United States Patent Application Publication US 2007/0067865 A1 - sequence listing, part 31

SEQ ID NO: 191962 - DNA, 459 bp, Gossypium hirsutum
  unsure (1)..(459): unsure at all n locations
nnnnnnnnnnnnnnnnnnnnnnnnnnnnnnnnnnnnnnnnnnnnnnnnnnnnnnnnnnnnnnnnnnnngaaatacttgatttgtttttttttaaaaatcataatccccgtaattggtccattgcctcatcttcataatctccatcattggcatctgcaacaccatcttcatattgctgatactccgaaaccagatcattcatgttacttttccccttccgtaaactccatttcatccattccttcccctgtttaccagtgcaaaaacccctttctacggaacataacgcggaattcttcccaaacactccttaacatctcttgaatctactttcaattccccattaattgtgataacttttttaacccttattattggatttcacaaacactttattttacattctatgaaatccactctactaatctcaataacttctttttcttaacatttatcatt

SEQ ID NO: 191963 - DNA, 466 bp, Gossypium hirsutum
aagcagctcagtagccgtaaaatctcaccttctgctagaatttctgggcaggcgactcatttgaaggccagcgatgaaatgatgatgagttttccggttcccagaaaagctcgctcagcttcagtgaaaaggtcacatgagaattgggtggctggaaatggtggtttcgtcgatgaacaaaaccatctgcgaggttcggtgtcaccggctcgtcggagcgttgagtctgaccgtgtttcaccgtcttcatcaaatggttcagtcaggaagaagatgaagacgaatcgacccaagactcggcttccaaaggcgaccaagtcttcgagctcagctcaagaggatattgagattgaaattgcagaggttctttacggattgatgaagcaatcgcatagctccaagaaggaagatagcgctggaaacccttcgtcaaagcttgaatctgaagatgcgaatgttttctcta

SEQ ID NO: 191964 - DNA, 640 bp, Gossypium hirsutum
  unsure (1)..(640): unsure at all n locations
ctcaaacttcttcataaatttcattaaactaagcaaagcccagattttatcttcactttctctttccaaaggatctgaaaaagaatgtcggcaaatggaactgacaactcaacttctaagaagcctccaagtccttctcctttgagattttccaagttttttcagtccaacatgagaattcttgttactggtggagctggattcattggctcccatttagtggataaattgatggagaatgaaaagaatgaggttattgtcgtcgacaactactttaccggcacaaaggacaatctcaagaaatggattggacatccgagattcgagcttattcgtcacgatgtcaccgagccgttgctcattgaggttgatcagatctaccatcttgcttgcccggcttcgccaatcttttacaaatacaatcctgttaagacaataaagacgaatgtgatcggtacattgaacatgttgggtctggcaaagcgtgtcggagccaaggattttacttacctcaacttcaaaagtttagggagatccctgggacatnccagaccgaactatgggaaatgtnaccctatggagtcgagctgctcagaggaaaccatgctgaaactgtgtcgatactagcgcatgcataaaa

SEQ ID NO: 191965 - DNA, 1296 bp, Gossypium hirsutum
atttttgtatatattagtccataatctctccatgtgagcaataggaaaattttccgtgttgtttggctttggtttctctgtaggagctgaggaaaaaaatgtcggcggatggaactgacaactcaacttctaagaagcctccaagtccttctcctttgagattttccaagttttttcagcccaacatgagaattcttgttactgggggagctggattcattggctcccatttagtggataaattgatggagaatgaaaagaatgaggttattgtcgtcgataactactttaccggcacaaaggacaatctcaagaaatggatcggacatccgagatttgagctcattcgtcatgatgtcactgagccgttgctcattgaggttgatcagatctaccatcttgcttgcccggcttcgccaatcttttacaaatacaatcctgttaagacaataaagacgaatgtgatcggtacattgaacatgttgggtctggcaaagcgtgtcggagcaaggattttacttacctcaacttcagaggtttatggagatcccttggaacatccccagaccgagagctattggggaaatgttaaccctatcggagttcgaagctgctacgatgagggaaaacgagtggctgaaactttgatgttcgattaccataggcagcatggcatagagattcgaattgctcggatcttcaacacttatggaccacgcatgaacattgatgatggtcgtgttgttagcaatttcatagctcaagcactccgcaatgagcctttgactgttcaattacctggaacacagacaaggagtttctgttatgtttccgacatggttgacggcttaatccgacttatggaaggagagaacaccggaccaatcaatatcgggaatccaggtgaattcaccatgctcgagcttgcagaatccgtgaaggagcttatcaatcctgaggtgaagatatcgatggtggaaaacactcctgatgatccccgacaaaggaagccggacataaccaaagcaaaagaggtgctcggatgggacccaaaggtgaagttgcgtgacgggctttcgcttatggaggaggattttcgtctgaggctcggggtcccaaagaagaactgattgaaagcttttttgcagcaacagaagttccatatatgacgggccttttttcttctatataaatccaattttatttcatcatataatgcgaatgagtatttgatttgtttatgttttgacatttgataatgacacatttgcttaaaaaaaaaagcgcgttaagtca

SEQ ID NO: 191966 - DNA, 392 bp, Gossypium hirsutum
  unsure (1)..(392): unsure at all n locations
gaatgatcttatcaatcctgaggtgaagatatcggtggtggaaaacactcccgatgatccccgacaaaggaagccggacataaccaaagcaaaagaggtgctcggatgggagccaaaggtgaagttgcgtgacgggcttccgcttatggaggaggatttccgtcagaggctcggggtcccaaagaagaactgattgaaagctattttgcagcaacagaagttacaaatataaagtgctattgcttcttttcctttctataatcaaattccaatatgcttatcttcaatgcataataatggcagcaatggagttattttggattttgtttttaatgttttttgaacgatatttgagttaaatggaacacaatttttgcctttccttnnnnaaa

SEQ ID NO: 191967 - DNA, 1145 bp, Gossypium hirsutum
  unsure (1)..(1145): unsure at all n locations
cccacgcgtccggaaaaccccagaacaggaaaggttggaaaggaggcgtcagatgccctaccatatgcacataaaccttgagcttctggaggctgtgcatttgatatgtgctatgcttcttgaggttcctaacatggcagccaactcacttgatgccaaacgcaaggtgataagtaagacattcaggcggttgcttgaggtgagtgagaggcagccatttataggtcccccggaaaatgtgcgagaccatgtaatggctgcaacccgggccctctgcaagggagatttccagaaggccttcgacatcattaattctcttgatgtttggaagctccttaggaatagagagagcgtgcttgaaatgctgaaagctaagatcaaggaagaggctctgaggacttacctttttacctactgttcttcctatgatacactaggcctggaccagctcaccagaatgtttgacctctcagatgcccagattcatagcatggttagcaggatgtgggtaaatgaacaactccatgccagctgggacccagccaacacgatgcatcatcttccatgatggtgagtactcaaaggttgcaggccttggcattccatttgacagaaaagctttcaatacttgctgagagtaatgagagggcagtcgaggctagaaccggtggtggtggattggatctgccactaaggcggcgagataaccangaatatgctgctgggacanctggcggcggcggcggtaggtggccanatttgtcctacggtcagggtaggcaaggtanttctggacgtgccgcgtatactggtggtggcagaccattggcattaggacaggcttcaagggatcggtcaagtcaatcacgaggaacaggcggatactctgggagagccggttcaggaatgagaggttaccagatggatgcttcagctcgcatggttagtctcagtcggggtgttcgcggttagttgtatttcttagcagtaatcttaacctaattttgtcaaagttatttacttggggttgaacttgattattggattttgtgttttgccatttatgcaatagctgttggactcaaaaaaaaaacaaaaaaaaaaaaaaaaagaactaaaaaaaattagatttttttacctaaaaa

SEQ ID NO: 191968 - DNA, 1844 bp, Gossypium hirsutum
gtgggtttagtaacaaataaagctctgaagcccatcaacaataaaatttctggttttatgcttttgtatcttgccagaggaaattaatggtggatttagctgaccagcagcacagttgatgtttttatagtttctaatacaagcaatcttcttctgaagatatatctcatatgactatcgttgtttcttatacatctcttgaataaagaaagggctactttttgttctgcaagaatggagaggtacaagttactcagggaagttggtgacgggacatttggttgtgtgtggagagctattaataagctgtctggtgaagttgttgcaattaagaaaatgaagaagaaatattgctcgtgggaagagtgtgtgaatctgagagaagttaagtctctgaggagaatgaatcatcccaatattgtgaagcttaaggaggtcatcagggaaaatgacgttctgtactttgtgtttgaatatatggaatgcaacctttaccagcttatgaaagacagggaaaagcttttttcagaagttgacattagaaattggtgcttccaagtctttcaaggtcttgcatacatgcaccagcgtggttattttcatcgtgacctaaagcctgagaatttgttggttactaaagatataatcaaaattgctgattttggtcttgcacgtgaaataagttcacgtccaccatacaccgagtatgtctcaacacgctggtatcgtgcccctgaagtacttcttcaatcatacctgtatacttcaaaagttgatatgtgggcgatgggtgcaatcatggctgagttgttcaccttacgtcctctttttcctggcacaagtgaagcagatgaaatctacaaaatttgcagtgtagtaggtactccaactaagtattcatggcctgatgggcttaatcttgcaagaactataaactaccaattcccacagttcgctggtgtgcatctgtctgtgttgataccatcagcaagtgatgatgcaatcaaccttattacatctctctgttcgtgggatccttgcaaaaggccatcggctgccgaggcccttcgacatcctttctttcagggctgtttttatgttcctccctctcttcgtcccaaagcagctgtgtctggaactcctccatctgctggggtgagaggaacatgggaacagcaatctcctaggaggttctctggggctctgcccaatgcaaagctcactggcaatcattctactctgttggcaaatgcatctttgggcacaggtgtgcagcgcaagctggagatggttaatcaggatcttaataagaatgataaatccttgaagagctttgccaaacaaccaaggtatcgaccaccaggaagaaagagtccatttgccacatccatcaacaaggataggaatgccattggagcttcagatgtagcggagaagttggcaaatgttacaattggaaatcggcggctgaatgttgggcaaataaggcactctgaatataaaggctggggttctgtggactgcggattctaacgacatgtttcttttgccaaccctactgatacttgatcaccggaaagaaggtagcgtggaatgatgagatggtctttttaataataatgcatttcctggggtattatatatcgatggagtccaaatatcggaatgagcatgtagtagctttggcttttatcaaatttatgtcttcgcgcgggtgtgttttccttaaccaataacgcataatatgatacattcgtgttgtgttctgttacacaataattgagagagtggctttttgtttctattgacctttgctttgataatgaagtgccagtttgtcaatg

SEQ ID NO: 191969 - DNA, 447 bp, Gossypium hirsutum
ggaaaataatgttctgtactttgtgtttgaatatatggaatgcaatctttaccagcttatgaaagacagagaaaagcatttttcagaagttgaaatcagaaattggtgcttccaagtctttcaaggtcttgcattcatgcaccagtgtggatattttcatcgtgacctaaacccagagaatttgtgggtttctagagacataatcaaaattgctgattttggtcttgcacgtgaaatcagttcacatcctccatacacagaatatgtctcaacacgctggtaagtttgatacttctgagaggttattttggtttccttttttttctggtctttttctattactactatctaaactttgacttgtttaggtatcgtgcgcctgaaatacttcttcaatcatacctgtatacttcaaaagttgatatgtgggcgatgggtgctataatg

SEQ ID NO: 191970 - DNA, 550 bp, Gossypium hirsutum
cggctcgtttaaaaaggcatggagcaaattggagaacaacgtgtattagaagcacaacttagaatgaggcagcaggaacttcaggatgaagaagaaagaatgcagaaaagacgagaatcgagtacttcaactggtgttgcaccaggagaagttcaaaacagttcggttgcagctcgttcatctggtgcggaggaagtagtttcttttcaagattcacaacctgccttgatgattaaacaaccttcaaatcctaggtcaaacagggatgagtttgacatagatcttgagggcataatggtcacggaagcaatttggcagtcaattcaggagaactgtggacacagaaattctagctgcagagatgctgcttctttagtccaacatgtttcaggatatcgttatatctctcctgctatgacaacagtggctggttcatcatcatctgcttttgctggtcatgtttgtgcggtagctggcctaactgagtggcagcagatgactggagaatcttctcccaattataatgtaaatttgccagcatttcatatgc

SEQ ID NO: 191971 - DNA, 613 bp, Gossypium hirsutum
cggacgcgtggggccaaaaccaaaatatgaagatactatgccttcacgggtttagaaccagtgggaagttcctgcagaagcaaatcagcaaatgggatccttctctttttcttcatcactttcaaatggattttcctgacgggttatttagtgccggaggaaagtcagacatagaaggcatattccctcctccatactttgaatggttccaattcaacaaggaattcacagagtacacaaaccttgaggaatgcatctctcacttgtgtcaatatatcacccacaatggcccttttcatggattgctcggcttttcccagggtgcaactcttggtgctcttctattgggctacaaggcacaggggaaggtgttaaaggagcatccacctttcaaaatgtttgtatcaatatcaggatcaaaattcagagagccaagcatatgcgaggtggcttacaaagacaaaatcgatgtgaaatcagttcacttcatcggagctaaggattggttaaagttgccttcggaggatttggctactgctttccatgatcctcttatcataaggcacccccaaggtcatactgtcccacgtttggatgaggtatccatagagca

SEQ ID NO: 191972 - DNA, 739 bp, Gossypium hirsutum
ttcaccacgcgtccgaagcaacccttgttttactcaaaaagatccctctccaacaatggcttctaatcccaaggtcttcttcgacatgaccgtcggtggccaaccagctggtcggattgtgatggagctctttgccgattgcactccccggactgctgagaacttccgtgctctctgcaccggcgagaaaggggtaggccgtagcggcaaacctctccactacaaaggctcatccttccaccgggtgatccccaatttcatgtgtcaaggaggcgactttaccgccggaaacggtaccggaggtgaatccatctatggagccaagttcgcggacgagaacttcatcaagaagcacacgggacctggcatcctttccatggcgaacgctggacccggaacaaacggatctcaattcttcatctgcacgaccaagacggagtggctggacggaaagcacgtggtgttcggacaggtagttgaaggcatggatgtggttaaagcgattgagaaggtggggtctagcggtgggaggacttccaagcctgttgttattgctgactgtggacagctttgaaaaagggcttattgaattgtgtttccttcataatatctggtctttttaggctccttttttttatgctatgctgcttctatggctactgggttttggtgttttttaagaagttgcttgatgtagctttttcattaactgccataaataagataggctttattttcc

SEQ ID NO: 191973 - DNA, 435 bp, Gossypium hirsutum
tctttgcttaatatatcttataaccgacctactggttggctggcttaaagtgtaaagggagaggaagaaattccgcatggtacagttgctgtgttgacccctgacatgccagatgttttgccacatgtttctgtccgagcaacaaattgcaaggtgcgctttgctacttgttgcgatcctaatagtctggctgacctacaagcggacttagggaaactgttgcgcctatgaccttcatctgcagatgtagttgatagtgaggtgaaggaaggcgagctagttgattcaagttcaagcaacttgaagggagatggtccatctgtcactttggtcagaaagcagtttgttggtaaatacgccatatcagcagaggagtttacacctgaaatggttggtgctaaatcacgcaacatctcatatctaaaaggaaaagtg

SEQ ID NO: 191974 - DNA, 1454 bp, Gossypium hirsutum
ttttctttatcattattgaaggaaaaaaaaaaaggaggaattagaaacctaaattgaagaaggaaaagatgttgggaattgtaaggcaaaagatgttggaacagtcattgaagaagattccacccgccgtgtcggtgttgagaagttactcatctgctgcaaaacagatgactataagagatgcattaaactctgctctcgatgaggagatgtcagctgattcgaaagtctttttgatgggtgaagaggtcggagaatatcagggtgcatacaagataaccaaggggcttctcgataagtacggacccgagagggttcttgatactccaattacggaggctggttttaccggagttgcggttggtgctgcttactatggtgtgaagcctgttgtggagttcatgacatttaacttctccatgcaggcgattgaccacattattaactctgccgcaaagtccaactacatgtctgctggccagatgtccgtacccattgtttttagaggtcctaacggtgctgctgccggtgtcggtgcccaacactctcagtgttatgcatcatggtatgcttcttgtcctggattgaaagttctgtccccatacagttctgaagatgctcgtggactgctcaaagctgctattagagatcctgacccggttgttttccttgaaaatgagttgttatatggtgaatcattccctgtttctgatgaagttcttgactccagcttttgtcttccaattgggaaagctaagatagagagaaaagggaaggatgtgactattacagctttttcaaaaatggtgggctatgctcttaaggcagctgagatacttgaaaaggagggaattgatgctgaggttataaatttgcgttctattaggccactggatagatcaacaattaacgcttctgtcaggaaaaccaacagattaataacagttgaagaagggtttccacagcatggtgttggtgctgaaatctgtgcatcagttgtggaggagagttttgcttatcttgatgcaccagttgagagaattgctggagctgatgttcccatgccatatgcagcaaatcttgagaggatggctgtgccacaggttgaagatattgtccgtgctgcaaagcgagcatgctacagagttgtaccattggctgctgctgcataattgaaccaatataggaactagaagaatacacgattgtttgccctctcaactgttttggggaggagccggttcatttaataactgagacattgttggaaaggctggaaatttggcgacttcatttgtcatgtgaacataacctattcaaccctgccgaagcccaagggctctgctactgtttttgaactcttgtgtttcaatattatgtttgttcagtcgaatgatttttaaatgcattgatttgatgtgtggtttgaaaaaaaaaaaaaaaaaaattctgcc

SEQ ID NO: 191975 - DNA, 517 bp, Gossypium hirsutum
cccacgcgtccgtcccttttcattttcagccatctccttgccgattcattcctaagaaaattttcaacgttatttcaaaaagcagagaaaagaacgttaaggaggaaagatgttgggaatagtaaggcaaaaaatgttagggcagtcattgctgaagattcgtcctgcaatatcggtgttacgaagctactcatcagcagcaaaacagatgacagtgagagaggcattgaactctgctcttgatgaggaaatgtcagctgatccgaaagtctttttaatgggtgaagaggttggagaatatcagggtgcatacaagatatccaaggggcttttggagaagtatggacctgagagggttcttgatactccaattactgaggctggttttgctgggaatggggttggtgcggcttactatggtctgaagcccgtagttgagtttatgacatttaacttctccatgcaagcgattgaccacattattaactctgctgcaaagtccaactacttgtctgct

SEQ ID NO: 191976 - DNA, 642 bp, Gossypium hirsutum
ggcttgccgatctagaagcgtagccggatgccctcgggctagttcgacacgaggctagaagttctagctcgtattgacactaatttcactggcacatccaaggcaactgatgacgaggagttcggggaattgtatactttcaaatggacaacccttctaattcctccaactactgtcttaatcatcaatttagtcggtgtcgttgccggcatctcagatgccataaacaatggataccaatcatggggacctctttttgggaagctcttcttctctttctgggtgattgtccatctctatccattccttaaaggtttaatggggagacaaaacaggacaccaaccattgttgttatatggtcagtgctattggcttcaatcttctccttgctttgggtccgaattgatccatttgtgatgaaaaccaaaggaccagacactacaatgtgtggcattaactgttgaaaaaaatcatcttgcgtggttcttttagattatggtatgtgatgtatgaacaaacaagaatggagatgcacaagacagaataaaattagagtgaaagttttgtgtagttatatattcattgtaccaactataagttttgtcattcaattgaaaatagctcaactttgtgatcccaac

SEQ ID NO: 191977 - DNA, 673 bp, Gossypium hirsutum
aatctatcttatcgtctaaaccaagtccttcgatgggcgctcggttctgttgaaattttctttagtcatcattgcccagcatggtatggtttcaagggagcaaagctaaggtggcttgagcgattcgcatatgtcaacaccaccatctaccccttcacatctttaccacttctcgcctattgtaccctaccggcaatctgtttacttaccgataaatttatcatgccaccgataagcacctttgcaagtctattcttcattgccttgtttctttcaatctttgcaactggtattctcgagctaaggtggagtggagtaagcattgaagaatggtggaggaatgagcaattttgggtcatcggtggcatttcggcacatttgttcgctgttatccaaggcttgttgaaagttctagctggtattgacactaatttcactgtcacatccaaggcaactgatgacgaggagttcggggaattgtatactttcaaatggacaacccttctaattcctcctactaccgtcttaatcatcaatttagtcggtgtcgttgcaggcatctcggatgccataaacaatggataccaatcatggggacctctttttgggaagctcttcttctctttctgggtgattgtccatctctatccattcctcaaaggtttaatgggga

SEQ ID NO: 191978 - DNA, 555 bp, Gossypium hirsutum
  unsure (1)..(555): unsure at all n locations
tctctcccttcccatcatccccccaggccccagctgcgttagcaccgtcaccttccgccgaaaacaagcaataatatctcttcattaatttagccatgcctcttaacttgatagcaacgaaaccagaacatggcatcagtagtggcccattggaggctctgtcagagacgcctgagccccacaacagtgctatgcttgcgtttccaatacaacgcaactcacaacctcctgtcagactcaccactttgtatcctataactatgaagtttgaagagatcgtgtacaaggtgaagttggagcagaaagggtcatgctggggtggatggatcacacgagaaaagaccatactcaatggcatctcaggtgttgtttatccaggagaaatactagcaatgttaggtccatcaggaaagtggtaaaaccacccttcttaactgctcttggaggccgnctcactggcaagctatcccggaagatcacatacaatggtcagccattttgtggtgccataaagcgaaaagcaggattcgtggctcaagatgaatgtttgaccct

SEQ ID NO: 191979 - DNA, 475 bp, Gossypium hirsutum
  unsure (1)..(475): unsure at all n locations
ctttcattcgacttcgacgagaacaaaaatggaaaaacctgtaacagaggacggaagctcttaacccgactcagaatccacccctacaaaagcaggacaagggtgaatactaaataatggacaagaaaccaagtaatccaatggagtggttgaatcagatggtaggagagccgtattatttcttccatttcctagctttcttctcttatttcatcgttcggagctctgcttctaatgtcctctcccctcaaatcactcaacttctcttttatagggaaattcaagcggttttggccttctttatgctgattgcatacaagatggcaagagaagatacatgggaggctttcattgctgatacaattgtttttgggaaagatctttcttaattgcccttactctaataatggactatcactnngacttgtggtattaagtgggtgtttcagtgatatatgtttaacacagcaacctc

SEQ ID NO: 191980 - DNA, 502 bp, Gossypium hirsutum
tcctttcgtccgcccacgcgtccgcccacgcgtccgcccacgcgtccgaaaaaaaaactgtctcagatctgaggtgccgttgctgatttgttcatcagcttgattgaatctgacgcctattatcgtcgccggcaccgatctgttgctttaaaaagaaatggagaatttaatttctcttgtgaacaagattcaaagagcttgcaccgctcttggtgaccatggagaagcaagtgcattgccgactctttgggactcattacctgcgattgccgtcgtcggcggtcagagttcagggaaatcttcggtgctcgaaagcattgtcggcaaagattttttaccccgtggatcaggaattgttacccggagacctctggtgttgcagcttcataagactgatgaaggaagcagagaatacgctgaatttcttcaccttccaagaaaaagatttaccgatttcgctgccgtcaggaaagagattcaagatgagacggatagagaaact

SEQ ID NO: 191981 - DNA, 441 bp, Gossypium hirsutum
ggaaggtatggttttattcaacagatctaattgtattgtgcttttctccacattctaatcaatgttctttttatgaaaaaaactaatcttgttattgagttctgattactgggttgttgatactgaagcggaatcaataaaaagatacaaatttcctctcttttaagcaattttgaaatctggttttcttcaaaaagagaaaaacaatatggttacagttaatatagggatgcttcattacattctagaccatgtatatggtgcatttgtgcatagaacaaagattagcccaccgttcttctcaagagggtggggtggaacaaagcttgagcttctggagagattgataagcccagtggttccctgaagttggaaggccaaaactgggcctccaagcttgattccacccatttggagaactgtttgggagacccaaaatgc

SEQ ID NO: 191982 - DNA, 1110 bp, Gossypium hirsutum
tgatcttgttgtcattcatggccatgaagagcctaggcctctgaagaacttggatggtcaagtttgtgagatttgtggtgatgaaattgggttgacggtcgatggagatcttttcgtggcctgcaacgagtgtggttttccagtttgtaggccttgttatgagtatgaaaggagagaagggagtcaacaatgtcctcaatgcaaaactagatacaagcgtctcaaagggagtcctagggtggagggagatgaagatgaagaggatgtggatgatatcgaacatgaattcaacattgatgatgaacaaaacaggtatagaaatatcgctgaatcgatgcttcatggaaagatgagctacgggagaggccctgaagacgatgaaggtttgcaaatcccacccggtttagctggtgttcgatctcggccggtgagcggggagtgcccaataggaagctctcttgcttatggggaacacatgtcaaataaacgagttcatccatatcctatgtctgaacctggaagtgccagatgggatgaaaagaaagagggaggatggagagaaaggatggatgattggaaaatgcagcaagggaatttgggtcctgaacctgatgatgcctatgatgctgacatggctatgcttgatgaagctaggcagccattgtcaaggaaagtgccaattgcatcgagcaaaatcaatccttatcgtatggtgattgtggctcgtctagttatccttgctttctttcttcgctatcggattttgaacccggtacatgatgcaattgggctttggctaacttccgtgatctgtgaaatctggtttgccttttcatggatccttgatcagttccctaaatggttccctattgaccgcgagacgtatctcgatcgcctttccctcaggtatgagagggaaggtgagcccaacatgcttgcttctgttgatatttttgtcagtacagtggatccattgaaggaacctcctctagtaacagcgaatacagttctatcgatcttggccatggactatccagtggataaaatctcttgttacatttctgacgatggtgcttccatgctcacctttgaatcattgtctcaaacagc

SEQ ID NO: 191983 - DNA, 538 bp, Gossypium hirsutum
ccccacgcgtccggcaaacctccaatcttttcagcgtcctatggcataagccaagctccattgccatggattggtactcttggttgtcaaaaactgcccttgagccctcactaatctatgactatggccttgccttctcccgtaatgagcttcaaaaagaggatttagcctacttcaatcatgagtttcttcagagcatgggcatatcagttgccaagcataggcttgagattctcaagcttgctaggaaggaagttggagaaacccctaatagcctgtccaagataattttggcaatcaacaaaaccagaaagagctttaacaagtatgttaacaagttggttcaccatgagaataactcgattaagctgctgccggagccgggtcgttatcgagatcagtggagaggaggattgacaaggaagtgcaacagtgagaaggaggtgaacattgagcatccagtgcggtgaaccaggaagttcgctaaatccggccgacactaatatcaagtatattagcagtgtgccgcgatttaatt

SEQ ID NO: 191984 - DNA, 1450 bp, Gossypium hirsutum
gcaaaccttaagtcgagatttagctgctgcggtttcgcagattcatgactttgtactgtccctaggagacgaagcgagggcagttgatgatatatctttcgatggcaatggattaagccataaaattggcgagttctccgtcacctacaataaggttctatgcagcaacgtaagtttggacgattttgttctcgatctttcttcggttttagtcaaagctagtgaattaagattcaatgtgcttggctacaagggtaatgaagttgaaataaatagtccggattgcataaacaaggttgctttaccggagaataaggtgacacaaaacggttcattgggaggaatatatcaaaatggatgtgcccacatttcaagtccgacttctaatcctgaggttcctgatgacggaaacttggtctcggactttgaatcaaaacaattgagcaaattctcgttggaagagttcgaggaactgaagttggagaaagaaagcttggcgatggatctttctcgatgtaccgaaaacctggagataaccaagtctaaattacacgaaaccgaattgcttctaacagaagctaaatctcaattggcttctgctcagaaatcaaacagcttggctgagacacagcttaagtgcatggcagagtcgtatagatcactcgaaacgcatgcagaggagttagcgactgagctgaacattttccgggtaaaaaccgaaacttttgaaaatgagcttcaagatgaaaagaaaggtcatcatgatgctttagctagatgtaaagaacttgaagagcatttgcaaagcaaggaaatctgctcggtttgttcttcagcagccaatgttgaccgcacgagcaagcaggagaaagaattagcagctgcggcagagaaattagcagaatgtcaagaaaccatattccttctcggcaagcaattaaaagctttccgccctcaaaccgaaacgaagggatcgccgtacaacgagaggataccaggtttccatgaggatgaaaccgttaccagcagcattaacttgcatgatctaaaccaggcagagatagaaacagctggttcggggaatgcaagcagatcgtgtgcagaatcacccatggagtcatcatttaacaccccatgcagcccttcagatactgaagcaaaccttttgagatcaccaatcaactcgaacaactcaaatcacaggtctaccatgtcaagctccgagtcttcctcgtctacaccgacaccggagaaacaatctcgaggctttagtagattcttttcctccaaagcgaagaacggacattaatccggcaagtcgataggtgcataatagtattttgttggactttgaatgtgaatttgtaagtaatgactgtatatggttttcgtgtgacatctatggttttaaagctggttaatatattttgaatattattttatgcgacct

SEQ ID NO: 191985 - DNA, 446 bp, Gossypium hirsutum
atcagggtggcttctcagaccaccatgaagggaattctgggttacgtagatgaagatttggtctcaaccgactttgtcggagacagcaggtcaagcatttttgatgctaaggccggaatcgcattgaatgacaactttactaagcttgttgcgtggtatgataatgagtggggttatagttctcgagtgatcgacttggttcgacacatggcttcttgctaagtgagtgaagttttagcttctaacttcagctttggcaagcaatttagaaactagaagagatattcctgtcttttgggtgttggtcatgcagataatagaaattgtatgcaacatttttttttcgtgtgaacactcttcttttgagtggattggaagggtttctattttgactcccttcatccattttatgacaataataattgcaagatcaactgaaaaaatat

SEQ ID NO: 191986 - DNA, 369 bp, Gossypium hirsutum
cttggaacgcctgcggcgaaacaccgcatgggttaccggggacgccacttgattcatgtatccgaaagatgtacgctcaattccagcgcttggatgtggatcctactggttcaacgctcgggatcatgaaagctaagcctgagcatgctacaagaggtcatgcacttgtcgagccagcgagtgatgccctgaccggtcaatggcttcagatacgcaagatgatagtatccacctatggatgaacgtgcgtggctctgtacaccatctcactttacttagctgatgccaagtacggtggcggtgccaacacggtgcatggcagccatggcattgcccagcttgctcatctcaaagttcgatcccgacttg

SEQ ID NO: 191987 - DNA, 580 bp, Gossypium hirsutum
  unsure (1)..(580): unsure at all n locations
ttttttttttttttttcatagtaaagaatcccttgttattctacttctttcacctttcagaatacaaaaccaaaaaaaaaaaaaccttttaccaattaaccctatagactagtatgaatgtgcactccaacaaccaaaaagaatgacaaaaacaatggtttctttgtccctccttacaaactaaaaacgacaactccccaacttcggaatacatatttacaaaaacacaacagtaaatatgaacattttcaggtaggaggtaagtcaaggggattacaaaaaatagtcgggggttctgcgtgtggtctcaggctcaatctgacgtggagctgggtcaaactgaagaaaactttgctccatattctctccaatctcaagtattgcagccatatttccacagcgatagcagtagtttggggcactgaacacggttaccacattcttttcctgggaccaattatatccttccataacaagctggtgagctctagaaatcagggtcagcccatttgtgtggttgaactgcccaaaaatatcctgcccaaaggtatacccagctcctcgaggagatattcnccac

SEQ ID NO: 191988 - DNA, 622 bp, Gossypium hirsutum
ctatgccacttgattgagtaaaactagaaatgcatgaccatgctcgaataagttcatatgagatatcatacttatttgtttttcatagtctactcaggacatcaaaaaacattagatgggctatgcaagtgtgactattccatgacttgtgtccattctagatataaagaacaaaaggatttataatacatgaaaggttaatcacaaagaggttatgtcgaatcatgacttcttgtaacttaggtagaaatgatgcattgctagatgtcactcatagtttgtaatattagaatcgttctagtattactgctaacattataagaacctacaaggtcacaccctatggttgaaacgaactaaatccaaatatagttggtattgagtttagttatctcatgaattaaattgattatagaattaattcaattgggcagttaaatatcacagaaattatatgtgtaagtatgttgtacacataccataaaatatggttaaattaatatacgaatttgattcatataaaatttaactaaaaataatttaccaaaattcttgttataattattggaattataatttaggatcaaatataatataattactataattgaattcttttggc

SEQ ID NO: 191989 - DNA, 1420 bp, Gossypium hirsutum
ctgaaataccctccttctgtcccatcgacgcgtgggtgacaagcttactcatgtctacactgccatcttgaagcctgacaacgaggtcagcattctgattgatggtgaggagaagaagaaggctagcttcctctcagcatgatgattttgagccaccacttatccctgctaagacgattcctgatccagacgataagaaacctgaggactgggatgagagagccaaaattcccgacccaaatgctgtaaagccggatgattgggatgaggatgctcccatggaaattgaagatgaggaggctgtgaaaccagaaggatggttagatgatgagcctgaggagatagatgatcctgaggcaaccaagccagaagattgggatgatgaagaggacggtgagtgggaagcccccaaaattgataacccgaagtgtgagacagcccctggttgtggtgaatggaagaggccaatgaagatgaatccagcttacaagggaaaatggtctgctccactaattgataaccccaattacaagggtatttggaagcctcaagagattccaaaccccgactacgttgagcttgataagcctgactttgagcctattgctgctgttggtattgagatttggacaatgcaagatggcatattgtttgacaatattttgattgccaaaaatgacaaggttgctgagtcatatagggagaccacatggaagcctaagtttgaggttgagaaagaaaaacagaaggctgaggatgagtccactgattcagatggactttcaggcgtccagaagaaggtctttgatgtcctttacaaggttgctgatattcctttcttaagtgaatacaagcttcaaatccttgatctcattgagaaggctgagaaacagccaaacatcaccattggtgtcatcgtctccattttggtgattatgctcacagttctcttcagacttcttttcggtggcaagaagcaaccaaaagtagagaagaaaccggaggttgctgagacatcaaacaatcaatcaaccagtggagaaaaggctgaagaagaagaagaagaagaagagaaagaaggaaccgctgctgctcctcgcagaaggaggcgtgacacttaaaacagaggtgaatggtgataatctgtttttagtatgggaaaatttttgggctttagaagtggtcttcatagctgaaacattcatggtacctggtgatttttgtttttttttagttttacttgatgaaacattattagattgtattaattgaagagtgtaaacagagacaatttttcatgtcatgtgcctcaaaagcaaaaaccaagtagagggagttgaagtttatggtatgatggtgttgaagcccccaaccttaatggatatgctggaacttgtagaattttgttataactagtcag

SEQ ID NO: 191990 - DNA, 776 bp, Gossypium hirsutum
gattccaaaccccaactactttgagcttgaaaagcccgactttgatcctattgctgccattggtattgagatttggacaatgcaagatggtagattatttgacaatattttgatagccaaaaacgacaaggttgccgagtcatatcgggagaccacgtggaagccaaagtttgaggttgagaaggaaaaacagggggctgaggatgaagctgccgattctgccaggcttgcaggctttcagaggaaggtttttgatgtcttatacaaggttgctgacattcctttcttaagcaaatacaagcatcaaattctcgatcttattgagcatgctgagacacagccgaacctcaccattggtgtcttggtctctattgtggtgattattctcacgattttcttcaagctcatttttggtgggaagaaacaaccaatagtagagaagaaaccagaggttgctgaaacatcaaatggtgaaggaagcagtggagaaaaggctgaagaggcggagaaggaagaagctgctgccgctcctcgccgaaggcgccgtgacaattgagcaaatcttaaaacaaaggtggctggtggcgactagcagtttgagttttggctaatttttgcactgtagggggttttcgtagctgagatattatttgcctttggcattttttagttttactttttaatatgattagattgtatggtttgaaggatgtaaacgagacaaatttctgcatcaaagcaaaaaccaagtagaaaggaatttgaagcttgcttgt

SEQ ID NO: 191991 - DNA, 758 bp, Gossypium hirsutum
tttttcgcgtccgcccacgcgtccgcccacgcgtggggctcacttaaaggcaatggaagtggccaaagaatcaggtgctttgttgtcatatgatccaaaccttcggctgccactttggccttcagccgatgaggccaggaaacagatattatccatctgggataaggccgatattatcaaggtcagcgatgttgagctagagttcctcaccggtagcaacaaaatcgacgatgaaactgctatgaaactttggcgccccaacttgacactactcttgatcaccctcggtgaaaagggtagcatgtattataccaagtacttccatgggtcagtggatgcattccatgtgaatacagtggatacaactggcgccggggactcttttgttggtgctttactatgcaagatcgtggaagacccaaccatacttgagaatgaatcgaaattgagggaggtactgaaattcgcaaatgcatgtggagccataaccacaaccaagaagggagcaatcccagcccttccaaccgaggctgaagtccttgccttaatcaatggagcttaggattattagcagcaaacttcaataatctatgctcatctttttctttttttaatttcttacatttcagagaaagggtgttgaaaggtatcgattttttcttcccctcttttgatttcctttttccctcgtttttcctccatccctccccgtgtagtgttgttaggctttgtgctttcaaggggagtaggaataaaaa

SEQ ID NO: 191992 - DNA, 607 bp, Gossypium hirsutum
gaaacatggtgcaaaaactagaagctatcaagggcggtggaggatcaattaaggtgggactggggagtaagggaacaatcagttcccttatgacacgggaactggactccgttaaaccggtacctaaaacaccggtgtctttcagacacaaatctcagacaattcctacatcagttgcctgtggttctcctaaaagattacagctagggagatctttggatggagcaagcaccagtggcaatgacaacaattacataagttacaaacaccaccaaacttcccagaagacaaaaagcttgtccaaaagcacccaccagattccaatgcttggttttgagaatatagctttagatagaactcctagcagacagaaaagtgacaaaaaagtatctaacattgttgaagttgtggacataaagtgtgggaaatatcctgatagagcatggtcaaaccctgtaacaaatcgactcaagaagcttgggttctctaaactttcccaaagcatttctagacctgcaacttgttcacatcagacttcaggttcctataactgagacctgaaatcccaagtgacctgttgtctgaaatttccaccatagaacatatg

SEQ ID NO: 191993 - DNA, 1007 bp, Gossypium hirsutum
ctatcgaaagaggtggctaaaagtatggctgaagatgctggtttgccttcatcccccgttgggcctcaatcgtcagcagcacctaatggattttctggcagcaagattgatgaagttcttaaagaaagttctttaggcagtcaagaaaaacccgaagtttctgctgccccaaaagcttcccataccgttgttaccagcgctgtcaagaagcctcttggtgcccgaaaggttaccgggaagaccggggggcttggtgccagaaagcttactaataggccaagtgaaaatctctacgaacagaagcctgaagaaccagttgtcccagttgcttcctctactaatgacattgcacccactggctcatcttttccatctcgttctcgttttgagtatgtggaaaatgttcaatctactgagttgaatcatggtggcccacaagtgcttaatcatgttgctccaccaaagtcatcaagcttctttgcggaatttggaatggacagtggttttcagaagaaatcaagctcaaattcctcaaaagtgcagattcaggaaactgatgaagctaggaaaaaattctcaaatgctaaatctatttcatcagcccaattttttggtgaccaaaccagagcagctgacaatgaagctcaagttactttgcagaaattctcaagctcaacagccatctccagctctgatctatttggtcaaggtgcagataatgctcttgaccttactgctagtgacctcatcaaccgactctctttccaggcacagcaggatatctcgagccttaagaacatagcaggagagaccggaaagaagctgagctcctttgcgtccacttttatgagcgatttccaggacagaatcctgtaatggagtgttctggccttgaaaaactatatatatgatatatatctgagtttgttatgttagatcaccggccaatatcttttggtagtgaaatgtagtagacccattttataataacaattctttcacgggac

SEQ ID NO: 191994 - DNA, 425 bp, Gossypium hirsutum
cataattcgaatcatgcgcgacggataccatcaacgcactcccagctacggtcacagctacccagcagctcagccttacactgccggtacatacacagctggagcaccgtcgacacctcaaccgtacggtactgcatacgccgctggaccatacggctcaccggctgctgcctactctgcccgatacgagcgagaaaccaccccaggacaagcgccaagcgcatggcgtcggtggcgctcctgcagatcacagccgaagctatgctgccacaggacgctatgcgggcccgttcgcatctctgacgccgtcggcattgtcaccggggacagatcctaacgtccctccctgctttcaaatggcctgaccaagatgcaagtggcctaattgatgataaagagttgaaaagggcgctgttgccgaataa

SEQ ID NO: 191995 - DNA, 724 bp, Gossypium hirsutum
acgctttcccactatctgaactgaaaccgtgtgggaaaagcctgagagaggagaaaaaaatcaaaaggcaaaagcaactgaaatgagcggagcctctacggcggcgtatttagctcgaagagcggcgcaaaaggagagggttcggatcctctaccgccgtgccctgaaagacacactcaactgggccgtccatcgccacctcttctatcaagatgcttctgaccttcgcgagaaattcgaagccaacaagcatgtggaagatcttgatacaatcgacaaaatgatagatgcaggtgaagcaacttataataagtggcggcatcccgatccttatatcgttccttgggctcctggtggttccaagtttactcgaaaccctgtcccaccttctgggatcgagatcgtgtatgattatggtcgagaagaaaatgactaagacatccatcttttcaacttccccagaaataaagttgatgcaggtctaaaggatcgttgagtgtgtaacgagtggtctaggacagcaactaatttgcattacctcaattgaaacgagataaggcttttaataacatttatggtgattctccattgtgcttattgttgtgtgcctggtgttttgtataataaaagatcattggtctgattgaaggtacaaaatgcttgcttacatggcatggaactacaacgatcttgaatctttcttgtcataaactatatttctctt

SEQ ID NO: 191996 - DNA, 1301 bp, Gossypium hirsutum
agattctgaagccacttagagagccaggaaattcgtatgctaagatatgttttagcaacagaagttttggcttggatgcagcaaatgttgctgcacccctcttgtcatccgttaagcaacaattaactgaggtagacctttcagattttattgctggaaggccagagtctgaagcacttgaagtcatgaatcttttttcttctgtcctggaaggttgtcagttaaggtacctgaacctttcaaacaatgccttgggtgaaaagggtgttcgggcatttggggctctcctgaagtcacagaataatttggaggagctttatttgattaatgatggtatttcagaagaagctgcacaagcagtttctgagctaattccttctaccgaaaagctgaaagttcttcagtttcacaataacatgacaggggatgaaggtgcaattgctatctctgatattgtgaaacgttctcatgcattggaggatttccggtgttcatctacaagagttggcacagatggtggtgtggctctagctgaagcactgaagacatgtacccgcttaaagaaacttgatctgcgtgacaacatgtttggcgtgggagctggagttgctttgagcaaagctctctctctgtttgcaggtcccgctgaggtttacctcagttacttgaacctagaggatgacggggcggaagcacttgccaatgctctgaaagagtctgcaccttcacttgaagttctggacatggctggaaatgacattacagccaaaggtgcagcttctttagcagcctgcattgcatcaaaacaattcctctcaaaattaaacttggctgagaatgaactcaaggatgaaggtgctattttgattggtaagtcattaggggagggtcatggtcagttgaatccggttgatatgagcacaaatgctattaggagagctggggcaaggcttttggcccaggtggttgtgaaaatacctggatttaagttgctgaatatcaatggaaatttcatatctgatgaagggatagatgagattaaagaattgtttaaaagttcccctgacatgcttggttctttggaggacaatgatccagaaggagaagattatgaggatgaagacgaagatgaggagaatgcagaagaagggaatgaattggagtccaagcttaaggatctcaagatcgagcaaggagagtagtcatatgctatgcatcccagctgcttttgcggcatctgaaaagcctgtctattttctattttgatttattataaggtactatagctgtgcaacattagt

SEQ ID NO: 191997 - DNA, 1266 bp, Gossypium hirsutum
ccgttccatcctgctctttgtgtattatggtcggtgatggagttcagatccttggtatgggagttgtgactatattgtttgccgctcttggattcatgtctccggcatcccgtgggactctcattacaggtatgctattcttctacatgattctcggaattgcagctggctatgttgcagttcggctttggaggactatcggctgcggtgatcacaagggatgggcttcggttgcatggaaagccgcttgctttttccccggtatcgccttttttaattctcaccattttgaatttcctgttgtggggaagtcacagcactggagctatcccattttcgctctttgtcattctactcctactatggttctgcatctcggttccactcaccttagtcggaggatacttcggagccaaggcacctcacattgaataccctgtccgaaccaaccagatccctcgagaaatcccagctcaaaaatacccatcatggctgttagttcttggtgctgggactctacctttcggtaccctttttatcgagcttttcttcatcatgtcaagcatatggatgggacgcgtgtactacgtcttcggctttcttctcatcgttatggtcctcctcgttgtggtttgtgccgaagtatcattggtgttaacttacatgcatctctgcgtagaagactggaaatggtggtggaaatccttcttcgcttctggttcagtcgccatctacatcttcttatactccgtaaactacctcatattcgatctcaagagtttgagtggaccggtctctgcaactctctacttggggtattctctcttcatggtcctcgcaatcatgttggccactggcacgatcgggttcctttcatctttctggttcgtgcattacttgttctcttccgtaaagctggattgaagaggtaaatcggtaacccgagaggcaggggaggaaagaattggaccttttacattacttgatcatatattacaggtgttatattgagctcatttactctgttaggggaactttagtaaaatgcaataacaataatatggcgcagtttcatttaaattctttagtagttgttactatcatgcatggtactgctggtttttacgttgtgtttgtaacatttcttggagctactttataccatttacttggggatttgtaatataatctatgcacagttcacatttttatttgctctaactttgtttaagtgtgttggtccaattacagtttttggtccttttt

SEQ ID NO: 191998 - DNA, 612 bp, Gossypium hirsutum
gaccacgcgtccgctctacttcaatccccaccaggtaaggactaactcaagagggagtgaaaatggttgagaaaacaagaggaagaaaggaagaggtggtgaccagggagtacaccatcaaccttcacaagcgcctccatggctgcacattcaagaagaaggctcccaaggctatcaaggagatcaggaagtttgcagaaaaagcaatggggacaaaggatgtgagagttgatgtcaagctgaacaaacacatctggagccgagggatccgaagtgttcctagaaggattagggtccgcattgctcgcaagagaaatgatgatgaagatgcgaaggaagagctctactctctagtaactgttgctgaaatcccagctgaaggattgaagggtttgggcactaaggtcattgatgatgatgatgagtaatttattgatgtttagttctatgaaaaacttgcatttgttcaccaagaaatttacccagagttttggctagtgttacatttgtgacctgtgaaacatcattctactcatatatttggtttattgttgtcaagaacttttaaacctggttcctggggcaatggaggtttccagcagattttagaat

SEQ ID NO: 191999 - DNA, 701 bp, Gossypium hirsutum
ctttggtgttgtagctttctgctttgctcttttttggggggtttcaaaaatggttgagggggcatggggaagaaaggaagaggttgtttccagagaatacaccatcaaccttcacaagcgtctccatggctgcacattcaagaagaaagctcccaaggcattaaaagagatcaggagatttgcagaaaaagccatgggaaccaaggatgtgagagttgatgttaaactgaacaagcacatatggagccgagggatccgaagtgtccccagacggattagggttcgcattgctcggaagagaaacgatgatgaagatgcaaaggaggagctttactctctggtatcggttgccgaaatcccagccgaaggactcaaaggtttgggcactaaggtcatcgatgatgatgatgagtaatctccgatctctagtttaagaaaagcattgcattttgtttactgaaaagtttaaacccaggttttggctagttttacgattttgttcatcaactgtttttcctttggtactcgcgtttatcgttgtttagacttttaagctcggtgcaatttatgtttcaatggcggaatcaggttctttttgcaattgagtttcccatacattatgaagcattactttattatattcatgtcatgaataagccgattatgcacgaacttgctgagttttatcaatgacttggaca

SEQ ID NO: 192000 - DNA, 515 bp, Gossypium hirsutum
  unsure (1)..(515): unsure at all n locations
gcggggnaagtcattatggtttnccttcaaaacaccatcaaagtaaggattaacgccagaaagatttcaaaaaggttgagaaaacaaggggaagaaaggaagaggatggtgaccagagaatacaccatcaaccttcacaagagactccatggctgcacattcaagaagaaggctcccaaggctataaaggagatcaggaaatttgccgaaaaagccatggggacaaaggatgtacgagtcgacgtgaagctgaacaagcacatatggagccgagggatccgaagtgtcccaagaaggattagggttcgtattgctcggaggagaaacgatgacgaagatgcaaaggaagagctctactctttggtaactgttgctgaaatcccagctgaaggactgaaaggcttgggcaccaaagtcattgacgatgatgatgagtaatttattggttttcttttagtttatgaaaacttttaaaattttgtttgagaccgacaactttatcattagaatttttt

SEQ ID NO: 192001 - DNA, 738 bp, Gossypium hirsutum
aagagaaaacatgggttggatcggagacaccgtagactccatcaaatcaatccagatccgccagctcctcacccaggtcgtcagccttggtatgattgttacgtctgccctcataatatggaagggattgatgtgtgtcactggcagtgagtctcctgttgtcgttgttctttctggaagtatggaacctggcttcaagaggggggatattttgttcttgcacatgagtaaagatcctattcgtgcaggggagattgttgtttttaatgttgatggccgtgaaatcccaattgtccatcgtgtaattaaggtccatgaaaggcaagatactggagaagttgatgtcctcaccaaaggagacaacaattatggggatgacaggcttttatatgctcaaggtcagcaatggcttcatcgggcaccatatcatgggcagagctgttgggttcttgccgtatgttggttgggtcactataatcatgactgaaaagccaattatcaagtatattcttattggagcattggggttgttggttataacttccaaagattgacagacagttgatgccaatccaatgtgcagccaaatccgaaggagatccatctaaagaattgtcaattgcttcttctatcctctcctttgtattggtcattcctaacttttgtatacttagaaagcgccaccgttttattattttaggcagttaaaaaaaaagatagttaagcagggtcaaaaac

SEQ ID NO: 192002 - DNA, 686 bp, Gossypium hirsutum
tttacgcgtccgcccacgcgtccgctcaatctctctgggaaccctcgccgcatttggaacctcgcagccaacatggggaagacacgtggtatgggagctggacgcaagctgaggacccaccggaggaggcaacggtgggccgataaggcatacaaaaaatccaaccttggaaatgaatggaagaagccatttgctggttcttcccatgccaaaggcattgtccttgaaaagataggtattgaagctaagcagccgaactctgctattcggaagtgtgctagagttcaattgatcaagaatgggaagaagattgcggcattcgttccaaatgatggttgcttaaactacattgaagagaatgatgaggtgttgattgccggatttggacgaaagggtcatgctgtgggtgatattcctggtgttagattcaaggttgtgaaggtgtctggtgtttcactcttggcactcttcaaagagaaaaaagagaagcctagatcttaagtttgcaatgaggaaaagatggctttcatgatctttctatagtttttcttaaaactgagagcgttctgttgcctggtagcttttctggacttttgtttattttctggctattattgtattgaatttttggtgtcatcgtttgatcaaaaagattttggtgctttaaaaaaaagtcgacgcggccg

SEQ ID NO: 192003 - DNA, 672 bp, Gossypium hirsutum
cccacgcgtccgcccacgcgtccgcccagcggctgtggtttcttctggctttcgattcaaatcccttttggaactgtccttcaattgaaaacaagcagccaacatggggaagacacgaggtatgggagctggacgtaagctgaggacccaccgaaggaggcaaaggtgggccgataagtcatacaaaaaatccaaccttggtaatgaatggaagaagccatttgctggttcttcccatgccaaaggcattgtccttgaaaagataggtattgaagctaagcaacctaactctgctatcagaaagtgtgctcgagttcaattgatcaagaatggaaaaaagattgccgcattcgttccaaacgacggttgtttaaactacatcgaagaaaatgatgaggtgttgattgccggatttggacgaaagggtcatgccgtcggtgatattcctggtgttaggttcaaggttgtgaaggtctcgggtgtttcactgttggcacttttcaaagagaagaaagagaagcctagatcataaattttgagcgaggggtctcatcgtgttctgttagttctatttagaacaaactatagagatttttattgctatgtagctatttggtcaacctggtcactttatcttaattaatattttgcgcttttgtactgtttaataaa

SEQ ID NO: 192004 - DNA, 578 bp, Gossypium hirsutum
  unsure (1)..(578): unsure at all n locations
cccacttttccgccaaatctctcaaaaccttcattccatcccactcaccccgaacaacctctctccaccaacatggggaaaacacgtggtatgggagcggggcgcaagctgaggacccaccgcaggaggcagaggtgggctgataaggcatacaagaagtctaaccttggaaatgaatggaagaagccatttgccggttcttcccatgctaaaggaattgtccttgagaagataggtatcgaggctaagcagccgaactctgccatccgaaagtgtgctagagttcaattgatcaaaaacggcaagaagattgctgcttttgttccaaatgatggttgcttaaactacattgaagagaatgatgaggtgttgattgctggatttggacgaaagggtcatgccgtcggtgatattcccggtgttagattcaaggttgtgaaggtgtctggtgtttcattattggcacttttcaaagagaagaaggagaagcctagatcctaagtttgcaacaatgaggatatctnttatgatgttttcatagttntttttgggatcgaatntaaagcaatgtgtttctc

SEQ ID NO: 192005 - DNA, 557 bp, Gossypium hirsutum
  unsure (1)..(557): unsure at all n locations
aattngcacgagcttaaattcgtcaacttttctgtagattttaagcaaagacccatttttcgtcttcatctctcggttttcgcccttcttgtttcagtattgggactaatggcggttggtcgtagggacaaaacggcatcgtttcgtggatcccgaatcgtcgtagccattgtgatcggcgttctcctcggctgtgtcatcgctttccttttcccttacggcctcttcaatcccgctgcctcagttcaaaatcgtcgaatcgggaaaacgaatttccagattggttcttcgtcatgtgaatcctcggagcggagtaagatgctgaagtctgaaatcgtatccctatcagagaagaactccgaattaaagatgcaagtcagggatttgacggaaaggctgcaactggccgaacaaggaaaagatcaagctcagaagcagtttttggtgttgggtgagcagcataaagctggacctttcggtactgtcaaagctttacgaactaacccaactgttgttcccgacgattccgtgaacccaaggttggctaagatcttgga

SEQ ID NO: 192006 - DNA, 372 bp, Gossypium hirsutum
ccagcatccttgtactccccttgtttcaattcccagaatccagcctccagcgccatgtggagtgagatagagagtgtttgggtgtttccccttgcatccaaatggcgaaccttttctcaagaaagctttgcatggtcgattttcatcattcttcttgcctggctaatcatgacccttgtctactgggcttaccccggtggcccagcctggggcaaatacaggttcgtgaaccgttcctctcttactgctgctaacaagaggagaattccagggcctagaggtttgcctctaataggcagcatgaagctgatggccaactccttggctcaccaccggattgcggccgcagcagaagcatgcaaagccaagagg

SEQ ID NO: 192007 - DNA, 842 bp, Gossypium hirsutum
aaatttgggaagctctctctcttgttgtaagctaaaaaaagaggctccattttcgattcctttttctcttaattttctttagagaaagagagagatggcttcctttgatgcgtacggaatggaaggagaagaggttcatgcaggtgcagcacctaataaccatcctttcgatgtagacgacgacgagagctattccaattacggctcttactctaacttcaccgacaatcagcaattcccggccgacggtggtgatgtggcggtggatcacttggcttcttctcctgagatcttcggcttcggatcttccgatccgtcccctgcttactcgcaatctcctttcggtactacgattcctgtggaaaacggaaacggaacgaatggatttagcggtggaaacgacgatgttttcagttctgatggtcctgtgcttcctcctcctactgagatggcgccagaggaaggcttccttcttcgcgagtggcggcgtcaaaatgccattcagcttgaagagaaggagaagaaggaaaaggaattgaggaaccaaattatagaaaaagctgaggagtacaagcgagcattctacgagaagcgggaaaaaaccattgagaccaacaaaactaacaacagagaaagagaaaagctatacgtggctaaccaagaaaagttccataagactgctgacacgcactactggactgcaatagcagaactcatcccccgtgaggtccctaacattgagaaaagaggcaagaaggatgcagaaaagaaaccatcagtatttgtcgtccaaggaccgaaacctggaaaaccgaccgatctttcaagaatgccacacattc

SEQ ID NO: 192008 - DNA, 684 bp, Gossypium hirsutum
cccacgcgtccgcccacgcgtccgcccactcgtccgcccacgcgtccgcccacgcgtccgcgcacgcgtccgcagattaatattttcaattagaatgatttatggttggcttggttggaccgaaaaaatgaagcatccaggctccgtttagaataaaacccaattggtaatacatttgggagtaccacctatatcataatcataaatcttttttatttacaaattcgaaatagaaataagaacgatttcaaactattaatcaatcgaataatatgagaaatacgttgaatatttggcggaaaacatgaaagaaaaaggaattaaaataaaaaaggaaatgaaatcatagcaaaaagatgtggtattgggtcatttgtcctatatgcgcaaatcaaaatcgggcggatctttactcggagtagagcataaacctaaaaaaattgaataaaaaattgatgaaacccattcaggaacaagaaaatgacatcgtgatttggattgaatcccaatgaaaaaaaaatagatcaatgaaaagtttgtgcgataagtttagcgaatttttctatattatagattataggaaaacgggccaaaacttatctttctttaatttcattttatttaaaaaatgtaagataaagccccttcgttagaaattagaattagaaaagcacactataaaaa

SEQ ID NO: 192009 - DNA, 1059 bp, Gossypium hirsutum
cggccgcgtcgacatcaactcagaacagctcaaaaaagcttccaacattttgaagaaacaaagaatcaaacatgtcgaaggaagtgagtgaagaagggatgagccgaaaggactatgtggatcctccaccggcaccgctcatcgacgtggctgagatcaagctttggtctttttacagagctctcatcgccgaattcatcgctactctcctcttcctatacgtcaccatagccaccgtcatcggccacaagaaacaacacgatgcatgcgatggtgttggtcttttgggtattgcttgggcttttggtggcatgattttcattcttgtttactgcaccgccggtatctcaggtggtcacattaacccggcggtgacatttgggttgtttttggctaggaaggtgtcgttaataagggcggtggcttacatggtagctcaatgtttgggtgctatttgtggtgttgggttagttaaggcattcatgaaaagtgaatacaactcccttggcggcggtgttaacacggtggcgactggttataacaaagggactgctttgggagctgagattattgggacattcgtgcttgtttacactgttttttcagctactgaccctaaaagaagtgcccgtgattcacatgtacccgtgttggctccacttcctataggatttgcagtgttcatggttcatttggctactattcctatcaccggaactggtattaaccctgctagaagcttcggcgccgccgttatttacaacaacgacaaggcttgggatgaccactggatattctgggttggaccaatggtgggagcacttgcggcggcggcatatcaccagtacatccttagagcggcggctattaaggctttgggatctttccggagcaaccccagcaattaaaagctaaaaagagaagaaaaccacaatatgtttgtctcattgtgtttataatgtttcttcattgttggttcctgtgtttgtattgtattatgattgatgattattaattcagacctttttatttattattctttatttttaaaaaaaaaaa

SEQ ID NO: 192010 - DNA, 797 bp, Gossypium hirsutum
atcatccgccacttccttcgctaccattctctcttttccttgtatctgggtgtcgtgcagataaaggatgagtacactggatgcaactagagcagaacttgctcttgtagttttgtatttgaataaggctgaagcaagggataagatatgcagggctatacaatatggctcgaaattcttaagtgatgggcagcctggcacagcacaaaatgttgacaaatcaaccagcttggctcggaaagttttccgtctttttaagtttgtgaacgatttgcatggtcttattagcccagttcctcaaggaactccccttccacttgttctgctaggaaagtcaaagaatgcactgttgtcaactttcttatttctcgatcaaattgtgtggcttggcagaacaggcatctataagaacaaagaacgtgctgagttgattggacgaatatcccttttctgttggatgggatcatcaatatgtaccacattggttgagcttggggagcttggaaggctatctgcatcaatgaaaaagttggaaaagagacttaaggatagtgacaagtacaagaatgaggagtatcgtgcgaagctccaaaattcaaatgagaggactttggcccttgttaaagccggaatggatatagtagtagcagttgggcttcttcaattggcaccaaagaaagtcacccctcgagtaacgggagcctttggatttgtttcatctctcatctcctgttatcagttacttccgtcaccgcccaagtctaagacaccttgaagttggaagcctgttttgccca

SEQ ID NO: 192011 - DNA, 619 bp, Gossypium hirsutum
ggcttattttttttcctctttcgaaaagattggaccaaacaagcctttatcagaagattagagaatcgaaaaacgacacattgagctgacgctggagagggcgtgacacccagagaccctaatctgcttgcttgccttaaaaaaaacgaatttttaattaaaaaaggagaaaagtttgtggatttcgaggtgttgtgcagataaaggatgagtacactggatgcaactagagcagaacttgctcttgtagttttgtatttgaataaggctgaagcaagggataagatatgcagggctatacaatatggctcgaaattcctaagtgatgggcagcctggcacagcacaaaatgttgacaaatcaaccagcttggcacggaaagttttccgcctttttaagtttgtgaacgatttgcatggtcttattagcccagttcctcaaggtactccccttccacttgttctgctacgaaagtcaaagaatgcactgctgtcaactttcttatttctcgatcaaattgtgtggcttggcagaacaggcatctataagaacaaagaacgtgctgagttgattggacgaatatcccttttctgttggatgggatcatcaatatgtaccc

SEQ ID NO: 192012 - DNA, 517 bp, Gossypium hirsutum
aagcagtttcctcttatcaaagcccgtgatgctacagacgacatgctgtcttgggggctcaagagaaaggttgatggttccattactatgatcgataatgtgaactgtatgactgacgaaccttcgcaagatggtaatgaatatgtgaatgacgtcataatatatttggaaactttggtttctaccgcacaacagatattgcctccgcaagtgcttaaaagagttttacaagatgtactttctcacatatcagacaagaccctcggggctttatttggagactcggtgaacaggtttaatgtaaatgctattatggggattgatgtcgatattcggttgttagaatctcttgcggataacctatcacctgtgttttctgaaggcgattcacttcaattgaaaaatgcacttgcagagtcaaggcagttggtcaatttgcttttgagcaatcatccagagaattttctgaacccagtaattagagagaagagttacaatgccctggactacaggaaag

SEQ ID NO: 192013 - DNA, 469 bp, Gossypium hirsutum
attccgatcaaatcacgatcccaccggcgccgactattagagttaaagtcaaatacggctctatttaccatcaaatcaacatcaattctcaagctacattcggggaattaaagaaaatgttaacgggaccaacgggattacaccataaagatcaaaagctaatatacaaagataaagagagggattcgaatgtgtttttggatatggtgggtgttaaagataaatcgaaaatggttttaagtggaagacccaattagtcaagaaaagagattaatggagatgaggaaaaatgctaaaatggagaaagcttctaaatccatatctgaaattagctttgaagttgataggcttgctggccaggtttcagcatatgaatcgattatttcaaaaggtgggaaaagtaatgagaaagatgtggttaatttgattgagcttgtgatgaaccagttgcttaaattagatgggatta

SEQ ID NO: 192014 - DNA, 669 bp, Gossypium hirsutum
  unsure (1)..(669): unsure at all n locations
ccctaattcctgtttcccttcttccacaaatccctaaccccttgcccgactgccctcctaccttttttctcaacctccacctccggtcctccacggctccactccttccccactccttagtgtttccatttcgaagtgaatcatggcgaggaagatgttagttgatgaggaaatgaaccaaacgaatcaagaggaggctcattatgatttcgacttgtttgttatcggtgccgggagcggtggcgttcgtgctgccagattctccgctaactacggagctaaggttgggatttgtgagctcccatttcatccaatcagttcagaagtcattggaggaagttggtgggacgtgtgttattcgtggctgtgttcccaaaaagattttggtctatggagcggcatttggaagtgaacttgaggatgctcggaattatggttgggagttgaatgagaaacttgattttaattggaagaagcttctacataaaaagactgatgaaataatcagattaaatggaatttaacagccgtttataatcaatgcctgttttaaattggtttgaagggaagggaaaaattgtccgtccaaatgaatttgaggttgaccacctggatggcaccantttgtcctattcancaagaccatttacttattgcaactggcagcct

SEQ ID NO: 192015 - DNA, 750 bp, Gossypium hirsutum
catgtacaccctcacttagaagccttttgactgcagctgtatcaccattcttaatagcttctcttaaaccctctccattgacatcataatccgtatgagattcatctgcagcagtaccattggtcgccagaccaggattgaaacccgaactagattcacagtttgaagtgcagcctctactcttgggaacagtgtcagtcttttttggttttggatttgacgaagccactgaggatggagggtttttcatcgtaagtggaactgcatctgttttcggtgctggactttcacaaatacacaaaggcattccacacttgcattttggaatgcttacaacaggctgttgctttgcagttgcttcagtttgtgcacccacatctgcgttaatgtttaatctagcgacttcgtcagtagcagaaccaactccgcctagaggaggctgagggtcggcttttgcagatcctgaagagttattggaacaatctgcacaaactcgaacagacgaaagtatgccaaattgaggtaaaggcatttgatcagatgaatgttcatggcataatgtccttccacaacatcggcaatggtgccggcgcctgaaagtgttgaagctgcatttgcagacgtcgcagcgaggtgcttcctgaaaaggtggcggctccgatgacatttccgatctccctttttctcactccggcggcaaaaaacagataaagatgctgaattctttttaggtgcttctattgattttag

SEQ ID NO: 192016 - DNA, 485 bp, Gossypium hirsutum
ctacaactacgagaactacgtgcgatctgcaggacatgccggcacgagctggtcaccataccatgattgaaaaccgaactagatttggtgtttgaagtggagcctctactcttgggaaaagtgtcagtcaaaaggcttctacgtgagggtgtagatgcaaattaccgtgacaagcaaggattatctgtactgcatctggcgacattattcaatcgaaccgatatagcgtttgccctcatggactgtggagcaagcatggactacaagaatgcacaaggtaattgattggcattcctgattctaaaaatgtctatctaccaatcgaagtttctaattattaggtgtgtaatcgagtcgagcacaaatactggcaagcttgagcttgattaaaaactggggctcgatactcaaatcaagcccaattgaatatcattttttaaagctcaagcttggctcaagatattatcgagctacatgagctcaat

SEQ ID NO: 192017 - DNA, 387 bp, Gossypium hirsutum
aaagatctttctcctgtatcttcaaaagcttcgctgcaaggtggcagttcaagcattaagatttgctccgccgatcctggaactcggtaacaagctcgctcggagaatgcagagcaagggaccatattttgctcttcatcttcgaatcgagaaggatgtatgggtgagaactggttgtcttccaggcttgagtaacgaatatgatgagatagtccacaatgaaaggagaaggcaccctgaatttcttactgcaaaatcaaacctgagctaccatgaaagaaaacttgcagggctatgccccttgaatgctttcgaagtgactaggctgcttaaagctctgggggcgcccaggagtgctagaatatactgggctggagggcaaccact

SEQ ID NO: 192018 - DNA, 327 bp, Gossypium hirsutum
ctttgttctggcgtgccgggtgttgcatagaacagaaccaagattggcttgtaacctgaagttatttttatggttattttattttttttttatttgtttttttttatttatttttatttttttttgttttttttttattgaggtaaaagaaagttccaatgacattttaaaaaaaaaaactttaaggttattagcctaaaccaaggattaataataagctaaggaaccaaattaaataaagtcttagcaactactagagcccctataaataacccaaaaagaataaacggtgtaaaattcaaccgtacttaaagataggcccaattt

SEQ ID NO: 192019 - DNA, 577 bp, Gossypium hirsutum
cccacgcgtccgagcagctttacaggttgcattggctcaaatggaataccaattgccgcgtcttactaaaatgtggactgaccttgagcgtcaagctggaggcaaggtgaagggtatgggtgagaaacaaattgaagtggacaaacgtatcttacgtactcaaattggagttcttaaaaaagagcttgaatctgtcagaaaacatcgaaagcaatatagaaaccgccggttttctgttcccgttcctgtagtatctttggttgggtacacaaatgctggcaagagtacacttttaaatcaattgactggagctaatgttctttcagaggaccgactgtttgctacccttgatccaacaacaagaagggttcagatgaaaaatggaagtgaatttcttcttactgacactgttggtttcatccaaaagttgccaacaaccctggttgctgcattcagagctacattagaggagatatctgagtcttctcttttagtgcatgtggtggacatcagccatcccctagcagagcagcagatagatgctgtggaaaaagttctagcagagctagatgtgtca

SEQ ID NO: 192020 - DNA, 1342 bp, Gossypium hirsutum
  unsure (1)..(1342): unsure at all n locations
cgnttccgattcgatanttgtgttccgcttcttaaattacagccagagtataccttaggannaagtgagtgaacgtgtgaggcgtttcaaanngaattcnnaaaaacacttttggagaaagaatcnnaacaagcgctgcgtgtgcatcnnaccattgagaagcgnnncagatggagaaatatcanntagattggtgnnntcataaaagaaaaaacagcncagctttttggatcaaccctttcttctgagnnaaaacataagaattcagagaaagttgcaccggagaatgcnncaaaagtgaaaacgttgaaaagaagatgaaaggaagtggagaactcaaagaggaaaagaagggagaggatttatatatggcaaatgtggcataggaaatgggacaagatgccccaaaggaactgttccaatacggcggagcacaactcgtgatgttttgagagccaagtctttgtttcacttcggcaagaaacaatctaccaccaccaaccctactcgccgtgccgacgctcccgacgtcgttagcagtaacggacatgagcatgcgattgcatatacgggaacatcccaagaggtatatggagcaaaggctacgataaacgtgtgggacccatccatccaagaggtcaacgaattcagcctatcacagatttggattctttcggggtcattcgacggctctgatctcaacagcatccaacctggatggcaggtcagtccggagctttatggtgacagcaggccaaaactcttcacatattggacgtctgattcctatcaagcaactggatgctacaaccttctatgtgcaggctttgtgcaacaaatagtagaattgccattggggctgccatttctcctgtctcacaatatgatgctaatcaatatgatattaccatcctcatttggaaggatcctaagctaggaaattggtggatggggtttggtgataataacctggtaggttattggccagcagagctatttactcacctagcagaccatgccaccatggtggaatggggtggtgaagtagtgaactcaagggccaacggcaagcacacgtctacggaaatgggctccggtcactttgctgaagatgggtttggaaaatcgagctatttccggaacttggagcttgttgatgccgataatagcttgagttcggtccgtggcatatcaaccctagctgaaaatacaaattgttacaacatcaggagctcatataacaaggaatggggcacatttttttattatggggggcctgggaataacccacgctgcccttagatcaatattattgtttgaattaaatattgattcttttaat

SEQ ID NO: 192021 - DNA, 610 bp, Gossypium hirsutum
  unsure (1)..(610): unsure at all n locations
gaaaaaagccgtagattccaaagctttagtgaaatcggaaaactcaccggaaattcaccatgtgtacgttggagaaacgcggcaacctctttattttaacgtttaccggcgaagaccagcaccggtttaatcccaatgtcatcggctcccttctcagccttctctctcaggtcaaggctgaagccactcgtggctcagctcttattacccaagcccaaggtaagttcttctccaacggcttcgatctcgactgggctcaagccgccggatctgaacaaggagccgcggaacggttacaccacatggtggatttgtttaggcccgtcatcgcggctcttctgtccctcccgatgcccaccgtcgccgccatcaccggtcacgccgctgccggtggatttgccctcgcgttgtctcacgattacctcattatgaggaaagaccgaggggttctttacatgtccgaggtggacatagcgctgacaatccccgattacttcaacgcgttgtttanggaaaagatcggcgacgcgtcggtccgccgcgattttttgctgcgaaggctgaaaatgaagggagatgangcggagaaaatagggttgtggaancggca

SEQ ID NO: 192022 - DNA, 411 bp, Gossypium hirsutum
  unsure (1)..(411): unsure at all n locations
aaaaaacatacacaaaaaaatgaagccttggggaaattgaggagttgtagaaaccatttatgaagatgaactttatgatgatcatgatgatgatgataactcttccaactctccttcacttctctcatctcctccttcacctctccattcaagtgcacaagcttggtcatcggcaatggggtgtaaaactgacgtgttgatacatgtacagggaactgcttttcaccttcataaggatcctctgatatccagaagcacctatttaaggcggaaattaactgacaaatcagaattaacgttatccccgccgttaaacataaccgccgaaacattcgctctcgtagtcgatttctgttacgggactcacctnctcgtaacgccgttcaacgtagcgtcactcttggtggcagc

SEQ ID NO: 192023 - DNA, 1423 bp, Gossypium hirsutum
ccagtgttttactctctcgtcaacttcaatggaggctccgatcagagccagagaagccctaagtttcattctcttctctcttctattttcgatctgcagatcctcttccttaaaccatctcctgatctccaacgccgagcgtagaattgacttgagctcccacattgtcaaagtttacttgactttgaaggtcgagaatgctggtagtacgcctacttcagaggtgtttctttctttcccacccactcaagttgatcatctcgcaacggttgaagcattagtaactaaaggaaagaggaagaagactacgttagtccgtcttgatgtaaaaccaactgaactgcctgatgcacctaatgacgctaaatattttgcgatttatttggaaaatccattaaagtctggtgaaagcacaaccatagaagtattgtacctgttgacacactcccaagaaccttttccggctgagatagcccaatcagaatctcaattagtatattatcgtgatagtgcattgatattgtcaccatatcatattaagcaacaagcgacttttattaagacaccaagtactaaagtggaatcattcacaagggtggaacccagtaatcgtgcaggcactgaaataaagtatgggccatatgaggatcatcctccatactctttttctccaattcttatacattttgagaacaatagcccatttgctgttgttgaggagcttgttcgtgaagttgagatatctcattggggcaaccttcaggtcacagagcagtacacattggttcatgccggtgcccggcacaaaggtgtattttcaagggttgatttccaatccaggccaactttgaatggcgcatcctcgctgaggtaccttctggcaagactacctcctagggttcattctgtctactaccgggatgaaataggaaacatctcgtcctcacacctgcgtactgattcccgtaagtctgaactggaaattgaaccacggtatcctttatttggaggttggaaagctacttttgtcatcggttatgggctaccattacaagacttccttttcgagacatctgatgacaggcgttatctcaactttacttttggatgcccccttcttgagacagtggttgacaagttaaccgtcaaagttgtgttacccgagggttcaaaagacccttctgctgtggttccctttcctgtggagcagcatttggagaccaaatattcttaccttgatgttgtgggaaggactgtggtggtcatggaaaagaaaaatcttgttcctgcgcacaactctcatttccaggtttactacaccttcaagccaatcttcatgcttgcggagcctttgatgttggcgtccgcgttcttcttgtttttcgtggcttgtgtggcttacctgcacatcgatctttccata

SEQ ID NO: 192024 - DNA, 1174 bp, Gossypium hirsutum
gctcctcgctgtggaaagaaaaaaaaagggaaaaaaaaaaacagaagttctctatcagatcaagtattagattgatatagtaaagatgtcgccaaccgaatcatcacgagaggaaaatgtttacatggccaagctggctgagcaggccgagcgctatgaggaaatggtagagttcatggaaaatgtagcaaaaactgtagatgttggtgagctgactgtcgaggaaaggaaccttctctctgtagcttacaaaaatgtgattggggctaggagggcttcttggaggattatctcttctattgagcagaaggaagagagcagaggaaatgaggatcatgttgcaaccatcaaggagtataggagcaagattgaagctgagctcagcaagatatgtgatgggattttgagcctccttgagtctcacctcattccttcagcttcatctgccgagtccaaggtgttttaccttaaaatgaagggtgattatcataggtatcttgctgagttcaagactgctgctgagaggaaggaagctgctgagagcactttgttggcttacaagtctgcacaggatattgctctcggtgacctagcgccaactcacccaattaggctgggacttgctcttaacttctctgttttctactatgaaattcttaactcacctgatcgtgcttgcaatcttgcaaaacaggcttttgatgaggctatttctgagttggatacattgggtgaggaatcctacaaggatagtacattgatcatgcaacttcttcgggacaacctaaccctttggacatctgatatcacggatgaagctggagacgagatcaaggaagcttccaaacccgagtcaggagagggacagcagtgatgagttaagttcatatgatatgtactctgtaatttatgttgcaggttgtacttttacgtacatgcaacgtgggctggtgtagaaggttccttttattttattttttttttatttttacatttatcagtacttggagttgaaattttacattccaatattattatcattcggacatgaatttggttttgtttggtttggtttcaatgttgtaatgctaaattcgagtttattgaatgttaattcagtcctgttttgaacttcttgtcatttgccaaatgaatctgaaggtacttaaagctc

SEQ ID NO: 192025 - DNA, 662 bp, Gossypium hirsutum
cccacgcgtccgccacgcgtccgctttgatactttttttgtttgtgtttttggtgtaatctttgataccctttttataaaaaaaccagccctctagctggtcagagtttagtcttcactccctagaataattttctctttctcacttccaccaacgaaaaagtcgtcgatcggatcacgtattagattgatattgtaaagatgtctccaactgaatcatcacgagaggaaaatgtttacatggccaagctggctgagcaggctgaacgctatgaggaaatggtggagttcatggaggaagttgcaaaaactgttgatgttgaggagctgactgttgaggaacggaaccttctctcagtggcttacaaaaatgtgattggggcaaggagggcgtcttggaggatcatctcttccattgagcagaaggaagagagcagaggaaatgaggatcatgttgcacaactaaaggagtataggggtaagattgaagctgagcttagcaagatctgtgatgggattttgagccttcttgaatctacctattccttggctatctgctgagtcaaggctaccttaagataagggtatacagttgtggttaactggctgaggagaccaaccttgtgctcagtgtcagatgttgtactgtcatacatagggtgt

SEQ ID NO: 192026 - DNA, 720 bp, Gossypium hirsutum
cgcgtccgtttttcacttcacatctgcaacgaaaaagaaagcgcccctttatctggtaggatcaggtattagagtggtatagtaaaaatgtcttcaactgggtcaacacgagaggaaaatgtttacatggccaagttggctgagcaagctgaacggtatgaagaaatggtggagttcatggagaaagttgtaaaagctgtcaatgtagaggagctaactgttgaggaacgaaatcttctctccgtggcttacaaaaacgtgattggggccaggagggcatcctggaggataatctcttcaattgagcagaaggaagagagcaaaggaaatggggatcatgttgctatcatcaaggagtataggggcaagatcgaagctgagcttagcaagatctgtgatgggattttgagccttctggaacctcacctcatcccttctgcctcatctgccgagtccaaggtgttgtaccttaagatgaagggtgagtggcataggtatcttgctgagctcaagactgttgctgtgaggaaggaagctgcttagagcacttctttggcttacacgtttgcaccgtatcattgtcttagtgtcttaatgcttacttatccatttaggcttttacacgcttttatcttttttgcattcttcttttctttttctttgtcttatcatttatttttctccttctttccttttttatttttctttttttttttactt

SEQ ID NO: 192027 - DNA, 1222 bp, Gossypium hirsutum
cgcattttccttagcatggtaatgtatggttgggttagcttagccccgaaggaaccttaatttccaaacctcggcgttgaccactctaaacgcccttattttagttaacccacacgttccttcaccgcttaatctccaccgcccatcttattctgccctataaaaccacccccttttccacccttttcattcacaattcaacgccgaaaaagaacccagtcttctgatctctgccccaaagcaaaaaagttctcatcttttacaatcacagctactgcttatttattttcatggctcaaggagattctaacttccagcaagacatggctaaagaggaagaagaacagaggctgaaatacttggaattcgtgcaagtagccgccgttcacgccgctttgtgcttcaccaacctttacctttacgctaaggaaagatcggggccgttgaaacctagcgtcgagaccgttgagggaacggttaagtgcgtggttggaccggtttatgataaataccatgatgtccctgttgaattccttaaattcgttgattccaaggtgggtgaatcagtgaccaagcttgatcgtcgagtccctccagtcatcaaacaggtctcaaccgaagccatcttggcagcccaaaaggctcccgaggttgctcgtggcgtggcttccgaagtccaccgtgctggagtggtgaacaccgcctcaggattagcaaaatcagtgtataccaagtatgaacccacagcaaaacagctttatgcgaagtatgaacccaaagctgaacaatgtgcggtttcagcttggcgtaaactcaacaagctccctctcttccctcaagttgcctcggtcgttgtcccaacagctgcttattgcagcgataagtataacgagacagtggctagcagtgcagagaaagggtacaaggttgcctcctatttgcctttggttcctacagagaagatcgctaaggtgtttggtgagcagacgactgaaatggagccgttggtttctgagagttgatctgctttgaatcctgtttatgtgggctatgacttgtgaatataataatctggacctgttttatgtttttacttgtgactgtctcttgtgatggatggaacaatgggttttagttttcatgtttgtttttgttgtattttatttttattgaaataaatttgtttttgatgggaaaaaaaaaaaaaaaaaaaaaagggcgg

SEQ ID NO: 192028 - DNA, 885 bp, Gossypium hirsutum
cccactcgtgcgcccggcagctcgcacgctctcatcattttccttctgctaccttctctcaacccaaacacatatttcccaggaaaaagaaaaagcttgagcgaaaagaaaatggccgatcagcttaccgacgatcagatctctgaattcaaggaggcctttagcctgttcgacaaggatggagatggttgcattactaccaaggagttgggaactgtgatgcgatcacttgggcagaaccccactgaggcagaactgcaagatatgattaatgaagtcgatgctgatggaaatgggaccattgattttcctgaattccttaacctgatggcaagaaaaatgaaggatacagactctgaggaggagcttaaagaggcattcagggtgtttgacaaggatcagaatgggttcatatctgcagccgagctgcgccatgtcatgacaaaccttggtgaaaagcttacagatgaggaagtcgacgagatgatccgcgaagctgatgttgatggtgatgggcagatcaactacgaggagttcgtcaaagtcatgatggccaagtaaaggacctctccaactataaccaggatttaaaaatggggtttaaaaaaaaaggaagaaaggaacagggcagataagtttgctaaaatatctattaatgaataggacatctatgtttttaagttacaagcttttgttggatggttctttgtttcatgtttgcattatttggtggaccgaaccttagtattatgcttgtttgctctgcttttttgttcagtagtgctgggttgttaacgtcaatatttttatgctttgtgctttctttcgaacaaactggaagattcgatgttatttttgctttttctgattgactaattttttagg

SEQ ID NO: 192029 - DNA, 725 bp, Gossypium hirsutum
cccacgcgtccgcccacgcgtccgcatttttattccgctattttctctctccccaaacacccttttaagccaaaaagaagacaatggccgatcagctcaccgatgatcagatctctgagttcaaggaggcctttagcctattcgacaaggacggcgatggctgcattactaccaaggagctcgggactgtgatgcgatcacttgggcagaaccctactgaggcagaacttcaagatatgattaatgaagttgatgctgatggaaatgggaccatcgattttcctgaattccttaacctgatggcgaggaagatgaaggatactgattctgaggaggaacttaaagaggctttcagggtttttgacaaggatcagaatggtttcatatcagctgctgagctgcgccatgtcatgacaaatctcggtgagaagcttacagatgaggaggttgatgaaatgatccgtgaagccgatgttgatggtgacgggcagatcaactatgaggagtttgttaaagtcatgatggccaagtaactttctcaccaaccataaagatgaaccaaacattgatattaaagggaacagggcagataagttcgctaagacttatatctctgaataggaacatccatgcttttaaattatgagcttttgttgttgatttgtatctgttttcgtttgaattattgcggaaccttagtgtcatactcatttgctctgtttttt

SEQ ID NO: 192030 - DNA, 804 bp, Gossypium hirsutum
cggacgcgtgggcggacgagtctcgcagctcgcacgctctcatcattttcctccgggaccgtcagtcttcccaaacaccttctttccgagaaaaagaaaagctcaagagagaagaccatggccgatcaacttacggacgatcagatctctgagttcaaggaggctttcagcctttttgacaaggatggcgatggttgcattactaccaaggagctggggactgtgatgcgatcacttggtcagaaccctactgaggcagaactccaagatatgatcaatgaagttgatgctgatggaaatgggaccattgattttcctgaattccttaacctaatggcaaggaagatgaaggatactgattccgaggaagaacttaaagaggctttcagggtgtttgacaaggaccagaatggtttcatatctgctgctgagcttcgccatgtcatgacaaatctcggtgagaagcttacagatgaggaagttgatgagatgatccgtgaagctgatgttgatggtgatgggcagataaactatgaggagttcgtcaaagtcatgatggccaagtaaggataaaaaatgggtaaaaaggggaacagggcagataagtttgctaagatctctatttatatcaatagggcatctatgtttttatgttactaccttttgttggattgttgactgtttctttgtacgcattatttcgtggactagaccctaatatctacctgtttgctctggtttttgttcattaggtctgggttggtagtgtcttatttatctttcttatttggtgttttctttcta

SEQ ID NO: 192031 - DNA, 906 bp, Gossypium hirsutum
cccacgcgtccgcggacgcgtgggcttttctctccccaaacacctcattttcctgagaaaaaaaaaacaaaaaagaagcgtaagtgaagaaggagaagaagaaaaagaaaatggcggaccagcttaccgatgaccagatctctgagttcaaggaggcctttagcctctttgacaaggatggcgatggttgcattactaccaaggaactgggaactgtgatgcggtcactcggacagaaccctactgaggcagaactccaagatatgattaatgaagttgacgccgatggaaatgggaccatcgatttccctgaatttctcaacctgatggcaaggaaaatgaaagatactgattctgaggaggaacttaaagaagctttcagggtgttcgataaggatcagaacggtttcatatctgctgccgagcttcgtcacgttatgacaaatcttggcgagaagcttaccgacgaggaagtcgatgagatgatccgtgaagccgatgttgatggtgacggccagatcaactacgatgaattcgtcaaagtcatgatggccaagtaaggatctctccaaccaaaaaaaaaaaaaaacagagtagataagtttgcagagatttcaatctcgtaattggttcgtgggtcgttcgtttatcggttgcattatttcgtcgaccggcttggttgctcttgctttttccttttagtagtctgggtttttatttttcttatatttggttttggtttttgtttttgttttttttgctttctattcttggtgcctttgaaacctttagaacaatttgcaagattccaatgtttttttttgcttatgggtgactaatttttactatattttaaaattttaaaagtgctttattttcaatggcttgtctgatttgccttttcga

SEQ ID NO: 192032 - DNA, 500 bp, Gossypium hirsutum
cgaaaaagcactctgctttattatcaatttttctttttgcatttttttccactgaaaaaattctattcgttggaattgaaaacggggacggaatttataggctaactatctttttattaacatggaagttgacgccgatggaaatgggaccattgatttcccggaattccttaacctgatggcaagaaagatgaaagataccgactcagaagaggaacttaaagaagcattcagggtgttcgacaaggaccagaatggtttcatatccgctgccgagctccgtcatgtcatgacaaatcttggtgaaaagcttacagatgaggaagttgatgagatgatccgtgaagctgatgttgatggtgatgggcagatcaactacgatgagttcgtcaaggtcatgatggccaagtaagaacctctctctctaaccataatcgagccaaaaccggtgaaaacccaaaaaaaaaaaaaaaaaaaaattctgcgggtcgacgcggccg

SEQ ID NO: 192033 - DNA, 423 bp, Gossypium hirsutum
cccacgcgtccgattttctctctccccctctccctccccctttccgagaaaatagtacaaagaaaagagaatggccgatcagcttaccgacgaacagatctctgagttcaaggaggcctttagcctcttcgacaaggatggcgatgggtgcattactaccaaggagctgggaaccgtgatgcgatcacttgggcagaacccaactgaggcagaacttcaagatatgattaacgaagttgacgccgatggaaatgggaccattgatttcccggaattccttaacctgatggcaagaaagatgaaagataccgactcagaagaggaacttaaagaagcattcagggtgttcgacaaggaccagaatggtttcatatccgctgccgagctccgtcatgtcatgacaaattttggtgaaaagcctac

SEQ ID NO: 192034 - DNA, 425 bp, Gossypium hirsutum
tctttatctacacaggattgatatacaatgaatttttttcggtcccatttgaacggtggtgggccctctgcttatggatgtcgtgatcctgcttgcagagatgcttctacagcaggcttagtaaaagtacgtgccacttatccttttggtgtggatcctaagtggcatggtactcggagtgagctaccatttctcaactcactgaagatgaagatgtcaattttgcttggagtagctcagatgaatcttggaatcattttgagttacttcaatgcaaagttttcgggaaatgaactcaacattcggtaccaattccttccccaaatgatctttctgaacagtctgttcggatacttgtcactcctcatagttgtgaaatggtgcattggttctcaagctgatctttatcacgtgatgatatacat

SEQ ID NO: 192035 - DNA, 1276 bp, Gossypium hirsutum
gagcctggtgccttggttgaccctgaaggaaagggtctcagatcattgtcgagagcccagctggatgagattctaggaccagctgagtgcactatagtttcttcactatcaaactatcatttggactcctatgtcctttctgagtctagcctctttgtttatccatacaagatcatcatcaaaacctgcgggacaacaaagctacttctttcgatcccacccatcctgaagttggcgggtagcctttctcttaccgtaaaatctgttcggtacactcgtgggagttttatcttccctgctgctcagccatatcctcatcgttacttcactgaagaagttgttattcttgatagccattttggcaagcttggcgctggtagcaaagcttacgaaatgggtgggctggataaacagaaatggcatgtttactctgcttctgctgaatctgttaacaccaaagcccctacttacactttagagatgtgcatgactggtttggacactgaaaaggctacagttttttacaaagacgaatcgacctcggcagcttcgatgaccatgaagtctggcataaggaacatacttccaaactctgaaatatgcgattttgagttcgaaccttgcggctattctatgaattcaatcgaaaccgatgctatttcgaccattcatgttacacccgaagacggttttagttatgcaagcttcgaagctgtgggctatgatctgaaagagttgaatctggagcagttggtgcaaagggttttagtttgcttcaaaccaagtaatttctctgttgccgtgcatgtggatgttgattgtcactcatttgaacagacctgtctgctggctgttgaaggataccattgccgggagagtagcatcgaagagcttggttcaggcggttccatcatttaccagagcttcaacggcattgggggatgtggatcacctagatcaactctgagttgcctctgggaagaggaggaagagtattattataattaaaacggcttattttcttatgttataactattaaataaattgctacccaggcattgcctggtgatatagcatggggtgtgtttctattctagtacttttttgtcttttatcaagtcaattgctatgccagcaaacctgaacttgttactgccatttgtacggcagaatgtggagcttctccatttttttattattatattacatgaaataatatgcggcctctattatacctaaaaaaaaattattaattttgtatttatatatatattt

SEQ ID NO: 192036 - DNA, 559 bp, Gossypium hirsutum
ctttgggattggattgttggtatttggcaagatgtgtgtagcaattaaggatgatgaggttgacattgtaataggagctcttcgttcggatctgacaacatttatgaatgaatggagaccaatgttctctcgatttcatctcattccggtcaaagaccctgatttgaaagaggaactcaaaatacctgaaggctttaaccttgatgtctacggaaagcccgacatagatcaagtggtgggttcttctacttcgattctcttctctggctattcctgcaggtattttggatatcttgtttctcggaaaaagtacattatctctgtagacgatgactgcctcccagcccgagaccctaagggctttttggtggatgctgttgcccagcatataagcaaccttaccaacccagccacaccattcttttttaatactttgtatgacccttatgctgaaggagctgattttgttcgtggctacccattcagtcttcggggtggggtgaaatgtgctttgtcatgtgggctatggcttaatctggctgatcatgatgcacctact

SEQ ID NO: 192037 - DNA, 1288 bp, Gossypium hirsutum
tggtcacatatccactccaaaatctactctgtgttccctgcttttccaagcaatgtagttgctcatcaatttctttcctttcaaataaacatcccaacagagtttgctaaagttgataagtatgtcttctagttaactaaagtagcatattttacctaacttcaccctccaatatcctaaataaaaagctcccatttcttatccaatcaaaacatccataaatttttgttcaaggaccacttcttcccttccattttactttgttttagttgccataacgtcaccttccaatacaacccacaatgaggcaacaatatgtcttcactactctcacgttgctcatcctgttttccctcagttgttcaacaacattagcccaatctccggcactggccccggcaccttctggcccgacaaacgtcaccaagatcctcgaaaaagccggtcaattcaccctcttcattcgtcttctaaagtccactcaagtggccaaccagctgctcggtcagctcaacaattccaacaatggtatgaccgtttttgcaccaacggacaatgctttctccagccttaaatcgggcacattgaattcactcaccgatgaacaaaaagtgcagctggtgcaattccacatcgtcccaacatacctcacctcgtctcagttccaaaccattagcaatcctttgagaacccaagctggtgatagtggcgatggcaagttccctctcaatatcaccacttcggggaactccgtgaatataacaacagggttgacaaacaccagtgtttccggcactatttacactgatggtcagcttgctgtttatcaaatcgatcaagttcttcaaccattgcaaatatttgcacctaggcctccagctccagcaccggcaccggcaaagtcgaagaataagaaggctaccaccgttgctgatagccccgatgttaccccagctgataactccaaagcggccaccttgcaaaatgttggtttgtttggagttgctgctctagttattgcactttctttgtgaccatgaaaatggagaaaagaagaagacagtgattttgatggtgatcaagatggcgagtgttttttattttttcaataattatcatttaaaaaatttatgttctgtatgaagattgaattttgagtttgtcttgttgatttcatttatttttgttttgaaattttctttgttatctcttacttccccattgtaattgtgaattttgcggcactttcttcatcctttctctttttaagattttgcatcattgcttg

SEQ ID NO: 192038 - DNA, 871 bp, Gossypium hirsutum
  unsure (1)..(871): unsure at all n locations
ggaagttcaacttaaggatggcagagttctggaagctgacattgttgtggttggtgttggtggaaggcctcgtacagcactatttaaagggcaggttgaagaggagacgggcggaataaagactgatgctttttttcaaaacaagtgttcccacagtatatgctgtgggtgatgtggccactttccctctgaagttatacaatgagttgagaagggttgaacatgttgaccatgcccggaaatctgccgaacaggctgtaaaggccatcaaggggcttgagaaggggcaatcagtcgacgaatatgactacttaccgtacttctattcccgttcctttgacctagcatggcaattctatggcgacaatgttggggatactgtgctttttggagacaacaacccacaatcaccgaagccaaagttcggatcttattggatcaaagatggcaaggtggtaggggcattcctagaaggtggtagtgccgaagaaaaccaggcaattgctaaagttgctaagcttcagcctaaagctgagaatttggatgcgctggcaaaagaaggacttgcctttgcctgtaagatatgaagagtagtaacagctgccatgccttacaaaaagggaagaactctgttgcaagaggactgcgtatgggaagggttggatctgtgttttttctttgggttgtgctgttatttctctttgcatttagtacatagattctggagtttgctttgtttatcttgcttttcttttgaatgatgaataataacaaacaatattccactgtatgttgtgcagtacgaaaaataaacccttaagcctatgatcttgctggtaaaataaaaaaaaaaaaaaanaaaaacccccct

SEQ ID NO: 192039 - DNA, 520 bp, Gossypium hirsutum
cgcatcgcgtctgcgcttaaaaccacagctatcagaggacggggaattgtccgcatcaaacttcctccggacgcctctgaccgcctgttcctcggcttgagtgaggggaaagacctggccgctcgcccggcagagggaactatggttatcatacaagattcgctggttacagttcttgtcacagatgtgtgtaattccagttagtttgcagcgatacatgttgccacaaacatgttcattttgacatttccaatcgcatttgtgaacagggataggaccatcacggcccagaatagtagacaaataaataacatttgcaggggcaacagccatggttttgccgtatacctccattgaccgaaaacaaaaagccttaaagatgaggaagaatcctccaaaagctcccaaccgtgtaaataactcaaccggccttctggcgaggggacagtgaaaggaacaaaaacgacaacccagaaagacaagaaaagaaaagaaaaaaaaaagccgtctcttgaagaag

SEQ ID NO: 192040 - DNA, 1027 bp, Gossypium hirsutum
ggtaattttcttttattttttgataaaaaagaagtacaatgttgacgtttaattccgaacgagtccctatttagcatactcgattagctctttgcataaaatttgtgaaatcagatacacaaagtgaaaagcataattttgcttctttagcaaagggccaaaaatacaaatatgcccagcttaacttcaaatgataattaatatttttaataataaaaataatcaaacattacaaaaacataaccaacagatttccagtctatgatcaaaattaacctaaacaagaacccgcaaatgagactcaaacctgaaccagaattgcaattttgtcattaagccaagactagaacttgttggcaatgatcaacatggatgagcaaacaatgtaacagacaccattgtgggaccagaacatgaatgtttcaattcagctaaacaagatccacttcaccggctaaactaaactccccataattgtcagccagacaaataagccttctggtaagcagtatctgattctcacgagtccataactggccatctcagttcttcatggttttcggccactattaactccgttcgcagttataaatgtctattaccgctgagaaagtcgacatcattaactcatttctgcaaccagccaaacagaaggatgttcaccattggtttcttcaccccatcaaagctggttgccgtctgcagtcagcaatgatacatgtcatactcggagtatggttgaaccactttgcaacctatgggaaatccctagtaggaaacgagcataagatggcaccttcacatagattccgctatccatcgccagcaatgacaaaattacctccattgaccgaaaacaaaaagccttaaagatgaggaagaatcctccaaaagctcccaaccgtgtaaataactcaaccggccttctggcgaggggacagtgaaaggaacaaaaacgaaaacccagaaagtcaagaaaagaaaagaaaaaaaaaagccgtctcttgaagaagaagttgcaacggcc

SEQ ID NO: 192041 - DNA, 759 bp, Gossypium hirsutum
  unsure (1)..(759): unsure at all n locations
ttcctcgcgtccgcccacgcgtccgggatgggggcggaagtatacggagggaaagtgaaggggagtgcaagccaacaaaaattgtacgacgagggagtgcgtgcgggtgcgttgggtctaatgataaactccatagtgttggcgttcgcgtcgttggggttagagcctgtgagccggttgataggtggagtgaagaacatgtggggggtggtgaacttgatattggcagcatgcttggcggggacggtgtggatcaccaaggtggcggaggcatggaggggtgaacatggaccacaaatcttggcccctccaccaaccagaatcaaaacctctgccttggctttgtttgggttgttgggtattccacttgcggtaacatttagcattccattcgcattggcatccatctattgctctgaagaaggtggcggtcaaggtctgtctttgggagtactaaacttgtctatagttatcccacagatgattatatcagtgattagtggaccgatagatgcagcatttggtggcggaaacttaccagcctttgtattggggtctattttggctgccattagtgctttattggcaatatttgcacttcccaatcccaaaacacaactctctctcaactcaaccggaatggctggagcccattgaccactgtcatggaagaaagtgagatactatatngnttcctttnttctttaattntctgggatctactctcttgtcagaatttcttaattactgactgatgta

SEQ ID NO: 192042 - DNA, 1863 bp, Gossypium hirsutum
  unsure (1)..(1863): unsure at all n locations
gtttggtaatataaagatcttcatctgttcttcctttttctctattctctccgtcttgtattcttttccttcattttccgactcatctttcgcttgaaatcatcgttgtatttttttttaaaaccctcaccgatggcgaccgctatggtagaagattctagctttgaagaagaccagttggcttccatgactaccgaggatatcgtccgagcttcccgtcttcttgataacgagattcgtattctcaaggaggagatgcaaaggacaaatctcgagttggattcatacaaggaaaagattaaggagaatcaagagaaaattaagcttaacaagcagttgccttacttagtcggcaacattgttgagatatttgagatgaaccctgaagatgaggcagaggaggatggtgccaacatagatctagactcacaaagggaaggtaaatgtggtgtgcttaaaacctntactcgtcagaaccatcttctacttgtggttgaacttgtagacccttgataaattgaaacctggggatgtggttggtgtcaacaaagacagctacttgatattggatactttgccatctgagtacgactccagagtaaaggctatggaggttgatgagaagccaactgaggactacaatgatattggtggcttggagaagcagatcccaagaactagttgaggccattgtgttgcccatgactcataaagaaaggtttcaaaagttaggcattcgtccacctaagggggtgctcttatatggacctcctggcactggaaaaaccttgatggcccgtgcttgtgcagcacaaacaaatgccacgtttctgaagctagcaggcccacagctggttcagatgtttattggagatggagcaaaacttgtccgtgatgcctttcagcttgcaaaagaaaagtctccatgcatcatttttatagatgaaattgatgcaatcggcacgaagcgtttcgatagtgaggtgagtggggatagggaggttcaacgaacaatgttggaactgctcaaccagcttgatggctttagcagtgacgaacgcattaaggtcatagcagcaactaaccgagctgatatccttgaccctgctctcatgcgttctggtcgattggatcggaaaattgagttcccgcatcccactgaagaagcaagagctcgaatccttcagatccactcaaggaagatgaacgttcatccagatgtcaattttgaagaacttgctcgatctacagatgatttcaatggagcacagctgaaagctgtttgtgtggaggcaggcatgctagctcttcgccgcgatgcaactgaggtgaaccatgaagattttaatgaaggcatcattcaggtgcaagctaagaagaaggcaagcctaaattactatgcataatgggagagcatttcagtgtaagaatgtgaaggtgggttgtgttgagaataggttgatatacatattttactctctgcccaattatattgtgttaggttttcctggtttgcacgtaattttatataaaaaaaaccatttacaaatggattgttctgtttaaaagactgccatctttttatttgaataagctagttcagcaacagattaagattgagagggaaaaaaagtttaatctgaaaattttgtatttgaataggaaaagaaaaagaaagaaatcctcttaaactgttaaaacttaggtgatagttttttctttatataaaatggtctgtttaatggaaagatgataatgagatagctttataataacaagtttagttgtaaatgtttatacattgtgtttagncgatgtttatttacacaatgcatatttagaagttatagcaatttttttttt

SEQ ID NO: 192043 - DNA, 1016 bp, Gossypium hirsutum
tcggtttcatgctcgatttgcctcgaaacgggtactgataatggggatcggtcttgggctaagcttcaatgtgggcatcaatttcatttggactgcattggttcagcattcaacgtaaagggtgcgatgcaatgccctaattgcaggaaaattgagaaaggtcaatggctttatgccaatggttgccgttcatatccagaatttaacgtggatgatttgacacatgatgaggacctttatgatctaagttactctggaatgtcatttggagttcactggtgtccatttggaagcttagcacgacttccttcattcgaggtaggagagttttcatcaacctcatatcatgagttactgggacagcaagccatctttgctgaacattcagcatctgctggtcatccatgtccgtatgtagcttactttggaccaacggttcatccctcatcctcaaattccggtggaagtgtttcagatagttctagtttcaacggtcactggaatggtccatcagtgcctagtgagatgcctacatcttatgcttttcctgcgatggatctccattatcatagttgggagcatcagtccactccattctccacatttagcagccgaattggtagttctgatcaacctccaaatccgcctataaatcaaaggtccaccaggagcagttctgatacaccaagatcagcatcttttatgcatccgtttgctgttggccacagttctggtgcaagagcagggagtttatttgctccgtgattgatccccccttacccaacgtagcaatgctcgggcccgagatagagttaaggctctccaggcgtactatgaacaacatccgagaacttagccaaccatacggacacccattgcttatggctccagaagagggagcggtcatagaagacatgctcaagctggacccgtagcctgataatctgaccaagtgggtggcttctattttattccgcctggtacattaggtcgaaactttcaagaggcataaaatc

SEQ ID NO: 192044 - DNA, 475 bp, Gossypium hirsutum
  unsure (1)..(475): unsure at all n locations
atatgatgattgttccataaaaaatatancangaaacagcacctcttgtcctagaaacagtgctaaaatgctgccaagagatttcaattatcctacactcactgctttagtaccagcaggcaagccattcactgttaatttccatagaacagtaacaaatgttggtatagcaagatctacttacaatgcgacaatctctaccctgtcggaacccgaaatccaagtgggtcctcaagtcttgtcttctcaagtctctaacagaacagaagtcttaccatgttattgtttctggcaaagctttgggtgagacatcaatggtgtctgcaacattgatatggtcagatggtactcataatgttagaagttccatcgttattcacacatataaggtgtccgtggggctgtttgagtcaaagattagcccccattttgtttttatttgttcagtcaattttttgcaatctattaataaaat

SEQ ID NO: 192045 - DNA, 595 bp, Gossypium hirsutum
cccacgcgtccgcccacgcgtccggcttagggtgaggccggggacgaggcaggggtcgtggaagaggagctcgaaatgtggaaagagatgctcatcgtgaaatagaaccagaaccctgctcaactcttcagcaaaacaacaaaagtcattcaacctcaggaatggtgatagatgatggttccgagttgaaggaaccggtgaaagagaacacagctgctgaagatgccaatcaagctgttcggaattttgggctgaatgccgaggtagatgagaatgtggatacaaaagcctcagcaactgctgctaaagttgctgcacctgcacccccagtcggcgttgctagtgccgctgcggcaccagcagcgccagctgcagcagctcagccttctacagcagagcctacaacagaggccaaacatgaagaatacccaggctggtctctttcggatatggacaagatagctatcaatcctcttcaacttgctcggcttggtggaaggttagacgaggatgaagaagattatgatgaggaagggtgagtagctcgaaactggactcctagaaaaagtagcggttgagatcagattagcaaccc

SEQ ID NO: 192046 - DNA, 688 bp, Gossypium hirsutum
  unsure (1)..(688): unsure at all n locations
agccgccctgcgtttcattaagcttcaattttctgaccggcgatccgtgacagagagatgacgacgatacgccggttttgctgcaacgaccttcttcgttttgcttccgtcaatctcgaccatttaaccgaaacctttaatatgtcattctacatgacgtatttagctcgatggcccgattattttcaagtagctgaaggccctggcaatcgagtgatgggttacattatgggaaaagttgaggggcaaggtgagtcttggcacggccacgtaacagcagtcaccattgcacccgaatatcgcaggcagcagcttgctaagaaactgatgaaccttcttgaagaaatcagtgataagattgacaaggcatattttgtggatctttttgtgagggcttctaatacaccagctataaagatgtatgaaaagctcggatacgttatatacagaagggtactacgttattattccggggaggaagatgggttagatatgaggaaagcattatcgagagatgtccaaaagaaatcaatgatcccccctaaacggccggttagacctgatgaattggagtatgattccatttagattcactttctcttactgtttactatgctcctgtctttaacttgggaagcaaaataggtgggttgtntctaatgtggtagatggctcatctgtcacgtgt

SEQ ID NO: 192047 - DNA, 827 bp, Gossypium hirsutum
ttgttctgatagccctgcgtttcattaagcttgcattactggtagccgaataagattgagatgacgactatacgccgattttgctgcaatgatcttcttcgtttcgcatctgtcaatctcgaccacttaacggaaacctttaacatgtcattttacatgacatatttagctcgatggcccgattactttcatgtagctgaaggccccggcaatcgaataatgggttacattatggggaaagttgaggggcaaggtgagtcttggcatggccatgtaacggcagtcactgtagcgccagaatatcgtaggcagcagctggctaagaaactgatgaaccttttggaagatatcagtgataagatagacaaggcatattttgtggatctgtttgtgagagcttctaatacaccagctattaagatgtatgagaagcttggatatgtaatatacagaagggtgctacgctattattccggagaggaagatgggctagatatgaggaaagcattatctagagatgttgaaaagaaatcaatcataccccttaaacggccagtgacacctgacgaattggagtatgattagatccgcttcctatggaacggctccctgctattttttattgtgttgcttcagaacattttcatgtttttgcagagatgggatatcagagagctttaggtatgccaaacatgtggacaagaaaatgttcttagtaatgaacacatttaatgttttcagtgtggttgtgacctttatctttcattgtaccttggatttgtataactcttggattatgcctttatacaatgttatccttctttaaa

SEQ ID NO: 192048 - DNA, 390 bp, Gossypium hirsutum
cggttgcatcgtattatatatagttttcaatggagtactccagctggtcatatacactaaggaaaagaatgcaattctctttacttatcctcctgctggatccgtcaccagcactggtttggtggtctcgtcaaagttaccaagattctctgatctttatacacttacgatagcaagtgcagatcccaagtcgatatctgcagggaaaccggttgagttgaccaaaagtgttactcaatggttcactaaggacggagtattggttgagggcctattctggaaaagatgttgaaacactaataaatgattatgcgacagaaccaaagaaaaagaagtgattgtagatagtaagccttaccttgttaggttattggttagaccgtgaaatct

SEQ ID NO: 192049 - DNA, 438 bp, Gossypium hirsutum
ctgtttcttcgagagggccggatcgcctgggacgcggggtcttgctatccgccggggactagcatgtttccaaggtacgactgggtcgttacgccgtctgaatcgaagtgaagaagcgatccccctggtacgactgcttgctacacaccctgtattttgaagctccggcgatcggcgagctattctttcggtgcccggggtggccccctttcaataacagtcaaaccggaagaaagcagcgctcgccgcaaagcgcagctctctggatgtagatggagccgttctctacctatgtatagccctggtaagaggggaaactatacatctttttcctttcgcgcgagaaagaaggacttttgggatcgtccttcggatgtccaatcaccagaaatgggaagatgggccgaagacgaaacttaaaagaactgtctcatagca

SEQ ID NO: 192050 - DNA, 1071 bp, Gossypium hirsutum
  unsure (1)..(1071): unsure at all n locations
cccacgcgtttgaagctgcatttagttccacaaagaaacaacatatagataataagcacctccccgtaagcaaaccacaaaggaaagcttggagagagacccaaaaacaatgtctaaggaagttagtgaagaaggacagggtcgtaaggactatgtggaccctccaccggcacctctgattgacatggctgaactcaagtcatggtctttttacagagccctcatagctgagttcatagccactctcctcttcctctatgtcactgttgctactgtaattggtcacaagaaacaacaagatgcatgtgatggtgttggtctcttgggtattgcatgggctttcggtggcatgatctttatccttgtttactgcactgccggtatctcaggtggacacattaaccctgcggtgacttttgggttgtttttggcccgtaaagtgtctttcattagggctgtggcttacatggtgtcacagtgcttgggtgctatatgtggagttgggttggttaaagctttcatgaagcatccatacaactcccttggtggtggtgcaaacaccgtggcttctggctacaacaagggaactgccttgggagctgagattattggaactttcgtacttgtctacactgttttctcagccaccgaccccaagagaagtgctcgtgactcccacgtccctgtattggctccccttccaatagggttcgcagtgttcatggttcacttggctaccatccccatcaccggtactggtattaaccctgcaaggagtttcggtgctgctgtaatctacaacaacgacaaagcctgggatgaccactggattttctgggttggtccatttgttggagcacttgcagcagctatatatcatcagtacatccttagagcagcagctatcaaagctttgggatccttccgcagcaaccccaccaactaaaaaaaatcaacccaaatagctttgtctccacttcactctttttctattttctccatttgttcgtttgtgtgtatgagaagattattatgaatgatgaatgatgatgaccctttccttttatcana

SEQ ID NO: 192051 - DNA, 492 bp, Gossypium hirsutum
ctatttttctctgcgagaagagaaatacgatggagggtggcatatcccatataacctggaactgaagcgatggaagggattgagcagtggaaggatcaattagagcagttgaagattcaattggagccatggaagattcaactggagcagtggttgcatcaagcaattgaatatttggatcaaatacccccaattcaactctatgctgctattgctgacttgttcatatctaccctcttgcttttctccatccgctcgttcaagcgcactaaatcaaataccatagtactcacaggccttagtgggagcggtaaaacagatcttttctatgtgcttcgtgatggttcctcacatcagggtactgtcacatccatggaaccaaatgagggcactgtcgtgctaaactccgaaagtgataagaagggcaaaattaagccgggtcatcttgttgatgttcctggtcattctcgtcttcgggccaaactggacgaa

SEQ ID NO: 192052 - DNA, 424 bp, Gossypium hirsutum
atcatatttaacgaaacacccttcgagttgcaacacgccacgcgtagagtcaaggcaaagagtgccgagttgactgacggctttcgccacacagcggccacaatcaccgctgttgaggttaccacggcactggaataggccgtagacagtgtcctgattgctggctcctggaagggtaaagttactgtaagaggtgtacatggctgagttgaccagggaagtgagtatggagttgacgttggactcataaggtgagccagacgtgtatttaagctgcgaacagccaccgaaaacgaaggaatcggtggctgaatctgatggtgttatgaagaaacaccatacagcgagaagaagaagaaacagcgccgccattttggtagctaaagccatgggggtgtgtgagaaaaagaagggtttgaaaaag

SEQ ID NO: 192053 - DNA, 593 bp, Gossypium hirsutum
  unsure (1)..(593): unsure at all n locations
ggtttatttattcctacttatttccaacagtaccgacccgagtcaattgggatgctgccaagttattttgttccgtatgcagctgcatcagatggaccagtccacaccattaatgaacaacttgatttttctataaatgcactcttgtctatgagcatggtggttacactcttggtagcatttgtactcgacaacacagttccaggcagccgggacgaacgaggggtgtacatttggtcatgtgctgaagatgtcgcaactgatccatccttgcaattggattactctctgccaggaaaattttcctcactttgttgtcgttctagctgtttgcgggcataatactcagcagaaggtagcttgttcttcaacttgaagtttctttccaaagaggtaagttttgttacggaagggcacttcctcaatagtacgcataaccaagcgcgaagatggtttggctaagtgagagagatacaagtacatgataattcttttgcaacaatagaattagtaatagcatctttgtaactgattgtttctacttgaaaagaaaggtatattcttttaatgaaatgttttcctgtnnnanaaaa

SEQ ID NO: 192054 - DNA, 895 bp, Gossypium hirsutum
  unsure (1)..(895): unsure at all n locations
gccgggattnccgggccgccgagcgtcgttgagttactcattcctaacgaaattatcgagtatttttttcacaaacccataaaattgtctaagttatggcggaggaagtgaagaagcaggctgaagctgaaacgacggcggctccaccgccggcagtggaggttccaaaagctgaatctgaggaaaaaactgtatctccaccgccagcagaggagaaacctgaagagtccaaagctcttgttgtagttgagaaggctccagagcctgaaccaaagaaaatctcaggaggatcacatgatagagatattgcccttgcagaggttgaaaaggcaaaaaggttgtcattcatcaaggcatgggaagaaagtgaaaagaccaaagcagagaataagtcccagaaaaagctctctgctattgtagcatgggagaacagcaagaaagcatctctggaagcaaaactgaaaaaaattgaggaacaattggaaaagaagaaagcagaatatgcagagaaaatgaaaaacaaggtagctttgcttcacaagggaagcagaagaaaagagggcaatggttgaagccaaacgaggagaagaggttctcaaggcggaggaaatggctgcaaaataccgtgcaaccggacaaactccaaaaaaggtccttgggtgtttctgaagttcaaaagcttggggtctgaggttgaagcaaatgtgaattttgactggtgttgtttgaagcttcccgtttttcatctgtatatctcttggtttctatgtttgttttgtgtgtaaacagtaacatcacaaatatttaatctaccatcgtatttgttgattgatatagttttcgttttggttcttttagacacaagttgngaggttntccatctggacttattaaa

SEQ ID NO: 192055 - DNA, 483 bp, Gossypium hirsutum
aaatattatagagataattgaaaattttctagacttatccattaccaaattattatcatttttctttttcctttcacaaattgtacacctataagctttaattatggcggaggaaacgaagaaggaggttgcggctgaaacgcccgtggctccgacgccggcagtggaagctccaacgccggtagcggaggatctcaaagctgattccaagaaaacaaccgtagctccaccgccagctgaggaaaaatccgatgaatcgaaggctcttgccgtcgttgagaaagcccctgagccagcaccaaagaacagttcaactggatcacatgatagagatgttgctcttgcggatcttgaaaaagaaaaaaagttgtcattcattaaggcatgggaagatagtgaaaaaaccaaagctgagaacaaggcccagaaaaagctctctgctattgtagcatgggagaacagcaagaaagcagctcttgaagc

SEQ ID NO: 192056 - DNA, 397 bp, Gossypium hirsutum
atagagctttccacacccgcgggagaggtcccccgggacctcctcggggctgctataactatgtccctgcctcatcacgcgccaccaccgccaccagaaaaagcagtgcaggtcctggagtcacccccaccgatgatgacgatgacgccatctcagctaccggcgctttataagcagcgctcgttgtcgccagacattttccgcgacgaggcatggcttagaaggaaagggaacagcaagaacagagggagcaagagcgtgacggacgaagaccttgatgaactcaaggcttgtattgagttggggttcgggttcgagtttgactcacccgaggtggatcaacgtttgtccgacactttgcctgctcttggcctctactatgctgttaacaagaact

SEQ ID NO: 192057 - DNA, 443 bp, Gossypium hirsutum
  unsure (1)..(443): unsure at all n locations
tttttgtttttttttttttgnngataaaaaaaacaccggacacattattcttcatttctaggaacctcatacagcacaatacatagtaaagaaaaaaggtcgtttatgtctctcaaattagaagtcgaaatttcaaataatttagggggtcacaaaatgattcaactgatttacctttgttgagtgaaactgtgaccgcaagattggctgagccgagctcctctgttttccggtggtagtcattttcatcctaacattaatcaaagccgaatagattgcgaaagatacagcgagttcaatacacaagtgagtctacaagcaggattcgaaaacgaacataatttgcatcatactgtgttgtttctagggaacattcatgacctggatggactgcaacatgtctgagacggcaactaaaaggtcgccatatttgatcattcccc

SEQ ID NO: 192058 - DNA, 611 bp, Gossypium hirsutum
  unsure (1)..(611): unsure at all n locations
acgggcattatcttcaatcggtgaatataaaagggcagaggatgcacatgtgaaatcaatccaacttgaccgaagttttgttgaggcctgggctcatcttacccagttctatcaagatctagcaaactctaaaaaggcttttgattgccttcaacaagttatacaaattgatccaaggtatgctaaagcatatcacttacgtgggttactacttcatgggatgggggagcacaggaaggctattaaggatttatcagtgggatggagcattgaggactcggatattgagtgcttgtacttacgagcttcatgctatcatgctattggagaatatgcagatgcggtcaaggactatgatgctgccctagatgttgaacttgactcgatggaaaagtttgtgcttcaatgtttggccttctatcagaaagagattgctttatatacagcttccaaagtcaacagtgagttttcttggtttgatattgatggagatatagatccactgttcaaggagtactggtgcaaaagatcgcaccccaagaatgtatgtgagaaggttttcagacagcctccattgcgtgattctctgaagaagggaaaagctanaaaac

SEQ ID NO: 192059 - DNA, 475 bp, Gossypium hirsutum
tggcaaatgatgaaaataagattaaataaggataataagtttgagcatctgcctgtgagttagtatatgcacccggcacaccctgcattcatggccatggatcacgaggtatgagcaattcggacaactaatcatggacttcttagttaagaagtaaggaagaatatatggttttttgttgtatgtcctgtcaagtttgttgaaaccgtatgttagttctgtggtggctaatggaatgagtttccgtccatcgttctcacttgcatacgatatcagagcttgaatatgactcgacgtttcttggagtcaagtctggtaaacactgaatcaattgtcagattcaagccattcatatgtttccaactcttcgaaagtgtcaatatctattaaaaccctggccttgaaatgtatgaatgattaacttttgctgtgattaaacagtatttttattgcaatacatgcttgttttttattt

SEQ ID NO: 192060 - DNA, 1415 bp, Gossypium hirsutum
  unsure (1)..(1415): unsure at all n locations
ccctctcgcgtccccccttcttttctttcctcctagcccaaaaaaaaaaaaccctctttcctttctctcgttctttttcccgttcaatcatgtcttgcttcattagcaaatatgccgatgagttggctaaaaacgctgcttacattggaacccctggaaagggtatccttgctgctgatgaatccactggcaccatcggcaagcgtctttcaagcattaatgtagagaatgttgaagataacaggcgtgctctccgtgagctcctattcacaactccaggagctcttcagtacctcagtggtgttattctctttgaggaaaccctttatcaaaaaaccgcttcgggcaagcccttcgttgatgttttgaaggaaggtggtgtcctccctggcatcaaggtcgacaagggtaccgttgagcttaacggaaccaatggcgaaactttcacccagggtctagatggccttgcacagcgatgccagaagtactatgaagctggtgcccgctttgctaaatggcgtgctgtccttaagattagtgctaatgagccaaccgagcttgcaatccaagaaaatgccaacgggctagctatgtatgctgccatctgccagcaatgtggccttgtccccattgttgagcctgaaattcttgttgacggatcacatgacattaaaaagtgtgctgcggtgacagagcgtgttcttgctgcttgctacaaggctttgaatgatcaccatgtcatgctagaaggtactcttttgaagcctaacatggtgacccctggttccgactccccgaaggttgccccagaggttattgctgagtacactgtccgtgccttgcagcgtaccgtccctgctgcagtccctgctattgtgttcttgtctggtgggcaaagtgaggaggaggctacccttaaccttaatgccatgaacaagctccagaccaagaaaccatggtcactctcattctcatttggacgtgcccttcagcagagcactctcaaggcctgggctggaaaggaggaaaacgtgaagaaagcacaagatgctttccttgttaggtgcaaggctaactcggaggccaccttgggtacatacaagggtgatgcaaagattagtgagggtgctgcagagagccttcatgttaaggactacaaatactaagaatttagtcttgtggtctgtgtatcaaagaaatttctggattgagaaantttgggtttcgtnnctntcatggaatttagtgtgaaatcgaccgttttttcatggaaattagtgtaaatcncataaataacctggggggctagtttngctgangtcatggttngttngtagtnaaacatattctgctaaaaaaaaaaaaaaattcgggggccgtccatnnctctatggtgatcatatggcgcntttaac

SEQ ID NO: 192061 - DNA, 864 bp, Gossypium hirsutum
catctttctggtcaattcaatcctccttttttctattcaaccataatgtcttgcttcattagcaaatacgccgatgagttggctaaaaacgctgcttacattggcacccctggaaagggtatccttgctgctgatgaatccaccggcaccatcggcaagcgtctttcaagcattaatgtagtaaatattgaagaaaacaggcgtgctctccgtgagctcctcttcactgctccaggagctcttcagtacctcagtggtgttattctcttcgaggaaaccctttatcaaaaaaccgcttcgggcaagcccttcgttgatgttttgaaggaaggtggtgtcctccctggcatcaaggtcgacaagggtaccgttgagcttaacggaaccaaccgcgagactttcacccagggtctggatggccttgcacacgcgatgccagaagtactatgaagctggtgctcgctttgctaaatggcgtgctgtccttaagatcagtgctaatgagccaaccgagcttgcaatccaagaaaatgccaacgggctagctatgtatgctgccatctgccagcaatgtggccttgttccaatcgtcgaacctgaaattcttgttgacggatcacatgacattcaaaagtgtgcttgggggtccatttgctaaaaatcagccgatgagaatgtactctagcttgtggaattcttgcttgaaggtactctttggaagcctaacatggagccccccggccctgacttcctttagtgtctcctacaagaacttcaatgcccatgcctgtgtgtgttccaatggagcctcttcctgcaaatctactgctacatcaacaaacagtgcatggttctttcaagaga

SEQ ID NO: 192062 - DNA, 557 bp, Gossypium hirsutum
gtttaacctaacccttctcttttaaaaaccctaacccctcttccttttcccctcgctctcttttccttgccaccaaaaaacatctttctgttcaattcaatcctcctttttctattcaaccataatgtcttgcttcattagcaaatacgccgatgagttggctaaaaacgctgcttacattggcacccctggaaagggtatccttgctgctgatgaatccaccggcaccatcggcaagcgtctttcaagcattaatgtagtaaatattgaagaaaacaggcgtgctctccgtgagctcctcttcactgctccaggagctcttcagtacctcagtggtgttattctcttcgaggaaaccctttatcaaaaaaccgcttcgggcaagcccttcgttgatgttttgaaggaaggtggtgtcctccctggcatcaaggtcgacaagggtaccgttgagcttaacggaaccaaccgcgagactttcacccagggtctggatggccttgcacagcgatgccagaagtactatgaagctggtgctcgctttgctaaatggcgta

SEQ ID NO: 192063 - DNA, 639 bp, Gossypium hirsutum
  unsure (1)..(639): unsure at all n locations
tccacgcgtccgctccccgaaggttgccccagaggttattgctgagtacactgtccgtgccttgcagcgtaccgtccctgctgcagttcccgctattgtgttcttgtctggtgggcaaagtgaggaggaggctacccttaaccttaatgccatgaacaagctccagaccaagaaaccatggtcactctctttctcatttggacgtgcccttcagcagagcactctcaaggcctgggctggaaaggaggaaaacgtgaagaaagcacaagatgctttccttgttaggtgcaaggctaactcggaggccaccttgggtacatacaagggtgatgcaaagattagtgagggtgctgcagagagccttcatgttaaggactacaaatactaagaatttagtcttgtggtctgtgtatcagagaaattttctgtattgatgatagacgtttagtgctgtttttgggggttgtccgtttcttctcatggaatttaggttgtgaaatcagactcaaataagcttggggggccttagttctcgctgagtgttcatggttttttgtttgcttcagtttaaaacaatattctcagcatatacaactgagtgtgctttgcactttttaaaaaaaaaaaaaaaaaannnnn

SEQ ID NO: 192064 - DNA, 1210 bp, Gossypium hirsutum
gttttatctctgctctgcaaaattatcaaaatacaaaatgatcagtttttcgagttcttccgaggttcccttgcttatgcctcttatggttgcctgtcttattatggcagcatcaggtagcaacttccacaacgattttgacatcacatggggagatgggcgtggtaagattgttaacaatggcgaggttctcactctctccctcgataaacaatctggttctggtttccaatccaagaatgagtatctttttggcaagattgatatgcagctcaagcttgtccctggaaactctgccggcactgtcactgcatactatctatcatcaaaaggatcaacatgggatgaaattgatttcgagttcctcgggaatctaagtggtgacccttacattcttcacacaaatgtgttcagtcaaggcaagggtaacagagaacaacaattctatctctggtttgacccaactgcagatttccatacttattcaatcctttggaacccccaacgtataatcttctctgttgacggtacacccattagagagttcaaaaacatggaatcacttggtgtcccatttcctaagaaccagccgatgagaatttactctagcttgtggaatgctgatgattgggccacaaggggtggtttggttaagaccgactggacccaagctcctttcactgcctcttacaggaacttcaatgccgatgcttgtgtgtggtccaatggagcttcttcctgcaaatcgaatgcttcaccatcttctgcatcgacaaacagtgcatggttctctcaagaaatggattcagctaagcaacaaaggttgcaatgggtgcaaaagaactacatgatatacaattactgcaatgatgctaagagatttcctcaaggtctacctccagagtgcaatatgtcttaaaagacttgacagagcctattagatcaaattgttttagagattaatattcaattatattcttttattatttgttctttattcaaaaccaggtcatgattcttttatcttttgaaatttcccatcactctgtatgtgataagttattatgaaaaagatacgaaaaattagaaggattttaatgtcctttaaagagaatggtggtgtacagtctccttcgttcctagcttttcacatagaaaaaaaaaattgttttatatccttataattattatttccatacatccatcacgt

SEQ ID NO: 192065 - DNA, 430 bp, Gossypium hirsutum
cccacgcgtccgcccacgcgtccgcataaatcctctgctctgcaaaaaaaatcgaaagtcaaaaatgagttcttcaggtttcaaatttaccttgcttgttcctcttatggttgcttgtctcatggcatcatcagccagcaatttccacaatgattttgacataacatggggagatggccgtggtaaaatcgtcaacaatggagaggttctcactctctccctcgataaagcttctggttctggtttccaatccaagaacgagtacctattcggcaagattgatatgcagctcaagcttgtccctggaaactccgctggcacagtcactgcttactatctatcttcgaaaggatcaacatgggatgaaattgatttcgagttcctcgggaatttaagtggtgacccttacattcttcacacaaatgtgttc

SEQ ID NO: 192066 - DNA, 594 bp, Gossypium hirsutum
tgaaggttgccccagatgttattgctgagtatactgtccgtgccttgcagcgaactgtccctgctgcagtcccagctattgtattcttgtctggtgggcaaagtgaggaggaggctaccctaaaccttaatgccatgaacaagctccagaccaagaaaccatggtcactctcattctcattcggacgcgcccttcagcagagcactctcaagacctgggcaggaaaagaggagaatgtgaagatggctcaagatgctttgctcgttaggtgcaaggctaactcagaggccgctttgggtacatacaagggtgatgctgagctttgtgagggtgccgcagagagccttcatgtcaaggactacaaatattaagaaattaggcttgtggtcaaatatgtgatgtttagcggagtaaattccggtattgatattagggttcttgattgtatactttttgtttttttattaaattatttcttatattattttataatttttttttttattattatacatgattttctatttttattttttttaaatattattttatttattttaattttatctatgtgtcattatatttttattttta

SEQ ID NO: 192067 - DNA, 721 bp, Gossypium hirsutum
  unsure (1)..(721): unsure at all n locations
gaaaagaaagaccaaaatgaacccccatactcttttttctaatatactgnacatgcctaggagggatccattcctgctccattcccatctattgtattcttgtctggtgggcaaagtgaggaggaggctactcttaaccttaatgccatgaacaagctccagaccaagaaaccatggtcactctcattctcatttggacgtgcccttcagcagagcactctcaaggcctgtgctggaaaggaggaaaacgtgaagaaagcacaagatgctttccttgttaggtgcaaggctaactcggaggccaccttgggtacatacaagggtgacgcaaagattagtgagggtgctgcagagagccttcatgttaaggactacaaatactaagaatttagtcttgtggtctgtgtatcagagaaattttctgtattgatgattttgggggttttccgtttcttctcatggaatttaggttgtgaaatcagaccgtttcttctcatggaatttaggttgtgaaatcagactcaaataagcttggggggccttagttctcgctgagtgttcatggttttttgtttgcttcagtttaaaacaatattttctgcatatacaactgagtgtgctttgcacttttttaattgtttgcgtttcttgattcattaatcgtaatcctactatttgagggaaaaaaaaaatgaaaaaaaaccggcacgagggggggccc

SEQ ID NO: 192068 - DNA, 1176 bp, Gossypium hirsutum
ttgccattttctgctctttcaattttaagaccaaatcacgagcgactcactctcagactcagctgagttaaaatcgctaaagcgatatggctttgcagctatgggaaacgttgaaggaggcgataacggcgtatacgggtctatctccggccacttttttcacggttctagctctgttatgggctgtttactatgtagcaacgggtctattcgggtcatccgatgatcatatccatcaacggtctacggctttcgaggagcagatggagccgctaccgccaccggttcagctcggcgagattaccgaggaggaacttaagcagtatgatgggtcggattcaaagaaaccactccttatggccatcaagggccagatctatgatgtttctcaaagcagaatgttttatggacctggtggaccttatgcgttgttcgccggaaaagatgcaagcagagctcttgcaaagatgtctttcgaagaaaaagatctgacaggtgatatttcagatctcggtccattcgaattggacgcattgcaggattgggagtacaagttcatgagcaagtacgtgaaggttggatccatcaagaagacaacggttccagtaaccgaaggggatgccagtggtgaagcctcaggagctgcagaaactgatactaagcaaactgaagatggtccatcacaaactccagttactgagtcagaggaaaaatcttctcctgcagatactaaggaggagtaacatgttcgagctttagctgtttctgtttcgaacaggtgatcactcgttgtactggacatgccggaagagacagcattgtgttgttcgaatgaatgtgaatcgtcttctatatataaactcaagttagtgcagatactgtttctagcaaaacttgcctcaataattagttccatcaaaaaaataaatgttaaaaaacctggggattcagacaaatacttattatgatgaactgatgtgtgtgggcaggaattaattactttgttcaacaaaataactagttgttgttgctactgctgctgcattataaggtattaatagaggtactgtgagtcctttttctaaaaaaaaaaaaaaaaaaaaaaaaataaaataaaaaaaaaaaaaataaaaaaataataaatgggaaataattttggggggtctattttaaagt

SEQ ID NO: 192069 - DNA, 405 bp, Gossypium hirsutum
gttgagacattattcgccgacgaagaggaaaaaaaaggggcagagcgatgggtttgcaactatgggagactttgaaggaggaaataacggcgtatacgggtctatctccggccactttcttcacgggtggtgctctgttgtgggccatttactatgtagtaacgggtctattcgggtcgtccgatgatcaccatcaacgttccagggctttcgaggagcagatggagccgctcccacctccggttcaggtaggcgaaatttccgagaaggaacttaaacagtatgatgggtcggatcccaagaagccactccttatggccatcaagggtcagatttatgatgtttctcatagcagaatgttttatggacctggtggaccttatgcattgtttgctggaaaggatg

SEQ ID NO: 192070 - DNA, 779 bp, Gossypium hirsutum
  unsure (1)..(779): unsure at all n locations
tgcagttcaactagtagatgaaaaacactgggaagatcgcttcatcattattgctgtggtaagttcacggcagaaggaaacaagtagcacctctggaatgcgtgagagtgttgagacaagttcgcttttacagcatagggcaaaggaagttgttccgaaacgcacaatacagatggaagaagccatacaaaaccgtgattttgcatcttttgcaaaattagcctgtgctgatagtaaccaattccatgcagtctgcttggatacgttgccacccatattctacatgaatgatacatctcacaggataatcagctatgttgagaagtgcaatcgttctgaaggaacccctcaggtggcatatacatttgacgctgggccgaatgcagttttaattgcacgagatagaaaggcagctgctcaattaattcagcggctgctattctacttccctccaaagtctgatactgatctggacagctaccttctcggtgataagacgatacttaaagatgctggactcgagggattgaaggatgtggaagctttgtccccacctcctgaaaatggttcagctcagaaataccctggggatgtcagttacttcatctgtacaagacctgggaaaggccctattctgctttcaaatgacaaactggctcttcttgacccagaaactggacttcccaagtaagaagtgccatactttctctccgcaacattggtaaaacttatcttcaaggagagctgaatgtctntgagctgcaaaagtgtcagatagg

SEQ ID NO: 192071 - DNA, 691 bp, Gossypium hirsutum
ctccttgatgatagaaattttctttcagtttctcacctgccaaacttgcccagcaactgtgaatctctgacacaactctgcaaaaaaactctgtacaggaagaacttttcttagtcctcttcaaaagatatttgtcccttttctcccaaaagttcctcacctttcgaatctattctcctttcgctctttctctctctcttaatcgatcatgcttcaaagcttagttccgcaatctccaatcagttccaacactactagctctaatcctagctcctccatgaagtcaaagcgcgtcgaaagagacgtctccgcagctaccggcgaagattccactgctgatgatccttctaacaagcgtcctaactactcctccggcgagaaagcagctgccgccgatgaacatgatgaaacggtgatagaaggtgagtctacagggttaaggcttttaggtctcctgctccaatgcgccgaatgcgtcgccatggataacctcgaggacgccaccgatcttttacctgaaatatcccaactctcttctccgttcggctcatctcccgaacgtgtcggcgcgtacttcgcacacgctttgcagggacgcgtggtgagttctagcttaagaaactattctcccctggataacaaatcacttaccttgactcagtcgcaaaagatcttcaatgcgctgcaatct

SEQ ID NO: 192072 - DNA, 704 bp, Gossypium hirsutum
cccacgcgttcgtccacgcgtccgcttttcttcactggcggggtagcctttcggaggtttatcagaaatggacggttctcaccttttcatcactttttcttcgttttgttcttatctagaggcgttgacttgaagtcgtcgtttgtttttttgaatctttgttccattccctatgcaagttttttgaaagattcaatcaattgtttggaatcgaaagtagtgtgtagtacaaattccgggtaatcaagtagagaggcagctttattcttgtaatctagtttgatggtgaaaagaaagcagcagcctcctccagaaatggagggtactggcggcgctgaagcggcggtggaggctgagaccggaatccaaccccaacgaaggtgtaccaaatctctgaaaacgcgagctcagatggataaacataacgagagctgtaaacgatatcgactgaaaattaaaatgaggcgtgaggaggaggaacaagagatccccaagttgaaggatgatcaccagaagacgaaaatggagcctgaggaattcaagtcttatattggggttatggggaatgagatccacctacttatgagaaagcttgaggcccaggggcaaaggcttacttctttggaaaaggtggtagaatggtttgcgttgcagacccatgtgctaggcggtcaaggttttccattctagaactgtatacaaag

SEQ ID NO: 192073 - DNA, 437 bp, Gossypium hirsutum
tttcacgagaaaacttctaaaaacatgaaactcacctcaggttcaagcgttatcatcaaccttttggcattacaatacttgcctgttctttgtctctcacaagattttgatttcttctactttgttctacagtggcctggatcatactgcgacacgaaacaaagatgttgttacccgaagacgggaaagccttccgcggattttgggatccatggactttggcctaattacaacgatggtggctacccttccaactgtgaccccaacagtcgtttcgacaaatctgagatttcaagcctgattgggagtctggaaaaggaatggcccactctttcatgtcctagcaacgatggagttaagttctggactcatgaatggctaaaacatgggacttgctcagaatctgaaacttgccaacgtgaatactttgaagctgc

SEQ ID NO: 192074 - DNA, 467 bp, Gossypium hirsutum
cagcagtcctacaaagtaagtgaatcttttcccttgagggggataaacaagaagtggaaagaggggtttcatgtaacatcaatgacaactgctgcgagtcgctggggtgtagtgatgtcgaggaacgccggattctctgaccaggttgtggagcttgattttttgtatccaagcgaaggaatacatcggcgatgggaaagtggttaccggataacatctatggctgcgaccgtagatcaagctgccttcatactgagcattccaaaacgaaaaacgatggatgaaactcaggaaactcttcgcacatctgcctttccaagcacccatgtaaagggaaaatgggcaaaaaatctctacattgcatcgatttgttatgggcggacggtctgctaactctggactgtaaattacgagagtccaaaaatgttaaaaatctgaagctgttgaggtatatttggtgttgagat

SEQ ID NO: 192075 - DNA, 634 bp, Gossypium hirsutum
aggttattgaacaaggatttcggggaacattattgacggcttatatttcatgtgaagttgtttagatgaagtgtgctttatgttttttgcctacaagatctaaatttttgtagatattgatggtgcaagaaggaatcgtggaatgttttgatttgcatgttagtagatagtaggaaatgttgctgctcggaggaattatattacgtgatgtgatgtctcatccccagcccagttttgtgccttgtaatccagaaaaccttaggacctagacaaccatggcagtgtggtgaccgcggaaacagtgatagaagaaagcaagaaagttgaaacttttattattatataaactaagtagagatggatatatatgaattgtgagtttgattggagcaatatttcctttgcgtgaactggattgggctggagtgagatgtaaggttatggatggttttaagtggtgatggtggtaagacttattttgcttgtacaaatatgagttcactgtaatatgctatgaattgaaggtatcaacattcatatgatggatggatgcttattgcttattagtaaatctgttgtgtttgggttcaaaaaactggtttccgttcttcaaaagaaaaaaattattggtttc

SEQ ID NO: 192076 - DNA, 410 bp, Gossypium hirsutum
ttattttaatagtttttttttttttatgagattcatgaaattctatgtcataatccatatgttatacagttttgccacatcaaaaagttagaacattgtaatgacataccatcccaaatattacaaacagaaaaagttacgaaaatgtcatcaacaaaaccataatttttaatggtcagcaagaaatcttctgacccattccaaccgcacatcagaaggtaaactaaagaaaacgagcatttgagttggatgatctggaattttactcaatgctcgaaaccgctcatccactgttaaaccttctatttcacataaggttggatataagtttgtagctttttcttggatgatctggaattcttctgacttttgttgaactaccacatcggaggcaatattcctactgattt

SEQ ID NO: 192077 - DNA, 832 bp, Gossypium hirsutum
gagagaataagtaaacaaaaagctaaaacctggggacggcaacactcgcaagagagagatctgtttgaacaaagagaaaaaaaaatgatgtccggaggttatacaagcattgataatcagaaagtttctggatctgttcctgcggtttcagatcccagtcatgtcgccgttaaatttacagattcgaaccttcaaacgtttcctccatcgggtgcacaagggaagatctctggtggaactcaacctcctcatgatgctgatgatacattttcaaaacctgctggtggatctcaacctggatctggtgaaccacaagggagcggctggtttcgtacattcaccatcgctgcatacaagccatacttcgatgttgacacttctgacatcattgatagacttaaggagtcactctttccatttagaggaacatttacagagaaaacggctaccaaccctgatttatatggaccattctggatatgcaccactcttatatttgtagcagcatctattggaacttttgtgacttacatagcacacaagctcaagaaaaaagaatgggattatgacataaatctagtgacttggtctgctggtgtgttctatggctatgtcactgtggttcctcttatcttgtatgttattccccagttactttccaccaccaccaggccttttcaacctttttggtctgttatgaatacccataattgttctttatcccacaattttgtctatccgtggttcccctgggaattttccaaatgggttaattggccggtgtacctgggtccatgttcacaactttggtggcacttattcctcaagctct

SEQ ID NO: 192078 - DNA, 554 bp, Gossypium hirsutum
gaaaaggggaaaaaatcgaatctctccggtactaaccataccttttaccttaccagatatcatagttgacgccaaaagaaaagaagaaaaagagagaagaaggctttattaacagcgcgaaagtatgtatttccctttttcattttgagtgatttaattaaacggttgaggagccgagaatctgcaaaagcttcctctcatacgcaacaacaggacgcctttttccacttggatcgaacggccgtgtcgtttattttaattgagtggttatggcggagccatcttcgtctttatcgtcttccaaggacgagctgtttcagctcatcaagcgtcttggaacttatctcgccctcaagatgtcaaatcttttctcgatctctctccaaaaactggatccgcgatctgttggggctattgcagggcttgctgttgcaattatccttacctataggttgatgagatcacctgcagtacccccaagaaggcaaccaaaacgtcaagctccaacaactagtagctcttctatcagtacccagtcaaatgcaacattgatg

SEQ ID NO: 192079 - DNA, 554 bp, Gossypium hirsutum
ggtggataagactacctttcatggcaaagaggggcgaggctaccaaggaaggtcttggattgcacctcctaaggatgcaaaagcaacgaatgatcattgttatataccaaagagattagtacacacttggagtgggcacacaaaaggtgtttcagctagtcggttcttccccgaatatgggcacttaattctctctgcagggatggatactaaagtgaagatatgggatgtgtttaattcaggaaagtgtatgaggacatacatgggtcattctaaggcagtaagagatatttcattttgtaatgatggcactaaatttttgactgctggatatgacaagaacatcaagtactgggatactgaaaccgggcaggttatttctactttctcaactgggaaggttccgtatgtagttaagcttaaccctgatgaagataagcagaatattcttttagcgggtatgagtgataagaagattgttcagtgggatattaataccggacatattacacaagagtatgatcagcatttgtgggcagtgaataccattacat

SEQ ID NO: 192080 - DNA, 461 bp, Gossypium hirsutum
tttcagaacaagaagtagaataagaatggataacagcgagggcaacaattcccccagcttgatctctcgtgagaagttgggagaggtggcaacctgggtcagcgccactgtggtctccgcctttttctcctctctcgagcgcttctcctgcgttaacctctccaccaacgaccctgacgatgacgacaatcccgacgaggccaaggaccgccctctcacctactcctgaatatctctctcggtacttgccacgtcatagactctcttgctttctcttgatttagggtctttgtatacagaaccaagaaaaaagtattaaggaaactttaaatgctctctatatgtgttggtcctcctgattgaaaagggaactcttgtgtaataaaggcctttttttttttggatatttaatcatctaagtctgttggtgctgtgttttctcaaaagtcacaagtcaaaac

SEQ ID NO: 192081 - DNA, 621 bp, Gossypium hirsutum
atgattttagtgatgatgaggagttacagtctccaattgatgaagtggacccttttgttttcggtgtggatacagtcaaagttttgcaagtatcggatcctatgaggttccagaaccttacacagacactggattttcattatcaagctcttgcgaacggtgttgctcagcatgctgaacagaggagagcagagattggaaaggagaaaatggagaaggcatctgctgccactgttgcatcatgagttgagttttggattaaaatttgagtttcattcatttagaagtggtttgatgaaagtctcatttcatttacagcattcattggttcatatggtcgtagagttgattgaacctcataaggttgaggttcaagtgcacatagtttgtgattttggtttggtgagactggcagattcttgggcagaagatgcccgtctcaaccactttcttgttcatttcttttcaccagccgctcttttccattatttcttcacgttttgtcaatttattggttaaggttttcccagatttgttgtttctgggaggccgatcttctttcagggagtgtcaattgcgtagtatatcagatggcttttctttttcattcttctttttgat

SEQ ID NO: 192082 - DNA, 830 bp, Gossypium hirsutum
ttcattttatttctatttctatcatttatttgcttctatagtggtttctcaaaatccgcgaacatagattcggatcgtaagaggaagaaatcttcgatctcatccgcagatcgaacggcggcgaaggagggcgaaaaacataaagataaagctcccacttcctccaccaatcaccaccaccaccaccaccaccacaaaaagaagagcaagatgtcttcttcatcgcccgccaatcaagtgagggcttctcacatcctcatcaagcaccaaggctcccgccgtaaggcctcttggaaggatcctgaaggtcgcgtaatctccaacactacccgagatgccgccgtctcacagctcaaagccctccgtgacgacatcgcttctggcaacgctaagttcggtgaggttgcctctcgccactccgattgcagctccgctaaacgcggcggggatctcggtccttttggtcgaggccagatgcaaaagccatttgaggatgcaacatatagccttaagattggtgagataagtgacatcgtggatactgatagcggagttcacatcattatgagaacaggttgattattggtgataatacctggatatgttggcaattagttcggtgtgttggataactgtattcaagaatgttctgaaattaatgtcgatactgcctatggtcaatttgagtgataatttacacttggcaatgacattttaaatgcttggtataagttgtttggcgagggcatttaatttccgaaccattttggttgtgatttgagattatttgcttgtttataataaaaggttttggttataatttatctctc

SEQ ID NO: 192083 - DNA, 732 bp, Gossypium hirsutum
cttaaaaacagcaaagaagatgtcatcatcaacggcggccaatcaagtgagggcatctcacatactcatcaatcaccaaggctctcgtcgtaaggcttcttggaaggatccagaaggtcgcgtcatctccaccaccacccgagacgccgctgtctcacagcttaaacttctcggcgacgacatcgtttccaacaaggctaagttcgacgaggttgcctctcgctactcggattgcagctccgctaaacgtggcggtgatctcggctgcaaggagtgtgcctcaactcagttcttattgttaattatctgtgacctttagttggtttataccagcattacgggacataatgcaaactaaaaaccttatacaaactttttggtggaggtccttttggtcgaggccagatgcaaaagccatttgaggatgcaacatataatcttaacattggcgagataagtgacattgtggataccgatagcggtgttcacatcataatgcgaactggttaatcattattgatggagcctggatatcgtgagcaattagttcagtcttctcggaaaattctatcgaagaacattctgaaatcacttctgataatgcctatggctaatttcaatggcttaatttttggacccctttggttttggtgtgaaattgacttgccagttataataaacaaatattgggtgaactaaatttctctggcttcttctcttctctttatctcc

SEQ ID NO: 192084 - DNA, 804 bp, Gossypium hirsutum
cccacgcgtccgtgctcaagctttgttgagactttgaactgagctttgctgaattttcgtgatcgtcgagaaagaaaattatgggaaggaaattcttcgttggcggcaattggaaatgcaatggaaccactgaggaagtgaataagattgtgagtactttgaatgctggagaggtgccttctccggatgttgttgaggttgtggttagccctccatttgtgttccttcctttggtcaaaacttcactgagacccgagttccatgtcgctgcacaaaattgttgggtcaagaaaggaggtgctttcactggtgaagttagtgcggagatgcttgtcaatttgagcattccttgggttattattggtcattctgagaggagacttattttgaaggagtcaaatgagttcgttgcggataaggttgcttatgcacttgctcaaggcttgaaggtgatagcttgtattggggaaacacttgagcaacgtgaagcaggatctactgtggcggttgttgctgaacaaactaaagcaattgcagcaaaaatatcaaactggactgatgtcgttttggcatatgagcctgtgtgggctattggaaccgggaaggttgctactccagctcaagctcaggaagtacattttgagttgaggaaatggcttcaggctaatgttagtcccgaagttgctgcatcaacccggattatttatggagggtccgtcactgctgcaaactgcaaggaactagcagctcagcctgatgttgatgggttcttggttggtggagcttcacttaagccggagttca

SEQ ID NO: 192085 - DNA, 1420 bp, Gossypium hirsutum
cccacgcgtccgagcttaaaccaggtttgagctactattcaaaagatccacaggctgctgcgaattgattaacttctcttcttgacaaggcagaaagtgttgttccgctagatttacgatcaaagacccctgtgagagttggggcaactgctggtctgagggcattaggaggcgaggcatctgataaaattttgcaatcggttagggaacttttgaaaagtagaagcacccttaaatccgaggcaaatggggtcaaaattctggacggctctcaagaaggttcttatgagtgggtgacaataaattacctactagggaatttgggaaggacatatcatgacacagttggcatagttgatcttggtggtggatctgttcaaatggcgtatgccatctccgagaatgctgcttcaagggctccaagtgtaccagctggacaggacaattatgtaaatgaaatgtatctcaagggatcaaaatattacctctatgtacacagttatttgcactatggcttactggcagctcgagcagaaattttgaaggccactgaagattctggcaacccttgcatcttggagggttttgatggtacttataaatatggaggagaagaatataaagcatcggcgccgtcatctggttcaagcatggaagaatgcaggagggtgactctcaaggctcttaaagtaaatgattcatgcacgcatatgaagtgcacatttggtggcatatggaacggcggaggtggagatggacagaagaatctgtttgttgcttcatttttctttgacagggctgccgaggctggttttattaaagccagtgatcctgttgcaaaagttcagccccattcgtttgcagatgctgctaaacgtgcttgtcaaaccaagtatgcagatgctaaagcaatatataaagatttgggcgagagtaacctggcatatatatgcatggatctggtttaccaatacacgttgctcctccaaggaatccggccttgatccgtaccaagatttaccttcggtgaagaaagtgaaataccgaaattcccttgttgaagctgcttggccgctaggcagtgcgattgaagctgtatcatcaatgaagtaaaaattccagaactactcagaaaactttaaattagtcactgaaaaattgcatgacttgggttaatattggcatttgctaatcgaatacactgtaatttgcagaacgactcagaaattggattttttggtgcggaataatcggaagagaaaacagtttgatttaatcttcttcattggtaatttacaattttccccccctgatttttataatttttgtgagagttaattgaattagttcatttagtttgtaaactgattatgttatgttaccaatgtgtttgagttccctaattaccttttgttaggtt

SEQ ID NO: 192086 - DNA, 1220 bp, Gossypium hirsutum
gtcaaaatatcctcaacccacaaagacaccccagcgatgactttttcatcaggttgcttaaactccaaaacaattcccttctctccaacatcacactctctaaacacactctcctatccaacatccacatcatttaagtagtaacataaagaaagcaagctccacacactactattttcctgttcccacaccaaaacaaaacactttcttctttcttttttttctcctccccaccatgactgacagagtttacccttcatccaaacaacccacaaatggcaccgcccccaccaccacctccgccgccgctgccgccaacccttcgtttcccgccactaaatctcaactctatggagcctctcgccctctataccgtccgcaaaccaagcgccaccgttaccgccgctcatgctgttgttcttgctgcctttggaccacaatacttatccttgttcttatcctcctagtcgccatagctggtgctatcttatacgtcctttaccgtccccaccgacctactttcacgatctcctccctcaaggtctcgacccttaatggaacctcagcttccaagggcatcaccaacatccaccttaacgtcaccgccaaaaacccgaacaaaaagctcgtctacatttacgacccaatcaccatatctcttatcacaaacgacgagatcgatataggggagggttccttgggctccttcgtgcatggcaataaaaacacgactcttttgaaagctgccataacaagtagcaacaggcgggaacttgatgaggcttcagctggcaagttaaggagcggtttgaagagcaagaagggtctgccattaaagataaagctggacactaaagtgaaagcaaagatgggagcactgaagacccccaaggttgggattagggttgtttgtgaagggattaaagctactgctcccaaggggaaatcagcaacaatagcttcaacttctaatgcaaagtgtaaggttgatttgaggctcaagatctggaaatggactttatgattatgagagctcaggattagaaagaatgaagaagaaaaaggtttgctttaagaaatttgggtttttcattttttgggtgattattatatcttgtgtaaatttggcgattgattgtaatgattgggtatagaaaacagtgatttatattataattattatttattattttttagtttttattttgctctttagtttt

SEQ ID NO: 192087 - DNA, 438 bp, Gossypium hirsutum
atatccccccccctttttttttttttttttttttttattttttttttttttagaagctgaaatctatttatatatattattataaatgacttgtaattctgcagtatcagtcaaaacaacaatatcatgaattacagaatattttgctaccaattctcacttcaaacattcaatggcagagcagaaatctgtagaactattaactatacacaacaaacaagacattgcgtacctgctcttttgcttgtgtcagtgattccttgcgtttgaagcaaaagatataataaaccgtctgaagtaagagattgtaaagagtcatcgaaatcagccactccatcattgctcgaaggtagtcattgtccacgcagggggtgacaatggcggaacagctgctgcttcatcagttgcattagtttcaatttccagcaccttcctagc

SEQ ID NO: 192088 - DNA, 775 bp, Gossypium hirsutum
  unsure (1)..(775): unsure at all n locations
gtacagatcccttttgcataatgaacaagaagcatgactcacaagcacttatctatgcaaggaagtggaaacatgtgatggcactgcggcaagctcctaaccgtttctccgagntgaaagtcctgaaggcaaactgtacaggagattttctccccagaagcatcgacattgttatttntagtgaatatgatttttgggaattttttaaccaaattttcagcccatccctttaacaccaccggggtcgaagatgttctgaacctccttcaaaaggtgtttcagaagctcccatctgactttggactgcactcagcatcgccggaccaattcgttctcggacaagcctcccacttagaaggcttgcaatgacatcaatcaaatacaacaagcatccgatcccggattcatctgattgccaaagaacaagagaagattcgaaaacttcgattgaaaaaacagctccagatatagccccaactgcggcgcctcgaacgaacccactctcggtctcttgtcctatcaaagcccccgtcatggcacctaacagggtgcccactaatgcaaagaagaaggttaagatcgcagagaaaatgttgccaataatggcggaaaaggcgaaattgcaaaaatctttaagcttttcaaggaaatccccaaagaaggaaggtggaggcctcgaaaaacgaatttggtattcatgaaattccattctttttctctcttttttttttttcacttcccttggatttgggtgattgttggaaaatgagaccgg

SEQ ID NO: 192089 - DNA, 674 bp, Gossypium hirsutum
ggaatttcagatatgattgatgatactgtgaacacaatgtgtcacagacatgcttgagtggccacatagaattgttgttccaattggtggtataccagttgatacaagtgaattagagctgaaaccggagggaaagctgacagttacagtagtcaaagctaatgatttgaagaacatggaaatgattggaaagtctgatccttatgtggttgtatacattcgacctttgttcaaggttaaaacaaaagtcatcgacaacaacctgaatcccgtttggaatcaaacttttgagttgattgccgaagatagagagacacaggcactcactgtagaggttttcgaccaggacattgggcaagacaagaggttgggaattgcaaaattccgtttgattgaactggaaccggagacaccaaaggaggttaatctgaaccttctgtcctcactcgatacacttaaaataaaagataacaaggacaggggaagttgtaccattaagcttttgtaccatcaatttaacaaggaggaacagttgattgctttggaagaagagaagaggatcctcgaagaaaggaagagattgaaagaagccggagttatcggaagcacaatggacgcacttgacggagcggcttcactggttggatctggtgttggtatggttggtaccggta

SEQ ID NO: 192090 - DNA, 954 bp, Gossypium hirsutum
cccacgcgtccgcccacgcgtccggctatatccaaatgtccaagacttggtgaaaataacgcttcttgaggctacagatcatattttgaacatgtttgacaaaagaatcacaaatttcgcggaacagaaatttggaagagatggcattgatgtgaaattggggtcaatggtcaccggcataaatgaaaatgaaatatctacaaaagttagaggtaatggcgaaaaaacttcaacgccatatggaatggctctctggtcaactggcattggacctcgtcctctcataaaggagttcatgaagcaaattggtcagggtaataggcgtgcttttagcaacggatgaatggctgcgagttgagggatttggtaacatttatgcacttggcgactgtgctactgttaaccagcggaaagtcatggaagatatatcagaaatatttagagaggcagacaaggacaactcgggaacacttacagtgaaagaatttcaagagatcattgatgatatctgtgaaagataccctcaagtggagctttatctgaagaacaagcaggtgcgtaacatggttgatcttttgaaggaagccaaaggggacgctgcaaaggaatccatggagctgaatattgaagaatttaaatcagctctttctgaggtcgattctcagatgaagaatcttccagcaacagcacaggttgcaaatcagcaaggcgcctatcttgcgaagtgcttcaaccgtatggaggagtgcgaaaagaaccctgaacgtccccctaggttcaggggaacaggtcgtcatcgattccatcccttcaggtacaggcacttgggacaatttgctcctttgggaggggaacaaacagctgcacaacttccaggtgattgggtgtctatcggacacagtgagcaatggctctggtattctgtctacgcaagcaagcaagtcaattggcgca

SEQ ID NO: 192091 - DNA, 603 bp, Gossypium hirsutum
tttttgtttttttaaaaaattattttgtaatcttttgaatagtaaaactagctatccaactcagctgaattgtttgatacatgaatttaatagccaataaacgagtctaatcaaacaaacatgagcagttcattttcttttttaaatcgcgaatcgattttgagcttcgaaaccgaaaattgatcgagcgtgagccaaactcaagtctcaaactttgaatgaaaagctcatagtttcatacagtttgaatacagttcggctcaaccccagataacatccttaatactaaaaactaacgtgcatattttggcatttcaataaattctaagatagttgcctctagaagattacgttcaacaaataagacagcaaccagtttaggaagttctttagagctgacaaaccttgcattgtgtgtaaagatatccgctttagtccttgtatttcattgcttctttctcaaaaccaatagtcggaaactgttttgcgtactcctccacttcttgtcggagcttagcgatttcggtttgaaagtatgtatccgactgtaaggttgctacaaaatccttcaactttgttccttccgtcttggccttgattttc

SEQ ID NO: 192092 - DNA, 684 bp, Gossypium hirsutum
  unsure (1)..(684): unsure at all n locations
ctcagattttcgatatgctcttagtattataccacaatcccctgttcttttttctggaactgtgcgattaaacttggatccatttaatgagcacaatgatgatgacctttggcaggctttagaaagggcacatttgaaggatgtgatcttgaggaacactttccgtctggatgcagaggttttggagggtggggagaattttagtgttgggcagagaccagtattgtgtcttgcccgagcattgttgcgaaggtcaaagattctggttcttgatgaagcaactgcggcagtggatgttaagactgatgcttttatccagaaaaccattcgtgaagaattcaaatcttgcaccatgctgattattgctcacagactaaataccatcatcgactgtgaccggattcttgtacttgtgctggtcaggttctagaaccaatactccaaggaactgctatttacagagaagcgctttctcaaatggtcatgtacaggctgcaatgcgatcttactagtattctgaagtgagaaaaggttataggacacccagcgttgatgtcganagaggcagctatcatgatgtgtgcatcgnctgcgagctactttcntagactaaactgactgatagaaatctagatacttgatataacgaccactagtagcccaagaatggtactttcagntctg

SEQ ID NO: 192093 - DNA, 1451 bp, Gossypium hirsutum
tggactcgtggggcacggccaccataaaataagaaaattaagaggccggatttcaaaaccctttctctttaaaatatagagaaaagagggaccaaagtgaaaatcgaaatatagatttgattttcaatctgcattttcagggtgtggaacaatgggtgcaggtggcagaatgtcggttcctccaagtcaaaggaaacaagaatcgggctcaatgaaaagagtccctatatctaaaccaccatttactctcagtgaaataaaaaaagccatcccaccacactgtttccaacgctcacttatccgttcattttcctatctcgtttacgacttcattttagtctctatcttttactacgtagccaccacttacttccacaacctccctcagccactatctttcgtcgcctggccaatttattgggctcttcaaggttcagtcctcactggcgtttgggttatcgcccatgaatgcggtcaccatgcttttagcgattaccaatggattgatgacactgtcggtctcatcctccattcatcccttcttgtcccgtacttttcgtggaaatatagtcaccgtcgtcaccattccaacactggttcccttgaacgcgacgaagtatttgttccgaagaaacggagcagcattagatggtgggctaaatacctcaacaatccaccaggtcgtttcgtcacaatcaccattcagctcactctcggatggcctctttacttagcattcaatgtagcaggtagaccttacgaaggattcgcttgtcactacaacccatacggtcctatctacaacgaccgtgaacgacttcaaatctacatttccgacgtcggtgtccttgctgtcacctatgggctgtaccgtctcgtgttagccaaaggtctagcttgggtcatttgtgtttacggtgtcccattgctcatcgttaatgcattcctcgtcatgatcacatacttgcaacacactcaccctgcattaccacactacgactcatccgaatgggattggttacgtggagccctcgcgacggtcgaccgagattatgggatattaaacaaggttttccataacataactgatactcatatcgctcatcatttgttttcgacaatgccgcattaccacgcaatggaagcaacaaaggcaataaagccaatattgggcgagtattattcatttgatggtacaccagtttataaagcgatatttagagaggcaaaggagtgtatttacgttgaaccagacgaaggtgagcagagcagcaaaggtgtattttggtttagaaataagatctaattttgccgatagcgttgcggttgccgatggtgatgcctttaagaatgtgttaaatttgttacattattgttaaggatttggggttacttctattttagatgcttttgaatttggacttcgatggttctcatcgactttgttgatc

SEQ ID NO: 192094 - DNA, 462 bp, Gossypium hirsutum
gtttgttttttttttttaagataacttggtttgtcaaattctcattcaagactgccaatctgatcaaattctttgtgtaccacgaactcatctgtcagctattgttcccttcaatcggaatctattcattatttggataaaacaaattcattgatcaaatttcgttatcatctgtttcattctattcgaacctttgatccattcaacagtcaacttgtgatgcttctttttcttggattgacacagtcagacttacccatgtcttccaatcaaatatatattcacttactacttggctcagcactatccactgccgcacaaatcatgaattctctctcattgccccatgtaggaattgctaattgttcaaattctacatcctggttcttaaacaagcaaagaataaagctttcttatcatagttccccttttgtcaaatacaacaaaacccggacgcgtggg

SEQ ID NO: 192095 - DNA, 713 bp, Gossypium hirsutum
gagtaaagtggaggagttgacacgcagagaataagctcgcaagaagactttgcatgagaaggagtcccaattaaatttgcttgaaggtgtcggagatgtgggtcaggcagctggtttgatctccgaaatcgtggaggttgaacctgtgtgtttgtgtagataaacaagcgggcaatagcagggacctctacagcatcccaagttcgtagtttgcgtaaagtcaatactgatcaagttgctattcctattgatgcggatgatggcaacaatagtaggttagaagatgaagatgaagataaagttcatggtttcaaatcacttaccacatcaagagttgttccaaggtttacgagaccagtatccgacatgatagatggcttatgggtttcttgtgatcgggcactcatgcgacaacctgccttacggcttgccattatggtctattgggctatattgcattcactgttagcagcttttgtattttgacgagccaaacctggtagcggccattttctctgatggttatctactagtttgtgtcgaaaggagtggcaaccatgaatgcgtacttggtccataatcattttattattatcattattcttttatttttcctttgtaaaacatggtccattaattgattatttcgataaaccaggcaactttgatttgccctttttatttgtatgcatctcaagttgctcggttatgtc

SEQ ID NO: 192096 - DNA, 912 bp, Gossypium hirsutum
gttttactttgacaccaatccttatttcaagaatggtgggctgactaagacggatctcatgattgatgaagatgaacctattcttgagaaagcaattgggactgaaattgaatggtatcctggaaaatgcttaacgcaaaagcttcttaaaaagaagcctaagaagggttcaaagaatgccaagccaatcactaaaacagaggagtgtgaaagtttcttcaacttcttcaatcctcctcaagttcctgaggatgatgaagacattgatgaagatactgctgaggagctacaaaatcaaatggaacaagattatgacatcggatcaacaattcgagacaagattattccacatgctgtgtcatggtttacaggagaagctatccagggagatgagcttgatatagatgacgatgaagaagatgacgatgatgatgatgaggaggaggaagaggatgatgaggaagaggatgaggatgctgacgatgaggatgaggatgatgacgaaggaagtaagaccaaaaagaagtcggctcataagaagagtggtaaagcagtaggggatgggcagcaaggtgagaggcctccggaatgcaagcagcagtagaaattaattgctgctgtcggagtgtggtttataagattttgattggaagaagcgggagaaagggagggtttgcagttttggtggttatttatttctacagttttatgttattgctatgagtatgattggtttctacagtcgttttatcctttttggtctgttggattggtaggatggtctggtaatggtactctaagatgttttgggattttgttttaatgtttaatgttcccagcacctcttttaagagttcttgtgatagcttgttatcaattatttaatggccggtctgattaaagttccacaag

SEQ ID NO: 192097 - DNA, 585 bp, Gossypium hirsutum
  unsure (1)..(585): unsure at all n locations
gaaaaccataaggcaattgtggagttctgtaaacgggaaggtcttgttctgctggcagatgaggtttatcaggaaaatgtctatgtacctgaaaagaaattccattcttttaagaaggtttcccggtccatgggttatggtgagaaggatatagccttagtatcttttcagtcagtctccaaaggttactacggatagtgtggaaaaaggggaggttatatggaagtaactgggtttggagctgatgtcagggagcaaatatacaaagtggcatctgtgaatctgtgttccaacatctcgggtcaaattcttgccagtcttgtcatgagtccaccaaaggttggagatgaatcctatgaatcatacagtgctgaaagagatggaatcctctcatctttagccaggcgtgcaaagacactggaagatgcattcaacaaattggaaggtgtaacatgcaacaaggcagaaggtgcaatgtatctgtttcccagaattgaccttcctgaaaaggcaatcaaagctgccgaagctgcaaaaaaagcacctgatgcatactactgccagcgcctnctcgctgctactgga

SEQ ID NO: 192098 - DNA, 749 bp, Gossypium hirsutum
  unsure (1)..(749): unsure at all n locations
gagattttctcatcaggcactggcgagtttgatgaagaagaagtctatgacaaaatcccagcagatctcaagattaatcctcagaaggcaaaaggtgttgttcatgatctcgcacggactaggttgtccaattcacttattcaagctgtggcattgctaccgcaggagaaaccgacagggagcggtttcctcgcttaatgatttgctagcttgtgacaaagctgtgccttcggagccactatcatgggaggtgcctgaggagctagctgatctgtttggtgtatacgcacaaagtaatcctgttcctgagaagttgtcccgcttgcagtatctgcttaacataagtgaggcagtggcggcagctgccaaagagatgggacatggatcagtatcagtcggagcagaggaagaaaagtttgtgttttgaatgtttgcttgaaattgtggtgtagagagccttttgtttaggaagctctgttttgaaggcttttctttttttatatgttactaagttgaaaaggagaatagtaggatcgaggtaggatggcgataatgataaaggtgtttgatcttaattgctgctttcttcttgctccatccgtgttttccttgcacttattatttttgctcaatggtattttccaaaacatgatattctctctttatatataataataacaacgaaaattctctgnnnnnnnnnnnnnnnnnnnnnnnnnnnnnnnnnnnnnnnnnnnnnnnnnnnnnnn

SEQ ID NO: 192099 - DNA, 1053 bp, Gossypium hirsutum
tttttcatctctgttttgttccaagctctgggttatggcttcccaggcgttttatcttcttgtttcaatcattgttctcttatccgccattgttgtctcaggttcgggttcggtcgggattaactacggtcgtgtagcaaacaacttaccgtcaccggaaaaagtcgtggaactattgaaatcacaaggaataaacaaagtgaagctttacgacaccgacgcgacggttttgacggcgttagcggattccggtataaccgtggtcgtcgcacttcctaatgaactactttcatccaccgctgctgatcagtcgtttgcagacaactgggttgaagcaaacataacaaagttttacccaaagacaaaaatcgaagccatagctgtcggtaacgaagtgtttgtcgatccggccaacacgaccaaatacctcgtaccggcgatgaagaacatccacgcttcgttagttaaatccaagcttgattccgccattaaaatctcttctccgatagctttcagtgctttaaaaacctcgtatccttcatcggccggttcgtttaagccggaattgattgaaccggtgattaaacccatgttggattttttgaaacaaaccgggtcttacttaatggttaatgcgtacccgttttttgcttattcggctaattcggatcagatctcacttgattatgctttgtttaaggataacccgggtgtagtagattcgggtaacgggttgaaatattctagccttttggaagctcaaatcgacgccgtttttgcagctatgtcggctattaaatacgacgacgtaaagatggttgtgaccgaaacgggttggccatcaatgggcgatgaagatgaaataggtgctagtgaatccaatgcggcgtcgtataatggtaatttagtacggaaagttttgaccggtaatgggacccctttaagacctcaagacccacttaacgtttatttatttgctttatttaatgagaataaaaaacccggtccaacttccgaaaggaattacgggttattttaccctaatgaacaaaa

SEQ ID NO: 192100 - DNA, 1121 bp, Gossypium hirsutum
acctcccacgcgtccgcccacgcgtccgaaaaaatgggagatcagttagcgaaaggagaagaattcgtgaagaaagcagagaaaaagctaaatggttggggcttgtttagttctaaatacgaagacgccgccgatttatttgataaagctgctaattgcttcaagcttgccaaatcatgggacaaagctggatcaacttatgtaaagttggcgaattgccatttgaaatcagacagcaagcatgaaacagctcaagcttatgttgatgctgctcattgttataagaaaacagctacaaaggaggctatatcttgcttgcagcaagcagtgaacttgttttgtgatattggaaggctaagcatggctgcaaggtattataaggaaattgctgaattatacgagtctgaacagaacattgagcaggccatggattattatgaaaaggctgctgatttcttccaaaatgaagatatatcaacctctgccaaccaatgcaagcagaaagttgcacaatttgctgctcagatagaacaataccagaaagccattgagatatatgaagagatagcgcggcaatcacttaccaataacttgctgaagtatggagttaaaggtcatcttcttaatgctggcatttgtcaactctgcaaaggtgatgttgtagcaatcaccaatgcgttagagcgatatcaggatctggatccaactttttctgggacgcgagagtataaattattggctgacattgcttctgctattgacgaggaagatgtctcaaagtttacggaagttgtcaaggaatttgatagcatgaccccattggattcttggaagacaacccttttacttcgagtgaaagaaaagctgaaagctaaagagctggaagaagatgatcttacctaaaagagctttgcgtcgtgagagttgcctgtgtttctcagtttttcattttaatggtgattgctttgttttatgtgtctgtgtgcaattatactccgtatactctcccttataacaattatttccggaaatgtttcacttgtttggccttaaattttatgatttacgctgatgatgattatactgctggttctgttccttgtgttactggatttcaaaaa

SEQ ID NO: 192101 - DNA, 592 bp, Gossypium hirsutum
  unsure (1)..(592): unsure at all n locations
agttaaaatatcagtgagcaacgaaccaaaggagatctcattcttccaaaactcttatctttcagaaaaaaacaatgtacggtaaagccgcaatctgtttatcattcgtcattcgcttcctgatttcatgttcaatctatgtcggcaccgttgatctcagatcatacttcttccccttacttcagtcaccccaggttccacgctcactctgtgcttccggcccccctctccgcgtttacatgtacgatctccctaggaaattccacgtcggcatgatggatcgtcggagcttcgagggaccggctcccgttacggcggataatctccctccctggccctccaactccgggataaagaagcagcacagtgtggagtattggctgatggcatcgcttctttttggcggcaacggcaatgaagacagggaagcggttagggtttcggatcccgaatccgcggagtccttttttgtgccttttttttcctcgttgagttttaatacacacggccataacatgacggatcctgaaacggaggttgatcgccgattacaggttgagttacttgaattcttgcnaaagtccaagtacta

SEQ ID NO: 192102 - DNA, 679 bp, Gossypium hirsutum
tttctacgcgtccgcccacgcgtccgatttttccttaaaatatcaaaatcatctgtatattcctataatttttgccctgaattcactaccgtccacaatatttttggtcacccctgcatttttcacagccattaataaacaggatttaaagcttggaagcagaggagcaaatcgttgaaatcagatcggaaaggcaaaggaagaaaaagagtgaaagatttgggttttgagaaaatcaattcaaaacgactggtttcactctttttttcctgccttgctgatctttttggggttcttccacaaaaagaaacaaaaaattttgggtgatctgtgttgaaaaagaaataaaatatggcgacattccaaggaactcaacaaaaatgcaatgcatgcaacaagactgtttatctggtggataagttgacggctgataatagggtttttcataaggcttgcttccgttgccaccattgcaagggtaccctcaagcttagcaactacaactcatttgaaggggtgctatactgcaggccacactatgatcaactcttcaagagaactggcagtcttgacaagagttttgaaggaacaccaaaggttgtcaaacctgaaagacatatcgatagtgagagtgcactgaaagagatgaactcatttggtggcaccagagaaaaatgtg

SEQ ID NO: 192103 - DNA, 804 bp, Gossypium hirsutum
cggaagtcagtcagtcggtcaaacaatcaaatgcctcgtcagctttagcttccacttccacctaacatttccatcttcccaatctttcctcctccatcggcccgtggtctttgacttctccggctacgccgtttacaaagagctacattcagcaatatttgtaacagatggcttcttccttccgagcattcctaaacagtccagttggcccaaaaacaactcacttttgggggcctgttgcaaattggggttttgttctcgctggattggtggatatgaataagcccccagaaatgatttctggcaacatgacatcagctatgtgtgtctattctgcattattcatgaggtttgcatggatggtacaaccacgaaactatctactgttggcgtgccatgcttcaaatgagacagtacagctctaccaactctcccgttgggcaagagctcaagggtatttgtcggagaagaaagacaaagctacatcgcagtaaagcagcagcttcagttggagctagctgcttttcgattctttccattccaagtgtctgtgagttttactgtgatccgtgaagattgtagtattctgaacctactattaaagcattcattttgactgctaaaccaataatgattgttggagtgcatcttgattgaccctataatgtgttctgattcttgattttacctgttaaaaaggtaaaattagcttagagttacaatcactgttgatttgggcatcaagtcatgcttttaataaacttggaatcgatttagcagatcacagaatgtataatttttaac

SEQ ID NO: 192104 - DNA, 1446 bp, Gossypium hirsutum
ttcttcccacgcgtccgcccacgcgtccgccggaagttctttctcggagagaatatgatgacaaaagattgatgagaatgtggcaagggagattataaatcatagatcactacgtcatccgaatataattcggttcaaagaggtggttttgactcctacacatcttgcaattgtgatggagtatgcagctggtggtgaactctttgagcgaatttgcaacgctggacgattcagcgaggatgaggctaggtatttttttcagcagttgatctcaggagttagctactgtcatgccatgcaaatatgccatcgagatctgaagttagagaataccctgttggatgggagccctgctcctcgtctgaaaatctgtgattttggttattcaaagtcatctctactgcattcaagacccaagtcaactgttggaactcccgcatatattgcaccagaagttctttctcggagagaatatgatggcaagatggctgatgtatggtcttgtggagcgactctttacgttatgttggttggtgcttacccatttgaggaccaagaggatcctaagaactttaggaaaactattagcaggataatgtcagttcaatacaaaatcccagactatgttcacatatcccaagattgcagacacctcctttctcgcatatttgttgctagcccctccaggaggatcagcatcaaagatatcaagagccatccgtggtttttgaagaacttgcccagggaactgacagaggcagctcaagctgcctactacaggaaagaaaacccgacgttctccctccaaagtgttgatgaaatcatgaaaatagttgaagaggccaaagtcgcccctcgagtatcgcggtcgatcggaggctttggctggggtggagaagaagatggggatgcaaaggaagaagatgcagaagaagaagtagaagaagacgacgaagaagatgagtacgagaaaacggtaaaagaggtacatgccagtggagaaattcacgtctcttaaggaaaaaagagagtaatatatggtttccaaacgatggagttttggtgtcttttagtgcttacatatgttcttataaatatgatgtcagttttttgctataggacctgggtgttgaataaacaacctgtaaattagtgtgttttggaccagaagtttgtgcagtctctaatatgattttgtagggtgtattggtactgattaggtaggtggaaactacagggatttgaagcctgcctagttggtaagtcgggtaaatgtaggggtctacactttttagagctaaatggaagatctgtcatctatgagccctataagtttgatttcttccatcataaaggggtatgttatgtcttgtggcgcgactccgtaaaatttaagaaattacctatgttatctttaaaaaaaatatagaaaaatagctcgagggg

SEQ ID NO: 192105 - DNA, 640 bp, Gossypium hirsutum
cggacgcgtccgcccacgcgtccgcgcatatttctttgctgctttactaactaaaaaggaaaaacattctttgtttaacgcttaagattcctttaacaacaatggctgcctcaatgtctactctaatggttgttctcgtcgctgtatgcgctctcatgggttccgccattgccgccgacgctccggctccgagccccacctctggtgccagctctatctcgccgccatttgtctctgtttccgtcgccgctgccgctatggctctgcttttcggatctagacttcggatctgaatgatgctatctctggtgttcagatgatgctctgtttttcttttatatatgtattttttttctttttgatttgattttgaatttggtttgcaattttagtagctgtggtagtggatctagggagtgattatattatatataaatttatataaatttatgagagagagagaggtagttattttatttgttgcacagattattgatggctgatgttttggatttggattattttctgtattattatggattgatgttatagcgagacattttattatttatatatattttcaatattgtttcttaaaaaaaaaaaaaccaaacaatagacaaagaaattacattaaacg

SEQ ID NO: 192106 - DNA, 413 bp, Gossypium hirsutum
gtaagtactttgatttcttaaatctgtttttcaaaggcttttgaacaataatacaatccctttcgcggcatgttgaaactggccattaccatgaaactccatacacatcaaaataactaatttctttcgcaataattaattaaaaaaaacagaaactggaaattatatttaataagttcaaatattaattttctcattcatattcagctccttcttcttcattctcctcttcttcaatcaactgttgcatcttgattctggtgatactctgataccaaatcatctcatattactctctgcttcggtaaattccatttcattcattccttcccctttataccaattcaagaaagccttccttccaaacataactgtaaattggtcccttacgcccctaaacatctcttggattg

SEQ ID NO: 192107 - DNA, 460 bp, Gossypium hirsutum
cccacgcgtccggcgttttccacctccgaagttgagagatttgtatagcagcttctcctctcaaccgccacgccaaacatgccttcacataagactttcagaatcaagaagaagctggccaagaagatgaggcagaacaggcctatcccttattggatccgcatgcgcaccgataacaccattaggtacaatgcgaagcgtaggcactggcgccgtaccaagctagggttctaagctttatgtgccttttttgtagttttgtactcacgcaaagctctgtttttttgtttatttcatgaaattttgatgtggccttgaacgtttttatatgatggttattgacgatatttagccattgtttcgactgttgtctatctaatgttttgatttcgagctttgaatttttatgaaactgaatcattatgttctttggaattaatgaaaactgttattattcagt

SEQ ID NO: 192108 - DNA, 561 bp, Gossypium hirsutum
gctgcttgagaactttagtgccgcatccatgtcaacaggtgaagtgccaaaaatgccttgcgcacaagaccttcatgatcaagaagaagctggccaagaagatgaggcaaaacaggcccattccttactggatccgaatgcgcaccgacaacaccattaggtacaatgctaagcgtaggcactggcgccgtaccaagctagggttctaagttcgatgggcttatttgtttccagtattttctttaagttttctaagtttattttcggacttattttatttgggatttaatattgggaaccatcgagaatctttgtattagggattttgatgagattgttagtggcttcgctctagtttgattttatattatctcatcttaatgtgagtgcatggtattgaactttcctttggtaattgctttaatttaccttatatgtcaaacaattctcacctgcatgatagctatgtgcttgagggtggctttatcaaatttattactttattctaaacctgaggaagaaaaaaattaagagcatataatgagaaaatataaaaatacc

SEQ ID NO: 192109 - DNA, 354 bp, Gossypium hirsutum
gctaaccgctttcattctccttagcgccgcattcggtcctatgctccaattcaccgccgaccatgccttcacacaagacgttcatgatcaagaagaagttggccaagaagatgaggcagaataggcctatcccttactggatcccgatgcgcactgataacaccatcaggtacaatgcgaagcgtaggcattggcgccgcaccaagctagggttctaagcaccatgagcttatttgggttcaagcttttcttttttcccaagtttattggcagacattgtgatgtggggcttaatataggaacctaccaaggatgaaggattcttaaattaaagattttgatgagatttttggc

SEQ ID NO: 192110 - DNA, 485 bp, Gossypium hirsutum
gctccctcgcgttcggacctcagcaaaggcagtccctaaaatctggctctcttcactcctcctattttaaccatttcttccttgtcctcgccccttccctagcaagctacatttccatggccccccctgaattggttcaacccagtgataaaacaaacgttttcgctaaacaagtcagtttgcgtaatcgtgcatatgttacgttcttggccggaaatggggactacgtgaaaggcgttgtagggttagccaaagggttaaggaaagtgaaatcggcgtaccctttagtggttgccgttttacccgacgtgcctgaggagcataggcggatcctggagaaccagggttgtatcgtccgagagatcgaaccagtttacccgcctgagaaccagacccagttcgccatggcctattacgtcatcaattactccaagcttcgtatttgggagttcgtggagtacagtaaaatgatatacttggacggc

SEQ ID NO: 192111 - DNA, 699 bp, Gossypium hirsutum
aacagaatagcaggagataaaaaaaaactttgtatggtataagcgagtgccgtgtggaaaaagagggaatttggaatcgcaaatcggtagttaaagagaagaaaaataggacaaaagcttcgaagaagaaacaatgggacggtggtggagtaagtatgcggtggcgttcatggcgttggccctcttctctatctccgccacagcgaggccctgcaagaccttcctcgtttcctcctattccatctctttccataaccctaatgacccttcctccgctgtctcctcccgatttgtcaccgtcttcactgagatcggtcaatggaaccccttatccatgcctgttgatcccaagccctcctacgccttcagctccctccgtgatcgtagtagggacattctcagcgtcgtcgtcgctctcctcttcggcgtcggctgtggctctctcactgccgccgccatctacttggtctggattatcttcacggcccgttgcgagtaccatgaggatgataagtctgacgaagaatttagccctaaaaagatggggtatgttaacattcctgcgaatcctgctgttaacgttaaggaagccctttgatcaaataccatagttgttattaattatttaaataaattctcggtttgattgttcagtacttcggtaaatcatgtctatgtctgtctatgacttttcatttt

SEQ ID NO: 192112 - DNA, 680 bp, Gossypium hirsutum
tgtacgcgtccgcccacgcgtccgtccccatctacagggtttacaaagggattgaggcagctgtaaccaatggctcccaaggttgagaagaaggcagatgcaaaggcacaggccttgaaggctgcgaaagcagtgaaatctggagccacttttaagaagaaggccaagaagatccgaacaaaggttacgtttcacaggccaaggaccttgaagaaagataggaacccgaagtatccacgcattagtgccccaccaaggaacaagcttgaccattaccagattctcaagtttcccctcacaactgagtcagccatgaagaagattgaggacaataacactttagtatttattgttgacatccgtgcagacaagaagaagatcaaagatgctgtgaagaagatgtatgatattcaggccaagaaagtgaacaccttgatcaggcccgatggcacaaagaaggcatatgttaggttgacgccggattacgatgccttggatgttgcaaacaaaatcggaattatctaagcagttggcgactaccttgttttgaatgctttattttttgtgttttgttgcaaggtgagactgttattttcagattcagctggaagatttaagcttagtttttttgttttttaaggttgtaatcttgctttactgccacttaatcatctttggta

SEQ ID NO: 192113 - DNA, 742 bp, Gossypium hirsutum
gcagccgcagctagaaaagggttattgatgtaagaaattgagcaatgtctcctgctaaagttgacagcaagaaaaaggccgatccgaaggctcaagcagtgaaggctgctaaggctgtgaaatcgggcgtggcatttaagaagaagtccaagaagatcaggacaaaggttacctttcatcggccaaggactttgaagaaggaccgtaaccctaagtatcctcgcatcagtgcaccaccaagaaataagttggatcaatatcaaattctcaagtatcctttaactactgagtctgcaatgaagaaaatcgaggacaacaacaccttggttttcattgttgacattcgtgctgataagaagaagattaaagatgctgtcaagaagatgtatgatattcaggccaagaaagttaacaccttgatcaggcctgatggaacaaagaaagcatacgttaggttgacacccgaatacgatgccttggacgttgcaaacaaaattggtattatctaagctagttagtagctaccttgttgagcatttattttccttttctttgcaaagagaaattatttcgagacattgagcaggcatttttatttttattagcacttaaaagtttgtaatattgcattgttgttgccaattagccatctctggttcaacttaagacagaaggtgatttttgatttacatgctttggggcatttgtttaaaaatggttcactgcttgaatgttagctatt

SEQ ID NO: 192114 - DNA, 473 bp, Gossypium hirsutum
  unsure (1)..(473): unsure at all n locations
ggactttgaagaaggaccgtaaccctaagtatcctcgcatcagtgcaacaccaagaaatgagttggatcgatatcaaattctcaagtatcctttaactactgagtctgcaatgaagaaaatcgaggacaacatctccttggttttcattgttgacatccgtgctgacaagaagaagattaaagatgctgtgaagaagatgtatgacattcagacaaagaaagtgaatacgttgatcaggcctgatggaaccaagaaggcgtatgttaggttgactccggattatgatgctttggatgtggcaaacaagattggaattatctaagcagatcaaccaatgtcttccttgctttcaacagttttgttagaacgattaactatgttaggactctntattttcgtgtctgcattatatgtgtaaggaactatgtttttcctacttaaagtctgcatgggatttggtttagggatttac

SEQ ID NO: 192115 - DNA, 598 bp, Gossypium hirsutum
gttctggttttattttattgtttttttatgaaaatatagattcattcctttagatgtatggatcaaagtatcagattaaaattgatcgtttccaaacttaaaaataccaaaatcaaaatgacttacaaaactttaaaacctgaagtgacataaacgtcaacccaaaatcaacgaacgacccaaacttgaaccttaaggtttaaaattccaaaattagccaaaagggaaaagaaacttggaacttcccaaaacctaaaacaatttgaattccaagcaatccaaacttaaaacaacttaaacttgaatgaccagaacccaaaattacccaaacttaaaatagcttttaagcccaatttgacatgatccacgtttacccaaaatcaacttgacatactaaatggacaacttcggctgccgcaactcaaatattacaaatatatatgtgcaatgttgtccttgaaaaatcatacctctacttgtttttgaatatgtcgaatagaaacactgaacgtatttaaggagaaagtctaaagcaacatagattgaaaacattgacaagaatccgtgctaaacttctgccctcccaatgtgtcaatca

SEQ ID NO: 192116 - DNA, 694 bp, Gossypium hirsutum
cccacgcgtccggcgaaatatttacgaagttctaccgccatggggagaagacctgcaaggtgttatcgtcagataaaaaacaaaccttacccgaagtcacgttattgtcgtggtgttcctgatcccaagattaggatttatgatgtgggaatgaaaaagaagggtgtggatgagttccctttctgtgttcacttggtctcttgggagaaggaaaatgtctctagtgaagctctggaagctgctcgtattgcttgcaacaagtatatggccaagtatgctgggaaggatgccttccacctgcgagtccgtgttcacccattccatgtcttgcgtatcaacaaaatgctttcatgtgctggagctgataggctccaaactggtatgcgaggtgcttttggcaagcctcagggaacatgtgctagagtagccattggtcaggtcctcctttcagttcgttgcaaggacagcaacagtcatcatgctcaagaggccctccgacgtgctaagttcaagttccctggtcgccaaaagattattgtcagcaggaagtggggtttcacaaagttcagccgaactgattatttgaaatataagtcagagaatcacattgtccctgatggtgttaatgctaagctccttggatgtcatggacctctagctaatcgggagccagaagagcatccctcatgctgcc

SEQ ID NO: 192117 - DNA, 1486 bp, Gossypium hirsutum
ctgaaaaatttccagctgagcaacaaaattcagaggacagtggcagacttaaggaatattttgggatgaactctccaacaaaagaccaattctttattgaaagaattggcagaccttccattggtgttgcaaaaggagaaaagacaagcaagctaaagggatctgaactaagcatggaatatgagactattgatttttccatgaaaagggtctcgaacatctatatagaggcaaagaaacatctctctgatctgctaacaaacgaggatcaaaatgaggatcttttgagtacacaggttccaaaaaccttaggtaggattctttctcttcctgagtataatacatcccctgtcagcagccctggtcagaacttggagcatagttttacaactgcgcatatgagatttgcaggctcggacaaattgcaaatggtgagtgaaaatgatcggtttgtcagccttctaagtatgagggcagagaagaccgatggccagctttgcatttctgaaaacaaaagcgataatgaagttgaaagtgataatgcaatttcaaacaaccttgacactagtgtgaataatgacaaagaggatccaattttttgttctataaaagatgaattgagttccaaagagtctgtgagtattgttaaagctactgaaatgatggttcatgaagaaagcaagtccctggatatttcttcagagacgagcggctcttcaattatcacagatgataaaaatgttgacatatatgaagtttgtgatgaaaaacaaaatccttggtacttgaaacaggattcatcggaagtggaccaacagcctttttctccattatcatctccatcagactcatcagtcatgaaaaaggttgaatgtttggagagtgttactgatataccagagcgatcaagccccgtatctgttcttgagccaatatttgcagatgatcttatcagccctgcaagcatcagatcttattccggtgaaacatccattcaaccgctaagaattcgattcgaagaacatgactctttggccacaaatcagagcaatcgaattaaaacttgtatgaatgataaggaatcaatatttgagcacataaaggcagtgctgcaagcctcgagtttcagctgggacgaagtctacatccggtcactttcttcagacctgcttatcgacccattgttggttgacgaagtcgaatacttgcccaaccagctttgtcaagaccaaaaactgctctttgattgcattaatgaagtagtcagagaggtttgtgagtactattttggttcccctagtgtttcatttgttaaacccaatatccgtcctatcccaaacatgcaaaatacaattcaagaagtctgggagggagttttttggcatttgctcccgactccattgccttgtactctggacctggtagtccgaaaagacctggctaagactggaacatggatggaccttcaacttgacacttgttatat

SEQ ID NO: 192118 - DNA, 854 bp, Gossypium hirsutum
ctcttcttggcggtgccgggtgtaaattcttggttgtttcgttcgttttaagaacagagattcgaagatgagtaagcttcagagtgatgcccttagagaagctatttcaaccattgtagctcagtccaaggagaaacagcgcaagtttactgagaccattgaactccagattgggctgaaaaactatgatccccaaaaagacaagcgtttcagtggttccgtgaagctgccacacattcctcgccccaaaatgaagatttgcatgcttggagatgctcaacatgttgaagaggcagagaagataggtttggattatatggatgtggaagcattgaagaagctaaacaagaacaagaagttggtcaagaagcttgccaagaagtatcatgcctttttggcttctgaatctgtcatcaagcaaatccctcgtctcttgggtcctggtctcaacaaagcagggaaattcccaacccttgtcactcaccaggaatccctagagtcgaaggtgaatgagacaaaggcaatggttaagttccagctgaagaaggttctatgcatgggagttgctgttgggaatgttgcaatggaggagaagcagatcttccaaaatgtgcaaatgagcgtcaatttccttgtttctttgttgaagaaaaactggcaaaatgtgaggtggctttacttgaagagtaccatgggaccttcaaacaggatcttttgaattatgcatggagtgaaatcatttttttaattgagaatgtttcaaaaattttgttaggtgatgtgggaatcacgaattttttagacattgaaagtttttgtttgcattcaaaaaaaaaaaaaaaaaaaggggggcc

SEQ ID NO: 192119 - DNA, 666 bp, Gossypium hirsutum
  unsure (1)..(666): unsure at all n locations
cactccttctcccacgcgtactttcacgctttcggtttggattatatggatggggaagggtgtgaataaactaaacaagaataacaagttggtgaacaaacttgccaagaaatatcatgcctttttggcttctgaatctgtcatcaagcaaatccctcctcttttgggtcctggtctcaacaaagcaggtaaattcccaacccttgtcactcaccaggaatcactagagtcgaaggtgaatgagacaaaggcaatggttaagttccagctgaaaaaagttctatgcatgggagttgctgttgggaatgttgcaatggaggagaagcagatcttccaaaatgtgcaaatgagcgtcaatttccttgtttccttgttgaagaaaaattggcaaaatgtgaggtgcctctacttgaagagcaccatgggtccttcaaacaggatcttttgagttcatatttttaccttctgttatgtacggactgaaagtagtagtggggatttaatactaaaatcagtttttttcttctcttttacttagaatgtttaagtttatgttatgttctgttgttccctagaaatgttatgaatacgagacatttgaattttgatttgcttatcaactttggtttcacattatttgcttaatccacacaaaaatttnccttt

SEQ ID NO: 192120 - DNA, 407 bp, Gossypium hirsutum
agaaaaatgccgccaccaggatggggaccgcctccaggaggaccgccggggcctcccggtttatgtggctgctttgattttatttgcggtggtatttgccgtcttctttcttcttgtttttatgttctctgctgctgctgcatatttgaaagctgctgtgggccaatgttcggcgggccgcctgggccacctgggccaagacctttttaattatagtgctcatctctttttcccttttactctgtttttgatttgtgttttaggctgttgtgaactgtgatgtgaaacaaaaatctagttctgcccctttctgttctttcttgccagcatggaacatggttccagtccacgcttttatttgttctaaaataaaaaaaattagttaaaatatgctttaaattttctat

SEQ ID NO: 192121 - DNA, 475 bp, Gossypium hirsutum
  unsure (1)..(475): unsure at all n locations
aaaaagaaaaatttacaatcatcatcagatctagtgttcttagcctgatgatgataatgaggctttacgctcttcttctcctattagctttcgcttcgctgcaactcctctgcttcgccgctgatgttgacgaggtgttctatgattcatttgaagagtcatttgatggacgatggatcgtttctgataaagatgattataaaggcgtgtggaagcattccaagagcgaggggcatgatgactatggtcttctcgtgagtgagatggcaaagaagtatgcaatagtgaaagagcttgatgaggctgtgaatctcaaagaaggtaccactgtgcttcagtttgagactcgcctacagagtggactggaatgtggtggtgcatatttgaaatatcttcgtcctcaagatgctggatggaagcctaatgagtttgacaatgaatccncttactctatcatgtttggacccgacatatg

SEQ ID NO: 192122 - DNA, 667 bp, Gossypium hirsutum
ttttcttctccatttaaagtatccacacattcatttcatgtgaggaaaacggttacaatacaaatattcacattggaatccgcatccagcaaattagaaatttatcatttcaaagactaaaaaaaaattcaaaagaaaataaataaatcttacaagcacaaggagaaacagcaccatgttgagagagaataagggatgctctctactctgtatataacaaggtcttgtaaattgggatggaattagtcaaacatcatcacatcagctgttaagaacacgacgtaaaagaaatgcttcaccctgttccccatttgccgaccttctctccaaacagcaagctgttagctgcctcagtaatctctcaagatacgactgtaagcacccttccatatcttgcgtgttcggatttgttgacaatatcatcgcattaactgtgtctgccacaagatcacgttgcgactcttctagaaggtatcccacacaggactcctgtggatgttcatatgccagcagagcagcacagtcctgcactaaatcatcaaatccagccaaccgaaaaaaatttgccaattcaattcttccatacttaacagcctcttcaagtgctcctacccgaaccaattcgataaatttttggcagtgcagcagaaagcaagtagcagatttg

SEQ ID NO: 192123 - DNA, 543 bp, Gossypium hirsutum
ttttgcgccagaggaaaaattaagtttatttaattcattacttaagggctaccaagaagaagttgataatcttaccaagagggcaaaatttggcgagaatgcttttctgaacatctatcaaaagctttatgaggctcctgatccttatcctgctcttgcttcaatttctgagcaagatctaaaaatctctgaattggaatctgagaaccggaagatgaaagttgagcttgaagagttcagaacagaatcaatgcacttaaaaaatcagcaggcaacgataagaagacttgaagagcggaatagacaattagagcagcagatggaggaaaaagtgaaagatattgtggagatgaagcagcgcagtttagcagaagaaaaccagaacactctacaagtcttaaaagacagggagcaatctttgcaagatcaattactgcaagctaaagaaagtgtatcaaacatgcataaactgcatgaacttgcacagagccagttgtttgaacttcgcgctcattcaaatgaagaatgggcatcaaagcaatc

SEQ ID NO: 192124 - DNA, 632 bp, Gossypium hirsutum
  unsure (1)..(632): unsure at all n locations
tttatgtctaattaaatgtgtctccaataaataaacatgacatttatattgagctactggtcgcccctaaaaccttccaacttcaggaaattcgacgatcaaatcaaacagtcatggctggagttgcacctgatggatcacaatatgatgctcgtcaatacgacagtaaaatgaatgaattgattgctgatgatggaaatgacttctttactacttacgatgaggtctacgagagctttgataaaatgggtttgcaagaaaacctcttaagaggcatctatgcttatgggtttgagaagccgtcagcaattcaacaaaagggaatcgtgcccttttgtaaaggtttagatgtaatccaacaagcacaatcaggtaccggtaaaacggcgactttctgttctgggatcttacaacagctggattatggtttagtacaatgtcaagctttggttcttgctcccactagggagcttgcgcaacagattgagaaagttatgcgtgcacttggtgattatttgggtgtaaaggttcatgcatgtgttggtggaactagtgtccgggaggatcaacnaatccttgcanctggcgtccatgttgttgttggtaccccgggtcgtgtttttgacatgctt

SEQ ID NO: 192125 - DNA, 843 bp, Gossypium hirsutum
aactctccccactcctgttccacgacctccctctgctcctgcttctaaaccttctggaaatgatacagtacctaatacttctgctccatcaccgtcgggaagcaatccttctatttctgactctaagtcaagtcatgaagcagcaatactagtcggaagcatagggggtggtacatttcttctaatattaataatcattgcctatcttttgaaaacttacaaggtatctactgtgaaaccttgggccacagggctaagtggacaacttcagaaagcatttgtaactggtgtaccaaagctgaagcgatcggagcttgaagcagcctgcgaagatttcagcaatgtaattggttctacaatgattgggacggtgtacaaagggacactgtctaatggagttgaaatagctgtggtctctgttccagttgaatctaccaaagattggtcgaagaatttagaaacacaattcacgaagaagattgacacattatcaaaggtcaaccacaaaaattttgttaatcttcttggatattgtgaggaagataatcctttcactaggatgttggtttttgaatatgctccaaatggcactctctttgagcatttacacattaaagaatctgagcatttggactgggctatgaggttgagaattataatgggcatggcttactgcctccagcacatgcaccagctaaacccacccgtaccccataacaacctgtcgtcctcagctgtcagtctaacagaagattatgctgccaaaatctcagattcatgtttctggaatgagttgactgcatcagacagggaagcagacggaataaacctttcggataccac

SEQ ID NO: 192126 - DNA, 695 bp, Gossypium hirsutum
  unsure (1)..(695): unsure at all n locations
gtaaatacaacaagaaaatccttcaaaaagaccccagatgtctttcacacatgtttgctgctgagatttacatgcacaggttccttttatctagtcctgttcgaaccctcaatccagaggaagctgattggttttatacccctatctatgccacttgtgatcttacacctactggtttgccattgcccttcaagtctccacggatggtgagaagtgctatacagcttatttcctcaagctggccttactggaatagaacagagggtgctgatcatttctttgttgtaccccatgattttggagcatgctttcattatcaggaagagaaagcaattgagagggggatccttccaatcctgcagcgtgctaccttggttcagacatttggacaacggaaccatgtgtgcttgaacgagggttcaatcacaattcctccttatgctccccctcaaaagatgcaggcccgccagattccactagatactccacggtctatttttgtctacttccgtggattgttttatgatgtgaataatgaccctgaaggtggctactacgcaagaggtgcaagggcagctgtttgggagaacttcaagaacaatccacttttcgacatctncactgaacatccaactacttactacgaggacatgcaacgagctatattctgcttgtgcccactatggtgggcaccc

SEQ ID NO: 192127 - DNA, 443 bp, Gossypium hirsutum
cggacgcgtgggctttttcaataatttggctctgtctccatggagagtgataatcgtgatggcaagtccaaaatggactatgaagttatagaacagattggaagaggagctttcggagctgcttatcttgttcttcataaacttgagaaaaagaagtatgtgttgaagaagattcgcctggccaaacaaacagagaagttcaaacgtacagctcaccaagagatggaattgattgcaaaactaaataatccgtatattgttgagtacaaagatgcttgggttgataagggaaacagcatttgcattgtaaccagctactgtgaaggaggggacatggctgagcttattaagaaggcccgaggtatgcacttccccgaggagaaaatctgcaaatggatgactcaattactcttagccgtggactacctacactcgaaccgttc

SEQ ID NO: 192128 - DNA, 647 bp, Gossypium hirsutum
  unsure (1)..(647): unsure at all n locations
cttagaatcaaaagcattcaacagtttctctgaaatcaccactatctattttctggtggtgactcttattttccttcactattgttttccctgatcggtgagcagcccaacagtaccttgaacctgattttcattttacagtactagagatgctcccccaaccgttcctcgtagatctttctccactgcctcttctgtaaaattcgggaccccgtcaagaagataagtattcatttccccccttaatccttcaacggccaaaagatgagccacttggttcccctacctcggaatatacgagaatccacagtttttaaatctctttctcaaagagtatgtaagcactgatgtatgaatcatcgttcttgtttgcttgttgtttctttatcaccataagtgaatcgccttcgatcaccacatcttgaaaccccaaatcaatgcccaattggattacttggagacatgcaatagcttccgcagcaaaccttgtttgaatgtgattattaataattgttgttgaccccagaacaaccccttttgatttcaaggaatgagcttgaaaagccccatcaaaacttacctttatgaaagcgttctctgaaggcctncatcttacaatctcaactctcgtaacatgtaacagtttg

SEQ ID NO: 192129 - DNA, 888 bp, Gossypium hirsutum
gtctctgaggctgttagctgttatggctgccatccgggtggacgagaaaccagataaaatcgaaaaccgtccgctttcttccctaatggaaggaaccgtgacttctccagaccctcttgcctctagcacatgggaggaggttcctcctgagaataccctgattacaccagtacaatgtaagtcactatggagacagttcaaatcagagactgaatatacagttactcaagctatttcagcacaggaggcatacaagcgaagtaacaactggttacctcctccatgggcaattgtggcaatggttgtccttggatttaatgaatttatgcttcttctaaggaatcctctctatctcatgtttctatttgttgcatttttactctcaaaagctatgtgggtacagatggatgtcccagggcagtttcaacatggcactttggctgggctaatctctatttcatcaaggtttcttcctactgtcatgaatcttctaaagcggcttgctgaagaggcccaaggccatcgaaccccagagtcccccaggcaacaggaatcatcagtagcttttcagagcttcaggaatcaaagtcagctaaatccaacaagctcgattgcacagtcatctgtatcatccaacgtttctgtgtctgatagtagtgtcgagtactccagccctaacttaatgcagagaagaagtacaaaagttcaagaagcagagctttctcaataaaagctagtcttccggtgtagaatgtataccaagttagttcaagtgctacctcatgcaacttaaaatcttctttgggatgaaaaatggggatatataatatatggagagtcttttacatatgtaacaaaggatgcaggatttggatgtgctctatatgt

SEQ ID NO: 192130 - DNA, 394 bp, Gossypium hirsutum
cccacgcgtccgcccacgcgtccggaaagatcgaaagtcaccattctcgcctaaaacaatggatttcagagtcatgggtttcgattcaccactgttccataccctccaccacatgatggacctcaacgaagacggcgataacaagaacaaccccaacgccgcgtcaaggacctacgtacgagacgccaaagccatggcggtgacaccggcggacatcaaagaggactcgaagtcgtacatgttcgttgtcgacatgccagggctaaaaccgggggacataaaggtgcaagtggaggaagagaatgtgctgttgataagcggagaacggaagcgagaggaagagaaagaaggggcgaagtatattcggatggaaaggagggtggggaagttgatg

SEQ ID NO: 192131 - DNA, 1052 bp, Gossypium hirsutum
tttcctaaccgttgattattccggtggcatctccacgtatccactcttggttttgcaggtcacatatttcaaatgtggtggagcatcactaggtgttggcatgcaacatcatgcagcagatggatattctggtctccacttcatcaacacatggtctgatatggctcgtggtcttgaccttacaattccaccattcattgatcggacccttcttcgtgcccgggaccccccacaacctgtgttccaccacgtcgaatatcaaccaccaccggcaatgaagattccaccccagtccaccggtcctgaaagcacagcaatctccattttcaaattgacccgggatcaactcaatgcactcaaagcaaagtgcaaggaagatggtaacgatgttaactatagttcatacgagatgttgtcaggtcatgtgtggagatcagtctgcaaggcacgtggacttgaagatgatcaagggactaaactgtacattgccactgatggaagggcaaggttgcgccccccactcccacctggttactttgggaatgtgatcttcactgctaccccaatagcagtggcaggggatctactgtcaaagccaacatggtacgctgcgagccgtattcatgatgcattggttcggatggatgatgaatatctaaggtcagcccttgattacctggaacttcagccagatttgtctgcacttgtacgtggtgctcatactttcaggtgtccgaaccttgggattactagctgggttaggctaccaatccatgatgcagatttcgggtggggcaggcccatatttatgggccctggtggaattccttatgaagggttatctttcgtaataccaagtccaaacaatgatgggagcttatcagttgccatctccttgcaaaccgaacacatgaaagtgtttgagaagctcttttatgacatttaaaggaagaagaaaccttgtatacagtccatgtagtctttaaacgttcctttttcccaatttttgtaatacttggttatgttataaagtctcacatttcacttgaaat

SEQ ID NO: 192132 - DNA, 404 bp, Gossypium hirsutum
gatcatccaaatctataaacttattttcttctattgataagccttagaaaagtggataccatcatccacgattatattacattcatatataaaatttagagcttgttcaagcaaagaccacacggattacataaatattttttttttaattgtagtaaagttcgagacccataccgtcgtggatttcgtaatctttgagggtaatatgatccttgtaaaccgtgtaccacttctggataccgatcttggctgctcgagttccagtttgggccccgaccagcttcttaaggtctccgatcgtgtcgtcgtccttgcacttcaagcgcactttctttcctaaccgatcgttcaacaccacctcgatcatcttcgattttttttcaaaaagactatttgcagggggg

SEQ ID NO: 192133 - DNA, 470 bp, Gossypium hirsutum
tcaattccaaaacacacaccaaattccagcacccaaaataatggccctctgcaagccgtattctaggttggtcctagcactggccatggcattggtggcagctacggtgcctgtttatgggcagagaactatcaacactccatgcaccccatcggcacttaacatcttcactccttgtatgaacttgcttaccaatagcagtgccaatggtacttcgcccactgcagattgttgcaactcgcttaaaacgctcacatcgagcggcatggactgtttgtgcctcattgtcaccgggagtgtcccgttccgtttacctatcaatagaactctagctatttctcttccccgagcttgtagcatgcctggtgtccccctccaatgcaaagcctctgttggtgcacctgttcctgctccaggtccaatttcacttgcaccaaccctttcttcaggaacatcaccaactttaagcc

SEQ ID NO: 192134 - DNA, 457 bp, Gossypium hirsutum
gagaaagcgagagaagaagagaatcgatttttttattcaaaaaaagatatccatggcagagacagcaatcaactctaaaccgaaaaacgcaagatggtttctcaatggaatgactgcccttgtcaccggtggcactcgaggaattgggcatgctatagtggaagaacttgcagggcttggggcttctgtttacacatgttcaaggaatggagatgagttgaataagtgtttgaaagaatgggaaagcaaagggtttttggttaatgggtcagtttgtgatgcctcgtctaaagaccaaaggctgaaactgatagacaacgttgcctctgttttcaatgggaagcttaacattcttgtcaataatgtgggaacaaacatcaggaagccaacagttgagtacaccgcggaagaatattcaaagctgatgtcaacaaacttcgaatcttcataccatttc

SEQ ID NO: 192135 - DNA, 640 bp, Gossypium hirsutum
gccatgtaatcatttatatcattcggattgcattatcccatggctggtgcagcacaactcgtgcccggtttgccgtcaagagttgccaccacaaggatcaggtagcagccagagttataaccccaggggtcaaagtaggagcagcaattttggaagtagttccagtggaagggagagccaaagcagcagacgtaatccattttcatatttctggccattccgttcatcaaattcaagctctagccataatggagccgcgggaagtagttccccacggcatgtgcatgagaacaatcagtcgatggggtataatggatggccttttgactgaggtctgtagttgtgtgtacctgtagtgtttgggcaaaaattagttgcactgaatgtggattgagggatcttaaaagagtctgtctctgtaaaagtgaatgaggtcaatttcgtcctgcaaactgtgtttcactctttagccagtacttgtgggttttcaatctactatgaggactataactcaataactgcagtcttgatggcatgctatgctatgctatgcttccatgtttcaataaactaagcatcatgtatgatatgggtttacaagtttggttgagttaatactaaccaagattacatcaaaaaa

SEQ ID NO: 192136 - DNA, 791 bp, Gossypium hirsutum
atgttcaacttgttggtccatgaatcgaatcgaattaccatcaaaagcttcaaatctcaaatccgtaaatcaatggcaagtgaaaattttaaaccaccagatccaggttcttcaataaagaagacacaaagaaagcaaagcaacattgttcaactaaagtgaagactataagtaatagctaaggaattattatcttcatctgagataaccagggatcttgatgcgaacaaagagcgtagtcatgacataggcaataacaacggaggagattcctgcaatggcgtaggaaaccttgacactccttgccctgtttttatcaagggcaagatccaggaggacaatcccaatgccaccaagcacaaacataaacccagaggagagtccttctatgatgtactgaccattgactcgacctggaaggaaaacaacaggtcggacggcgccagtggcaggatcttgggtagagccaatgccagggggctccacgatgacgtcgtagacgaagccggagaccaccatgaagtaagtgaggaggacgagagaaaagacagtcatggcggaaggaagggagacggaggggatcttgaggcggaggcgcggagcgcgaaggaaggagtaagggacgactttcaagatgtggaatagtgggtccattgagaattgagaggatgcgtcagctgcagcgacagcgccggcagattgggtatctgctttcggagccatttctgtttttctttttcagtcctttcctatctgtgttttgatcactcggctcttaggggtttggtgat

SEQ ID NO: 192137 - DNA, 481 bp, Gossypium hirsutum
cccacgcgtccgtccacgcgtgcggaaaaaaaaaatggcaggaagattgagcaatgtagcatcaaagatcatgggcggaaacggcatcgtttcacgctccgctgcctcctctctccgtctccgttccggcatgggtctccctgttggcaaacatattgtgcccgacaagcctcttcctgtaaatgacgagctaatttgggacaatggaactgccttcccagaaccttgcatagatcgaatcgctgatactgtcggaaagtatgaggcattggcttggatgtgtggtggtttgagcttctttgcatcgttgggattcttagcttggtggaatgataaagcctctaagattccatttgcacctaaagtatatccatatgacaacctgcgagtggagcttggtggagaaccataggtagatctgtatgagcaattgtacggttcttggtgtcacttgtctccccatgtgtttcattttacttct

SEQ ID NO: 192138 - DNA, 477 bp, Gossypium hirsutum
cccacgcgtccggctaaatattaatacagaaaccagagtttggttctgcagaaaggtccgaggagaaaagaaatggcaggaagattgagcaacgtagcggcacgtataatgggcggaactggcgtcgtatcgcgctccgtcgcctcttctttgcgactccgctccggcatgggtctccctgtcggcaaacatatcagttcccgacaagccccttcctgtaaatgacgagctaatttgcgacaatggaactgcatttccagaaccttgcattgatcgaatcgctgataccgtcggaaagtatgaggcattagcttggatgtgtggaggcttgagcttctttgcatcgttgggatttttggcttggtggaatgataaggcctccgggatgccattcgcaccatacgtatatccatattacaacctgcgagtggagcttggtggagaaccgcacgtagatccatatgcagagctgtatac

SEQ ID NO: 192139 - DNA, 803 bp, Gossypium hirsutum
gacccacgcgtacggcctgcgcagctgttgctctctctcgtgcttcatctgtgaaggcagaagttttctctgcgcaggctgaagatcaagcgctgcaagcgagatcccaagttcaaggttcctcaaaggctcaaggacagggtgaactagatgctacacctagtgaagtcttggctatgtctactacacagacaaaatcaaaggtacaaatgaggcaaacaacaagtgtgtcatcaggagaagattcagatgatgatgaacttagagatactgaaactactgataacatggatccggctgatgcaaaacgtgcaaggagaatgcggtcaaatcgagaatcagctagacgctcaaggagaagaaagcaagcacatatgaatgaacttgaaacgcaggttggccaactaagagttgaacattctacattactcaagagtctcactgacacgaatcacaagtatgatgaagctgctgtggacaatcggattcgggaggctgatattgaagcattaagagcaaaggtaaaaatggctgaagaaacagttaagcgggtgacggggattaactttaactctggtcttctatctaggcacaatgtagctagtgttagcatgccttttgttagcagcccattggaaacatcttcaactgctcctgttccattgcagccaaacactaatcagttttttcaccaaccagttcccttgcatcatcagagaatggagaacgttttcatggggaacaccatggttcctcctatcgtgaattcacgaaccgaaggagtgaaacatgaaaatgaaaca

SEQ ID NO: 192140 - DNA, 887 bp, Gossypium hirsutum
ggagaaggtgcttcttacagtgaagccacagtatggtgggggtgagaaggggaagccagccactggtgctgaaggtgcagtgcctccaaatgccacactcttgattactttagagttggtttcatggaaaactgtgactgaagtaactgatgacaagaaggttataaagaagatcttgaaggaaggagagggatatgagcgcccaaatgagggggctgttgtccaagtgaaattgattgggcaactgcaagatggtaccatattcttgaagaagggccacaatgaaggagaagaattgtttgagttcaagacagatgaagaacaagtcattgaaggtcttgatagagctgtgttgaatatgaaaaaaggcgaagtagcactgttgactattgcacctgagtatgcatttgggtcatccgagtcaaagcaggagttggctgtggtaccgccaaactctactgtttactatgaagttgagttggtatcatttgtcaaggaaaaagaatcatgggatctgaacacccaagaaaaaattgaagctgctggtaaaaagaaggaagaaggaaatgtattgttcaaggctggcaaatatgtgagaagcttctatgacatatgagaaggcttgttacatctatcgattatgatacttcctttagtgaatatgagaataagcagtccatggcgttgaaagttgcttgcaatctgaacgatgctgctttgcaaatgaaactaaaggacttcaagcaggctgagaaattgtgcagcaaggctatagatatatatagtggctacgttgaagcactgtatagaatggctcagcatacatcaatctggcatatttggatttggcggtacttgattcatgtaagctttgagctgacccggtt

SEQ ID NO: 192141 - DNA, 777 bp, Gossypium hirsutum
  unsure (1)..(777): unsure at all n locations
tttatatatatattgcattgcagaatttcacaaatgctttcacacatcttcctttttctctcattattatcctacccaaatgagaaactttggcaactctccggcctttgtaatcctcggagtttttatcctctcttgtgtttcccatgttagatccgacgcctccgaccaccgttacaaagaaggtgaccctgtccctctctacgccaacaaggtcggccctttccacaaccccagtgaaacctatcgctactttgatctgcccttctgttctccagatcatgtaaaggagaagaaagaagcattaggtgaggtattgaatggagatcgactcgtcagtgctccttataaactgaattttaaagaggaaaaagattcttccgttgtttgtaagaagaaactttcaaaggatgaggttgtctttttccggaaggcggtcgaaaaagattattatttccacatgtactatgatggatttgcctatctggggttttattggctaaggttgataaggaaggaaaagctgatcccaatgagttcaaagtattacctttacaagcgtatgcaggttgatggtactctattcaaggatcgtggtatggagatcagcgcaagattggatccacattgcctcgtggcttgactgaanatanggaanttgtgctgagtnatgtacacggggaatggaaggaactgatactctttggaaaaagttggaagatttcatggcttgtcttgccgttctttaagatacatgtttcaatttcaacctggggg

SEQ ID NO: 192142 - DNA, 1345 bp, Gossypium hirsutum
gcgggttttgaagaatgatttcatcagctgcttcttcatcttgaccgtcttgaagaatgatctcattaagtacggtcaagatgaagaagcagctgatgatcaagaagagactggatggaaatatattcatggagacgtattccgtttcccaaagtacaaatctctctttgctgctgctctcggatctggaacacagctgttcactttaacggtcttcatttttatgcttgcactggttggtgtcttttatccgtacaatcgaggagctctattcactgcccttgtggtcatatatgcacttacatcaggaattgcaggatatactgcaacttctttctattgtcagcttgaaggaaacaactgggttaggaatctcttattgactggctgtcttttctgtggcccgttgtttctcacattctgcttccttaacacggttgctattgtatacagtgcaactgctgcactgccttttggaactattgtagtaatagtccttatatggacactagtgacatctccattgcttgttctgggtggaattgctggcaaaaatagcaaggctgagttccaagctccttgccgcaccacaaagtatcctcgagagattccaccattgccatggtacaggagtgccgttcctcagatggcaatggctggatttcttccttttagtgccatctacattgagctttactacatattcgccagcgtttggggccacaggatctatactatatacagcatcttgtttattgtcttcatcatccttctgattgtcactgcttttataactgtggctttgacatacttccaactcgctgctgaagatcatgaatggtggtggaggtctttcctctgtggtggatcaaccggtgtctttatctacgcctactgcttgtattattactacgctcgatcagacatgtctggatttatgcaaacctcgttcttctttggttatatggcctgcatctgctacggattcttcctcatgctcgggacagttggtttccgtgcctcgctactctttgtccgtcacatatacaggtctatcaaatgcgagtgacaggttatttttcatttccttccattctgtcatagaaaatattctatgatttttgttagatatttagcaggaattggagaagtgccttaaattgtcagctagcaaattgttgatgcatgtgggtggcagagggccttggattaagttttaggcatcatctgtttattaatatttgggttctatataaaccccatgagacagatttgtttaggatgctgttatttttatacttttatcatataaaattgatccttttttttttaaaaaacagaaaaa

SEQ ID NO: 192143 - DNA, 865 bp, Gossypium hirsutum
aactttcaaaggatgaggttgtctttttccgaggggcggtcgaaaaagattattatttccaaatgtactatgatgatttgcctatctggggttttattggcaaagttgataaggaaggaaaagctgatcccagtgagtacaagtattacctttacaagcatatccagtttgatgtactttataacaaggatcgtgttattgagatcagcgcaaggatggatccacatttgctcgtggacttgactgatgataaggaagttgatgctgagtttatgtacactgtgaaatggaaggaaactgatactccttttgagaagaggatggagagatattccatgtcttcttctttgccgcatcatttagagattcattggttttcaattatcaactcttgtgtgacagttctccttttgactggtttccttgcaacaattctcatgcgggtcttgaagaatgatttcattaagtacggtcaagatgaagaagcagctgatgatcaagaagagactggatggaagtatattcatggagatcgtattccgtttcccaaagtacaaatctctctttgctgctgctctcggatctggaacacagctgttcactttaacggtcttcatttttatgcttgcatctggttggtgtcttttatccatacaaccgaggagctctatttactgccctggtggtaatatatgcccttacgtcagggattgcaggctacgtagcaacttctttctactgtcagcttgaagggacaaactgggttaggaatctgttattgactggctgccttttctgtgggcccttggttcttacattctgcttccttaacacagttgccattgcatacagtgcaactgcagca

SEQ ID NO: 192144 - DNA, 580 bp, Gossypium hirsutum
accttttataactgtggctttgacatatttccaacttgctgctgaaaatcatgaatggtgggggaggtctttcctctgtggtggatcaactggtctctttatctatgcctactgcttgtattattactatgcacgatcagatatgtctggttttatgcaaacctcgttcttctttggttacatggcatgcatctgctacggattcttcctcttgctggggacagtgggtttccgtgcctcgctattctttgtgcgtcacatatacaggtctatcaagtgtgagtaggggttttagttgtcccttgccctttcccagcaattctgttagagaaaaaaatctatggtttttgttagaaaattaactggaagattgaatgtcaagtaacaaatgaggcatgctttgactatgcttaatggatatctacgaaatcattgtgtttattaatatttggactgtacgtaaagatgttgacagatttgtgtaggttgctgttactttaatacctctttgcctcttttcaaccaaccaaagatctttcctgtccctttacgtgatgcagaaatccagttttctttaacc

SEQ ID NO: 192145 - DNA, 437 bp, Gossypium hirsutum
gtgaggtattgaatggagatcgactcgtgagtgctccttataaactgaattttagagaggaaaaagattcttccgttgtttgtaagaagaaactttctaaggatgaggttgtctttttccgaaaggcggttgaaaaagattattatttccaaatgtactatgatgatgggcctattgtagtaatagtcctcatatggacactcgtgacatctccattgcttgttctgggtggtattgctggcaaaaatagcagggccgagttccaagctccttgccgcaccacgaagtatcctcgagaaattccaccattgccttggtacaggagtgccattcctcagatggcaatggctggatttcttccatttagtgctatttacattgaactttactacatattcgccagtgtttggggccacaggatctatactatatacagc

SEQ ID NO: 192146 - DNA, 451 bp, Gossypium hirsutum
tgatcttggggatgctatgtggtgttgtaagtgtagtcgtcgcgcgcttagtttcttggtgtcacagcagcatttgagtatatcaaggagaaattaggactacctactgtaatctgtcctgctttaggtggtttaggagctggaataatagctcttaggtatcctggaattctatactggggctttacaaatgtcaatgaaatcctacatactgggaagtccgcatctgctcccggaatctggttgctaacccaactggcagcagccaaagttgttgccactgctttgtgtaaggggtctgggcttgtaggtggcctttatgcacctagtttgatgattggtgctgccgtcggtgctgtatttggatggctcagctgctgaacttattaattcagctattccaggcaatgctgctgttgcacagccacaagcatatgcactggttggaatg

SEQ ID NO: 192147 - DNA, 473 bp, Gossypium hirsutum
tttttccattaaagaccatggctgcaaaacctgggggaaattttaaagtagatgattgagccccatgaaccatccccaacaacaaaagatgatgcaccacaaccaaaacttgatgatgatgatgatcatcatcatcaacaatcatctgcaaacgaaccgcgatcatcttcatcatcggaggaagatactaagcaatggggtacccacgtcatgggaccgccggcgatccctattgtccacccggataaccagaaggccgctttatgggtcgccggcgaccaccagcaaattcacgagctgccttacctcgtttacactcctgctgaaaaaccgacccaaaattcatttgaacttgtgattaacgttttcaatacttggagtaggaaggccgagatcgtcgcacgcagcgtctggcacaacctgagaagtggatcgtcggtatcggatgctgcgtggggtaaagtaaacctaac

SEQ ID NO: 192148 - DNA, 481 bp, Gossypium hirsutum
ttttgtgttggctagtaacagtgagcctttgtttaacctgtttgggttcttggtttgtgttggttctactgctggtcgtgctttaaagtctgtagttcaagggatctggggaactagtgaagctgagaagctacattccatgaacttgctgctgtatatggctcctatggcagcaatgattttgttaccgcttactctatatattgaaggaaatgttgcaagaatcacacttgacaaagccaagactgattctttcattgttttcttgttggttgggaatgctacggtggcttatttggtgaacttaacaaattctttggttaccaaacatacgagtgcccttactttgcaggttttgggcaatgccaaagccgcgttagcagcgatcgtgtcggttatgatcttcaagaatccggtgaccgtgataggcattgctggattcgcttttacaataatgggagttgttctctactgctaagca

SEQ ID NO: 192149 - DNA, 551 bp, Gossypium hirsutum
aaaaaaattaaggtaggaagttcccttgtcttctactcggtgtcggacttcaatgcatttcatttcatttcatttcatttatctgcaagaaagaaggaaatagaattttcctctttcttgttttgtgaattcttgagaaatggttgatgtaaccgataaattggcatattttcaagccaccacgggactcgaagatcccgatttgtgtaccgaaatccttcaggcccatggttgggaccttgaactcgccatctcttccttcacctcttccactcaaccctccgcttcttccactgtctctgattccgaccctcccgattcacgggcccggactgattccgcctcggcctctgcctccgcctccgcctccgcctccgcctccggtcctattaccgctcccgcaccgggcttagcctggagactcgttacattaccgatttccgtgatatccggaagtttagggttgatctctggcgctgttgggctgggtctatgggccgcgggtggagttctttcgtattcccttgggatgatcgggctaggctctgggc

SEQ ID NO: 192150 - DNA, 652 bp, Gossypium hirsutum
cccacgcgtccgggaaagtaagtatccgaagcgaaaggatttgagagaaagaagggaaagacgtctgatagaaaaatggagaaagcaatcaacagacaacaagttttgcttaatcatttacaaccctcttctcagtctcatcaatcacctgctgctattctatttccttccaactgcgcggcgggggatagcgctgcttatcaccggacggctgcttttggggatgatgttgtgattgttgcggcatgtcgcactgcaatttgcaaagcaaagcgtggaggcttcaaagatacacttgcagatgatttgcttgcccctgttttaaaggctgtgattgatagaacaaagctgaacccaagtgaagtgggggatatagttgttggtacagtgttggcacctggttcacaaagagcaatggagtgtaggatggcagcattctatgctggtttccctgatacggtgcctattagaactgtcaacaggcaatgttcatcgggcctgcaagcagttgccgatgttgctgcttgcataaaagcaggattttatgatattggcattggtgctggactggagagcatgacaactgacaaagttgttcctggggttcccaaagttaacgcaaaggtagagagctttgctcaagcccgggatt

SEQ ID NO: 192151 - DNA, 632 bp, Gossypium hirsutum
aaacccctaattttagcttttagtccgcctcagatctccccgtctccacaggcatggctaccaagcagccaaatactggcctctttgtgggactgaacaagggccatgttgtaaccaagaaggagttggctccacgtccctctaatcggaaaggaaaaactagcaaaagagtccattttgtgaggaacttgattagggaagttgctggttttgcaccatatgagaagaggattactgagcttctgaaagttggtaaggacaaacgagcgctcaaggttgctaaaagaaagttgggaactcacaaaagggcaaagaagaagcgtgaggagatgtctagtgtgctccgcaagatgagggctcaccctggaggtggagaaaagaagaagtgaagctctctggtgacaagtcaccttgatgatttcattagagaactttgtttagcatatgttttaacgtattggtttgagactgaaaactatgcactgaatctcgtttgtttaattttataatgtatgctaaatttttgtgtttagttgcatgtccttgacatgttgggtattgccttgttttcttagccgtatggatttggaagttcatcattgagtcaagagagcatctttcgtcgtttattt

SEQ ID NO: 192152 - DNA, 777 bp, Gossypium hirsutum
  unsure (1)..(777): unsure at all n locations
cccacgcgtccgcccacgcgtccgctctttctgaatgttttcttctgttcgatttctcggggaaccaagtttaacttaaaaccacaacttctgtagaaatataaatatgatagactcaactcaaatattgagctgctttagctggtttcctcgactgtagacgatttaagttgcgatttatcaactgctgtgcttcggttggaatggctaccaagcagccaaatactggcctctttgtgggactgaacaagggccatgttgtaaccaagaaggagttggctccacgcccctctaatcggaaaggaaaaacgagcaaaagagtccatttcgtgaggaacttgatcagggaagttgctggttttgcaccgtatgagaagaggatcactgagcttttgaaagtcggtaaggacaagcgagctcttaaggtagctaaaagaaagttgggaactcacaaaagggcaaagaagaagcgtgaagagatgtccagcgttctccgcaagatgagagcccacggtggaggtgcagaaaagaagaaataaagctttattttcttggtttctcacccttgtcgtgctcgagtttcttgtttaggagcagctagaggtttgtttagcatatgtttcatttttgttgttttgagactgaaatcagtgctttggaacttttgtttatttgagttagagatgagaaattggaagaagtaataacttttaaattttatgtttcttgaattatatttaacgccattactattctacgtgcaaattttgggtnnaa

SEQ ID NO: 192153 - DNA, 511 bp, Gossypium hirsutum
tcgttttatcgccgtctcgagaggcatggccaccaagcagccaaatacaggcctttttgtaggactaaacaagggccatgttgtaaccaagaaggaattggctccacgtccatctaacagaaaaggaaaaactagcaaaagagtccattttgtgaggaacttgataagggaagttgctggttttgcaccgtatgagaagaggattacggagcttttgaaggttggtaaggacaagcgagctctcaaggtagctaaaagaaaattgggaactcacaagagagccaagaagaagcgtgaagagatgtcgagtgttctccgcaagatgagggctcatcatcctggaggtggagacaagaagaagtgaagcttttatttttgttgatttatggacaagcttgaaagtttgatttagtagctgttagagattttgtttagcactttgtttgagactgaaaatcatgcactcaaatttgctgctttacatgaattactgcaagtttttttttttttt

SEQ ID NO: 192154 - DNA, 436 bp, Gossypium hirsutum
gttctcttcctatctggcatggtggccatgatcatgatgagaacattgtacaaagatatcgcaaactataatcagttggaaactcaagacgaggcacaagaagaaacggggtgggaacttgttcacggggatgtctgtaggcccccaatcaattatggtttactctgtgtttatgttggcacaggtgtccagattttcgcaatgtcgcttgtgacgatgatatttgcgttgctgggctttttgtctccttccaatcgtggagggcttatgacagctatggttcttttgtgggttttcatgggaatatttgccggttactcttcatcacgtctatataagatgttcaagggcacagagtggaagagaattactttgaaaaactgcatttatgtttccgggtatcttattcgccaatctttttgtactgaatgcacta

SEQ ID NO: 192155 - DNA, 477 bp, Gossypium hirsutum
cggacgcgtgggcccagcatcttctattgaacctggaggtgttgctcccacacagactgaattcctacacagtaatctggataccttcccatcactgctgttctttagatcaaaatcaacccgttcagagagtttccagtctggacctttgtctgaccggaaagatggaatgctagtattgaggaacaagtcaccgaggtggcatgaacaactccagtgctggtgtctgaacttcaatggacgggtaacagttgcatcagtcaaaaactttcagctggttgcatctcctgaaaatgcagctgctggtcaggagcatgagaatgtcattctccaattcggtaaagtggggaatgatgtattcactatggattatcagtatccaatctcagcttttcaggcatttgctatatgccttagtagcttcgatactaagatcgcttgtgagtgatatgcaaacaggttgtgcgaaatgcaatg

SEQ ID NO: 192156 - DNA, 585 bp, Gossypium hirsutum
tccacgcgtccgcccacgcgtccgggtagaggagatctgtcggtgctcctgcattttccgcccactactcttccaaatcctcatcatgtacggcagagatccgtggggaggtcccctggagataaacgccactgattctgccactgacgacgacaggagcaggaatctgcaggacctggatagggctgcactctctcgccccttggacgagactcagcaaagctggctgcttggccccggggagcaaaagaagaagaagaagtacgtcgatctcggatgtatcattgtgagccgcaagatctttgtatggaccgtggggaccctgctcgtctccgccctcctggccggactcatcaccctcatcgtcaagactgtcccacgtcatcaccaccgccactctccgcccgataactacactctggctcttcacaaggcgctcatgttctttaatgctcagcgttctggaaagctgcccaagcatattaatgtgtcgtggagagggaactctggcctccaagatggcaaatcccatcccttcgttttgatgaaagatctggtcgggggaatattccatggctgagatgc

SEQ ID NO: 192157 - DNA, 761 bp, Gossypium hirsutum
attaaatatatactctcaaaacactttgctttctttgggattcgtgattttccgaaagctgaattggccggaactcttaccaaaatacctcaggtacaagtgatcaaagagaatgggaagaggaaaaatagagataaagaggatcgaaaacacaacaaatcgtcaggttaccttttgcaaacgcaggaatggcctgctgaagaaagcttacgaactgtcagtcctctgtgatgctgaagttgctctcattgtcttctccagtcgaggccgtctgtatgagtactccaacaacaacataagatcaacaatagacaggtacaagaaggcttgctcagatacttctaacacaaacactgttactgaaatcaatgctcagtattatcaacaagaatcagccaagttgagacagcagattcaaatgttacagaattctaacaggcacctaatgggagattccttgagttccttaactgtgaaagagttaaagcaggtagaaaacaggcttgaaagaggaattactaggatcaggtccaagaagcacgaaatgctactagctgaaatagagtttttgcagaaaagggaaatcgaattggaaaatgaaagtgtttgtctccgaaccaagattgcagaaattgagaggcttcagcaggcaaacatggtgactggacctgagcttaatgctattcaagctttagcttctcgcaatttctttagccccaatgtcattgagcatccatctgcttactcccatctctctgact

SEQ ID NO: 192158 - DNA, 571 bp, Gossypium hirsutum
cggacgcgtgggcgggggcttctttggaatttgtaattttccgaaagctgaagtggccggaactgtggcctaacctcaggaatatataaaagggtgaagatgggaagaggaaagatagagataaagaggatcgagaacaccacgaatcgtcaggttacgttttgcaagcgcaggaatgggctgctgaagaaagcatacgagctgtcagtcctttgtgatgcagaagttgctcttatcgtcttctccacccgtggccgcctctacgagtactccaacaacaacataagatcaacaatagagaggtacaagaaggcatgttccggtacctcaaacacaaataccgtcacggaaatcaatgctcagtattatcaacaagaatcagccaagttgaggcagcagattcaaatgctacagaattctagcaggcatctaatgggagattcgttgagttccttgacagtgaaggagttaaagcagctagagaatagacttgaacgagggattactagaatcagatcaaagaagcacgaaatgctgctagctgaaattgaatattttcagaaaagggaat

SEQ ID NO: 192159 - DNA, 726 bp, Gossypium hirsutum
ttccacgcgtccggttaattgcaactcatctcaggaagttcttagtggaccgcagtataattccgttatttgaaatgcatatgcaaaggtctaatcatcagatggatcacatgccacctcatcaatcctggggtccacctcaaggtgtccctccaaatgctagtggaggttctggttatggtcataatcctctgtacatgccaccttctcggcaaatggacaattactaccctcctgctgatatgccacctcatatggaaaaacagccccatcagggtatttctgcctatggaagagaggtgccaatgggtgcccatggatcatcaaatccccagaatgcaccatcaatgatcacacaggtcactcagcaaatgcaaattccactatcttatgctgatgctgttattgggacagctggtgcaagtattagctatattcgacgtgctagtggggcaactgtcaccattcaagaaactcggggtgtccctggtgaaatgacagtcgaaataagtggtactgctttcacaagttcaaactgctcagcaactgatacagaattttatggctgaagctgccgcaccagcacaggcacaagttggtggggctgcagaccaagcttataatccgtatgcagctcatggttcttctatacgcatcaccaccatccaatccaggacatgcgggtggctattgctatggtcaaactatgggtactaagcaaagggt

SEQ ID NO: 192160 - DNA, 478 bp, Gossypium hirsutum
gatcatgctgatcgtcttttcaattgcataagagacacttggttgaggtctgctgggaagggtaatacatcagatgtgaaagaactgattccagaattcttttacatgcctgaatttttggaaaatcgcttcaaccttgacttgggggagaagcagtcaggggaaaaggttggagatgtgggcctgcctccttgggccaaaggcagtgctagggagttcatcaggaagcatagagaggccctagaatctgattttgtctcagaaaatctgcaccattggatagacctcatttttggatataaacaaaggggaaaggcggctgaagaagctgttaatggtttctaccattacacatatgaaggaagtgtagacatagactcggttacagatccttcaattgaaagccttcattctagctcagatcaatcattttggacagacacctaatcaactattcctcaaaccccatgtgaaaagg

SEQ ID NO: 192161 - DNA, 455 bp, Gossypium hirsutum
atttaaattcatttcttcaatattatatggaacagaaaggatggcaaataaaactgatgggtatgtggagttcgaacatcatacgtttcacaaatccaattctggaatgcagcaattccattccattatcgccactgatacacaaataataccaatcaaaactgctaataatatcataacgcatttccctccactctttgaacctacaacagttaatgaaacatccaacataacatgactactgttgctgtgccgcctgtgcaacatataagtcacctttaccaccaccattttccattgctggaacacttttcattactaatttttcatctccgacgaatgaatgtaacatcttgaagattttatgcatgcaggtccttgttcgtatttcctacaggggctttaggacctacaccatcacaaaacatcccacttccattatccacgctaatcag

SEQ ID NO: 192162 - DNA, 909 bp, Gossypium hirsutum
attctcttagctttcaccgacaaaaaaatggcagcgaagcaaacgacgatcctagttgccgccatcctcgtaacggctttttacggcggcgcggtgacatcggcgcaggcaccggcagctgatccagcgatggccatgtcgccgtccgccatggcaccgacgccggactgtatgacgaacttgctcaacttatcggattgtttgacgtacgtggaggccggaagcaacttgacgaagccggacaagccttgctgtccggaattggctgggctagtggaaagtagccctcaatgcttgtgttatttgctggataagaacgcgacggcgaactatgggttcaacattgacatggatagagctcttaagcttcctgatgtttgccatgttaaaactcctcctgttagtctttgttcagctattgtcggggctccaatcggagttccaactcaaagcactgaaggatctatgtcaccagcatccgagccaacaggttccgtagcatacggaccgtctccatccgccatggcaccaacaccggactgcatgacaaacttgtttaacttgtcggattgtttgccgtacgtgacggccggaagcaaccaaacgaagccggacaaaccttgttgcccggagttggccgggctcctggaaagcacccctcactggttatgtgtattgttggataagaacgcgacctcgagttatggagtcgacattgacatggatagagctcttaagctacctaatgtttgccatgtataaaacccctcccgttagactctgctccactatctatggtgccgcttcaatggggttccaacttcaggcactgaagtatatttatcaccaggatcagctccaagcgcttcaaatggaaacagcagtggtgcttcaaacatggcattattt

SEQ ID NO: 192163 - DNA, 621 bp, Gossypium hirsutum
  unsure (1)..(621): unsure at all n locations
cttgcagccgcatctccttcgctgcagaaacctatcttctgtctatcttcctatcaagcccacaaacagtccaaaggagaagacacctaaaaaatcattgtccagaaaacatggcattggaaaagatagggaggttaaagatgtgggggtatcaaatggacaagaaaatacacatacatttcggagaatggctgatgtgctcttaagcagttctagttgcgagcagccagcatccacagctagtatggaagacaacctggtcacgaagagggtagatcctactagctgtgctgttgaaatgttgaactctattagtgattccaaagaaatgtccactgattctgaagtaagtgttagcaatgtcgacaaacaggctgagtctaacagcattcctcaaaaggatgctcatgtggtgtcaacttcagagatggcatttgattctcatcatgatgaccaagaagagcccacttctgagcccagtcgaaaactaccagaagctgatatgatgactgtaagtaaaaaagatgcggagacactttgtgacatgcaggttcttgaagctgcaaaaagtctggactgccgttctgganacagagattcctaattccatttcacttagct

SEQ ID NO: 192164 - DNA, 594 bp, Gossypium hirsutum
  unsure (1)..(594): unsure at all n locations
cccacgcgtccgtttggatctatcattgcaatcaagggagaaaaagaaaaaaaaaccaagccatgtttttatttgattggttttatggggttcttgcatctttgggtttgtggcaaaaagaagccaagattttgtttttaggacttgacaatgctggcaagaccactcttcttcacatgttgaaagatgagagattagttcaacatcaaccaacccagcacccaacatctgaggaattgagtataggcaaaatcaagttcaaagcttttgatttgggtggtcaccaaatcgctcgccgtgtctggaaggattactatgctaaggttgatgcagtggtatatttggtggatgcatacgacaaggaaagatttgcagagtcgaagagggaattagatgcgctgctttcagatgaagcattggccaatgttccttttctaattctaggcaataagattgacattccgtacgcagcttcagaagatgagcttcgttatcatcttgggctgaccaatttcacaactgggaaaggcaaggtcaatcttacaaactcctccgttcgaccccttgaggtgtttatgtgcancattgttcgct

SEQ ID NO: 192165 - DNA, 929 bp, Gossypium hirsutum
ttttttttttttttttgggaaaaaagtagagagaaattaaagcctaaacatgagaattccatttctctctctctttcccgcactttttctgactttctttctcactgcacactcacccccttcttcaatatacgaccacttgaaacacaacggcctccctataggtctcctccctaaggggatttctgatttctcaattgaccccaacaccaaccgtttccacgtcaacctaacccaaccctgcaactccgaattcgagatccagctccattacgatttcaacatctccggtgtcttgtctttcggcaagatcgctaatttgtctggtgtctcccaacaggaactcttcttatggtttcctgtcattaacattcgcgtcgatgatccaacctccggtttgatcaacttcgatgtcggcgttgttgataagcagttctccttgtccttgttcgagatcccccgtgattgcaccgcttttgatcctaagggttccctctccatttctcagaaaccatctgagttacttggtactgaaattgttgacgagcacatgctgagggccatatcatagactctggaggcagagatattatattaaagtttcaaggttgttgatacacgtctaatatttctgctgtagcaagaataacaattttgggtcaagccaaatggtaaagttgaacaactttaagtcttgttatcatgagttaaggctgaacctggggcttttgttcgggtctggtttcacttggttaatattctagaaattgctgctatttattgctgtcacgaaatcgctggacatacaaatgtactagcatggtgttctgtaaatttagagaactctttgttctcttcttgttcttataactttggttaaatattgatttttaagataaaacataattacataagaaagtcgtgctgtt

SEQ ID NO: 192166 - DNA, 548 bp, Gossypium hirsutum
tttaacttttataaaaacagaagccatcaatctctcttgctagggtttcattcaactcaccgtcgacgaaccaatatcacgcctagtggccgacggcgtgcgattaacgaccagatctttgccaacgaaggccgtaactatggaaatctggtcagcttttctcagcgccgacgcaggtaggcacggcatggcgaagccgcttatgagcttgtcgatgtggggcgtgaagcgttagggctactgatggcgtttgcggccctggctgttggctagggttggccgaaagtttggttggtattttgggcctagggtattttgggtttaggtttattaggttgggtttattggtgggttaataaatgtaaatgactggactttaaattagttcggttttattattatttttatttttggctttctggcttattataggcccaggcaaattgggcctattacagattgtttatgtttaattttaatgtttagctaaattgtcatgtgataaatacttgggatatgaatatgaggtcctttgatgcttgttaatt

SEQ ID NO: 192167 - DNA, 574 bp, Gossypium hirsutum
ataaaagagaaaaaaaaaaagcaaataaaaaggggagaaaaacagaactgttcttctggaacgaagacgatcagcgatatcaaaagcacttccccagtctcctggatttatcttctgcagtcaactccaccatattcctaagtttctctcgcaagctctttgcaatcccaaaaggagaaataaaaatctttttggggaaggacatggcagccgaggaggctcttgacttgtcaactttgcagtctcagctaagtgaaactcatgaaatttggaaccagaagatggaaaaacaccaatgccaggtagattttttacaagacaaaattatggaggtaaaggcttgcttacaggggtcggaggaggaatcaaaggaggtagatgttctttggcgtatggtaaaaactactgcaactttgttggcttacttggaatcaaaagctagagtgatggctgttcctgatttagccctataagtcatgcggcatctaaatattagaaggggtagggctcgtggataaggaaggtacaccgttgtctggatggtcaaggagtgctgatctcgcttcatttgact

SEQ ID NO: 192168 - DNA, 426 bp, Gossypium hirsutum
ctggaattatcttctgcagtcaactccaccatattcctaagtttctctctcaagctctttgcgggcccagggggagaaataaaaatcttcttgggtttgtcttttattgccttccatttttcttttattttcagaagaaaatggaaggacatggcagccgaggaggctcttgacttgtcaactttgcagtctcagctaagtgaaactcatgaaatgtggaaccaggagatggaaaaacaccaatgccaggtagattttttacaagacaaaattatggaggtaaaggcttgcttacagggtccggaggaggaatcaaaggaggtagatgttctttggcgtatggtaaaaactactgcaactttgttggcttacttgaaatcaaaagcaagagtgatggctgttcctgatttagcccataagtcatgc

SEQ ID NO: 192169 - DNA, 1676 bp, Gossypium hirsutum
ctttctctacaaatactttgctgcaaattctcccaaatttttcagaaaatctaacacaagttgttatcaattagggaaaaaaatgagagagatccttcatgttcaaggtggacaatgtgggaaccaaatcggttccaagttttgggaggttgtttgcgatgagcacggcatagatccaactggaaggtacattggttcctcggatctgcagttggagcgtgttaatgtttactataacgaggcttcatgtggtcgctttgttcctcgtgctgtgctcatggacttggagcctggtacgatggacagtgtccgaactggtccttacggccagattttcaggccagacaactttgtttttggacaatccggtgctggaaacaactgggccaagggccattacactgaaggagccgagcttatcgatgccgttcttgatgttgtgaggaaagaagctgagaactgtgactgcctgcaaggtttccaggtatgccactcattgggtgggggaactggttccggtatgggtacattgcttatctcgaagatcagagaggagtaccccgataggatgatgcttacgtgctccgtgttcccctcgccaaaggtttccgatacggttgtcgagccatacaatgctactctttcggttcatcagcttgttgagaatgctgatgagtgcatggttcttgataatgaggctttatatgatatctgcttcaggactcttaaattgactactcctagctttggtgatttgaaccatttgatctctgcaaccatgagtggagttacttgctgtctaagattccccggccaactcaactccgacctccgaaagcttgctgtgaacttgattcccttcccccgtcttcactttttcatggtcggatttgctccactgacctcccgcggttctcagcagtaccgagctctaactgtccctgagttgacacaacaaatgtgggatgcaaagaacatgatgtgtgctgctgacccgaggcacggtcgatacctcacagcatcagccatgttccgaggcaagatgagcaccaaagaagtggatgaacaaatgatcaatgtccaaaacaagaactcttcctacttcgtcgaatggatcccgaacaacgtgaaatccagtgtctgcgacatcccacctagagggctatcaatggcatcaaccttcgtaggaaactcgacctcgatccaggaaatgttcaggcgagttagtgaacaatttaccgctatgttcaggaggaaagctttcttgcattggtacaccggtgaaggtatggacgagatggagttcaccgaggctgagagcaacatgaacgatctcgtgtccgagtatcaacaataccaggacgctaccgctgacgaggaaggcgaatatgaggatgaggaagatttggatgaagaacacatgtgatgaaagcgaaaaccaaacgaagttgtcggtaatgcagcatatacaggtatgtgattcgagtggatttgtatgtaatgagtaatgaaagtgtcttttccctatttttccctttcacgagtttgctttttttggtttctatttgagagagtaatgtataatatatccgaaaatagtaatgtaatacctatatctatgtttgtattcatttggtttttgtgtattatatgatcaatgccttattttttctctt

SEQ ID NO: 192170 - DNA, 561 bp, Gossypium hirsutum
ttctacaaatactttgctgcaaattctcctaattttttcagaaaatctagcacaggggaaaaaatgagagagatccttcatgttcaaggtggacaatgtgggaaccaaatcggttccaagttttgggaggttgtttgcgatgagcacggcatagatccaactggaaggtacattggttcctcggatctgcagttggagcgtgttaatgtttactataacgaggcttcatgtggtcgctttgttcctcgtgctgtgctcatggacttggagcctggtacgatggacagtgtccgaactggtccttacggccagattttcaggccagacaactttgtttttggacaatccggtgctggaaacaattgggccaagggccattacactgaaggagccgagcttatcgatgccgttcttgatgttgtaaggaaagaagcttctaactgggactggctgctacgattttatgcatgactaataatgcttgacctaatctaatcatgaagctggtcatcaaaacttataatgatgagatcatgccatttttattggcactggttgtgt

SEQ ID NO: 192171 - DNA, 1149 bp, Gossypium hirsutum
gcaatctatttagatgggccaattatccatctatttttgcagcaactgtattgtacttgccacaatttgcctctagcctagggttattaattttgtgattgtctatctacaggcttcttggaaatagcttccttgttcgttgctaatgtaacccttgctggtgctcaggtgcttctgagccgattgagattgtttttgagtcctgggtatccatatgaggaaatattgagtacgtttcataatcaaaccagcataattatgtgctcattccttccggttttcactagctttaatagaacaaaaggaggtttgattcagttaaaccatggaaggcctcagccactgcaatacgtagtcaatgcagccttcttagccgccctatatagtgattatcttgatgctgctgatacacctggatggtattgtggtcccaatttctattcaactgatgtcctgcgtgaatttgccaaaacccagattgattatatccttggcaaaaatcctcgaaaaatgagctatgttgtgggctttggtaaccattacccaaagcatgttcaccatagaggggcatctatccctaagaataagatcagatataactgtaaggggggatggaaatggagggattcgtcaaagccaaaccccaacacgcttgtgggagccatggttgctggacctgacaagcatgatggatttcacgatgttcgcaccaactacaactattctgaaccaactcttgcaggcaatgctggtttggttgctgcacttgtggcattgtctggtgacaagtcaactggaattgacaagaataccatattttctgcagttccaccaatgtttcccacaccgccaccacctccagcaccttggaagccataaatatgcttttagatcctttaaatgtttcctttttgtgtgacttagtctcatgattttgtaagtgttttttggcaccttgatgaccttgaaagtgaaagtagtgcaaagggcaaggaaggagatgtgcaatggaacatagctgcactaaactagatggtggtttggctattagattggagaataggactagcattcaggatctgataatttgaatatgaagtccatttggatttcacggtatacatagtgtatatgtatgggattaatact

SEQ ID NO: 192172 - DNA, 820 bp, Gossypium hirsutum
tgttttgatgaaagatctggtcggcggatatgacgatgctggagatgctatcaagtttaactttcctgcatctttttcaatgactatgttgagctggagtgtcatcgaatacagtgctaaatacgaggctgccggcgagctcaatcatgttaaagagatcatcaaatggggtactgattatcttctgaagaccttcaacaatactgctgataccattgacaggattgcagcgcaggtagggataggagatacatctggaggagtttcagccccaaatgatcattattgctggatgcgccctgaggacattgattacccccgtcctgtatatgaatgtcatagttgctccgatcttgctgctgaaatggctgctgctttggcttctgcttccatcgttttcaaagacaacaaagcatactctcaaaagcttgtccatggtgcccgaacactctttaagtttgctagggatcaaagaggcagatatagtgctggtggttctgaccctgccctcttttataattcctcaagttactgggatgagtttgtttggggtggagcctggttatactatgccactgggaattcatcctatcttcagttagctactcatcctaaacttgccaagcatgccggtgctttctggggcggcccagattatggcgttcttagctgggacaacaagcttgccggtgctcaggtgcttctgagccggttgagattgtttttgagtcctgggtatccatatgaggaaatattgagtacgtttcacaatcaaaccagcatagttatgtgctcattccttccagttttcactagcttt

SEQ ID NO: 192173 - DNA, 515 bp, Gossypium hirsutum
ctttatgttgaccatgtaatactcaaatgtgttggttattttcttttccatgagcatgtgaactttggatataatacaggaggtttgattcaattaaaccatggaaggcctcagccactgcaatacgtagtcaatgcagccttcttagccgccctatatagtgattatcttgatgctgctgatacacctggatggtattgtggtcccaatttctattcaactgatgtcctgcgtgaatttgccaaaacccacattgattatatccttggcaaaaatcctcgaaaaatgagctatgttgtgggctttggtaaccattatccaaagcatgttcaccatagaggtgcatctatccctaagaataagatcaaatataactgtaaagggggatggaaatggagggatacgtgtcaggaactgaatcaatcaggtccatcttattgcacccacttcaatcatcaacaatccccatactcagttcatacccccagaaaaaacaaaattataagtttcccttt

SEQ ID NO: 192174 - DNA, 663 bp, Gossypium hirsutum
aaatttttataatctaattccgaatcctgcattattgagacatattgattgcatggtcggtccgatgactgaagtccaaaactaaaaaagtgaatcaaataaacaacgacaactctacaactgttaccttatatctcagcttctctcaggtctgcttctttccaactgagtatctagtgttgataggatctgaggcattgacattcccccagatataacaatttcaattccttcacggactgacagattcagtctgataacatccttggtgttgatgaggaatatatcaccgaggtaaagatgattcgtgggaacatacacacagcatagctcttcttcaccagcgtcgctctgcagagtaacagatgaagtgatgaacccaaatgcatattcaccaattcgaggatgccttatgatggctacttccttgaatgcctgtgtgttctgatctggtgatatagcggaactgatctgcttggaggcattgtagatatgacgaacaaatggcatccgcttgataaaccactcaccaaggcctaggacagatgctcccaaccatgatgacatgaataccccaaccaagaagatgaatgttatagaagttacaaatccaagaccaaatatttcaatgccaagttgagcataaattggagagaaaaagcg

SEQ ID NO: 192175 - DNA, 1190 bp, Gossypium hirsutum
cagggatgctattggagaaatcttggatggggactggcaagaaaatcttgccaatgaatcgtcccttgaaactttgccgaatgaagctggagaacattctaacctacaagaagctgatgaaacatcttatgaacattctccccaaaatgacagagaaaatttggaaggcaatccagctgtacagattgatgggcaagaatctgcttctctagttgaactatggcaggaagaggatcaagaaactgcagaagcagactggcaggaagctggcgttgagtataatgagtccatggatggtaatgaagaagcctctgacaggcaccatgaagatggaggcttgcgcgggactgcacaggattggatggaagggtcttacaatcaagaacctgttactatcagaagaacagatacattttattttcctgatgatgataatgtacacagcatggaactgagggaactgttaagcaggagaagtgtgtctactcttcttcatagtggtttccgtgagagtcttgaccagttgatacaatcatacgtggaaaggcaaaatcatgctcctgttgactgggagttggaaggaacatctccttctcctgcatctcttgagcaagacctagaacagcaaagtggggatcagaatgatggccacggggatgctgagactcctccactcacccttccttcacccaggatgccacctatgcaaccactctgggatcaggattcacaccattataattgggcatcacatgatgtgcatcaacgctttggcattgagtgggaggtcattaacgatttgaggattgacatggctaggatgcagcaaaggatggataatatgcagaggatgctggaggcttgcatggatatgcaacttgagatacagcggtcaataagacaagaagtttctgctgcccttaaccgttcagctggttcacaacctgcaggggtgattgacgaacaccacttgccgaaggatgcttctaactgggaccatgtcaggaaaggcatctgttgtatatgctgtgaaggcaacattgattcattgctgtacagatgtgggcacatgtgcacgtgctcaaaatgtgccaatgagctggtccatgttggaggaaaatgtccaatgtgtcgggcaccggtagttgaggtcattcgtgcctactcaatcctttaatatgaagagtatt

SEQ ID NO: 192176 - DNA, 978 bp, Gossypium hirsutum
gcgtcatgcagttaaagcaaagaacgcggcgtatgatcggatgacccttctgcaatcttacacttactttctttgtctcctcctcttgtttctctcttacaatctcaccttctttctttctttttcttcctatttttggccttctcttggccactgtgtcttcttttaacaacaatcaacatatataaccatattatatacatacatacacaaggtctttccttctaaggaagccatgactggcaaagaaatcctccacaagatgaaggagaaagttcaagaaaaagttggcttaaacccttctagtaatgctgaatctggaaaagggaagagtaagatgtcgaagaatataacacatggttatcatttagtgaaggggaaagcgaatcatccaatggaagactatgttttcgcggagtttaagcaagtcaatggcagtgagctcggtttatttgccatattcgatggccatttgagccatgttattcccgattatttgaaggcgaacttgtttaacaatatcttgaatgagcccgacttttggacggaaccagagaatgcgattaggaaagcgtatcgtttaacggatacaaatatattggaacaagccattgatttgggcaaagggggttcaacggcagtgacagcaatattgatcaactgccagaagctggtaatagcaaatgttggcgattcccgggctgtgatttctaagaacggcgtggctaagcagctttcagttgatcatgagcccgcttctgaaagggagagcattgaaaatagaggcggttttgtttcgaactttccaggggatgtcgcgcgtgttgacggccagcttgcggtggcgagagcatttggtgacaagagtttaaagaaacatcttacttcggagccagatgtgagcattgaaacaatcgatgatgatactgacctcataatattggctagtgatggtttatggaaggtaatgtcaaacca

SEQ ID NO: 192177 - DNA, 801 bp, Gossypium hirsutum
gttttggttttttttttttttgctaaaaatgtgaaaatgttgtaaattatgggtcaatcatattaacacaaacttcaggttcatggcacattacaaccagaatggaaccaaaacaaatcacatcgaacaattgaggcattaaataaagaaattcatgaaagcgtactgaaattaaaaggaaaaggattgaaaccaatccatcatccatcagtttgtatttatatgatatcgatataaacacttgatgacggtgagttttaacatcattttcttcttcattgttgttttcccatcgacactaatgtccaccctcactgtaagactactacgaaagcacccattacaaccatttgccaacttcaaaatccaaaaagacaaaaacagcaaactgactaagagaaatcgtcctgcataaactggaaaaggaaaacataaaaagcaaaccatacaataataaccaaaccgacagaaacagtagcggaagaggaaaaaaaggatggatcggaggagatgcgagtgacacatttaaatccctcctcaaaattagcgaccactgttggggcactccctagcgaaatgcccagagcctccacagttgtaacaagcaccgccgcccccgcctccgcctccgccatatctgcctccaccgccaccgccaccctgcccacagtcccgtgctaaatggcccatctcaccacacttataacatccggggcctccaccaccaccaccaccgcctcctccaccataaccgcctctccttccccctccaccatatccaccggatccaccgccataacc

SEQ ID NO: 192178 - DNA, 1226 bp, Gossypium hirsutum
gttttgtttttttttttttatataaagaaatagcctttgattttattgaactgaaatctaaaatacatgcccttatagtttgcaacatttaagtcaaaatttagcagcaacatgatcttacaaacattaagaaaccagcatgtttaagaactatttcaaacctgcaatttattggaattaaaaccttttctttttctttctggaagtacccattgacaaactttgtttcatgtcctttttgcttctaaaatcttaaatcacagcttatgaatggtttccatgtcacttacttccttcagggtccctttctcgacatgatcccaccacttgaacaagaaattatccacgacgagtctgaaccatggtgacagtttcaaaccatcttcaccagcatcagctttacgcagtaactccttcagttggtcacggttcacgtatttagcctctgctacctcatcagggtttggatgaacgttaacatctcggacaatgaataggaggtaatcaagttcatgctcgccccacttgccgtcagaaggtgccttgtacagcatgcggctcagtgggacgaactgatcaacaggaacatcttcaggaggaataccgagctcatccaaaagcttcctttgggcagcattcctcaccccaagatgattctccgaaataagctcagattcacgatataaaggatggctgcaacaggtgtttgtccagacacgagggaatgttacctttgttgcagatcgttgctgaaggagcaactcatattttgtgttaaacaaaaatacactgaatgctctatgcagcatctttccagttagaatcttttcccacaaatgacagttgtacttcgattcatggccaacaacattatcactctcgtccactaaaatacattcatcctcaaacatgaggcgtctttggacagcgtccataccaacgtcgggagcgtcacccatggtcgcggtggcggctgaagcttgggtgcgaaaagacggggataccctcgaggaaacgagggaggaatgggggaatcgagggggaggaagggcaaaagtggaagaaatggaaagaaggcggcgcgtgggaggagaagggaaagaggaagaagctaatgagcgagaaagggagagggcgtatggagtatttaaaagcataagcatttgttggtctgtgctgctctctgcatatgctctactctgtcaatggaatagaggaagggtggg

SEQ ID NO: 192179 - DNA, 810 bp, Gossypium hirsutum
gaattaaatttggggaccccaagcaaaaaaatttgattttcattccacgggaacaaaactattggattcttaaacacgccccccccatttttttttttttttttttttttttccttttttttttttttttttttttttttttttttttttttttgtccaatttaaatattcctttactaggaagagtaacggcagaacaaatatatatacagataaaaaccatgaactaggaattaatataaaatagcacaatagtttagtttaattccaaacaaaggtccaattcaattatttaaagaaaataaacaaaaaaaaaaaggcgagacggtaagaacatttgatttttcaacatttgaggcttttggcagagttggattctcaaaagcaagcatccagcaggcaacaacagcacagagcagccaaacagccttctaagaaaccagtactttgctgttgctgaggaggaggctgagcaggatattgaggggcgtaaggaggaggatatccttgaggaggataaccttgaggatatccttgtggaggatatcccggtggtggataagcatccttcggatatccttccggtggataaccttgagtaggaggaacaccaactggaggctgttgttgattgtaataactcatcgctgttctttttgattttcctgcaaatagtttcgctaaggaagatctttctctcttttcttgagtagaagattttttgttccttttcactccctggggaaagcttttttgaagagacggacgcgtgggcggacgcgtgggcggacgcgtgggcggacgcgtgga

SEQ ID NO: 192180 - DNA, 586 bp, Gossypium hirsutum
gccgccccttttttttgttagtgttaattttatttaaagacataattggagtttctaaagtttattttatttcataaagtctagaatttttagatatttttttttaaataaataatttaaatattcatttactaggcagagcaaaagataccaatcactgtccaaatggctaaccttggaacaaatatatatacagataaaaactaagaattaggaattaatataaaatataacaaaggtttagtttaattccaaacaaaggtccaatttaattatttaaagaacataagcaaaaaaaattaagcaggcgagacagtaagaacatttgatctttcaacatttgaggcatttggcatagttggattctcaaaagcaagcatccagcaggcctccgaactatttcaaacctgcaatttattggaattaaaaccttttttttttttctttctggaagtacccattgacaaactttgtttcatgtcctttttgcttctaaaatcttaaatcacagcttatgaatggttcccatgtcacttacttccttaagggtccctttttcgacatgatcccaccacttgaacaagaa

SEQ ID NO: 192181 - DNA, 1285 bp, Gossypium hirsutum
  unsure (1)..(1285): unsure at all n locations
gttggatgagatcatggactttggctacccacaaaatgggtctcctgaaattgtaaagctttacattactcaggaaggagttcggtccccattttcatccaagccttcagataagcctgttccaaatgcaactttacaagtcactggtgctgttggctggcgaagagagggacttgtttataaaaagaatgaggtgtttctggacattgtggaaagtgtaaacctactaatgtcttcaaaaggcagtgttttgcgttgtgatgttacgggaaagattcttatgaagtgcttcctttctggaatgcctgatctgaaattgggcttgaatgataaaattgggcttgagaaagaatcacaacttaaatcccgtcctgctaaaagtggcaagactattgagctggacgatgttactttccatcaatgtgtaaatcttacaagattcaactctgaaaagactgttagttttgtgccaccagatggtgaatttgaactaatgaagtaccgtatcactgagggagttaatcttccttttcgggtattgccaacaatcaaggagcttggtcgaacacggatggaagtaaatgttaaggttaaaagtgtctttggagcaaaaatgtttgctcttggagttgttgtcaaaattcctgtccctaaacaaacagcaaagacaagtttccaagtaacatcaggtcgagcaaagtacaatgcggctattgattgcttggtattggaagataagaaaattccccggacaaacagagccaaccttgagtgcagaagttgagttaatttccaccatggcagaaaagaagtcttggacaaagccaccaattcagatggaatttcaggttccgatgtttacagcctctggtttacgggtccggtttcttaaagtgtgggagaagagtgggtataacacagtcgagtgggttcgctatattaccaaggctggctcatatgagatcaggtgctaaaaacacaggattccccgttggctcgtatcancaaacttgaatagtgaagagtgtgttcgcttgctaccgattgcatgtatttgccgtgatggtaaggggaataagcctcaatttccaacttaaagcatgcagccatccttttgctctggtttcttgaattatttggcatttttttcccttgtagtgtttttgttaatatgtttatttcaagtgactatttggtttatgttgttttcttgtaaaggctaaccttatttaaaacaaaatgtgccattataatacaatgctttattgtttgcatattagaacac

SEQ ID NO: 192182 - DNA, 397 bp, Gossypium hirsutum
ctctattcacaccccattatataacttggtactggcctgaggctttcaccatgaggaaacagtgcaaatctcaatgcattaaccatggaaggtattgtgcacctgatcccgaacaagattttagctccggttatgaggggaaagatgtcgtgattgaaatcttaaggcagctatgcgttttcaaagtcccaaatgtgagcaataagtcctggttgtggtgggactatgtgacagattttcaaataagatgccccatgaaggagaaaaaatatatcaaggaatgcgccgatgctgttatcaaatctcttgggcttgacagttaaaagattgaaaagtgtttgggagaccctaatgttgatgcagataatcctgttctaaaagaaaaacaagatgccca

SEQ ID NO: 192183 - DNA, 1373 bp, Gossypium hirsutum
caaaaccatgatacggagaactaagtccgatcaggaagaggagaacagaaagaggatggaggagttacggatccagcgccagaagaggatagctgagaggagtgctgccggtggtcttaatccggttacttcccggaggagctccgccgaaagtaaaacttcagcagcttcaacgaagagccaaccatcaactcaagacactaagaaatcgccgaagccagtccttagaagttccaccatagaacgccttgcaaccgcacggaatacttcaaaggtctcttcggctgaattgaaatcgagccagccgaaaaagccaacattgaaggaaatcagttcttcaacaactcagaaggctgctcctgctaaggataagaaatcaagcacaaacaaagccaaagcttcagatataaaaagtggtacaaataaagaacttccaagtggcgataatgcacaaggaaaaagggagtccaatgaggtcacagtagcattgccaatggaaccagcaccatccaaagcaactcaacctactgacattgttgatgatttcaaggacattcaagaattgcagactaccccaatcgaaaagaccgaaggaaatgcaactttgaaaccaaacccgtcgggggaagaccaaagctcaaatgccaaaatggttaccgtaaataagccaatgcaattagatcatgtaaaaggtgatgaagaatttataatgccaactaaagttgtttctgaagataacatagcaccagaaggatttggtaaagatattcctgagacaacggtccatcctgtgccgccagtgcctagcaagacggtaagattttcgactgtaaatatcgaagagatgggtgcaacgaatgagaaatatcagtcgcctaggattcctgaaatagagatctcaactccacctccaaataatggaatggacaaggaaccaatgcatagcacgaagaaatggaacaacgaggagagccctcctaaagcagccaaagggtttagaaagcttcttttctttggaagaaaaagcaaaaactatgctactgcttagtgtatgcttgtctttccatattgcttatgtttcgggttttcagttttttcgggtggaacgtaccaataaggcctttgatgttgctgccattcaaggattcatgaacttataaagaaaaatggggaaaataagagagagattcataatgtaatttatctttgtttgatatatcatgttggaagggttaaaacacattcttttttgtttgattgtatacctttgtattttgaatcatttgtaatttgaattatttgtctatctctctctctctctctctctctctctctctctctctctctctctctctctctctctactctctctc

SEQ ID NO: 192184 - DNA, 620 bp, Gossypium hirsutum
tagggtttgtggagtacttcgtttttggttttgttcgctctttaactagaaaaaaaaataaaaataaaacatcaatcaattcccagccatggaaggagacttactagattgggaggtgctccacaactcggattctgactctaattctatcctggttaactcgccgcagttgaggaatcttgagggaatcgaaggtgatactggagggatgataaggtctgattacttttctcttgataatcagagtatgtatgcgaaggaaggggatgcaagtgaagaaggctctattgagtcagataatccgagttggattgatcccaagccggagactcagtttaggaggaataattcgggtgatttttggtccgattcgggtagtgatcggtcagatgatcgtaaattaagtgatttctctttgaaaaaagacttggagtccgctgagaatgaggtttgtttacaagggattagttaaacggaagctagggctgacgaattgggtacatttaagcctgaaggtgccgaacttactgaattggataagataaaggaattagattttggtgggtttggcgatattcaagatcaggaaaagggatttgagcgaggtgtggactgaatct

SEQ ID NO: 192185 - DNA, 1130 bp, Gossypium hirsutum
  unsure (1)..(1130): unsure at all n locations
tagaactatgccgcatccctcggacgagttcggcacgagattttattcaatcttttcttcaagttcccattgtccccgttggccagtgttgaggttcaatcagctgcaacaacattgccagagaacgagacaacaccagaggtaaccaaggttgtggaaacgccaaaagaggagccagcggccgcacctgtagaagctgagccggagacaacatcagatgctccggctgcggaggaaaccgaagtttccatagccgaagctccagctgaagtcgataccaaagaagtggtagaagaagaagcgaaggctgctgaggaatcggagaaagcaaaggaggaggtaaaggatgagaccccggaggtgcagacagaaacagttacagaggaggccaaagtagagaccgaggaacccgcggtggaagcagcggtggaggagaaaccagcggaggaggaaaagggagatgaaaaagctgaagagattcctgttgagaaagttgaagaatagagcgaccaataccatacgtaaggtggcaaaagcttaaaggagcttcttttttctataggctgtatgtcatagttggcggagtcatactactattatttatgattactatgtcggatgtgggatgatgagggctttctttttctttaatggttgtttttctgctttggggtttgatatttagtattgaacttccttttgggtccaggggtcaacatgctgatggaagaaactataggttttccattttgaagtggtatggatgtatgtatgcatgtgtgcatgcatgcacgcacgtatggttttcggtcccaagagagtctatatgatgagtttgatactggtgtgatgagatgtgatctccatatttgcataataaatatctatttttgtttaaaaaaaaaaaaaaaaaaaaaaaaataaagaatccaccaaaaaaaaaaaaaaaaaaaaaaaaaaaaaaaaaaaaaaaaaaaaaaaaaaaaaataaaaaaaaaaaaaaaaaaaaaaaaaaanggggggcgcccgttttaaagaaccaaattttactaccccgtctttgcaaattaaaaatttttttttagggcccccaaaataaaatccctggcccgggttttaaaaacgggggg

SEQ ID NO: 192186 - DNA, 448 bp, Gossypium hirsutum
ttcacgcgtccgcccacgcgtccgcggacgcgtgggccgaggaacccgcggtggaggagaaaccagctgacggggaaaagggagatgaaaaagctgatgagattcctgttgagaaagttgaaaaatagagcgaccaataccatacgtaaggtggcaaatgcttaaaggagcttcttttttctatagttggcggagtcatactactattatttatgattactatgtaggatgtgggatggtgagggctttctttttctttaatggttgcttctctgctttggggtttgatatttagtattgaacttgcttttgggtccaggggtcaacatgccgatggaagaaactatgggttttccattttgaagtgttttggatgtatgtatttatgtattttatttgtattttcttgaatataatatattttatttttttttagtttttatttatt

SEQ ID NO: 192187 - DNA, 1060 bp, Gossypium hirsutum
  unsure (1)..(1060): unsure at all n locations
gtcaaacctgaagtgcaaaagtcaccaccacctatcgaagttcctgcactatcgttggaagaattgaaagagaaaacggacaattttggatcaaaggctttgattggtgagggttcttatggaagagtttattatgccagcttgaacaatggaaaagctgtggctgtgaaaaagcttgatgtttccactgagtccgagtcgaatgtggagtttttgacccaggtttccatggtttcaagattgaagcatgacaattttgtcgagttgcaaggttactgtgttgaaggaaatctccgtgtgcttgcttacgagtttgcaacaatgggttcacttcatgacatattgcatggaaggaagggagttcaaggggcacaacctggtccggttcttgactggatgcagagggtaagaattgcagttgatgcagcaaggggcttggaatatttgcacgagaaggttcaaccttcgattatccacagagatatcagatctagcaatgtccttctctttgaagacttcaaagcgaacattgcagattttaacctctcgaaccaggctcccgacatggctgctcgtcttcattctactcgtgttttgggaaccttcggctatcatgcacctgagtatgcacatgaccgggcagttgacgcagaagagtgatgtttacagttntcggggttgtccttttagagcttcttacggggaggaaacctgttgaccacacaatgcctcgtggacagcagagtctcgttacctgggctactccaagactgagcgaagattaagtcaaacaatgcgtagattcaaaactgaaggnagagtatcctcccaaagcagttgctaaagttgcagcttgtgcggcattatgcgtgcagtatgaaatctgagttcgtncaaacatgagcattgtcgtcaggctcttcaccggttgtgaggctcagtgccataccacgctgcgacttaaacagcgaggatcaagttttcgcatttatgaatttatcactttgaagtnggtcgaatcaaatcgatttatcgacctaatataatattcgttttatcn

SEQ ID NO: 192188 - DNA, 1149 bp, Gossypium hirsutum
atccaagctgaccaaaattgtggaagaatctcaaacagtaaacgacaacaaattgtctgaatttgaaaagaagtttgaggaatgtgccgctaatgaagagaagcaattgctgcaaaaggtggcagaactgcttgcaggttcaagtgctaggaagaaaaagctggtccaaatggcagtccacgatctccgggaaaatgcatccagcaaaaccagtaaactacagaaagaaatgtctaccatgcaagagtccacgtctgttgttagagcagaatggaatgttcacatggaaagcacagaatcccactatattgaggatacttctgctgtagaaagtggaaagaaagacatggaagatgttcttcaaaattgtatgaagaaagcaaagatgagtgctcagcaatggaagaatgctcaagaatcccttctcagtttagaaaagagtaatgttgattctgtggattccattgttaggggaggaatggaagccaatcagatcctccgagatcaattttcttgtgctgtatccactgctcttgaagatgtagacactgcaaacaacagttgcctaacatccattgattattcattacaacttgatcgtgatgcatgtgggaacatgaattcgatgattattccttgttgtgaggaattgagggaactgaagggtggtcactaccacaagattgtagaaatcacagacaatgcagggaaatgtctggaggaggaatacatggtggacaagccatcgtgttcaacaccaacgaagagggcattcaacctaccaagcatgtcatcaatagaggaactgaaaacgcctccattcgaggaactattaaagttgttttgggaagcaaaatcagcgaaggtagccaatggagatataaaacacatgttgggggaatatgaagcagcatcagcagctccccaatccccatcccaacaattgaaagattctagacttcctctcactgctattaattaaaaagtgaatggacttttaaaacagataaaaacaagaaattagtatattatattatattatattatattatatatataatattagtatagtggtaagaaagaaaaggtgtgtacagtgcagatacagaaccagaatacggtgtggctgaacgactccttcccttgggc

SEQ ID NO: 192189 - DNA, 574 bp, Gossypium hirsutum
acttgaccgtgatgcttgtgggaacttgaattccatgatatatccttgttgtgacgatttgagagacctgaaaagtggtcactaccacaagattgtagaaattacagagaatgcttcacaatgcctcgaggacgaatacatggtggacaagccatcttgttcgactccaaggaagaggtcattcaaccttccgagtgtttcatccattgacgaactcagaactcctccattcgaggagttattgaagttgttttgggaagcaaaatctgcaaaactagcgaatggagatgtaaaacatatgctggcagcatatgaagcagcccaagccttgaaagactccagagttccactcactgctataaactaaaagtgagatggaaaggaacaaacatatttaagaaaacaaaggccgagtatagtatagtgttaagaacaaaaggtgtgtacagattcagaaccattccactcttttttttttttctttcttgtatttcattaattgtttggttgcttgttggattcagcaaattatcacatttacatactaaatcagattttcttctcttcttttctc

SEQ ID NO: 192190 - DNA, 928 bp, Gossypium hirsutum
gttttggttttttttttttaaagttgaaaagggcatatgataaaatcagccacaaactcagagagcaaccatatcagccatctaaacgaatcaagtcatactagattcaacatgtagccaatttacaatggcaaagcatcacattgcctctctgctaacacactcagaaaccaaacacctaatctgaatctgattcagatttatgatcatccgcatttgctttctcttttccttcagcttccttaacagccttcccaaaggcatcaacgggaatcgatggtagatacccaaccacaggataacctttttccactcttctcctttaaccaactgttgtatttctcacacaaattagctgctttgggaacaaccttttctgtcactgagttgaaagtcaagttgctgttcagtttaacccacaacttggtcgagcttaccaacaccaagttcttgtactcagctgcagcgtagtgcaaagcccctcgtgctccattggttcgagcctcctctactagtttctgagccttttgggttgccttttggaccaaatcgtgggccaggttaaccacttgcttggctggtgctggagcatgctcgtcaaatttgtgtgaaacctcatctaccttgttatcaagaaatccaagaaaatgatcaggaacatccttaaatttcccgtaggcgggaccgacggcagtggtaacggcatgctcgacggcgtcaacggtggatctcaacggccccgagttctgtttagagtaatcgtaaaggttcgagacgcaaaccaaggcgtggattgtagccaccctgacgaagtttaggtgcttgaggcctaaattcttgttctcaaactctaaccccttctccatggttgccatctgtttgatgcaagtattctttgcttcacttttttgagagaaaataacgatcg

SEQ ID NO: 192191 - DNA, 1761 bp, Gossypium hirsutum
ctcattaattttcaactgttttgtggattgtcttctacctatttacacaaccaataacacagtgagcaaacaaccttttcacaaacctcatcatcatcttcttctaaatctgttgcctagaaaatgaataatcatcacggatttacggagaagaagcccaacactaagatcgtatgcaccttgggaccagcatcaagaccggtccctatgatcgagaagctgttgatggccggcatgaacgtcgctcggtttaacttctctcatggatctcatgcctatcatcaggagactcttgataatctcaggtccgccatggtcaataccggtgttctgtgcgctgtcatgctcgataccaagggtcctgagatccgaactggctttctgaaggagggaaaagttcagctgaaacagggtcaagaaattaccataactactgactatgatataaagggggatgaaaaactgatcagtatgagttataaaaagttggccgaagatgtcaaaccagggatggtcatactttgtgcagatgggacgatctcttttacagtcttatcttgtgacaaacaaaagggtttggtgcactgtcgctgtgagaactctgcacttctcggtgagaggaagaacgttaatcttccaggggtccttgttgacctcccaaccttgactgaaaaggacaaggaagatatcttggaatggggagttccgaaccaaattgacatgattgctctttcttttgttcgaaaaggatcagacctcgtggaggttcggaagctgcttggaaagcatgctaagaatattcttctaatgtcgaaggttgaaaatcaagaaggggtagcaaattttgatgacatccttacaaattcagatgcatttatggtggcacgaggtgaccttggaatggagattcccattgaaaagatatttctggcacagaaggtgatgatttacaagtgtaacatccaaggaaaacctgttgtcactgcaacacagatgttggaatccatgataaagtctccccggccaaccagggctgaggccactgacgttgccaatgcagttcttgatggcacagactgtgtgatgttaagtggtgaaaccgcggctggagcttacccggaacttgcagttcgaaccatggccaaaatatgcgtacaagcagaaagcacacttgattatggagatgtcttcaaaaggattatggaacactcaccggttccaatgagtccattggaaagcctggcttcttcagctgttagaacagcaaattcagcaaaagcagctcttatcttggtcttaaccaggggaggaagtaccgcaaaattggtggctaagtacaggcctggcatacccattttatccgtggttgtccctgagatcaagactgattctttcgattggtcatgcagtgatgaaactccagcaaggcacagcttagtctttcgtggtttgatcccggttttatatgctggatctgcaagagcttctcatgaagagacaacaggggaagcattggagtttgctattcagcatgccaagacaaagggtctctgccaaaatggggattccattgttgcactgcatcggattggaactgcatctgtaattaagatcttgaatgtaaagtgaattgacttggtgatttccgcttcactttcagactttctgtccatggcactacttactttttcagttttagatgcaacaaacgtgattaacaagatgactaataaataaaatggggtgatgatttgggttttt

SEQ ID NO: 192192 - DNA, 457 bp, Gossypium hirsutum
cggacgcgtgggctttactcttctgtgtgaggagaaaaaggaaaaacctttccacaaatctgtatctgcgtctgctttgaaactaaaaaatggaaatcaataaccaccatgaaggaggtttcgaaatggagaagaagcccaagacgaagatcgtatgcactctgggtcctgcatccaggtccgtccctatgctcgagaagctgttgagggccggcatgaacgtcgctcgtttcaacttctctcatggatctcatgcctaccatcaggaaacccttgacaatctcagggcagctatgctcaacaccggcattctctgcgccgtcatgctcgataccaagggtcccgagatccgaactggttttctcaaggatggaaaaattcagctcaaacagggtcaagaaatcaccataacaactgactatagcataaagggtgatgagacactgataagtatgag

SEQ ID NO: 192193 - DNA, 652 bp, Gossypium hirsutum
caagtttcttatcttcctccatggaaggaattcctaaacatattattacaaaattcaacttcttcacagatagcccgagatcacctcttcaacctcccacatatgggaatttgattactcttcttagcattgatggagggggtatcagagggcttattcctggaactctacttgcttttttagagtctcagcttcagaagctggacggtgagcaagcgagattggctgattattttgatattatttctgggacgagcactggtggcctcgtcactgccatgctaactaccccagatcccaaaaaagagaatcgccctctttttgctgccaaagatatcaatgagttctaccttgaacactgccctaaaatctttccccaagatagttctccttttgcaccagctgcaaatgtggtcaaatcactaatgggaccaaaatatgacggtaaatatcttcatgatattgtgagggaaaagctgggagaaactaaattgcaccagaccctgactaacgttgtgatcccaacttttgacatcaagcaactccagccaagaatattctccacctatgaggtaaaaagccatccttgcaccgatgctttactgtcggatatttgcattgcaacttcagcagctcctacttaccttcctgc

SEQ ID NO: 192194 - DNA, 1186 bp, Gossypium hirsutum
gggccggccgacccttccgcgaacccttatgcacaacccaaatctctctccatttttactaatcgaaatagatataaatttgagtttgatcccagtttcctttgaaaaagaaaaccccacagaagaaaaaaaggtacaaattttattcattaaacttgaaaaagaaccaagtttttgtattggaggatggcaagtggggatctagagcgaggaggaaggaatgggaagaacagagcaaatagctatcaccaatcatcatctcctttctatgtagaaaacactgataagcaatggacttcatggcttgttccaatgttcgtggtggctaatgttgctgttttttttgtggtgatgtatatcaatgattgccctaacaacaatctgggatttgaaggcagctgcgtggctaagttccttggcaagctttcttttcagcctttgaaagaaaatcctctctttggtccttcttctcatacattggacaaattgggagcactaaattggagcaaggtagcgcatggcaagcaaggatggaggctcatcacttgcatctggctacatgctggcgttattcatcttcttgcctacatgttgagcttggtcttcattggaattcgccttgaacagcaatctggattcctgctgctctgtccttttcttagtgtttgattaatgatcatttgattcattacttgctgaatgaagaatttgatcatcttgctgttaaagcttttatatgtgtttttcccctaacagtgcgtattgggcttatctatctattgtccggctttggagggagtatactatcatctcttttcattcaagaataatatttttgttgtgccctttgtgctttatataaacctctgagagccatgtgataccgagcttttgagttaacgggctctatatacacataaagggctggtgctaaacccacattgggggccttaatgccttaacttaaatagtgggtattcttcctccggcaaaactttgcccatatgggggctttttaccggttttcccctggtttggtaaactgttcgtccaaatccggggggtccaatgcacattgtcctgtggggccctgtaaatttacccagggattccgtattttttgggattccgggtttggcaaattggatcacaggaatgggacctcttaagaaaaaggaatcccttg

SEQ ID NO: 192195 - DNA, 1057 bp, Gossypium hirsutum
gattcattcaattctacattgaaattacttttagaattgtgattttaaatccaactagaaagcaaatttccatcaaaacatcggtttgcccttcaaaccaaacgtaatacctttagattttccatgcagacaaacaaacaaacaaacaaaccctcccatccacaggttccaacataatttgattgttttgcaaatattaagaaaactacgtaacctgagtgggaatatatatataattttctccttaaaccactaaatattaatttttttataataaacttactcgagtatattgttgctttctctttcaggtctatgcttttgaagcagcctcatccttcttatcttcctctgtttttgcttcatctttgacggcttccttggtgtcggaggcaacgaccgtatcttcttctttaccgtcacttttactttctccaacactcaacttgtcgaggagatcagcagtgactgtagcgtctttattttcctctttctttccctgactttcagcaacatcttgaactgtctccatgaaggtcttacaattctcaacagaagcaaatctgatacagaacatctcttctttcaaattcccatcagcgaaatcagcggcgtgccaaacgcatgatttatcatttccagaatgttcttgcaccgtcattgttggaataacgaaatggttagcacagatcttaagggttttagattggcgcatgactagacggactttgccattgactttgtgcttcaagagcttcacatttccaactcctctctccttccattgattcccttccttatcgaatcgatacagctttgccttcagatcgagaatcggatcctcgtcttcttcaccagtagtgacagcgacttcctcgagcttgacgataggagctacttgagcaccggtgtcctcatcgtctgcggcggtggcgggagcgttgtcatcgtcttctctgcagtgcggctctggatctcctttagcatcggtcgccattggtgcagctaaacaagcaaaaaaatatataaatataaagaaagaaattgaaaagaaaag

SEQ ID NO: 192196 - DNA, 430 bp, Gossypium hirsutum
gttttgtttttttttttttgcatcaaaacatcggttttgccttcaaaccaagcgtgatacctttagattttccaaattaaaactcttacaattccatgcagacaaaacaaacaaaccctcccatccacaggttccaacataatttgatttttttgcaaatattaataaaactacgtaacctgagtgggaatatatttatataattctctccttaaaccactaaatattaatttttttataataaacttactcgagtatattgttgctttctctttcaggtctatgcttttgaagcagcctcatccttcttatcttcctctgtttttgcttcatctttgacggcttccttggtgtcggaagcaacgaccgtatcttcttctttaccgtcacttttactttctccaacactcaacttgtcgaggagatcagc

SEQ ID NO: 192197 - DNA, 946 bp, Gossypium hirsutum
tggagaagagacgaaattgtagttgaccctttaaccatttatttcttataaaccgaatcactccttcggagattttgataattcccccatctccctagatctcctacatttcggagatggcggacgcgcaatccagatacgttaagctgacaaaagatcaggcgcctttagaggatatccaacctggtgaacttaatcagcccattgatgttcctcagttgcatgtccgaaagtgcaatgaatgtggacagcctttacctgaaaactttgaacctcctgctgttgaaccttggacaactggaatttttggctgtgctgaagatacggaaagttgctggacgggactattttgtccatgtgttctatttgggcgtaatattgagagcttgagagatgatacgccttggactacaccatgcatttgtcatgctatttgtgttgaaggtggcgttgcattggcagttgcaacagcttttgtccatggtattgagccgaagacaacatttctcatttacgagggtttgttgtttgcttggtggatgtgtggaatatatactggcctttctcggcaatccttacagaaaaagtatcatctcaagaattcaccctgtgatccttgcatggtgcattgctgcatgcactggtgtgctttatgccaggagcatagagagatgaagggacggctatcagatgactttgtcatgccaatgactgttgtcaaccctcctcctgttcaagagatgaccgccaataatgaaaaccaggattccacaccaccaccctctgggactagcacaaacttggagatgcaagctctctaagttccggcattcttagtaaaaaatggcgcatattgttgaatgatttttgtgttggagggattttatttaaatattcatgccttgtttctctgtaaaaaaaaaaaaaaaaaatgtcgacgcggccg

SEQ ID NO: 192198 - DNA, 857 bp, Gossypium hirsutum
  unsure (1)..(857): unsure at all n locations
cccacgcgtccgccttgaccgagaaggatgaaacagctgaacaacttcacatttcgaagggagctatcgaagatggaacacagaagattacttctgaagggcagagtttacaatctcagatttcttcactaatggaggagaataacttgctcaacgaaacacatcagaacacaaagaaagaacttcaatctgtaatatcacagcttgaagaacaattgaaaaacgaaaaagaaaatgaagaatctctaaaatcagagattaacaatctcaaggctgagattgcggagagttccttactgcaaactcatgtcaaaaaacttgaagaacagttggtgacggttgaagctcaattgaaagaagaggttgaaagtgttaagacagccgcctctgtaagagaagctgaattaacttcgaaattagaggatcatgcacaaaagattagtgatagagatgttatcaatgaacaagtgggttcaacttcaacgagaattacaacttgctgtaacaacgatcactcaacagaaggatgcagattctcagaaagagatggatcaagaagccgctttaaaacattccatcgaagagctcgaagccaaaaacaaagaagcattacacctcaagaaacaagtcaaagagttggaagattaattgcagaactgagctaaatgaagtgcagccggcaccgaagcaagatctttaaggaattccgagatctgtggatacatttacaccacanacgaagatnaaaaagtcgacccgtctgcagtggtctttttatagtaccaaaggggttcttggaaactaaatgtttgtgtcccttctaaataatgttgttaggagttatcagagttgtcttt

SEQ ID NO: 192199 - DNA, 649 bp, Gossypium hirsutum
aaagagatggatcgagaagcaactttaaaatattccatcgaagagctcgaagccaaaggcaaagaagcattacacctcaagaaacaagtcaaagagttggaagataaattgcaagaagctgaagctaaaatgaaggttgcgagcagtgcagccgaagcgaaggatactgtagaggtgaattccagagatactgacggattaacattttcaacaccaacaaaacgaaggagtaagaaaaagtcggaagccgcttccgtacaagttgcttcctcttcttcatcagctacccatactgaggcttctcctttgacgaacttaaagttcgttctcggagtagcccttgtgtcagcgatcattggtgttattcttggaaagcgttattagtttagggtttttttccccttcctttttgtgtttgattttactacattgctgatttttgttttctttgcattttccttctttaagttatgaagcagaatagaaaagctttattgctcgggttttgaggttcggttggggaacttgttttcattctttcccttgcccgctttgtcagaaacagtcagttttatgcatatcgatatttaagtttgtattctgtaaaattgaatcggattgatcatgtttttggtttatatctcctatc

SEQ ID NO: 192200 - DNA, 557 bp, Gossypium hirsutum
tttttgtctgagcaatttgatatcacgatctgattggggtgggagaaaatggagaaggtgatgaatatgataaagccaaaaccgaatccacaacagctgttaagagattggcagcgtcgccttcgccaggaatgccgaaacatcgagcgccaaatcagagatattcaaagagaagagaaaaatgtacaaaaagctattaaagatgctgccaagagaaatgacatggtttctgctaagtcactcgccatggaaattgtgagatccagaagaacagtcaatcgtctctatgaaaataaggcacaattgaattcaatatcaatgcaccttggggaaagtgtagcaattgcccgtacagttgggcatttgtccaagagtgctgaggttatgaagcttgtcaataaccttatgaaggctccagaagtggctgtcacaatgcaagagttcagcaaagagatgaccaaggcaggtgttatcgaggagtttgtcaatgatgctcttgacaatgcgctggattctgaggatatagaggaggagactgaagaagaagttgacaaggt

SEQ ID NO: 192201 - DNA, 682 bp, Gossypium hirsutum
gaacttaagatttcagtctcaaatatggcaaccagcgccagagaaagtcggcgtaggaaaatcctcgaaagaggatctgatcgtttggctgttattgcgggtcagctccaaaacctgcctactcctcctcactctcatgaacaactccacgccaaccctcctccgccgcaagatccacctactgatttttcgactcaacccgccgtttctcctgatgtcgacgatgaagcctccggtcctttgtcgctcaaacatcaccctgtttctgatgctgatcagggtcagaccagtgcttataatggtggaattgatgaaggatcagcatccagcggacgggatagaagcattgagccttcaaatggttctgcttttgatacaagtggtgaaccgaattcatttctggtttcatcaaatgatcgaagttcaccaatttccacgtcagggacagtacagggttcagaaacatctgctcggaaacataacttcttcacccctaaacaaataagttctgccattgatggatctgagaaagcacgccttttatgttcagcaattgcgggtgttttagttgtattgttgcatttggggtttcctcttccaggaaacaagttcgtagggagcattcttaactttaggccactttacttggttttgttgaccaatgtaacattggtgatggggc

SEQ ID NO: 192202 - DNA, 346 bp, Gossypium hirsutum
cagatgaacaatggggttggtaccagcctccggagcaaggaagttcaacatggaaatacaaataatatttactgctctaccaaaaataacggtaataaggtgtgctgagagccaatttgtttttgagtatgtatgtttgtacgtatgtaatcccgtcccgttgcaggtatgtctatggttttcagtttcacgtttatatgtatgtttgcatgtacgtaatccctttgggggctatgtcaatggcattgagtctcgtttatatgtatattctacattacattttggctgacctgtttggaatgtaagttgcgaatgcatgttacctaaaaaaaaaaaaacaaccgca

SEQ ID NO: 192203 - DNA, 348 bp, Gossypium hirsutum
gtaacacgcaaaatggctccaccgaaagcagggaaaacctttccatcgatcgcggaatgcgatcgattgaaggacgaatcgatcgccgccgatctggatggcacgcttttaatctcacagaagctctttcccctacttcatgcttattagccgtcgaagcgggaagcctccttcgaggtcttatccttcttctttctctgcctctggtcatcatatcttatctcttcatttccgaagctattggtattcaaatcctcattttcatctccttcgctggactcaagatccgcgacatcgagctggtatctcgcgctgttcttcccagattctatgctgcatatgtaagga

SEQ ID NO: 192204 - DNA, 1076 bp, Gossypium hirsutum
gtttttgttttttttttttacacacaaattagcagtctttgcatacccatagaacagagagaatcatacatgcatagcaaatgttatttgtcaggcagatcagagagagggggtccaggtttaggaaacatcaaaactgcagcccaagaaggcaatagggaaacaagtggacggatcctaccatgagacctgtttaattgtacacttgctatccacacctaactccagtggcagatcagatgtattcctctgcactttgtcacttacaataacagagctagattcagtttttatcaaatatgtatatatatataaggaatcctatatgcttagctttacgcaacatgagctggagcttttggttggatatcttcttgacgaatgggtgatgccttgaagtagccagactctggtgaagttgtggcactcacgtcagctttgacgtcatcagccatttttggtgttgatggaccaggatatgggttcttgttcaccagcctgtcccgccgcttctcaagaaaacgctgaagtgagtgtctccttgcaattggtagttcagcttgcagtttgctaaaagatgtcctggggagaggatacaactgtgcctgtggcgaagccgaggcagttgcagtactttgaagtgaaggacaccttgtaagagcaggtgaaatggtggcataatcggttgcagcattcttcatgtcaacagagccaacatcagcagcagccacagtagcagcaataagcataatttcttgtatcttttcagcggaaattgcatcaaatacagaaacttttccgccatagaagatggtgagttgggattgagcagggcttgtggtaattactccagatgccagaattggtagggaacagttatggaatattttctgggaaagaaaatcaggggtttcaatggtacccaattttcctgcatcgttatcgccgacaatatctccatttgtctctttaacgacgacgtttggcttgacttcctcgcgtgattcagcctcttcttccatggaaaccagacttttttttttctttttacttttcttttcgttgataattttttt

SEQ ID NO: 192205 - DNA, 1000 bp, Gossypium hirsutum
atccattctattcaagaaactgatttttcctttgactcgtttaccaaaagcgggaatcttccgatctgggtagggtcgatggcagaattggacagtagctgcaccagctcatcatcggggtccacgttcttcaatcgctccttcacgatgcacgcaaatacagctgaacccgatgcccccaaagtccatcttcttctcaacaacccatcgtctcttaatcgagcagctgccatttccaaaatttacaattcaatcgattcagtcaaaggttaagtcaaaaagctttgcaatttattcgagtccgcgaaatcttcatcaaccagtacagaactttcccctaaagttgttttaagacccgcgaaatcaatcgggtattcatcttcgttttcttcgagttttaataacccattgataagattacccggaactgaagatcggattgttgtctatttaactagtttacgagggattagaaggacttacgaagattgttatgctgttaggatgatatttagaggatttagagtttgggttgatgaaagggatgtttccatggattcagcttataagaaagagttgcaaagcgttttgagaaagaagaacccgagtttgcctcaggtttttataaagggaaagtgtggtggtggtgctgatgtgattaaaagcatgtttgaagttggggaattggctaagattcttgaggattttccaaggatacaacagcctgggcttgtttgtgattgttgtggggatgtcaggtttgtgccttgtgggaattgtagtgggagtcgaaaagtgttcgacgaggacgaagggttgcttaagagatgcttggaatgcaatgaaaacggcttgatccggtgccccaattgctgttcttaacactttgattgctgctgcctgcaggatgttaaggtatatatacataatgagcttggtttttttttcgattgtcgaggtatatgaaagatggtctgatgtgttttgtatgaaccctttc

SEQ ID NO: 192206 - DNA, 418 bp, Gossypium hirsutum
gctcaatcagcggatttttggtcgtacgaacctggtatgagatagatatccctcccccactcttaaccctaaaactaaagctaagactacaactaaaacttagagactcaaactcaaacttgctcttctcttccctctcccccccaattccataaccaacgaaagaagacgaagagagctcctggtgccaagaaagataaggaatttttgttcctcacttaagacgtcattgactggactagcaaaagaggggacatcgccgacgagaagccgaagaagtcagacgtcgagccgagcaggcacaaagagtagacaaaaaagataaggttcggtttcctctaagaggtctccaaactctgagtcacgaaggcctctaagtaaaaatgaacgcacgaagggtaatgcgacacgtcccaca

SEQ ID NO: 192207 - DNA, 441 bp, Gossypium hirsutum
cggacgcgtggggtgtctttgcagagtatcgggtagtcctttcaatcctcagccatggcggaacagacggagaaagcatttctcaaacaacccaaggtgtttttaagctctaaaaaaaatgggaaaggaaagagacctggaaagggcgggaatcgcttctggaaaagcattgggttaggctttaagacacccagagaggccattgaaggaacatatattgataagaaatgcccatttactggcactgtttctattagaggccgtatccttgccggtacttgccatagtgcaaaaatggtaaggactattatcgtccgaaggaactaccttcactacatcaagaaataccaaagatacgagaaaaggcacagcaatatcccagctcatatatccccctgctttcgtgttaaagaaggagatcatgttataatcgggcaatgc

SEQ ID NO: 192208 - DNA, 363 bp, Gossypium hirsutum
gaagacacctagagaggccattgaaggatcatatatcgataagaaaagcccacgtactggcactgtttctattaaaggccgtatccttgccggtccttaccatactgcaaaaatggtaaggaccattatcgtccgaaggaactaccttcactgcatcaagaaataccgctcgaatatccagttctttggccttcattctcaacaaaaggttacatcatcctatgttgtggtcattgatcgtggaggcgttgccagtcatgctgcatctatgcttccgagatcaggagttggcatgctcctattgttgggctgtgaccagtttactgagaacactgcttatctgcggtctatagaacttaaact

SEQ ID NO: 192209 - DNA, 443 bp, Gossypium hirsutum
tcgcgttttttttttttttttttttttccactcaacattatatattatagagatttcaagacacttgagatgagacagagccatagccatagccacatccggctcccatatggctctgccattgtgtgaggtaaggaaaataacatactttgcaaaccgaaatcatcttcttcagcttcacattcactatcaaatttaacaataaatctactacctcaacaaccaataccagcaacagcaatcacaattttcacaacagctcaaactataggacaatagattagaagcaaaaaattaaaaagaaaaaggatagtattctttgctaacctgctcagccaaaatcttgaaactcctcctattgggagaatatgagagatagcaaagcttcttcaaatttgaaaaaacagcatggccccctatccttaaataagcttctaaccacc

SEQ ID NO: 192210 - DNA, 661 bp, Gossypium hirsutum
caagaacataaccaattctctgttttttcttcccttttttttttcaaaaacaatttagtaaaacatacacaaatattctctcttttttgcagttttttctttaaaaaaaacagtttcaaggattgtttttgtgttgtttctctcccatgatcacaaaaatggcttgatttgcggttgatcctgcaaataatcgcatttcgttctcttttttaacagagattcattaatcaataaataaccatcagttttataaataaaaaaacgttataacgaggccttgcttttctttgttttacaaacccctttagccttacctcaagcttcatcccctttatatttctttgaaattttttcattaaaaatcctaacaaaagcatgggtaattctgggtttctagcaacattattattaccgacattcctttgtgttcatctctttggtgggtttgttgatggtcttggtgtgaattggggcacaatggcaacccataaattacctccagaaacagtggttcagatgttgaaagacaatgggattaaaaaagtgaagcttttcgatgcagattcaaagactatggatgctctttcagggagtgatcttgaagtaatggttggcattccaaacgatcagcttcttgctatgaaaagctatgatcgtgctt

SEQ ID NO: 192211 - DNA, 536 bp, Gossypium hirsutum
ctaccttttcatccattatcattcacttcaccattgatgaccagtaccccatgcttgtacagctggacatgcaacaccattagagcacctagtgttatgtacagtgatcgggattccgataacgggatcgattctgatggcgtccggatccacggcgatgatctatggccatgttttggtttttgatttgtttcaggtgccttggacactccaatgctgaagttgttccacatgaagttttcaataagttacctttacttaggtatttcatctatacccccacgtatcatagtcttcaccacacagagatggagaccaatttttgtctgttcatgccgctgtttgatgcactggggagtacacttaacaccaaatcattggagctacataagaaaattacctcaaattctggaaaaaacgggagggtaccggattttgtgttcctagcacatgtggtggacataatgtcggcaatgcatacaccgtttgcgttaagatcatttgcgtcgaccccatttcgcatgaggatgtttctg

SEQ ID NO: 192212 - DNA, 687 bp, Gossypium hirsutum
ggcggtgcctgtctcagaatcagcggactttttgggtcgtaggaacctggtatgagctcgaccctctgcaattagaggttcgcctcgctctaaaggtccctacccttcgtaagaagaacttacggggacggctccgcgaagagtatcgactctaaatacctttaagagaaaagtctaaaaatctacgttttcctccttaacggactagtctgcccgagctactttaataggtgtgcacttacttacgccgacataaagttggtaaacgtaaacggcggcggagtcctcctcagaaggttgagcccagtacccccgttcagtaacaagttggtaaagctcggcttcggaaacatggtcgtcaagtttctcctactacttgaactagccgacctaaagttaacagtagtcataacgtagagtaaagaggatgacgacgtttaccttatcatcctcgttattctctgcagtatcaggaggagcagcgggctaggacctattcctaggccggaggaatgcgtcgaaaagaggaaggagccctccctaaagtcagaagagaagacttacgtcaaggaagctgaaaagaacaattcgtaggtaaaactaaaggagaattaggaggtggaaactaagtaaccaacgaagagtccgatccccaaagtcatattgacgttgaaccctcataaggaa

SEQ ID NO: 192213 - DNA, 1185 bp, Gossypium hirsutum
  unsure (1)..(1185): unsure at all n locations
gaaaaacanatagatcaccattatatataacaagggataatttcttaatccataagccaaactaggatcttactgaagaagaaagctgagatacaggacgaaaacttaccagcagatggtaaaatacatatatagcttctcaccattctaatattactatggatcaccaatgcatatacattaagaacacaagttgatactacttataataattgcatccacaaaatgaacagcaaaacagcttcaccagcattcaaagccttgcctctcctcccttctactcacttgttctctaacacttctttcactacatcgatgctgcaagtcgggtcagggatcttttgcttatgttgatacagatcaaatggcctcagatttgctagtaggaacccaagaaacttggaatggttgctaagtgtgcagtgccatgaataaattctgcttgcaagcatgctccggaataagtttcttgacaacttcaggagggataccagagagctcttgaggcttgaaattgaagagtggtggtagcggacgcccgttgggaaggcgagcgtttgggtccctcaattcatcaaagaaagggtgaatgcaagcctccaaagcagtgcatcgcaaattaggagagtactgaaaaaacctacagacaaggtctactgcttctggaggtaaacgcttttggaagaccttgtgccatggatgtggttttatctggggaaacttgaattcggtgtagtttgggttcatgcacttgatctcctcccttgttggagtccccaaaaccttaatgatttcaactaattggtcgaccccgctctcaccaggaaacagtggctgtccaagaagcaactcagccatcacacaaccagtggaccatatatctatagcagttgtgtactcagtagcaccaaatatgagttcaggagcacgataatatctcgagcagatgtaagaaacattcggctctcccttcaccagcacttttgcactcccaaaatcacaaagtttcagctgatgcgtatgtggattcacaagtaaattctgaggtttgatgtcacggtgacatataccaatacagttgtgtatataggcaagtgctttgcatatctgatacgtatagagtttaacatatattaaaggcattcgtgtgttcatcctgctgtagcttctggctgtacgatgaac

SEQ ID NO: 192214 - DNA, 469 bp, Gossypium hirsutum
gatttctctatcctccgctcactccatatatttacaacaagctcgaatatttaaatggagatattgggttttatcttttagtttaattgaagagagaagaagcgagaggtaccagcgtccgccatggctggtttgcaaagatcagcggtgtcttttaggaggcaagggtcttcggggcttgtttgggatgacaagtttttgtcggagttgaatcaagggaaaccagaagagcagcaacaagaaggagacacgaaacagctgcagaaagaggaaccaaggcagttgcaagacagtcgtaacccagaaaagtttgacgatgttaagggtgttgcccccaccaacaccatcgaaagaaaccgatcaaatggtgaaagacgaggttaccggactggtggtaaggtatcccctgctattgacccgccttctccaaaggtttcagcttgtggtttctgcagtgctcttgggaaac

SEQ ID NO: 192215 - DNA, 513 bp, Gossypium hirsutum
cccacgcctccggaaaccagagagagaaaaaaaagaaagaaaaaatggttctgctagacaaaatgtgggacgatgtagtagctgggcctcaacctgaacgtggtctcggcaggcttaggaagatcaccacccagcctttgtccatcaaagatgaaggagaaaagaaaaagtaccagaggtcgttgtcgctgccgaatagtccagtgtcaggtccgacacccgtgacaccgacgactccgacggcgcgtaaggagaacgtgtggaggagtgtgttccatccgggtagcaacctagccaccaaaagtataggttctgatgttttcgacaagccacaacccaactctcctaccgtctatgactggctttacagtggggagaccaggagcaagcatcgctgagagggtggcgactgacaggcggctagcaggctgctctagtgagccagggttgcatgtaaataagtgtgttctctttccttttctttttttcaatgtgcttatttgtctctgtctt

SEQ ID NO: 192216 - DNA, 694 bp, Gossypium hirsutum
aaaaaattattttttttatattttatttataatttttttttttgcagatgaaatatataacactgctgtttagagtaactgagcccggcaatacacgtgctcgcatctatctggagacttctccgaataaaccaacagttgccacaagatctgcaatattacactacatgacggtaagtgcccattgcttaatgtgataatatctgaaaacagcagcatctggaatctatggcttccctaagaatcaacaaccagaatactaccattatcaagatatattaagtcattcgatctcatttgctaccgccaggtcccccaccgaaaaggtaatccagagaagatccacctccaggggcagcatgaatcttggtggatggtcgatccgtaatgaaattgccagtgttctgaccatcagcacgcgtactgttaatacccgcaggaatttgcttggcaacttgttgaggagcaggagcaggcttggacacatcctgtgcttcaattggagcagcttcggatttgtttgtaactggttttggagcttctccactcccaaacagatagcccaatgagctctgcccaccaccactgctaactccacgacccatcttttccatcttacttttgaagtgtgaagaaaagatctaggcttagcgttctgaaattgcctgaaattttcttttgagatctactaagg

SEQ ID NO: 192217 - DNA, 482 bp, Gossypium hirsutum
cttctactacattcttcacaattttctcaatatctttataacacaaaattactaaaatatatcagaatttatacgaacttggtttttacgtatcaggggggtattattattaggttcagcaagtactgcttattcaagtacataataccatgcgccattatcaaagtagccacaacaccactcaccgatttagggtttaaggggggttctctgtcactggtattacattcacgaccgacaatccatatgcaaacagcgatttaaattccctgcgagaaactcttaacaacccaagcacgctagaacaaatgaaatcaaagtgaagaacacggaagcaatacgcagcaagctctagacacctgtaccctctccctcacctgggtgttaaggatcacgacacatgaagtaggcatttgggttgctgcgtatctacatgatttcaatggaaaagagccatcacattcattctctaaagcactttt

SEQ ID NO: 192218 - DNA, 808 bp, Gossypium hirsutum
  unsure (1)..(808): unsure at all n locations
ttttagcgctatatgcctatatctccgtgtctgtcactccgctcagcttcgcccctttacagccaaattcctttctcgagcgtttcttttttaactctccagttctcaacgaatccatagaatttcaccaagaagaagaagaagatgtcgtggcaaacatatgtagatgagcacttgatgtgcgaaatcgatggcaaccatctctcctccgccgccatcgtcggccacgatggcagcatttgggcccagagctccaatttccctcagttcaaacaagaagagattaatgccatcatgaatgactttgctgaacctgggtcacttgctccaactggattgtaccttggtggcacaaaatatatggtgatccaaggcgaacccggatatgttattcgagggaaaaagggacccggaggtgttactgttaaaaagaccaatctggccttgatcatcggaatctatgatgagccaatgactcccggccaatgcaacatgattgtggaaaggcttggtgattatctcatagaccagggtctttgatcactttggtgtaaccttaattgtttgcaattcttcctggcttcttctatacaaaacttgtgtccaccaactctcgtattgatggttggggtgcgttgantaatantattaccatttactaatgtgaaactcgtagggagatcgacgagaagctcagtgtttgtgaggggcgagttattgatctcctacttggtatttgtgccttgtttgatgtatggtatcctaaagattgtttaggtgggaggaaaaaagagagaattgcgcgggg

SEQ ID NO: 192219 - DNA, 802 bp, Gossypium hirsutum
  unsure (1)..(802): unsure at all n locations
ccttttcgtacgcccacgcgttcgcggacgcgtgcgaacattttctcctttttatctttaaaacacgcacccaaaaaataaaaccctttgaaaaccaaagaaggaagaagaagatgtcgtggcaagcttatgtagatgatcacttgatgtgtgaaatcgaaggaaaccatctctctgccgccgctatcatcggccaggacggcagcgtttgggcccaaagcgccagtttccctcagctcaagcctgaagaaattagtgccatcatgaatgactttaatgaaccgggttcactcgctccgaccgggttgcacctcggtggcacaaaatacatggtgatccaaggcgaaccgggagctgttatccgagggaagaagggacccggaggtgttactgttaagaagaccaatatggccttgattatcggaatctatgatgaaccaatgacacccggccaatgcaacatgatcgtcgagaggctcggcgattatctcctcgatcagggttattgattctcttcggtgtgtgtccttatttgaatgcatttcttcttgggtttttttctatacgaaaaaaagaaacatgcatcgaagcgtctccgtattactcgtatttacatggaaaaagtttgtaatggttatgttttatgatctctttgctttgtttttatgtattttgtttgatggatactatgaaggttgtggagtgaggtacttttggtttttcttcttttacatttacagtggataattctactggatttgtttaatttaattgaccttttgtttcggtttnaaaanaaaaa

SEQ ID NO: 192220 - DNA, 812 bp, Gossypium hirsutum
caaatactttcttggtcttcatttgttttcctccaaaaggaacaacagagaagaaaacttcatcaaacaaggaaaaaacttgaagtaaaacaattgagagaagatgtcgtggcaagcgtatgtcgatgatcacttgatgtgtgatatcgagggcaaccatctctctgccgccgctatcattggccaagacggcagcgtttgggcccagagctccaatttccctcagttcaagccagaagaaatcactggcatcatgaatgactttgctgaacctggatcgcttgctccgactggattgtaccttggtggcacaaaatacatggtgatccaaggtgaacccggagctgttattcgagggaaaaagggccccggaggtgttactgttaaaaagaccaacctggccttgatcattgggatctatgacgagccaatgactccaggtcagtgcaacatgattgtggaaaggcttggtgattatctcatagaccagggtctttgatcactttggtgtaaccttaattgttgcaattcttcctggcttcttctatacaaaagtgcatctaccaccacctcttgtaatggttggctgcaattaaataatagtattactagtattaaagtcgtgtggaaccttttccagaaacaataggcttggtgtttgtaatagtgataatgcttgtgatccttttgctttgtttctgtgcttgcttgatggatggtattgtcaagattgtggagtgaggtactttgtctaaattttacaatgaattgttctagttgatttggtaaatcaattcgaagctttttgtcta

SEQ ID NO: 192221 - DNA, 441 bp, Gossypium hirsutum
gtcaaacatttttctcacttatttattctttcatttatttatttgtaaaaactcacacaagtttaggaagaagaagaagatgtcgtggcaaacgtatgttgatgatcacctgttgtgtgatatcgaaggcaaccatctctctgccgctgctatcatcggccaagacggcagcgtttgggctcagagctccaatttccctcagtttaagcaagaagaaatcaatggcatcatgaatgacttttctgaacccggatcacttgccccaaccggattgtaccttggtggcactaaatacatggtgattcaaggtgaaccaggagctgttattcgagggaagaagggacctggaggtgttactgttaaaaagaccaatcaggccttgatcatcggcatctatgatgagccaatgactcccgggcagtgcaacaatggttgtggaaa

SEQ ID NO: 192222 - DNA, 677 bp, Gossypium hirsutum
ccagatttatcagaatataatatggaagttccactatcatatattaccggttccattggagttcctctggaagtagatgaggtcacaagtctattaaaacgaatgcaattgcatgctgaaaaagctgaatcggatgaagctaagatcagtgtgtctgtacctccaaccagaagtgacattcttcatccatgtgatgttatggaggatgttgcaattgcttatggctataataatattccaaagagaacgctttcttctttgaagccccttcccttgaatcagctcagtgatcttattagatatgagattgcgatgaatggttttactgaggtgttgacatggattttatgttctaagaaagagaattttgagatgttaaaccggaaggatgataaatccactgcagtgatcattggaaaccctcgctcttctgattttgaggtggtccgcacaagtctcatgcctggcatgctgaagactgttggacataacaaagaccatccaaagcccatcaagatttatgaagtgggtgatgtagtacttttggatgagaagaaagatgttggtgcatcaaaccgccgcctacttggtgcattatattgtggtgctaactctggttttgagttgattcatagcctggtggacagaatcatggaagttatggggaatccttttaa

SEQ ID NO: 192223 - DNA, 771 bp, Gossypium hirsutum
aaacaaaccataaaaatcctatgatgctcttcttgtcagtaaactttcagaattgaaagtaaaatattctcaatttcattactgaattatatatacatacatatatatatttgaaggtgtcgcaatggagagcaccgactcgtcgaccggctcacagcagccgaacctcccaccgggattccggttccaccccactgatgaggaactagtggtacactacctcaagaaaaaagctagctccgctcctttgccggttgcaattattgctgatgttgatttgtacaagtttgatccatgggaattgccagcgaaggcaacgtttggtgaacaagaatggtacttttttagtccgagagacaggaagtatccgaatggagcgagaccgaacagggcggctacctcgggttactggaaggcaaccgggacggataagccggtgttgacttcgggagggactcaaaaggttggtgtgaagaaggcactggttttttatggagggaagccccctaaagggatcaaaaccaattggatcatgcatgaatataggcttgctgataataagactaacaacaaaccccctggatgtgacttgggcaacaagaaaaactcactaaggcttgatgattgggtgttatgtcgaatctacaagaaaaacaacgcgaatagacctctggaacatgataaagatgactccatggatgacatgcttggtactgtaccaccttcgatatcaatcggtagccaacataatccagaattccacttcttaac

SEQ ID NO: 192224 - DNA, 1123 bp, Gossypium hirsutum
cggccgcgcacctcttcctttgttcctcatcctctgatccgtctcttcccgcattcgtcccgccggatttaacaagttttcaaacgaaaaatgagggaaatccttcacgtacaaggcgggcaatgcgggaaccagatcggatccaagttctgggaagtggtttgcgacgagcacggcattgaccctaccggacgctataccggaaactccagtctacaattggagcgcgttaacgtttactacaatgaggcttcttgtggaaggtttgtcccacgcgccgtgctcatggatcttgagcccgggaccatggatagtgtgagaaccgggccttatggtcagatctttaggcccgataactttgtcttcggccaatctggagctggtaataattgggctaaggggcattatactgaaggagccgagcttattgattctgttcttgatgttgtcagaaaggaagctgagaattgtgattgtctccaaggttttcaagtttgccactctcttggagggggaactggttcgggtatgggtactctgttgatttctaagatcagagaagaataccctgatagaatgatgctcacgttctcagtcttcccatcaccaaaggtttcagacactgtggttgagccgtataatgccaccctttctgttcatcagcttgtcgaaaatgcggatgagtgtatggtgttggacaatgaagctttggacgatatctgtttcaggactctcaagttaactactcctagctttggtgatttgaaccatctaatctctgcaaccatgagcggtgtgacatgctgccttaggttccctggccagctcaactctgacctccggaaacttgctgtcaacctcattcctttccctcggctccacttttttatggttggatttgctcctctcacctcacggggatcacagcagtatcgttctttaaccgtcccagaactcactcagcagatgtgggatgctaagaacatgatgtgtgctgcagaccctcgacatggttgttacctcacagcctcagccatgttcaggggtaagatgagcaccaaagaggttgatgagcaaatgattaacgttcaaaacaagaactcatcctacttcgttgagtgga

SEQ ID NO: 192225 - DNA, 514 bp, Gossypium hirsutum
atttatctggaaagccctctgtggatcttgctgaattgcagatctccactttgaaagaaatggatattgatattggtcacaagcaggtggcctgaagtaaaaaggcttcaaccctcaaccaagggtgtaactggcttatatttagttcaagattatcttcaaaagtgcaatggtccaaaatcaccgatcggagtttccacaacttgtacaaaacttagagcaagcaaacagcaggccgaaatcccactctcgtagtctgtcagatacagaaaagccttgcaggaatggtaatgtcaagctatttggtcagatactcaattccagttcccaggacgatgggaagatccgtttccgtgaacagagcatgaaatcttcgaatttgaacttcagaggtcataacaatgttgatggaaatgcatctttctcaaaggttgatcaaaatatcatttttgcaccggaaaatgttcccaggagaagctatggtttctgggatggcaataggatacaaactggg

SEQ ID NO: 192226 - DNA, 415 bp, Gossypium hirsutum
  unsure (1)..(415): unsure at all n locations
nnnnnnnnnnnnnnnnnnnnnnnnnnnnncttaactaaaaggatggaaataccattaggaagcagtgataaagttagtttcagacattaaatttacagaaaaacaaaggttccaagtccagacagttaaaagtaaccgccatcgtaaagggcaaagcatttactcaagcaaacaccatatagaatttacaccttttctttgagctatatatacataagcttctttctgcattgcattgaatcatgctaaaagtaaaggggaaccaaatgtgttttctccactgtaagtcatgtaaagaaagccatcctcatccctgttttcctcgtaaatcgcggacatcaaggcggcagtaggtgggagagtgttcttcacaaagacaaatatagctttctcggcactaagcttaatcctttta

SEQ ID NO: 192227 - DNA, 768 bp, Gossypium hirsutum
aggccctataccttacgagtgtgtaagaagagctggcggttgggaaagacaccaagccgggagaggttccatcattcagcagattttaaggctagctattgaaactcatagcacagctactaaaaagaataaggaatggcaagttaaaattattactgtcatcgtcaaagccgaggagattatgtattccaaagccaattctgaggctgaatacaccaacccggaaaccttatgggaccgtgctaatgatgccatcaacacgattatccgtcgagatgagagcactgaaacaggagagcttttgccaccttgtgttgaagcggcccttaacctggggtgctatccagtgagagcttcaaggagccaacgacacagtaatcctaggacttaccttacgccaagagcacccgaaactgttcctgcaactcctaggattttggataacggcagtgaggataggtatcctcagttatcccaggttcagtctggtagtcagcttgcaagaatagcaaccaatgtgaattcgaacacttcggtttcacaagctaaccgtcataattatccatttctacctcaaaattgcccatctggccatgaccaattgatgaggatggaaactaacactccatcgaactctggtcaagtttaccccctttattatggaattcactatcaaaatgcagagtcccaaacaggttctccagtgcaggaaaatctagtgtctgatacgataatagttgggagacctattggttcatccgtgttaga

SEQ ID NO: 192228 - DNA, 674 bp, Gossypium hirsutum
  unsure (1)..(674): unsure at all n locations
cccacgcgtccgcccacgcgtccggactagttctagcggacgcgtgggtggccataccttcaattatcttgttgacaatggatacacttattgcgttgttgcagatgaatcagctggaagccaagtgccgagtgcttttttggagcgtgtcagggaggacttcgtgtcgaaatatggtagcgggaaggctgctacagctcctgccaacagcctgaacaaggaatttgggccaaaactgaaagaacatatgcaatactgtatggagcatcctgaagaaataagcaagctagctaaggtcaaagctcaggtttctgaagtcaaaggtgttatgatggagaacatcgaaaaggtgttagatagaggggaaaagatagagctgctagtggataagactgagaatcttcataatcaggctcaagactttcgaagtacagggacaaaaatccgaagaaaaatgtggctacaaaacatgaagatcaagctgattgttctaggaatacttattgccttgatccttatcattgtcctctctgtttgccatggtttcaactgtggcaaaaaaataaatgctattcttagaaggctgtattagctttcaccgcagcttttgtgatataatcttgtaagggaaagtttaaaatacatacatatatatataatactntatatgtcat

SEQ ID NO: 192229 - DNA, 648 bp, Gossypium hirsutum
ttttcgcggacgcgtgggttcaagtttcaatttttaaaccttattgacccttttttcacttaccttttttacttcttgtttctagatatatcaaaaaagtccaacaaaagagtaattgtgaagagaaaccaaggggaaaaaaagcaatagaaaagagcaagcaagcttcaaatcccagatctctctttgttttctccttgaaacccaaattttcccatataagaaaagattctgagaaaatggtgcccaaatcattgatctatgcatttgtatctcgtggaggagttatattagctgagtatactgaatacagtgggaatttcaattccatagctcttcaatgcctccaaaagcttccttcttcaaacaacaagttcacttacaactgtgatggccataccttcaattatcttgttgacaatggatacacttattgcgttgttgcagatgaatcagctggaaggcaagtgccgattgcttttttggagcgtatcaaggatgatttcgtgtcgaaatatgataacgggaaggctgctacagctcctgccaacagcctgaacaaggaatttggaccaaaactgaaagaacatatgcaatactgtatggagcatcctgaagaaataagcaagctggctaaagtcaaagctc

SEQ ID NO: 192230 - DNA, 514 bp, Gossypium hirsutum
cttaataatgaagggtccaataaagattgcaatcgctgacatgttgatctctttcatgtgggtattttgttcatctgcgtttggtctattaacttattttataaccaccgccgctggtgttcaaaccgtaccttgggctgctattgttatcatcaccgtcgtctttttcgttttcctttccatctttaatattattggtggatttcttggcggggctagttttgatcctgctgctacaactgccttctacgccgccggttccggcgccgatacccttatctccatggccctccgcttcccagctcaggctgctggtgccgtgggtggtgccctggcgatcatggaggcaatcccggaacaatacaagcacatgatagggggaccatctgtgaaagtagatacgcacactggagcctttgctgagggggtcttgacttttgcaatcacctttattgttcttttaatcatgcttagaggcccgcagagtgaaatcttcaagacgtggtttctttct

SEQ ID NO: 192231 - DNA, 402 bp, Gossypium hirsutum
cccacgcgtccgcccacgcgtccgcccacgcgtccgcccacgcgtccgcccacgcgtgcgtgcatcgatagcattgttaatggcagcactagcgggaatggtaaggaaccatctgttgctgctgctttggctgtgcaatgtggaaattttgggtcaaaaattgaatcatccatcgatccatcccatatgaccttcggtgggatgaaaacaaaagagggtcccaacaggtgtaatgcatgccacaagcgtgttggtttgacaggatttagctgcaggtgtggaaacatcttctgtgcagcgcataggtactctgacatacacaactgtcctttcgattataggacagccgcccgcgatgctattgctaaagccaacccggtagtgaaggctgagaaacttgat

SEQ ID NO: 192232 - DNA, 521 bp, Gossypium hirsutum
gcggagcatccaccttaaacaccccgattttcttgtgtgtccttctcgaggacgtaattcctgggaatcatcacttcctcttccccaaaaagtcatcctcttaactgtggccctggcagaacactcaattaaacgccgtcctaataaaaaaacgctttcttttttattaaccgacttgtttaactcagtggcctctatctacaaaaccgagtcaagtggtgcggtttgatatcggtgatgcttcgtgagtttgttttctttttcaagtgataagattcaagaaacttaaagaaagagagaaaaatggatccggcagacatgatggtagggccgggtatggatatgccgatcatgcacgacagtgatcgatacgatttcgctaaagatatcgggtcgggtaatttcggagtcagccggcttatgagggataagattaccagagagctcgttgctgttaagtacatcgagagaggcgattagatagatgaaaatgttcgaaaagagattattaatcatagatc

SEQ ID NO: 192233 - DNA, 597 bp, Gossypium hirsutum
cccacgcgtccgtactttctagtctttacgcttctttcttttgcatttatttttatatccatttgagacgaaaggtagtgtggagtagtcctcgtcttcaacccaagacttgacccatcttatatatatatagttctttatttgtttggatcaaaatccaatatactaatccttcaaatcatatattacaaaagatgggagtagaaggcaccttggaatacatctctgatgggcttagcagcgtgaagaaggagaagaagaagaagaagcaaattcaaactgtagctctcaaaatcaggatggattgtgaaggttgtgctcgtaaggtcaagaaggtcctctccggcgtaaagggggcaaagtctgtggacgtggacttaaaacaacaaaaggccaccgtgacgggttacgtagaggcaaagaaagtactggcggctgcgcagtcaaccaagaagaaggtggaattgtggccttatgtgccttacactctggtggctaatccttatgtggctcaagcttacgacaagaaagctcctcccaatcatgtcaggaaggttccggccagtgccaccgtttctgagaccaccattgacaacc

SEQ ID NO: 192234 - DNA, 745 bp, Gossypium hirsutum
  unsure (1)..(745): unsure at all n locations
ttggttgtacagctctgctcggcgacgatctgatcgtcttcgtctgtctgattaacaccaacttcaatcaaaatcaatggctgcaatcttcgctcgtaactctctcaacgctctccgagctcgacaccttgctgtgtcagggcaagtgttgcagggttcacagcactacgggttgcgactcagttcacgctcatatggcacgcagaaagatgatgaagaaagagagcagcttgcaaaggagatttcaaaggactggagttctgttttcgagagaagcataaacacactgtttctaactgaaatggttcggggtctcatgctgacactcaaatacttctttgaaagaaaagttactattaactatccatttgagaagggtccattgagccctcgttttcgaggggagcatgctctccgccgatatccaactggagaggaacgttgcattgcctgtaaactttgtgaagcggtatgtcccgcacaggcaatcacaataaaagctgaagaacgagaagatggaagtcgtaggacaacgaagtatgacattgacatgaccaagtgtatctactgtgggctctgccaagaggcatgtcctgtcgatgcaatccgttgaaaggacccaactttgaatttgccaccgagactcatgaagagctgctgtatgacaaagagaagctgcttgagaacngtgaacgatgggaaaccgaaattgcnaagaatctcngatctttttttttttctttta

SEQ ID NO: 192235 - DNA, 440 bp, Gossypium hirsutum
ggttcggtttttgattcagggaccggtcaatatagtacggtgttggttgttagggcagggggccttcaagactcatattttctgggtgatatggatccatatgttataattcaatacaaaggtcaagaacgcaaaagcagtgcggccagaggtgatggatctagtccatcatggaatgaaaaattcacattcaaggtggagtatccagggtctggtggtgactacaagctacttattaaaatcatggacaaagacaccttctcttctgatgactttgtaggccaagccaccatatttgtgaaggatttgttggcagttggagcagatgaaggaagtgctgaactacatcctactaaacatagtgtagttaatgctgaacaacgttattgtggagaaattgtagttggtcttactttcaccaaaaaggaagaaaatgatta

SEQ ID NO: 192236 - DNA, 608 bp, Gossypium hirsutum
  unsure (1)..(608): unsure at all n locations
tagaaagaaaattttctcttttcataggtttttgatctctaaaactcttgtttttagtgaaagttttcacattttctttttaatccctttcctctcctttttttttttttggtgtgatcgatggaggagagatatgacccagtgaaggagcttggatcagggaattttggagtcgcaaggctggtgaaagataagaagacaaaagagcttgttgccgtcaaatatattgaaagaggaaagaagattgatgagaatgttcagagagaaatcattaaccaccgatctttacgacatccaaacataatctggtttaaagaggttgtggtgactccaacacatttagctattgtcatggagtatgctgccggcggtgaactcttcgagagaatatgcagtgcaggtcgatttagtgaagacgaagtgagtttatatctacattcaacatgttgagttgatctttcttccccacctgttaatttgcattaatgttcaactttacgatatttgtccatccgacaggctaggtgtttcttccancagctaatatctggtgtcagctactgtcattccatggtatgttatatgaatatcacttttgtcacagtctt

SEQ ID NO: 192237 - DNA, 486 bp, Gossypium hirsutum
gtcaaatatattgaaagaggaaagaagattgatgagaatgttcagagagaaatcattaaccaccgatctttacgacatccaaacataatcaggtttaaagaggttgtggtgactccaacacatttagctattgtcatggagtatgctgccggcggtgaactcttcgagagaatatgcactgcaggtcgatttagtgaagaccaagctaggtttttcttccagcagctaatatctggtgtcagctactgtcattccatgcaaatttgtcacacggatctgaaactagaaaacacactcctggacggaagtccaacaccacgtcttaaaatatgcgactttgggtactccaagtctgcagtgctgcattcacaacccaagtcaactgtaggaacaccagcatatatcgccccggaagtcctatcacgaaaggaatacgatggaaagattgcagatgtttggtcttgtggcgtgacattatacgtgatg

SEQ ID NO: 192238 - DNA, 717 bp, Gossypium hirsutum
aagtggcatcaaactagagtcgctcgtttatcagtcctgatgacaataatattgctgcaggctctgcgcatgggtccatctacatttggtcaatttccaaagctgacatggttagcactctgaaggaacatactgctcccatcctgtgttgtacatggagtgcaattggaaaaccattagcctatgctgataagaatggggttgtctgtacctggacatgatccgcacgggttgcgcatggaacaactcggaaagctgaagtatatgtttgatgcaggtacattcattctttttaaagctttttcataaattttgaagatctgtagtctcatacaaatgtctatatgtatatcaaacataggcgtcgtaacatagttgaagtgtaaattattcaatcgtaattatgagaacgaagttggaatcagttgggtagaattttagagttcatctttgggataaaaggaaggtgttgtaggattagaggaagagttcttgatgggatatgaagcttgcattgctataccacagagaccttgtttgtctttgatgccacgttccattcttatgtaacctttctcaccccaatcaggtccccatgagttctttactatccaattcttagttccatcaagggttgttccatatcccactgctgcaaccccatgggtcagctttattccacattgtccaatgtataccccctccgagtagaattgg

SEQ ID NO: 192239 - DNA, 638 bp, Gossypium hirsutum
  unsure (1)..(638): unsure at all n locations
cccacgcgtccgcccacgcgtccggccaaatggagttaatcatgagaaaaaaggaaacaagcgacaacttgctgaagaaaggtagcagagattatcaaggaggatttatggcccaatcctctcacttatttcaacaatgaggccgatgaggaggattttgatggagatgaaggtgatgaagagggtaaagatgatgatgatgactctgatgatgatcaagacgacgatgatgatgaggacgacgacgacgacgaggactaaatcacttaacagccttaaatcatggtagtatgttctcttgctcaagtaagaactggtgtaaagctgtctcctagtcatagctacgtaaggttatagagaagatagccatctttaagattagctttctatgctttataagcaactctcgttattgtaagcatagctatgactcgtttctttttgcccatcccttcactccctttttttgatctttactcgtgtttttgtttttatggtttcctcccagagggtgacatgaagtgaaagcttcttacatgatattggaatgcaggcattttatttattagaaaaagagacnnnnnnnnnnnnnnnnnnnnnnnnnnnnnnnnnnnnnnnnnnnnnnnnnnnnnnnnnnn

SEQ ID NO: 192240 - DNA, 717 bp, Gossypium hirsutum
ggaagatttcccggccgcagaatttttttttttttttttttttttttttttttttttttttttttttttgcaggctaagcaattttgagactcttctatttagcaatggcttcttctctagctcttaagaggctcgtctcatccaacatcctccctagctccttacgcgtcgccatcgctccatccatctccagactctttaacaccaacgccgccacgcctgatgaccacgatgatcgccgtcgtgctgacggtttcttcccagatctgcaggggcggcgccagggggccaaaaaagatatgtttgatcctttgtctccaacaaggagcctgaacatgatggatcaagtcaaggggaatcgatttctctccacatcccgtgacattccagggcttgggagcgaggccaaagaatcaaaccttcgcccgttatctcctcatcttcctatttataagccacaactttctgcgactctttcaattaccaataggatctccggggttttcctaactactgcacttttgttctcttatcttctttctctgaaaatgggttcaatttgcttcacctattcgaatttctaccaattcttcttttattcagcaaagcttgccccagttaccgtctcaattgctgcattggccgtttcctatcatctgtgttatggggttcgtcatttattggcggatttttcgggatagctgaggtgaataagg

SEQ ID NO: 192241 - DNA, 665 bp, Gossypium hirsutum
cccacgcgtccggttctttgtatgctgagtggcactacatgtgcttgggaatcccatagttttccttcatatactattaaccccaccgtccatcccttattccatctcactctcttctatataaaacctactctactactgcttaaccaagtacctgacttagttatttaagttaatttatagaggaaatgggtgaggaaactaagcaggaacaaccgccggtagaggctcaaccagaggagaaaaaggatgagaaggcagaagagaaggcaacagaggaaaagaaaggggaaccaccggcacccacccctccgcctcctccttttatcttgttagtggacttgcattgtgtgggatgtgcaaagaagattgagaaatccatcatgaagattagaggtgtggaaggagtggagatcgacatggctcaaaaccaagtgacaataaagggaataattgagcctcaaacaatatgtgctaagatcatgaagaaaaccaagagaagagctaaagtactgtctcctttgccaccagctgaaggtgaacctataccagaagttgtcacttcacaggttagtggattagcaaccgtggagcttaatgtagacatgcattgccaagcctgtgctgaccagctcaagaaaaagatactaaaaatgagaggcgta

SEQ ID NO: 192242 - DNA, 1176 bp, Gossypium hirsutum
ccctcgcgtccgaaatctttcatttctcgagtctttttcggggttttctctttttttttttcgtcggatcttcaacacttttttcaaaaatggctgagcacgaagagaagaagcacgaggaatcgttgatggaaaggatagccgagaagatccaaggtcatgattcgtcgtcatcggattccgataatgacaagccatcggaatcatcgatcaaggccaaggtcttccgtctttttggaagagaaaagcccgttcaccacgttctcggtggaggcaaaccggctgacattttcctttggaggaacaaaaagatatcggcaggagcgctcggtgtcgcaactgtgatatggattttgtttgaaatgctcgaataccaccttctcacactagtgtgtcatttgttgatacttgctcttgcattactcttcttgtggtcaaatgctgctaccttcatcaacaagtctccaccacgcatccctgaagttcaaatccctaaggacccagttatggagtttgctcaggcactttggtttgagatcaaccgggcttttgctgtcctacgggatattgcatcaggaagagatctcaagaagttcctatctgtgatcgccggcttatgggtcttgtctattgtcggaagttggtgcaacttcttaacactgttttacatagtctttgtacttcttcacacggtacccgtgctttacgagaaatacgaggacaaggtggacccatttgctgagaaagcaatgcatgagattaagaagcagtatgcagtgtttgatgcaaaggttctaagtaagattccaaggggaccattaaaggagaaaaagaaggattagatttaccggccaagatgtgcttttgcaggtttctgacatacatttggtagctgccttccgtgaaaatgtgttatttactatatatcctgtatcagttagaaccctgtttgaatattttttcggttttagtacacaatgggttcaaaaagtttgatgaatttggcatctttttttctaaatcttgtttagttgttttttgatatggatccatatgctatgtgacgatatgttatcatattgcatgttggttggaatacattgagttgaaagttttttcaacttgcgttgtatatcttttcagaatgatcgagtttgccttgtgattgtgacttct

SEQ ID NO: 192243 - DNA, 1158 bp, Gossypium hirsutum
  unsure (1)..(1158): unsure at all n locations
ttttatttttctgtttccgtttctttcaatatgcaaaggcgttgcaaagcgagtggttggtgtgtttcttcttttaagattttgtgtggaaaaaaataagacaaaaatatggctgagcacgaagagaagaagcacgaggaatctttgatggaaaagatagcggagaacatccatggtcatgattcatcgtcatcgtcgtcggattccgatgacgacaagcaatcggaatcttcgatcaaggacaaggtgtttcgtctctttggaagagaaaagcccgtccaccatgttttcggtggaggcataccggccgacattttactgtggaggaacaaaaagatctcaccaggagcgcttggtgttgcaactgtgatatgggttttgtttgaattgcttgaatatcacctgctcactctagtgtgtcacttgttgatacttgctcttgcattgctcttcttgtggtcaaatgctactcagttcatcaacaagtctacaccgcacatcccggaagttcaaatccctaaggaaccggttttagagtttgccatggcacttaggtttgagattaaccgggctttcgctgtcctgcaggatattgcattaggaagagatcttaagatgttcctctctgttattgctggattatgggtcttgtctattgtgggaagttggtgcaacttcttgactctgttctacatagtcttcgtactacttcacactgtacctgtgctgtacgagaagtatgaggacaaggtggatccctttgccgagaaagcaatgcatgagattaagaagcagtatgcagtgtttgatgcaaaagttctaagtaagattcctaggggaccgttaaagcaaaagaaagattancttaccggtcaagatgttgatgctgctaggttcaaaagttanaaatacatctggggactgtatttcatgaagttgttgagttttatccagtatcagttagaatcctgcttttatccttttcttttgtagtaactgggttcaaaatgatgatgaatatggaaactttttttttcttaacatctttggttctgctgtcatacatgggagctgtcccatggatttatatgctatgtgagacaatatgttattttattgcatgttgattaatggattgtacaccgaattgcaagttta

SEQ ID NO: 192244 - DNA, 529 bp, Gossypium hirsutum
gtttgagattaacaggggtttcgccgtcctgcgggatattgcatcaagaagagatcttaagaagttcctctctgtgatcaggggcttgggggtctcgtctattgtgggaagttggcgcaacttcttgacgctggtctacatagtcttcgtactactgcacaccgtgcctgtgctgtacgagaagtatgaggacaaggtggaccccttggccgagaaagcatggcatgagatcaagaagcaggatgcagtgtttgatgcaaaagttctgagtcagattcccaggggaccgttgtagcagaagaagaaggattcgtttaccggtcaggatgttggtgctgctaggtcctgacgtacggactgtattcatgaagttgttgagttttatccagtatcagttagaatcctgcttttatccttttcttttgtagtaactgggttcaaaatgatgatgaatatggaaactttttttttcttaacatctttggttctgctgtcatacatgggagctgtccatggatttatatgctat

SEQ ID NO: 192245 - DNA, 869 bp, Gossypium hirsutum
cactgttgccatgaggtctagttacttttccccaaaggcagcgatagtgtgatccatcctagttcacggcggccttgtatatataagccatctgcttgccagcatatctaggtacttcttctttgttgttttctgcagaggagactttatatacatagctgattgaatgcaaagacttgatatccaccagaccgctggtgaactatcattattttaatatatatagacccacgcatctttcacgttttgcatattacgacgtcccattaatttatttcagatggaagatacgagagaagaatcatcttctgtaattctaagattcacagactcttttaacaaatcaaatgaagtgaaagaatgtggtcgcagtagcgcactcatctcttgcgcatcttccagcagtgtttgattaggagcgaccttctttggctccttgaaggaattctcatccatcagattagcagacgtgagagtggtctttgttgatccagacagctttacagaatttggatccaatccatcaacagaaatttggaggttgactgaattgctcccaaagtttacaacctttatccttatgtaggtttgaccagcctctgaatttttccaagtaattgcagatgcaacaagggaattagaggaatctttttgcagtgttgcattaagaagaattgctccacttgattctgtgaaaaaacgctgcacccagtagctaggagttccatacgcctgaaaggagttgaagacgattgcatctgggttccaccgtctgtcattggaattcacaaaaagtggtgcatagctagccatatgcacaacatcgctgttcttttccagaccaataaggaatgcagcctccgcaagtg

SEQ ID NO: 192246 - DNA, 1643 bp, Gossypium hirsutum
cccacgcgtccgcccactcgtccgtccacgcgtccggtgtttctctccatctcgccgtctcgcgtgcgccctgtggctctcttcaaccctcgcatatctcttcaagatctgatctgatctgacaaaaaaatgttcgggagagcaccaaagaaaagcgataatactaaatactatgagatattgggagtgcccaaaaccgcttcccaagatgatttgaagaaggcttatagaaaagctgcaattaagaatcatcctgataaaggcggtgatcctgaaaagtttaaagagttggctcaagcttatgaggtgctgagtgacccagagaagcgtgagatatatgatcagtatggcgaggacgcccttaaagaaggaatgggtggaggtggtggtgcccatgatccatttgatatcttccaatccttctttggtggcaatccttttggtggtggtggtagcagccgaggccgaagacaaagaaggggagaggatgtaattcatcccctaaaggtttctttggaagatctctataatggaacttccaaaaagctttctctttcacgaaacgtaatatgctccaagtgcaagggcaaagggtctaaatcaggtgcatcaatgaaatgtaccggttgtcaaggttcaggaatgaaagtctccattcggcacctcggtccttccatgatccaacaaatgcagcatccttgcaatgagtgcaagggtactggtgaaaccatcaacgataaggatcgttgcccacaatgcaaaggtgataaggttgtgcaagagaagaaagtcttggaggttattgttgagaagggtatgcagaatggacaaaggattactttcccaggagaagctgatgaagcgcccgatacggttactggggacattgtattcgtcctgcaacagaaagatcatcctaaatttaaacgaaagggtgatgacttatttgtagagcatacattggcacttactgaggccctttgtggctttcagttcatactgactcacttagatggcagacaacttctcattaaaacccaacctggggaagtcgttaagcctgatcaattcaaagcaataaacgatgaaggaatgccgatttatcagaggccatttatgagaggtaaactttacattcacttcactgttgacttccctgactcgttgaccccagaccagtgcaaggcactggaggctgtgcttcctcccaaggcatcggttcagctgactgacatggagctggatgagtgcgaggaaacaaccctgcatgatgttaacattgaggaagagatgcgtaggaaacagactcaagctcaacaagaagcttatgatgaagatgaggacatgcatggtggtgcgcagagagtacaatgcgctcagcaatgataaaaaaaagccgaatgtccgagacacagacggtggtttttggcgatggaatgtactgtggttaaaaaaaaaaagaaagaacatttgagagtaagattctcaaaacattgttgtgttttggtagtcctttattttttgtttttaatagtgcaagtattttagtaattgaaatggtgttatatgctttgaaacctgatgctttctaagtatgcaaagatttatgcacacaatatatttattcaaaaaatactttttgt

SEQ ID NO: 192247 - DNA, 453 bp, Gossypium hirsutum
cggccggaatcccgggtcgcccacgcctgccctcgccgtctcgcctctcgcttattggttcaagatctggttttgatctgatcagatcgtgataaaaatatcaaaacatgtttgggagagcaccgaagaaaagcgataataccaaatactatgagattttgggagtatcgaaaaacgcttctcaagatgatctaaagaaagcttatagaaaagccgctattaagaatcatcccgataaaggcggcgatcctgaaaagtttaaagagttggctcaagcttatgaggtgctgagtgacccggagaagcgtgagatttatgatcagtatggtgaggacgcccttaaagaagggatgggcagcggtggcggtggccatgaccctttcgatatcttccagtcattctttggtggcaatccttttggtgctggtggaagcagccggggcagaagacaaa

SEQ ID NO: 192248 - DNA, 608 bp, Gossypium hirsutum
gtgggaaccaatggggttacttgcttcctcaaatttatgtcaatcttgggattgctcttgaaggagaaggtatggttttaagtgcttgtgagtattatagggaagctgctattctttgccctactcattatagagctttgaaacttttgggtagtgctctttttggggtaggggaatatagggcagctgtaaaggctttagaagaggctatttttatgaaaccagattatgctgatgcacattgtgatggggccgtcagctttgcatgctctgggtgaggatgagagggcaattgaggttttccagaaagctattgacttgaaacctggtcatgttgacgctctatacaatctaggtgggctttatatggacttgggtaggttccagagagcttctgagatgtacactagggttttagcggtgtggccgaatcattggcgggcacagctcaataaggctgtttccttgttgggggccggagaaactgaagaagctaagaaagctttgaaggacgccttgaaaatgacaaacagggttgaattacacgatgccatttaccatttgaaacagctgcagaagaagaagtaaagagtaatggtggtggcaat

SEQ ID NO: 192249 - DNA, 549 bp, Gossypium hirsutum
cttttgctgaaccttcttttttctctctttttctcaccttccctctgctcctgctaatctaaagccttggtgctggttcatggatattgaacccttgtgggctcttggggggtggttttttctttatttctttgattgtatggcagcacctaaatcaacatcgtcgctctcacacacctatgaaaaaccccattttttcccactcttcctcacccttgtcttcttggttttccttctactcctcaacccctcttcaaaccctatcaactcatctaatgtcaccccttccatccctttcaagaggctcctcttacataattcatggaaatcatcatcatcaaccatgaacttgccccccaagcaaaggcgtcatccccgcacctacgcgtcttcgttcggagccgaagctcatgaagttccaagcggtccaaaccctatttccaacaggtaggaaagtgtgattttgtggagacatatggggtgaagatgattaagaaagagtcgtgacagcgaaactttattgttaatttgcttgtcatatcctttcta

SEQ ID NO: 192250 - DNA, 1040 bp, Gossypium hirsutum
tttttgttttttttttttttaccatataagaacgaaaggaggttagtcttggaattcctaaataaatcaatgtctgtagcaagatatataagataagttcaccatgctattgcttcgagccatgagacaaaacacagaactaataccaggctgtttaaactgatggttgatagagttttaacatttgaacctatcacactccaaggcaaagttctaaaggctctcctcaagcaactaaagatacacaagatataagaggcgttgtcattgcgtgtgcgtccaaccatagaacaaacttatatattgcgaggtatactagacaaaagcagcactgatttcaagcaataccctttttccaaaattgcgaaagctaagaagcacaagcattccttcagtcaatgcctaagctcacagtccaaagaagccaagctcactcgccttctccttctcaaaagtctcaaaatactgattgatgattgtgactgcgagaagaatacccgtccctgacccaattgctcccataagatcagccaatactgtgagtgcaccaatgcacatgcctccgaatgcagcagctgtgggaatgtagcgccttagctctttctgtaagcttccctcgcgatggccaggcataaccatttgttgttccctgagctgcttggcaacatctctagcagatgaccctgagacttcaatccaagtttttgagaacaatgcacatgctgataacataaacacaagatagaacaacgcatggaccgcactggcagccatctcagctaagcttgatggtgcagtgatataatatgcaaggccaccaacaggaatggattgaccatttgaatattcagactccttccacttgcccaagagattcacaaaaaaatttccactgtaccttctgtacagtaactgagagatgaagtaaaggtttgaaacaagagcagaatgtagaatgatgggcatgttagaggtgtagaacagcttgataggatatgaaccctgctgtccacgggcactctttgacctcacgggcaaaa

SEQ ID NO: 192251 - DNA, 714 bp, Gossypium hirsutum
  unsure (1)..(714): unsure at all n locations
tttttaaatatttattaataataattataaaatttttttattagtattatattttattatataaattttattaattttttttattttttaatttttatattttttatttttttttttttntaagacaaaacacagaactaataccaggctgtttaaactgatggttgatagagttttaacatttgaacctatcacactccaaggcaaagttctaaaggctctcctcaagcaactaaagatacacaagatataagaggcgttgtcattgcgtgtgcgtccaaccatagaacaaacttatatattgcgaggtatactagacaaaagcagcactgatttcaggcaataccctttttctgtaatttctcaaaacaaaatgtgtaaacaaaacatattgaactaactaaattgtaaactcttttgtcaaaagtaggcccgaaatgaatccctcaccttacccaaaattgcgaaagctaagaagcacaagcatccctccagtcaaagcctaagctcacagtccaaagaagccaagctcactcgccttctccttctcaaaagtctcgaaatactgccagacgattgtgactgccagaagaatacccgtccctgacccaattgctcccataagatcagccaatactgtgagtgcaccaatgcacatgcctccgaatgcagcagctgtgggaatgtaacggtttagctctttctgtaagcttc

SEQ ID NO: 192252 - DNA, 420 bp, Gossypium hirsutum
cttgagttgagaatgattcctgttgtactgcatgcgtgggctgccaaattcaactccacccgtccggcgttgtcaggattgagtttttgttggagcatgggtggccttggcttctagtgggcacttgccgctaaacaaatttcgaggaagaattggggaaaaccatatttaagacgcgaaacttgtaaggagtaaaatgccttaattggttacttgggatggagataaaaacgtgttaataagatcatctatcgggtttggggctatgtcttgaagtgttggttggaaaaagaacttggtttactatcctaactatctatccaatgctcatttgcctaagttgctgttaaaagtcggcaaccggcagctgagactaaagtatatgatgtgtgctcgacccagttactctgtggatgagct

SEQ ID NO: 192253 - DNA, 1097 bp, Gossypium hirsutum
cccgtttacccgcccgagaatcagtcccagttcgccatggcttactacgtcatggactgttccaagctccgtatttggaagttcgtggagtacagtaggatgatatacctggacggcgacattcaggtgtacgacaacatcgatcacctgttcgacctgcctgacgggcatttctacgcagtaatggactgcttctgtgagaaaacatggagccacaccccacaatacaggatcggttactgccaacaatgccctgacatggtcaagtggcccgccgagatgggtcagccccctgcactttacttcaatgctggcatgttcgtgtttgagcccagccttgtgacttatgaatctctcttgaagactctcaaaatcacacaacctaccccatttgcggagcaggactttttgaaaatgttctttaaggacatttacaagccgattcctttaatttacaaccttgttctcgccatgtcatggcgtcatcccgacaatgtggagcttgagaaagtgggagttgctcacatactgtgctgcgggatctaagccttggaggtacacagggaaggaggctaacatgcaaagagaagacattaagatgcttgttcagaaatggtgggacatttacaacgacgagtcacttgattaccgtaccagcgcggctgaaggagggacagagaccgtgaacctgcaaccgttcctggtggcactctctgaagttggtgcagtccatttcgtggccgccccatctgcggcgtaaatatgttgtgtaacgacgataaataccagttcataggtgtaaagaaatattgtaagaatcgagaaaggggcgatcctatgtggaaaacaaaggtggttttaaacaagggttggggaattggtgaaacgcttttagggggtttaaaaactatttagggcgttgtttttacttgatgaatggtgatgaaggtcgagtgtggggtcaaagtgggtgtttgtttattgtgtggctctggcaaaaagtcctgctgataaaacgcccccgtagtcttaaattttcagcaacggtgacataagaaatgaaaattgccacattttaaaaaaattgattatttttt

SEQ ID NO: 192254 - DNA, 481 bp, Gossypium hirsutum
cactgcagcaggctttaggcaagcttcgcaataataacaatgagggtggtcgtggtggtatatgttcgtctgaggaagagctcaatgattttatctatagcctgcagtatcgcatccagcatgaaagcatcccgttgtccgaggagaaacaacttcttagagaaattaaacaactagaggggacccgggaaaaagttattgctaatgctgcgatgagagcaaagattcaggaatcacttggtcagaaagaagccattcaagatcaagttaaacttatgggcgttgatttggatggcgtaaggaaggaacaaaatgcgatctggtctaagaaaaagcaaattaaagaaaaagtcaatgccatagagagtaaaatcgaatctttacaggaggagctgaatgccgtaatccagaagaagaacaaagcttatgaaaccatgcaacaactgtggaaacaacgtgatgaggcgaatgctcactttta

SEQ ID NO: 192255 - DNA, 881 bp, Gossypium hirsutum
  unsure (1)..(881): unsure at all n locations
cggtgagtgcaaatcctaccagcctgccattaacgccttttagcaattaggaatggcccattgcccattcctgcactaaaatcaatcaaaaaaaaggaatcaaaattcaaaaccttgttcttttatccactgctttaaagctctaaatcaaattattacgtaggaacttatagcaatttatccctcttcatgggttgctcttcttctctcccagatcggagttccgggcggtccactggacttaacaacgcggacaatcctgaaggtcccgatgccaaaaatctacgcgtaaagctggtcttgttaggtgattctggagttggaaaaagttgtattgttcttcgctttgttcgtggccagtttgaccctacatctaaggtaactgtaggagcttcattcttgtcacagacaatagctttgcaagattcaactactgttaagtttgaaatatgggacactgctggacaagagaggtatgctgcattggcacctctctactacagaggagctggaggtgcagttattgtgtatgatataactagtccagagtccttcaccaaagcacaatattgggttaaggagctacaaaagcatgggagcccangtatattgatggccttggttggtaataaagccgaccttcaggaaaagcgcgaagtaccagtccaagatggcattgactatgcagagaagaatgggatgttctttattgagacatctgccaagactgcggacaatataaatcagttgtttgaggaaattgccaagcggctgccacgtccatcaccttcatgatcagaggatggtgataccgaatcaactactaggtatttttaatgttatgcanttgggatttcaagtttgtgaatatcttattaatc

SEQ ID NO: 192256 - DNA, 639 bp, Gossypium hirsutum
ctttagcttctctacttttcgtacttcccactggaaatatcttatgatggagttcaaacatcaaacatcgacactctcattgatctttcttcttatgatgcctggttttgccctttctgatgtcaatcaagacaaagcagaatgttctaatcagctagtcgggcttgctccatgtctcccatacgtaggcggagaggcaaaaacacccaccatagattgttgcagtgggctcaaacaggtgctggataagagcaagaaatgcctgtgtgtgttgattaaagataaagacgacccgagcctcggcctcaagatcaacggtactcttgcgggaactcttcctagtacttgtcgagccagtgctagcatgacagaatgtatctccctgctgcacttggcacccaattcccaggaagcaaagttatttgaaggatatcaaaagctgatagaggggcatggcagtactcttgctgccaccgggaactccactagcagaccatcaagtgctgcagagaagagtgatggaggacaagggaagagatgggtgggagttgagatggctaccggaatttcactgttgattttctatagcatatacagaaacattggtgtgtgagagtagtggaacctgctggcagctgg

SEQ ID NO: 192257 - DNA, 415 bp, Gossypium hirsutum
cttccctcgctgtgaatggtacagtaaaacaacccaaggtgggaaaaggttgcaaaaggaataaccgagcccgtacgatcccttctcttctctgcgtcaaaaaccacatacatattcaacgagggcggaaccaggttttccaccctcttcctcccgctatataaagccattttcacgaaagccaagctcgctcgtccagttttcatttttgtagtcaaaacagtgcctttctcctataaatatggggctttcttatttttctttcccttccaggcaccctgctccatgtctcgttgaatggattcccttctcgccccttcctccacgtcgtctttccctgctctgaacaacaatagcaacagtaggattgagcataactcgctgccatccagtttgtgtttctttaatttgagaa

SEQ ID NO: 192258 - DNA, 727 bp, Gossypium hirsutum
cacgcgtccgtcatccctggctgaatcccagtattacatataaaacccagactaaacaaaaacagagattgaaccatcatgtcacggcgatcatcagggacatggttgaggttatgcctcgtaatatttgcggtagtttcagcactggcagtatgtggacctgctctttattggagattcaagaaaactctcagattcgtcgattccaaatcctcttgtcctccttgtatctgtgattgtcctcctcctctttccctcctcaagattgcccctgggttggccaatctctcagtcacagattgtggaagcaacgaccccgatctcaagaaagagatggagaagcaatttgtggaccttttaaccgaagagttgaagttgcaagaagctgtcgccgaagagcacactcaccatatgaacattacctttggtgaagccaaaagggtggcttcccaatatcaaagggaggcagaaaagtgtattgcagccatagaaacctgcgagggagccagagaacgggctgaggcgttgctaataaggagaggaaagtaccacgatatggaacaaaagctcgacaaatgggtggaagggaaaacttctaacagtcaatgatatatagtctagattgaattatgaaaggagctagtgctgcctgacaggtgtaggcaaggccattattgtactaaatctgcagtgaacatttacttatttcaacatgctgatatctatt

SEQ ID NO: 192259 - DNA, 1617 bp, Gossypium hirsutum
  unsure (1)..(1617): unsure at all n locations
ctagcaattacgctgtgggacaggaatgtttggatcgtctancaatttccttaggtggaaatactattgttcctgttgcatctgagcaattttcaacttatttagctgctcctgagtggcaaaagcatcatgctgcgttgattgcccttgcacagattgccgagggttgttccaaggttatggttaaaaatctggaacaagtggtttctatggttttgaactcctttaaccattctcatccccgtgtgaggtgggcagctattaatgcaatcgggcaattgtctaccgacttgggtcctgttttgcagaaccaatatcaccaaagagtattgcctgccttagcagcggctatggatgacttccataatcctagagtacaggcccatgctgcttcagctgtgctcaacttcagtgagaattgcactccagaaattttaacaccttacttagatggaattgttagcaaattgcttgtacttttacagaatgggaaacaaatggtgcaagaaggggccttgactgcattggcatcagttgctgactcatctcaggagcacttccaaaaatactatgatgcagttatgccttatctgaaagctctcttggtgaatgcaactgacaaatctaatcgtatgcttcgtgccaaatccatggagtgtattagtattgttggaatggctgttggaaaggagaagttcagagatgatgctaagcaggttatggaagtgcttatgtcattgcaagtatcccaaatggaaacagatgacccgacaacaagttacatgctgcaagcatgggccagactctgcaagtgtttgggacaagacttcctcccttacatgagtgttgtcatgcctccccttcttcagtctgctcagcttaagccagatgtaactattacatctgcagattcagataatgacatagaggactctgatgatgaaagtatggaaaccattacgcttggggacaaaagaattgggatcaagacaagcgttctggaggagaaggctacagcatgtaacatgctatgttgctatgccgatgagttgaaggaagggttttttccatggattgatcaggttgctccaactttagttcctcttcttaaattttatttccacgaagaagttagaaaagctgctgtttcagccatgccggagttattgcgttctgcaaaattagctgtggagaagggaatggctcaagggcgtaatgagacctatgtaaagcaattgtctgattacattattccggctctagtggaggcattgcataaggaacctgatacggaaatatgtgcaagcatgttagatgcattgaatgaatgcgtacagatctctggtcctctgctagatgaaagtcaagttagatctattgtggatgagataaaacaagttatcacagctagtgctagcagaaaaagtgagagagctgaaagagccaaagctgaagactttgatgctgaggagggagagttgattaaagaggaaaatgaacaagaggaagaagtttttgaccaagtgggtgaaatcttgggaactttgatcaaaacatttaaagcctctttcctgcctttctttgatgagctatcttcatatcttacacctatgtggg

SEQ ID NO: 192260 - DNA, 809 bp, Gossypium hirsutum
gattgcaaaatgtagatatatgttattgtttttagagctaacatcttgaaaatgaccgcgtaataacaaaagctcggcctagaagtatgcatctcagtattcaacatgttttcactccaacaaaaataataataattgtaaacaaaatgggaatggtgaagtgaggaatgcaaagtttttgttggcatcaactatggtttagaatggttcatatttcatacaacactgccaaagcagcccaaagcacccacgcgcttccggtctgctcttttcgtaatcatcgtcgtagaatcttttgataaactacctatcaactggttctgataaagcaaaagtatgcttacttcttgtgaacagggaagaccatccaacttcctactcacacttgattgaacggtaaatgtgtcgaacaaagagcagagatgcacggaagccaatagccccaagcatgaggaagaagccatagcaaatgcaggccatgtacccaaagaagaacgaagtttgcatgaagcctgacatgtctgaccgtgcattgtaataatacaaacagtaggcgtatatgaacagcccggtagacccaccacaaaggaaggacctccaccaccactcatggtcttcagcagcaagttgaaaataagtcaaagccacagtgataaaagcagtgacaatcaagagaatgataaagacaataaacaggatgctgtatatggtgtagatcctatgtccccacacgctggcaactacgtagtaaagttcaatatagatagcactgaatagcaagaaacctgccattgccatctgaggaatag

SEQ ID NO: 192261 - DNA, 1643 bp, Gossypium hirsutum
tcggggttatttatattttatagttgaaagggttatataaaaacctaagggaggaacaattccaagcacttaagatttgttgcattgttattttgccttttcgctatcgtctttgcctatcaactccacggcgcagatccgaggagtctctatttttcaatccaaacaacccctctaaacactctcttcttttattgctcctactcttccagtcatggcaggcttggcaccagaaggatcccaatttgatgctcgtcaatatgaccagaaaatgactgagctgctccagactgatggagatgactttttcacaagttatgatgaagtttatgacagttttgatgcaatgggacttcaagagaaccttctgaggggtatctatgcatatggttttgagaagccttctgccattcagcaaagaggaattgtaccattttgcaagggtcttgatgtgattcaacaggcacaatccggaactgggaaaacagcgactttctgctctggaattctacagcaacttgactatgctgtagtccaatgccaggctctggttttggcacccactagggagttggctcaacagatcgagaaggtgatgcgggcacttggtgattaccttggtgtgaaggtccacgcttgtgttggtgggactagtgttcgcgaggatcagcgaattcttcaaagtggtgttcatgttgttgtcggtactcccggtcgtgtcttcgatatgttgagaaggcaatcactccgtccagattatattaagatgtttgtcttggatgaggctgatgaaatgctctcccgtggttttaaggatcagatctatgacatcttccagcttcttccagccaagattcaggttggagtattttctgccacaatgccgcctgaagcccttgagatcactaggaagttcatgaacaaacctgtgagaattttggttaagcgtgatgagctaaccctggagggtatcaagcagttttatgtgaatgttgaaaaggaggaatggaagcttgaaactctttgtgatctctatgagacccttgccatcacccagagtgtcattttcgtgaacacaaggcgcaaggttgactggctaactgacaagatgcgaagccgtgaccacacagtttctgccacccatggagacatggaccagaacactcgtgacatcatcatgcgtgaattccgctctggttcttctcgtgttctcatcacaactgatctccttgctcgtggtattgatgtgcagcaagtgtctctagtcataaactatgatctgccgactcaaccagaaaactacctccaccgtatcggacgaagtggaaggtttggaaggaaaggtgttgccattaactttgtgactaatgatgacgagagaatgctgtatgacatccagaagttctacaatgtgatcattgaggagctgccgtcaaacgtcgctgatctcctttgatgagattaccttttttggaagattatttgaggcaaagggttttgttgttttgcaagtcctattttaacgtgcgcttttcttgtttctttctttatttttttttcttcctttctagtttcttaagttaatgttgttcttaaaaacatatttgaccattttaatgatatggttcctgcacattttctag

SEQ ID NO: 192262 - DNA, 645 bp, Gossypium hirsutum
gaaaaggcctttttgttttgcttgcttatcatcatcaaatacactttcttcttcttctcttcatattggttttttcccttagaactccacgacacagatccgaggagttggggaaaaccctcacacaaattctctctctaaatcttaaccgagaaggtctccaaaaaagactaccctttttgcccatttactctccttattcaacaaattcggcatcacatcccccaaaatagtcgcttttttatctcttgctctcttcatctgcttcaagtcatggctggtgtagcacccgaaggatcccaattcgatgctcgtcaatttgatcagaaaatgagtgatttgctccaaacggacggagatgatgttttcacttcttatgatgaagtttatgacagttttgatgcaatgggacttcaagagaaccttctgaggggcatctatgcatatggttttgagaagccctcagcgattcagcaaagaggaattgttccattctgcaagggtctcgatgtgatacaacaggcacagtctgggactggaaagacagcgactttttgctctggaattttgcagcaacttgattacggtatagtccaatgccaggctctggttttggcacccactagggagttggctcaacaaatg

SEQ ID NO: 192263 - DNA, 501 bp, Gossypium hirsutum
tcgctgtcgcgtgggcaacacttctctcctctgtcaaaactccgcggcgcagatccgaggagtttgggaaaccctatctctctctaaatatcaaccgaaaaaagctctcaaaaaactaccctttcttccccccccctctctctctctcactttctctcattctctttctttccagcctttctacactctttttttccccatcgctcctactgttttcatctgcttcaagtcatggcaggtttggcaccggaaggatcccaatttgatgctcgccaatatgatcagaaaatgactgagttgctccaaactgatggagatgattttttcacgagttatgatgaagtttatgacagttttgatgcaatgggacttcaagagaatcttctgaggggtatctatgcgtatggttttgagaagccttctgcaattcaacaacgaggtattgttcccttttgcaagggtcttgatgttattcagcaagcacagtccggaactgggaag

SEQ ID NO: 192264 - DNA, 1261 bp, Gossypium hirsutum
cggaatgtcccaatattttagccatctgatcaaagcagttctaacacaatggggggaggcagtgacggctggacaggatataggaagataaggcaaaacacaaacggtgtaaggagtttaaagatcattctgataacagttttcagttttagtttttgagaggaaagccctacaagacatcaaatatcaatccatcattcttcccctcagcatggctgccgctttcctcacttgcctcacgggccctaagatgaataccttgtccggtgggcccttggcacccccaaaatgaatttccgcattgcaagactccttaattgacaagatggaaaccccttttcttccaatgacacgtcccatcttcccttgcggaacatccagaattgaaagtatttcttcttcaggagcatccccctccaccatcacgttatctggaataggaggaatagatggccaatcagcatagttattatcgttgatgcagaaacatcggcaatacagagctccacgaactgcaaggtgccacaaggatcgttcattcagtttcttcatcatcatgtggtagatgtatagaagaaagcggacatcatctgcagctgcacggaccatgagctcagataatggtctgtatttccaacacttgggatcctgcctaaggaggagacgaacttcttccttctcctggtaagatattccgcaatagcgtggatctgcaaggaggccgacaaatgatatgttgtcatcaggcaatctcgtctgtccttcttgttcctctaaaagagaataagcaatctgtgtgtccatgacattgtttaacttgatgccaaattggaagtacaatgcctcactatctcgtttgcaatcgtgaataactttttggatgtaactagactcaagtgcaggcttacaggcatttataagcacttctccaccttcaatggcgtcaactaaatatatggcatcctgaaatgcaagctgcataatacaaagagtgccattgcgacaaaggtcaacgccctcacagtcaaaacctacaaccaactgcttctccggtgaagggttcaagaactccgccggcagctgagaagcattggtcactatatggatagggaccggagaagcttcatcgtcaaatggattgccacctgagtcagatgggagaggaacgtgagtgcgatgagaaggaggatgattaaaggaagccatgcgatcgaaccatccaagcagatcgttttattctttttttttccggacgcgtggg

SEQ ID NO: 192265 - DNA, 1172 bp, Gossypium hirsutum
ttagacaatgcagccagccagttataatatcgtaataaccaactcattcgctcttaccgttttagtgggcagcatcgaaatgacgaatgacttccattgccagttgatgagggctcttgttctgcagctttgcaagctcttccatggcttcgtatgtctctttatcggcgaatggcttaaggttataccttaccggtgattgaactggaccttcccacttgtctaccagctcatgaagtttttcgaatcccattcgggttgtgaagtcgccgaatgattctttgggctgtctttttcgtttccagtagtagaataaaggctcgaaaactttttcgagatcttgaactttgactttgttcataaaagttcttgctaattgggtttgattcggtgttcctccgagccaaatctgataactgtttggaccgtcaccaactagtccaagctcagccatgtatggtctggcacaaccattagggcaaccagttacccttatcactatggactcactgtacttgagtccaaccttctcaaagacagctctgacacgcttgaggatgtcggggatacctcgttcagcttcggttattgccaaagggcaaagtgggaaagccgggcacgccatagcggttaagttcaaggggtccacatatctaggatgcagcaacccagcttgagcgagaactgtggtaataggacgcctccatgcactacgaatgtcacacaaaatgaggttttggttcggggtgattcgcacatttaaattatacttctctatcacttccctcagtgtctttttcatttttcctccaatccgaccgttatctacatggagcccgcaaaataaagcaccgtcaccctgctcgtgccatcccaagtaactcttaaattcccattccggcaactcgtggaaaggctcgaatttctttccataatattgctcaacaacatttctaaatttttcaatcccccaagagctaatcaaatatttcatcctactatatttacgatcatctcttctaccatggtctcgttgtgtagcaacaatggctttaatagcatacaaaatgtcctcttttggaacataacctaacggttctcccagccgaggaaaagtggcctccattctatgagttcttcccataccaccaccaacatagatgttgaatccc

SEQ ID NO: 192266 - DNA, 807 bp, Gossypium hirsutum
aattttataatttatgtataatttaaaaaatattatcaatataaataaaaaaagaatagttaatgtactgttatttattgcaacagaaaattagaaattcacacattcatatcataaagtaattaacaaaacatataaataataaattaacgattcctctcttaattttaacaattttcttcttcttcttttgttgctacatttattgcatgaggtactgctgtggaacttgttcacactaaccaccttcattaaatgcgtaaaacaatgcaagatagcttaaggatgatggggagcaaagggtggcaaaggaggccattttccgaacttggggtggtggtggaaatacttgggaggaatcttagggagaggaggcagcttaggaaggggagggtggtggtggaaatacttgggaggaatcttgggaagaggaggtagcttaggaaggggagggcatggcttcttagggaatggagggatcttgggaagtggagggagtggcttgtaaggaatgggagggaggggttttggattgtaggttggaacaggtggtggaagtggcttcgtatacactggaacccggggaggtagtggtttgttgtatacaggaactggagggggcttgtagattggaaccggaggagggactcgtttcttgtataccggaactggaggaggcttatggactggaactggcggaggatgtggttccggaactggaggagatttatagactggaactgggggaggacatggtttcttgtatactggaactggaggtggatgtggtttcttatagactggaac

SEQ ID NO: 192267 - DNA, 1663 bp, Gossypium hirsutum
gccgcattggctagggttttgtgatctctatcgattgtctctccattttcttacctctcaaacaccaagcctagatcttttcctttgtcatttatattcacttccatggctttaatcatacactagggttctcctggttgctatttcgttttctttttttcacttaaaaaagaaagaaaagctaagagattttcaataatccaattttttttaaccaatggcaaccacgaaccctttcgatctcttggacgatgatactgaagacccaaatttggttattgccgctgctgagcagcagaagcttgaaaagcccaagaaagctcctgcttccgccccagctcaagctcagccggctaagcctgctaagttcccttccaagccatctcctcctgctcaagctgtgagagaggcaaggaatgatcctggacgaggaggtcgtggtgctggacgtggaggaggccggggatatggtggaagagggttcaatcgtgattccaatgtcaatgataactccaatgcatttttaggagggtacagaccttctgaagagggagaagaaaggaagcaaactgaaaggcgtggaggatatggtgggcctcgaggttctttccgtggaggacgacgcggtggttttaatgatggagaatctggagagggggagcgccctcgcaggatgtatgatcgccgcagtgggactggacgtgggaatgagttcaagcgtgatggttctggacgtggtaattggggtagtcctactgatggaattgctccggagaccgaagaaaatgtccctgagaatgaaaagaatgttggcattgagaagcagtctggagaggaagatgccatggatgctggcaaggagaatgctgcaaatgaagctgaggagaaagagccagaaaacaaggagatgactctggaagaatatgagaagattgttgaggagaagaggaaagctttgcttgcccttaagactgaagaaaggaaagttgataccaaagagtttgagtccatgcaacaactttcaagtaagaagagcaacgatgacatttttatcaaactgggttctgaaaaggacaagcgcaaggatgctgataaagaagaaagagtcaaaaagtctgttagcatcaatgagtttctgaagccagctgaaggggagaggtactacggacctgggcgtggtcgaggccgtggccgtggtcctagaggtggatatggaggcaatacagctagcagtgtgttagctccctcaatcgaagatcctgggcacttcccctcattgggtggcaagtgagaccccaccgctgcaatctgcacaatggttttcattttcatgggaatgcgttgtgatctattcaatagtcaggagtctacaagcttttctgtttttgagtgtaaattttagatactttgcccatttcctgacatgcatgcatgcatactttgtctttcttattaatttcttttgttttactgcttttggttaaaattagaacacatgttgcattattatcaaccaaaaagtagcggcatcagttttgtttcggtttaggttaagatggtttagagggtcgcgtcggagtttgagacatggcattcatgttatctttttaaacctctatttactgacgattccgagtgtaaaagaagtagtggaagcagaaaa

SEQ ID NO: 192268 - DNA, 575 bp, Gossypium hirsutum
cccacgcgtccgcccacgcgtccgcaaactgggatctgaaaaggacaagcgcaaggatgctgataaagaagaaaaagtcaaaaagtctgtgagcatcaatgagttcctgaagccagctgaaggggagaggtactatggacctgggcgtggacgaggccgtggccgaggtcccagaggtgggtatgcaggcaacacagccagcaatgtgcaagctccctcaattgcagatcctggacacttcccctcattgggtggcaagtgatgtccgccaccacaatctccgcaatggttttcacttggaatccattgtggtttattctatagtcaggagtccccccacctctcccccaaaaaactctcaagacaaatcaccatttcccttgttagaaaccatgaacgtgtttttgagtgtaattttgcatgaatatcttttttgttttccattctgtttttgttttgggttaaaaaattagagaatattacaactgagaagtagtagcatcagttttggtcctgtccgagacattgcgttaatgttatttccatcctcttaccttttaatctctattattgcc

SEQ ID NO: 192269 - DNA, 599 bp, Gossypium hirsutum
taattatctgatgattattacgaggtctatgatatgatcgtatgattgtgtgtaaatttcgtgaagaaattctatgcataaggtgcggtattcgaagttagggactaaattgaatagttgcaaaactttcattctagaagtttctagtatgaaattgctttgaaatattaactaggaggtcttaaatataatttcaccaatttctaagtttatggacaaaaattggacatggatggaatttttggaaagtttactagtaagggcattttggtcatttaggggtaaaatgaattaaaatacataattaaaagccaattttgctcatcttcttcaccatggacgtgtataccaagggagactccatggctagggtttccaagcgtcccaagctcgattgtaagtccgttctagcccccgttttcatgttctttacgtttttggagtcccgagtaacttgatttagcttatgctagcaataattcaacctagggttcatatttggaaaaatacccataggtaaaatttgtgtattctagtgttttatgatacaatatgaggttttaaattatattggacaacttgtgctactcggttttaag

SEQ ID NO: 192270 - DNA, 1203 bp, Gossypium hirsutum
  unsure (1)..(1203): unsure at all n locations
nnnnnnnnnnnnnnnnnnnnnnnnnnnnnnnnnnnnnnnnnnnnnnnnnnnnnnnnnnnnnnnnnnnnnnnacaagaaaaaccaatctccaatcgaataatttggtgtatatcaatgcctttaaacaacacgcatgtacagctttcaatgaatagtacaaacagggcaaaggaaagataaaactttggttgcagagccagggagcattacaagagctatttagatgatacaggtgggaaaacaacgaccatcgcctaagagcaacaagatgcagttgcagtccgttctgaaggtctattcatgagaaccattccagcaggattttgtgctggctgcactcgaggtaatcttttagctatttcatagaaaagttcattgacattggatgcggtctttgcagaagtttccatgaagaaaagaccattctcctgagcataagtttgtgcttcctctgctgccaccttccttgcatccagtaagtcagctttgttcccggccagtgccattaccataccaggattgccttgtgcttgaagttcttggacccattttttggctctctcaaatgatgcttgatttgtaatatcatacacaatgatagcagccgcagctcctctgtaatacattggtgccaagctatggtacctctcttgaccagctgtatcccaaatctcaaacttcacagttgcatcattcacagccaatgtttgggagaaaaaagctgcacctatggttgattcctgaaattcaacaaattgccctttagcgaagcgcaaaacaagactagactttccagctccaacatccccaagtagaactaatttagcattgatgttcttgtttccagtggtggccatgagatcccttctaaccagactgatgctccgatcaaaatcagatgaagaaaatattgattaagtaatatgtgttggaggcgttgacgaacaagaacaagaaaagagtggctgactgacaaaagccaaacgataaaagtaaaaggaaggatcctccttaagcctccaccctaaaaaccaaatcaaactctctttaatttctaaagacaccctgatcccgattaccaaactcgaaattgattgcaattttaatttatcttccctcttagatttcctttttatttttccttcacctgccttttttttaaagagtgcttaacccaaccggacgcgtgggcggacgagtggg

SEQ ID NO: 192271 - DNA, 424 bp, Gossypium hirsutum
gctatggtatctctcttgaccagcggtatcccaaatctcaaactttaccgtcgcatcattcacggccaccgtttgggagaaaaaagccgcaccgatggtcgattcctgaaattcaacgaattgccctttaacaaagcgtaatacaagactcgacttcccagctccgacatccccaagtagaactaatttagcattgatgttcttgtttccagtagtggccatgagatttctcttgtgatcggatttaggtttctaaaaaaaacttatgcagtgaacaaaacgaaattgaaaattggggattgctggagatgttaacgaagaacagattaaggggcaaattgaaaataaaaataaaaaaatggcaaagccaaagggtgaagacacccccaaggatcctttctttatcaaccccttgagagacaag

SEQ ID NO: 192272 - DNA, 431 bp, Gossypium hirsutum
tattaggattgccttgtgcttgaagttcttgaacccaatttttggctctttcaaatgaagcccaataatcgcagctgcagctcctcggtagtacattggtgccaagctgtgatacctttcttgcccagctgtatcccatatctcaaactttacagttgcatcattcacggccaatgtctgggaaaagaaagctgcacctatggttgattcctgaaattcaacaaattgtcctttaacaaagcgcgacaccaggctagacttcccagctccaacatccccaagtagaactaatttagcattgatgttcttgtttccagtggtggccatgagaatgagatcctctacgatcagatttatgttcaaaaagtacaccaatgaaaataaaaactaaggagtaaaaaaagaaagaaagacaacatggagaattgagg

SEQ ID NO: 192273 - DNA, 502 bp, Gossypium hirsutum
gtctaccttcgagggcctagtccagctggcagacatggagctggatgattgtgttgaaacaactctatatgatgtcaacatcggtgaagagatgcgtaggaagcaggcgcaagcagctcaagaggcttatgaggaagatgatgacatgcatggtggtgcccaaagagtgcaatgcgctcagcaatgatcggtggcagacggtaaggaatggaatgtatgattgtttaacaaaaattatttgaaaataccattctggatatggttgtttgcttagaccatttcttctagagtgctatctgctttggtaactggtaaagtgtatggaaagatttagcgttggaacttgacctatttgtttatggtatacaacctattgcttcttgtgagcttagtttttttagttttgattttatatttgaatttgagaaatcatttagggatattttatgatttgaaggtgttcattgttccgatttgattcgggtcattataagatgtttgg

SEQ ID NO: 192274 - DNA, 678 bp, Gossypium hirsutum
aaatgttgttatcaaaaaaaatgaaatttccccaaaatttattgatatttagtctgcttttcaattaaaaagatgtcttgtagcggtaaccacttacatttatttgagattaattgaaggcaaacagggcgagtacattttccttttattttttactcttttttttttatttttttttttttttttttttttttttttttttttttttttttttttttttttttcaaaagaagttaatcaagaatgtccaagttaaacatacaaggttacaacatatcatgcaatgcatacaacagacaaggttagctactagggttaaaccacaacaaaatcaacacattgaacaacacccacaacagccacaaaccagtgattgtagctgattacaaagcaaacaaaaactaatgtgtattttcatcagctactactttaacaattgtatgacttccacaatttaataaacttgtcatgactcgcggaagaaaccaggccagtcaccggtgacactgccaatgcagctatcagtccttcatgagccgacaatgtctttgtcttaccctccgtcatattccatagctccaaagactggtaacagccaatgaccagcaatgaaggacttgtaagatggaaaacacactagtgaaacttgttgccattacaactcaattcatgaacaca

SEQ ID NO: 192275 - DNA, 607 bp, Gossypium hirsutum
tcttacatttttgtaaaaaatcataatacgtacattatacatttttgaggaactttcatttgtacagcttatttgtagtgtttgtttggtggtgcatgcatactattttgcggtttcgaaaacaggcatgggtctccaaagaagtggaataagttattgaataatgaatttttcgagacgtatggtaatgcttatatgatatcaggaaatccacggaagaaaaatgaaatgcaatgctaatcttacaagtatgtataatagagaaactatattatccaaattttgcagccatagaaactctgcaatagctcttctttactactggtataaatatttagtaggcctctcgacccatcaagattttcatgcacttggtatgaaaaacacacgaaaaaaaccttacaaagataatgcgtagggaaccttcaaccgcaggaatgatagagcttcaatgtagaactagcagcaccatattacaagcctcaatatggtacaatcttccatatctggttatctcccatgttccaatgccacagcactatagtagaaccattttggattccaacaaatctctcatcgccgtggaaagcatcgcgtacgaaataaa

SEQ ID NO: 192276 - DNA, 427 bp, Gossypium hirsutum
ccccccttcaagtttttttttcttaaaaaaaaattcaaatttttttttttcgaaaagtatgatcaaggttagatgagatcaggaaaagcatgttgttggtacattccacggaagaaaaatgagatgcaatgctaatcttacaagtatgtataatagagaaactatattatccaaattttgcggccatagaaactctgtaatagctcttctttattactggtacaaatatttagtaggcctctcgacccatcaagattttcatgcacttggaatgaaaaacacacgaaaaaacctcacaaagataatgcgtagggaaccttcaaccgccggcatgatagagcttcaatgtagaactagcagcaccatattacaagcctcaatatggtacaatcttccatatctggttatctcccttgttccattgcca

SEQ ID NO: 192277 - DNA, 842 bp, Gossypium hirsutum
cctcaagttttgttacttttccggtgagaaatatttttatggtttacattcataagtgctttagcatcaactaggggaaatgatttccctagacagatactttaaacgtatagcagcatcgcattgtgttggagctgaaagaggggatggcatttcaactgaggatggtcaatcacttgatccatactatcctgaatatagcttttccggattggataagtcccgaagaatttttgcaaattgcattgaaacctccttgctacctatatacataggctttgaaaaggcctagttcacatattcacttttgttgtctcttttatctagttgcagagaaaaatgaaattgggccgccgatagctgggtcaccgttgaggcttcctcgtatggcttgcaatttgacaggtttcgtgtgagtttgtatttttatcatgtggcatgaagcttggataacagttcaggaaaatttacatgccttgttggattctcccatttcagtagttcggctatttctttctctgtttctgtggcttctctcttcaaatcattaagacagtagcctaggctgcttagacatagaaccatttggctcttaagcatctcttcgacttcattacgctcggtcttatctgccactctgattgtatattgaagaaaacactttccgatctcagaaatgctggtttcttcataccccaatcgtgtacagacatctgcatttggtgattttcccaactcaaggtcttgggatacactttccatttgcaactgtttttcaatctcttccagagacttaattagtcacaccttatccaggcattttgataaagagcctgttttgt

SEQ ID NO: 192278 - DNA, 743 bp, Gossypium hirsutum
  unsure (1)..(743): unsure at all n locations
naataaaactcatgaatttgtccatgtttagcccaanaaatccagtttctgatttgagtttctccattttactaatccatgctaacgtttcccataacttccattagatagcggcaatgactggaaacnagtccgttacgttgatttagatcacaatgtggtgccggcgctttaggattcaaaccanaatgcattctggggttttgatataatatgatgtctgcagcgatcatctgggattatgaaagtatgaactgaaaattgcagcatntgctgtntaggtgccgctcatcatgactccncccaggttggagctcagtaatgtaatcacattaatgaccttggcttggaatggaactgtccactttcaattcatcagccagctccgcaaccaccccctccctagcggcaactgcttntgtttcaatatctgtaacttccnntgcctctccgtctttgctcttaccaatatctgcactcacttcagaagtgtttgacacacaatgcttttgaagccatctatcagtttcccacaggacatgcatgatgctttctcgaccagaatagccatggctctcaaagggtagaataacaaggcgacagagagctccatgacccttcagggcattgaagaaacgatccgactgcatggttaatgttcccgggttgttgtcttcttgcaaatggataagcaagataggcttctttattatgtatgccgtacgagtggtcggacgcgtggg

SEQ ID NO: 192279 - DNA, 449 bp, Gossypium hirsutum
gcagcttgaacaatcaaatccatagtttaaaatttagtaataaaaacatcatcgtattgtgtcacaatttgcttcagaccccccaacaatacccagtttctgaatttcgagttttctcaactataaactaatacatgactaaacgttttcccataaacttacaactagatagccggcaatgactggaaaacgaggtccgtttacgttgattttagatcacatattgtggtgccggcgctttaagaattcaaaccaaatggcattctgggggttttgatattatatgatgtctgcagcgatcatctgggattatgaaagtatgaactgaaattcgcagcatttgctgtttaggtgccgctcatcatgactccccccagggttggagctcactaatgtaatcacattaatgacctttgcttggaaatgaactgtccacttttcatatcatc

SEQ ID NO: 192280 - DNA, 603 bp, Gossypium hirsutum
atttattttccgttgcaatattaaaaaaatgataatttatttgattgtaaaaagttttaactcccagtccatttataccagtttagtaattattaaaaatataaaattcaagtaagcgacagtaagaaagagctctgaacagaataaaagctttaaagccactaaatcatcagatccaacttattaaattaaatcatccctttcacaatagcagagtccaagtgccaaatatctcaataaatactcccaaaatatgacatatttactttaaaaactaggcttcttaactcatcaaccaagcaagttttctagacaaagatggaaaaaagggaaaataaacgtcaaagcccaccattttacacaacttatcataccaaagcaaattgctgctgctgccaaaataatctttgttccatattttcatggagaagcctctgcctaaatttctcacaaccttcatttacaaaattcacgccacaagaaaaagccatatatttaaacgagggagatccacccgtcaagccacgttaatattcttgaaactcgatgtagcatgagcaggtgtgtttgtcatttataacctctacaatatccagaaacaaa

SEQ ID NO: 192281 - DNA, 1143 bp, Gossypium hirsutum
agtgataaccaaaaatccatttataaaaaaaaataaagaagaccaaaatgaaaaccggttgtataccccaaagaaacgcaaagacagaaaaattctatgaatgcatgagatggaacaattttgactcccaaactaagtaaaactaacgaatgaaatgaattctaatgaatgcaatgctgaatgtggttaatcctcgacccgaccccgaaccaaaatgtataaatgaagcagaggagatttaaatacaagccagccggaagtacttacttcataaatatgcagatttgagcttcaaaaataagcattgataggtgatggaataaggactgacaatggttgatttacagcagttgagatttctttaaagtgctgcagcgttgtttgaaccagatgatcgatcatccattccatcaaactagatttactgggagaaaaccacgataaaggcaaaactgatgctcgtgtggacatgtaagtgtgatcgagctacctgactccactccttatgcatgtccaaattcatgattccctccccctactccgctcattcaagaccaaaagatattctctttatgcaggcgttcgttgacttctctgaaactgtctgcatccagttcgcccatgattaaaaaaaaatggaatctgaccccatgatgctgatgcaaatgttagtgacaacataaagactggtaacttctgttgtctgacaatggtgatgacacgacacatgcaacccaagaccctagacattcccaaatgcatggacttcgaaaagaaataaacatgccgaatggcaacacccctcaaacagaaatggcacgactaatagccaacttggcccattcagcagattctttaaccagaaggtcttctgaagacaagcattcattcaaaaagtctttgctcgagacagattgctgtatcatagaaccagcatgacttcctaatgtatcagccagatcaccaaggactccaatggcagtcttcatgaccatatcatccatgtctttctccatgtatatgccatccaaaaactggaggatgtgaggtgcatagggaatcaacagctgggttttgggagagttcttaaacccttggcaaatcccagaatatgcctccaggattccgtttctcaggggattt

SEQ ID NO: 192282 - DNA, 808 bp, Gossypium hirsutum
  unsure (1)..(808): unsure at all n locations
ggccgcccttttttttttttttttttnttttttttaataggaacaactnnactcagcaattaaaggttttcatgtccatgcatccaatcaaatacaattggattttaattgtacaaattaaatccnctatagtcaaataacgtcnccatcagcatcctaccataagtaaaacagctacatctaaaattccattttaacaagtgcattggattcttcagatccatgatgaagccagtccttggcacagattagcgcttccacagtctccggtcgtaaggagcttcggtactcatccagttgctttattatgatgtcaaagaccgagtccggagcagcagctgatactggaattgacaaaatgtcacgagccatcttcgaaagagttggatacttcatcttattgagcttccaccagcctaatacatcaaactcttggactcgaggcaacaaggactcttctaagtactgatccagctcagatttcatttgctggctactagtctccataatgtacacatcgaaatctgtaagtccttggtctgaaagaagatttccttgctgagattcatcggtctttccattgtttcccgcattgccttcttctgtgtaagttggtgtcaaaggcagtggaagtgctacatactccagaaagagctcatgaattccatcatcaacaattttgatatatgtgggagcgtcttcaccaaatatttttgtgaaactgaactcaacaagcttcattttgaacccaggatccatgactacagcaattgccaaaatcaagcttgtacagtgcatggtagcacag

SEQ ID NO: 192283 - DNA, 604 bp, Gossypium hirsutum
cctgttaagtgtaacaaggcaagttgcccttagcatacactgtttaaagcttgaccattagcactagcaaaggacgcttagtcttctcaatttaactcttctgtaccacacaaatgctcacatcaaatgctgctaatttttgttgaggaaagtgatgatgagctcattcacctgctctggtagttgttcttgaacaaagtgattcccttctggcatgaaagtgatgtccagattaggcataaactgcttcactatccctttcctcatgtactcctccattcctgggaatttcataacatagtccttctcccccattatcagcaatgatggagctgtcacttttgggttggttataccacaatccaattgagtgcacctgtaggggacctgcagtgcggttcggaaaccagaattttgatatgaagctgcatagacctcaagatcctcctctgtgaaccatggaggcaatggagttgatggatcaaccaaatccattatctcctcattgtcgccggctacttgtaactcacttctgcagaagagaatataaatgtttctaacgaccgtcttaacatcaaatcggccgcgtgggcggacgcgtggg

SEQ ID NO: 192284 - DNA, 815 bp, Gossypium hirsutum
gtttattttttttttctgttgttcttagaccatcagtatccatgtattattaatttaatccttaaaaaacctcaaaataataataataaggttcggcaaattatgtttagaaaatgtaaaatgtctctctttcatgctcagctaatgtgaaagcagaaattttaaatcaataattctaagcttgagcaccaagttcaaggagaagagtgtggctaacagcattggaagatggtccaacaaattgaatgggaccaggactaatgtagcagttcttaagtgcccaatcctccctcacggaagcaaatttcttgaatggagcaccttcaagctctaccattgccttcttgataacaggtttgaatttaccatgcctcctctcgacatccattaacgatgtaagagcagtccctccgacagtccattcttcaaccggtgctcccaagtttcctaccgatgatatcaacccagtttttccactgtggaggagagctgcggcgccgtagcccaaagcatagcaataggaggcatcaaagttagttggcaaaccacatcttccttcatatccaaaaaagtgtgattgtcctttaaaatggcccttataagatccttcttgcttcctcttctccaattctgtttcaaccatttgaatcaacattttctccgtttcgattttagcgacctgaacgtttccatgaggatctctttcgagcatcaattgttcttgaattgcttgaggtaagaactcgaaaagctttagagattggttggtaagtttctttttccatatcccatcttcatcgacaacatcatgtgcc

SEQ ID NO: 192285 - DNA, 628 bp, Gossypium hirsutum
ctgttattcaaccacccaaaaaaaaattattattacaaaaggcaaagcaaagcaaactgcataatatgaatacaaaagaaataggatcaatacccttatatatctatgatatataagaaaatcacaccaattacattacaaaatcaaatttatgtcactaatgtaacatgatatatatagagatatttaaaactttagagaaattgaaaattgataacacccaaatattatctcggagaagattagaggctactcccctcatcaccagtgagagtgaaattaagggtagccaatgtcataaagtcttgaaaagctttgaattcaatgcaccaagagagcaattaaagagaccaacatggaagagcataagaagacagcggaaaccggcaaagcagagcctgctccggtagccattgcaggagaaggagcaatatcctgtgccatggtcccggacacaacaaacatggccacagcaaatattgccaacacaatgtgagctgcagaggtcccaatccgagccattggcactaattacaacactattcaccaacttacgagacccagagacgagagagatggggaaattgagcgtagaaaggttgtaaaaaaaaaaaaaaaaaaaactcga

SEQ ID NO: 192286 - DNA, 534 bp, Gossypium hirsutum
aagcttgtaattctaatatcactttttttaaaaaaaacttaaacaatggcgtaacaatattaccacctttaatctcaaccaacttattcagccacccaaaaaaaatattattattacaaaaagcaaagcaaagtatctaaaactttaggaatagagaaattgaaaattgataacacccaaatattatctcgaagaagattagaggctactcccctcatcaccagtgagaatgaaattaagggtagccaatgtcatatagtcttgaaaagctttgaattcaatgcaccaagagagcaattaaagagaccaacatggaagagcataagaagacagcggaaaccggcaaagcagagcctgctccggtagccattgcaggagaaggagcaatatcctgtgccatggtcccggacacaacaaacatggccacagcaaatattgccaacacaatgtgagctgcagaggtcccaatcccacccattggcactaattacaaccccattcacccacttacgagacccagagacaaaaaagatg

SEQ ID NO: 192287 - DNA, 461 bp, Gossypium hirsutum
gaaataaagtcgtgacagctcataatataaaacaaaacttcccgtttgtagacatttggtgaaaaataagaaagtaacacagttgaaagaaacccaaaaacctatcgtttctaaattcaggaatctctctgaacaaaacgaaaacatcacaaattaacttacgaagcagcaactgctcccttcttccttggagttgcttgagtaccttctctaaagccagtcttgaaccttcggggaacatgtcggaggtacctcatgcggccagtcccggtggtctttcttctaatagccttcacgctccagttatattttcggatgcgactggcagggtagccacaagcaccgcaacggctcttctgtagatggaagcttcggcgaccacatcgaacgcacagcgtgtgagtcttgttccttctctttccaaagcttccagttccttttcccattttcggacgcgtggg

SEQ ID NO: 192288 - DNA, 517 bp, Gossypium hirsutum
ctcagtttttttttgtttccgtttgggacatcacactgttgtgactattcatggtaaaacacattttcctgttcatggacattatgaggtaatgatcaatgttcaaactgatgataaatatcacaaaatcttactttgtgtaaattcagaaatctcaacaacaaaacaccaaaaccaacttaagatgcagcaacagctgccttcttccttggagttgcttgagtgccttctctaaaaccagttttgaaccttcggggcagatgacggaggtacctcatgcggcctgtcccagtcgtctttcttctaatagccttcacactccagttatattttcggatgcggctggcagggtagccacaagcactgcaacggctcttctggagatggaagctacggcgcccacatcgaacgcaaagtgtgtgggtcttattccttcgctttccaaagcttccagttccttttcccatttcttctgtcggagctgctaacaagaaccctagaactgtgcggagaatga

SEQ ID NO: 192289 - DNA, 438 bp, Gossypium hirsutum
aaaataaaagtaccccagttgatccaaacacaaaacttgtgtttataggaatctgaaaagaaaacaccacaattaaacttatgaagcagctccagctgccttcttccttggagctgcttcagtaccttctctaaagccagttttgaatctcctgggcacatgacgaagatatctcatgcggccagtcccggtggtttttcttctaatagccttcatactccagttatattttcggatgcggctggcaggatagccacaagcaccgcaacggctcttttggagatggaagcttcgacgtccacatcgaacgcagagagtatgagtcttgttccttctctttccaaagcttccggttcctttacccatttcttctgttggtggtgccgcaaaaaccctagaaccctgaggggctttcggacgcgtgggcggacgcgaagg

SEQ ID NO: 192290 - DNA, 829 bp, Gossypium hirsutum
ttttctgtgaagtataaagacaatgtatatatgagtgtttattagaagcattgcatgatcttatgattatatcatggaggcccgaccttacacaattcttaatagcatcgtcatagaagcagatcaaggatggatacgtgataatagaggattgcggtgacaatttcatattgttatgccttgatgacaatggccatgggtgctgctacttgtttacctgctaacttgatcatttctgcgaatatgttgcacgtaaaattgcgcatccctcttgttgtactccttgattttctcttttaagactcggtactccaatttcacatccctgttatcagggtcgatctccaaggcctttttgatatcagcctcccgccaaatccaagtcaacaagttgaatatacgcttgagccctcctgtagagtgctttcacattcccgctatcaagctccaataccttagtacacagttttgcagcctgcttgtaatctttgtgcttcaatttggaagctgcattgttaaggttacaatttacttttagcaactttgcttgtttcttctcctcatcgttgaaagaagagtcatactctatgaagctaacagccttctcatatcgttttgatgctctctcaaatttaccagccttgattagtgcgttcccttcttctttcttcttcccagcagcttcgatcttctgcggtgtatccatttcccatgattctttctccttcacaaacgagaccatctcaacctcataataaacagttgaatttgcaggaactacagccaactcttgatgcgattcagatgaaccgaaagccggacgcgtggg

SEQ ID NO: 192291 - DNA, 471 bp, Gossypium hirsutum
tttccgtttttggttttttttgggagcatgtactagccaaatttattgtctatgatacaaaatatcaaagccaaatcacgaacagtgcagaacaagcgaagtggcacaataccctcaaccctaaatgaatttgcattcacaagtaggaataattgatacttccctacacattattacaaaaattaataatatatgagcaaagtttcatcacatctgcagcaaacacatcaaactgagactgcccaatgatttcctagcggcacaaaatctaatactcgtatcaactacaacctgctaagtttacacttacaaaagctaccggctgcaccaaggactctgccacctccacttctcatgaagctacgtgaattgttacagaagatccacgccaggtgtggcagcaagttaccaaaatattaatgcaagtagcagaagaatgagaaaacccaggatcttataggtaatttaatc

SEQ ID NO: 192292 - DNA, 1946 bp, Gossypium hirsutum
tatttttagcccataccttttaaaattttggcactaatataattttttttttgagaataaaaaaggtattccattaaagagacaaatcgtttatgaaatttcaacattctacaaatgacacaagttctgatcgaactcaatataagtttcctaacagacgacaagaattaaaggcacaacgcagagccttttaaatcttcattatgatggtaaaattccaattatgttgtggctgggggaaaaacaaggtacaacacaactcttcatcaaaaacaaaaatcaataggtatgaatcaaactgacccggactccatctgtaatcgatagacatttatgctactgcaggcatgtccttgagccatggatccagtggcttaccaattgagtacactatgaaaccaatctccctcagctcatccgcgttcacgatgttccttccatcgaaaacaaaagccggcttttgcatgttgtcgtatatcctcttgaagtcaagtttcttgaattcgtcccactcggtcagaatgcaaattccatgggcatctttggttgcctcataagcatcccacacacagctgacttgcttgacagtcgtgggactcatgggttgcaagtgaagaggatggtcccagtcaaacttgttcatggaaagatcccgttggacctggtcttcggtcacctgcgggtcatatatgctcaatcgagctttgtctcccaagagtcctttgcatacatcgatagcaggggtctccctagtgtcaccggtatccttcttaaaggcgaaccctaagatagcaatctttttgtttgaaacggtgttaaacatcgaggaaacaacacggttaacaaatcggtttttctgatagtcattgatcttaatgacttgcttccaatactctgccacctcaggaaggccattgcactcgcagatgtaaacaagatttagaatatccttctggaagcaggatccaccaaaaccgacactagcattcaaaaatttgggtccaatccttgtgtccttaccaacagcataagagacctgcgtaacatcagccccggttgcctcacaaagagcagacatggcattcacggatgagatcctctgagccaagaaagcattggcagcaagcttggaaagctctgcagaccaaagattggtggtaagaattctctcctcaggaacccaatgagcataaacctccttcaatgcttggacagccttattgccttctggggtttcccggcctccgataagaacacgatcaggattaaaaagatcttgaattgcagttccctcagcaagaaattctgggttcgaaagaatttggaatttgattcccttgctgttgtgggtgagaatcttttcaattgcctcagcagttttgacagggactgttgatttctcaacaacaatcttgtcagatttcgatacgtccgcgatcatgcgggcagcactttcccaatatgtaaggtctgcagctttgccagctccgagcccccgagtcttggtgggagtgttgacagaaacaaagactatatcagcctcacgcacatgtttctctacatcagtgctgaagaaaaggtttctgccacgacactccttcacaacaccatcaagaccaggctcatagatagggagctggtcactgttccaggcagcgatcctaggtacagagatatcaacgacagccacttcaatatccggacatttaagcgcgatcacagccattgtaggcccaccaacataaccagctccaatgcaacagatcttcattttgtttttgtatactaccacctcaaaaaaattgctttttttaaatagagacaaagaattcagaggaaaatgaagagcaagaagagggcagcttcgctttaacgatataaaattcagaagagcgggttgttgttttatactaattctcttccaattttatcctttacattattta

SEQ ID NO: 192293 - DNA, 491 bp, Gossypium hirsutum
caaattttgtaactttgcaagcaacataataagtccacaaaggcgatgcatcaagcaaaataaagcgatcacagttgacgtccaatctcttgaaatgtttaaaaaaaaaaaaacaaaaaactaattaggaatagtacttgtgtatgtaactaatggtactaaatccttcccaggaaaataccatggtaataggcaatgcaatttgaaatcgaaaccttgagcaaaaacaaaaaagaatagggcaaggaaacaaccatggtaaatgtgttgtaagcaattaggctgctgttgcctctggttccgcaacagtttggtccttggtgggagcggtcgtggcggcggcatcttgttcagcggaggaattattagcagcagtgccagtgggggcggcgccatcttttgcagatgaaacgggtgcccctttctctgcagttccattcgatgcagccttcgcaccgtttttcgagtcttttccctctttagcatccttt

SEQ ID NO: 192294 - DNA, 536 bp, Gossypium hirsutum
aaaggaaaaagcatctactttaacattaatcatgaaaacaatcaaccttcaacttaatcgttttagacagccttgaagatgcgtcatgagttcataactcagtttccaaatcaaacataaagatgcatcagattttcatttcaactcctagtggggtcatcgatgttcttctcgtaccatgaaatgtttccacaaagcataaaatgatggcgacgtctaccatgatcctacagcaccctgagtaggattctcaaaagcagagaactcccagtaggtctttatcgaatatggcggggaaatcgtcatgccttcttcagtgatcttagctatctgaagcttgttaatagctgatctatcacgatagaggagaacacgcatgcatttctccagtaatttaacaccatccttagctttcttaattctcttgaagcaacttatcaatagcttcaggcttaaatacaaggcatttgtttttgtgtgtgtttagaagattctgttcaggtattagtacagacaaggctgacatttcatatagg

SEQ ID NO: 192295 - DNA, 351 bp, Gossypium hirsutum
ccgaaactagaattcatattatctatctatatcattacaagtacataaaatgggtcacttgagggcaagaagatcaaagatatgctgatgaaattccacaaattaactgaaaaaaaagaaagaaagaaggaactgcctttcacaagctaagcctggtagttggaaagaaaataagagataaatacatcaaacccccataatgtcgttatgattagttttacatttagagtgactgtgaagccgaaccttccatttcgaatctgcaggccttttttttgttcgctttatccacagcaacccgacttttgagcagcttgactagctgctgccgagtcttgcttattaattttg

SEQ ID NO: 192296 - DNA, 474 bp, Gossypium hirsutum
gggtgccccaaaaaaaaactaataagttggaaggcaggggaaggaaagttgggatctttaaaacggcccccccttttttttttttttttttttttttttttcttttttttccacaaaacttttaggaactacagtcgcgtagtagataattgcaaatttcataattttaatgaaaacttctctcaacctccaaaatagatcaaggatccttgcacataaactaaaatctcagaccgctaaatcaacacatatcatgtctagttcattctcctaattagctcgttgatgtaattttcgcggttgccagcatctcctccttcaacatagtggattctcttcttcttcagacctcccaatggtgcctttatcttaaatggccaaagaaagttgttggcctccttaaaatgaagccccacactcattatctcatggatgacatctttcacacataatactccaaacttgcccaaaacc

SEQ ID NO: 192297 - DNA, 504 bp, Gossypium hirsutum
  unsure (1)..(504): unsure at all n locations
aattaangattaaaactccaagattgaaacatttgtcaacaacacaaaaagaagagagaatggaagccaaaaaagaaaaaaaaccaagatccagggcctttgagatttcttcttcctctactaacctacattaaccggtgcaataagaaacaaatatgatctcaaacccctgatgtttttactaagaaatggccataataagtaaacctaaaaaatagaaagaaacaacatagcaaaacccacaatgcattatcccctcaatgttttttgccattgaatacaagctctttttggatcatatcaccaaaatatctccctttagcccttatttgcaacatcccttccatatttcataatcctaatatgaaatacgaaccatgaactgatctaatcctgagattcactgctcttgccacttccttcaccttccctctcttccaacaatctcccaccttcttcatctgcttgtgcagtcttcttctgtgcttctttggccttcaaagc

SEQ ID NO: 192298 - DNA, 474 bp, Gossypium hirsutum
gtcatctgatttgatatatgttaagagataatagcatgcccatttttttaacacaaaagttcatcaacattccaaccctaactttattacatcaaataatttacccaaaaaagaacacagaccacagcaaacccatatcaaaggagaataactttacagtcaaagctactttgtatttctaaaataagacccacatattttatcttacttttctaagtgctcccgccagggtagatgcaattactataagtaggattttgggatgttagtgttgccgtctgcgagaaatcacagttccacggattcttggcggaattctggtagtaaaggttcatggcataagcagcgtgagatgctatggtattcggttcgaaacaagcacctcccggttggatgggactgcaatcgatgccttggccacatgcatagtctagactcgattgcaattgagcatcgaaaatgccggcattcggt

SEQ ID NO: 192299 - DNA, 409 bp, Gossypium hirsutum
ttttaaaataagacccacaaatataaagtactcacagcttttatttaaccatccttctcctttttccaatttcacttcacattttgtctggctttttttaagtgctcccaccagggtagatgcaattattataactaggattttgggatgttagtgttgccgtctgcgagaaatcacagttccacggattcttggcggaactctggtagtaaaggttcatggcataagcagcgtgggacgctacggtgttcggttcgaaacaggcacctcccggttggatcggactgcaatcgatgccctggccacatgcatagtctagactcgactgcaattgagcatcggaaataccggccttcggtacgcaccaaccagttgcagtcggtttcggttgaggagttaccggagtcga

SEQ ID NO: 192300 - DNA, 647 bp, Gossypium hirsutum
cacattaaatcaaataactcatcatttacatttaaaattcaagcggagaacaaacatttacaactctaactctactttctttgctataaaaagcaaaacccatgaaagaacaaagaaataaggaaagccatgaaagaggtaatagcaaaggccagatttctgcaacaattaaacacaaatttattgtcaatggatattggtgtgtttcaaataatacaacattaatatcatacatgcactccgtctgtctgtataccacaaaatccaaatagacttcatatacaaattatcaatgtttgaatgcttctctgactctccaatctgacagccaaacaccacgagttttgtccaggttgtctcatatcactcatctcctgtcttgcctttttgcgttacttacacttccaaggtcatttacgtaccaaaaactaattccaaaatcatcagactgtaagtcacacatggacagaagaaagatcaaaacgttttcatggtttccaaggtgccggaggtggtggtggtgtaagaggtggtgctccacctggaggaggtggaggagccccccgcataggaggtgggggcggtgcaggtgccccacgcataggaggggggggcggtgcaggtgctccacgcataggaggtggggg

SEQ ID NO: 192301 - DNA, 482 bp, Gossypium hirsutum
ggatgtatctttagtctttgatcctaatttagtactgatgctgtttctggcggtgctcttgtttttgcggtcagcaaattctcacttgggcacaaatttatatccctgctgataatattgctctagattgtggttcttcaacttcaggcaattctgcagcaccagatggtcgtgattggaccggagataacatgtcgtggttcgccgagtccggtagccaatcagtgtcggccagtgtccaaaagcataacagctctttccatggtgtgccttacttgactgctagaatgtctaaatccgaattcacctacatgttcccagttactgctggtcaaaaatttatcaggctctatttcaatcctgctctgtaccatggctttgacacctctgtctatttcttctctgtcaaggtaggcccttatacactgctcaataacttcacttcttccgttactgccgatcgttcgaggaaagggtcgtcg

SEQ ID NO: 192302 - DNA, 883 bp, Gossypium hirsutum
atcaagatgaacagttgcatggaacaccgattaagtaaaaaacaatgaacggttcctgattacaagcaatcacaatccaattgacagagacagcacaattcagcaaaaaccaaaccaacagtgtctatagtttttgaaattaaaaggtgaaataagtaaaaacacgaagcattacatcagggctctataggctctcaagccatcatgccatctttaagcagtgctttatcattcagaatcctcgtaaacttctccatcagatagctcatcgaatgatcttatgtcaagctgatagcggaggatacctccaatgccaccgaagcctctgcaaaactgtgatccttcttgggatttgtttgtgacgaattcaagagagcaaccgaagcgcttgtactcgttggcaaaccattcgagcaggggcattttttcttgaacttccaactctgcagaggtttcaggatcacggaagttgctctgatcagcctcctgctccttattcaggtgttttatgataatttctccggttgcactgtgctttagcacgtacctattgatctctagattttcccacacaataagggtttctacagcacccatttccagagccttcaacgtatcatctatgccaaacacatactttccagtatcctggcttatctcctcaaagtattttccaattaatcgcttttcttgtatgaacttcacattcgacaagatttcagcagacaactcaatagcttgattaaaaccgttttcacctccataagacacatcaacaacattcaaaatcttggcttgtaaacgaggatcaaacatgtctgactgactcaattcagtcttgaagtcagctgaaccagccagtatcagcccagcaacattgggc

SEQ ID NO: 192303 - DNA, 705 bp, Gossypium hirsutum
aaaccagagacattatattaactataatttcaaatttaaccttcaacattaaatattttagcattaataaaaaaataaatgttaaaggctaaatttaacactaactgtaacagttgaacaggtctatctgagatcaatctggaaaactttagcgtctctaattctgaattacatttttctgaaattttagattttaagaagcggacaactatatagaaagcaagcaactgggaagggctatcccaaatgccatacgggagatgagtggccatcggagtcccgatagcaattgtgggcagctgccaatgtgatcccaccaaggttgtcagtttttgaccttcatccacccatcatgcaaatcacgatccacatgtttctttaccacttaaaacattccacttttcaaattaccctttatgactactcaaaatttgaaacacgtaacatactaaacaacatgaaatgaaatgacaatcaagcaaagttagcagactcaacccaacacatggggtgtaaacctcttagacaagcaaaactgcatttatacacccgtcattttctgggttatttgttacttgagcatattttccccaaacaactttcccagctggcgtgaccaaacccaattcacttacattcacctcgatgattgttcctttggtcatgacaccaagagatgtatacattggaccattaggatttttc

SEQ ID NO: 192304 - DNA, 728 bp, Gossypium hirsutum
  unsure (1)..(728): unsure at all n locations
gataaactatcaaattcccgttagtttatttaatacggtacggccacactataatanaacagtaacaactaccataaatgctggtagaactcattattagcggcatttctccttcctcccaaacagtagcatcgaagcatagcagaaccagaaatgtaaatgaaataactcatccgtcatgaattatatcataggaagaagcagcagtcctccaacacacagcagcaacatagagcagccaaacagccttgcaagaaagagaaacagccagaatcagactggttctggtaatggtaggggtcatagtggtggtagtgttgatattgaggatgaggttgagggggcggaggaggtggatacccttcagcaaaatagccttggtaaccgtcgtagggctggcgaggcggctgaggaggataggcaggatatccagttggcggaggaggatagccttcgtaagatgggggaggaggggctgatggatagcccggtgggggataaggagaggaataaccaggaggaggataatgatcttgaggacctccctcgtaactcatttcgatgctttttctgtctgtgtctcactctttgagaggttctattctaccaccttcttcttctgaaactctaacggaacagcccaaatcctgtgcgaacggtgtcctgttttgtgttttgagttttgatcgctttgcaagttgcctgttccaatcatttcctgccatttc

SEQ ID NO: 192305 - DNA, 631 bp, Gossypium hirsutum
  unsure (1)..(631): unsure at all n locations
nnnnnnnnnnnnnnnnnnnnnnnnnnnnnnnnnnnnnnnnnnnnnnnnnnnnnnnnnnnnnnnnnnnnnnnnnnnnnnnnnnnnnnnnnnnnnnnnnnnnnnnnnnnnnnnnnnnnnnnnnnnnnnnnnnnnnnnnnnnnnnnnnnnnnnnnnnnnnnnnnnnnnnnnnnnnnnnnnnnnnnnnnnngatgaaagttgaagcaaattgtacagataatcgatacacccagcaaatgtatttataaagcaaccttctgttgacaaagttcaaaagtagataaactatcaaattggattaggcagggaatcgctacaaccaactgtttatagaacagtaacaactaccataaatgcggggtagaactcattattagcggcatttctcctccctcccaaacagtagcagcgaagcatagcagaaccagaaatgtaaatgaaataactcatccgtcatgaattatatcataggaagaagcagcagtcctccaacacacagcagcaacatagagcagccaaactgcattatgccatcagcaaaaaaattgcatacaataacaacaaaagcatctaaaacattatattatccaatttgtggtctatgcgtaggtctgggccggaactgcaattcggt

SEQ ID NO: 192306 - DNA, 430 bp, Gossypium hirsutum
acaagcatgaaagccaggagggggttcctctatagaatatagacctcaacaaccaatcaacaaaaaaagcaaccatctggaagtgaaagaggaagggaaaagaaacaaaataatcctaaggaatggaattatgcaggacataattcccatcgcatccacttcccattcttagtacggccaccaatctacaccgccgggttttttcacgagcaattgattgtattcaggccgcgatgtgagatctttgaagatgataaaagcgatgatgaggaagagggtaaagaggatctcgaactcggccaatctgacaaattcgaagatgttagtgacggcggcggtcagcgtccaccctttcctgcctctgccgttatcccgactcatacccacacgcttggccatcccttctcgcttctcgttcttttcaaaaacc

SEQ ID NO: 192307 - DNA, 851 bp, Gossypium hirsutum
gctaatacttattttttgcatgcgcacataattagttatgcgttaaataatacaataggcgaatatcaggacaaccaaacgagggagacgcgagtatcacccacccttcttggaagtgaatgctttctttttgtccttttgcaatttcgaaatgttcaaatttcaacaattggttaaaaaattaaaaaccagagaaaatcactataactctctcgcaattattccaggctctatttgccattcccttacttgccttgggcaaatatcacaaaaggataattaaaaagataaaaataaatcaaaatcacagaggattttgaaaaaccttcttttcaaatccccacagttaatgagtgtttcaagctccccacatgcagcaaatgttgtcccaatgctacttttcggcttccaagttcatcaaccacactcaaatccttacaaacatccaccttaaacctcaccaatgtctctgatttccctgttaatgaaactttctcaaatcccaacaaatgcttttggggcgagttgtgcactgatgggggactcgaaaacaagaacaccgtgtggcttccgccgtatttccctctgttttgaactctcacatgaatgtcgaatgctaggtttttacaactttgttcgacggcttcaactgatttacattcagatgagcggcaaacatggtcttcctccaatgggattgatactaatcgaggtgctttggctaattcgtgggtgattttggagtagcttagcccatctcccaatgtataaatggtttcccctgtgtcgaccctgtacgttctgcctgggtaaccattagaaggatcgggtctcatgttcatgtttgtcat

SEQ ID NO: 192308 - DNA, 482 bp, Gossypium hirsutum
aaaaacataagcatgatttgattctcgaatgaaaattacaagacaagtaacagttgttcataatctgcaaactctgaataaataaataaaaacccatataattcaaaacaccacaaatgggtaacacttaatgactggccgatggattagtcagcaattcaagtgatttctttaagtgctcaactgccgtcgacacttcatcaaatgctaaggccccaaccgcaaaccgagcagccttgtgcgcctcggcgattttctccggcggcggttggtaattgctgtcgtattggtatttctcagaaggaggtggtgaaggttccgcgattttcccgtttctgctacttgaagagtattgagcggttgttgatggatagcttgttgtcggaggagctgactggggaggattgtaaggagtctccgaaccttgataggatgatggatagtgagacggggccgattgtggaggattgtaaggagtctcg

SEQ ID NO: 192309 - DNA, 484 bp, Gossypium hirsutum
aaccataattctaacaacaaaggtcatcattatgtgataaaaatcaaagccaagcttcatacaaatacgaattaggaccagtttcatcaatcatgtcttgtgttctttctttttctttttccttttttaagaaaaaaaaaagggaaatttattaatttatcatcatcatcatcgtgggcaaggacataaagcagtacacgggagatcatcagcgtcatccaacggtggaaaattgagatcaaaaggcaacattctccgacgtgaagatgatgcgataaccccatcatcaacgaccgacgacgacgaatcgcagtcgctgtgacaatcctccggcgccaaaggcggcgtcctcggacgattcttcctggtcgaaaccgccgcgaaatccgtcgacttctgtggcggtagttgagccggtctcggcccactaaaagattccaccgtgctactcatgctacttcttgtcggtctttgcgggttcact

SEQ ID NO: 192310 - DNA, 369 bp, Gossypium hirsutum
aacagcaccttcttgttttcctggatattgatactcccgggtgtatactttataaaagccagaatcgtgatgcatcattcgaggaatgcgtgagctcggattgtttaagttcaatggaatgcatgcaagaagctgcagtcgagcctaattttctggatttcactggaatggattttgattctgtttacggaatgaggagagcatttagtgaaggcgatataaagacacttggcaacggtgatgtgagcgttatccattcttccgtcaagtggccattaattgtcagaagctgttcttctgaagatcgaagggaaaagctttctagatacaggaacaagaagactaagaggaattttggtcggaaaatca

SEQ ID NO: 192311 - DNA, 877 bp, Gossypium hirsutum
gttggtttttgtttttatacagtagaagcaccatttgggcaatcatagcaagagagagtgttttttggttaggagaaaaggagaagaaaacaatgtcaggtcctcagtgctgttcgaatccaccaacattggattctgcaagtggggctggtcacgttgagaatcttgctggtctcaacacttatgtttctgggtctcttcaatctaagcttgctgtttttcttatctctgatattttcggatatgaggctccaaactttagaaagctcgcggacaaggttgcagccgctgggttctatgtggtggctcctgacttcttttatggagaaccctatgaccctaataaccctgatagacctctatctgtttggataaaggatcatggaccggataaaggttacgaggatgcaaagctcgtaattgacgctttgaaaagtaaaggggtttcatccattggagctgctgggttctgttggggtgctaaagttgtggctggactggctaaggatccccttatccaagcagctgtaatgttacatccttcatttgtgactgtggacgatatcaaaagtgtgaaggtgcccattgcgatattgggagctgagcatgaccatatatctcccccagagcttttaaaacagtttgatgagatcttaaaagcgagtgaggttgatagctttgtgaagatatttcctaaagttgcccatggatggtcggtcagatacgatgtcaatgatccgacagctgtgtcgagcgctaacgaagctcaacaagatatgctggagtggtttgcaaagtacgttaagtgagaaacttatccgatggtgatggtgttaatgcgtattatctagaattctgtttacaatatggtcttgtt

SEQ ID NO: 192312 - DNA, 669 bp, Gossypium hirsutum
  unsure (1)..(669): unsure at all n locations
cggaccttggtccctcggnagaaaaaaaaaattgaaccgttttatttcacaaaagcaaaattcccatttcttctgattattgttattttctttaaaaacaatttcttggtgggttttgggttttgcttctatggctgcagttgttgacaattcaggtgaagcagtggaagctgctaaaaacaacgatttggaagtggaaacaaccaaatcagaatcaaaggaattcaatgtgcaaaacctggttgatatgttcacaaagttgaaccctttggccaaagaatttttcccatcatattttcatcataatcagaccaaaaaatcagataattttaatcaggttcctgttaagcaatcagctggcaatgagaatttttccaacaaaaggggtagaaataacgtcaaccagggtagaaggaggcttaatggtaaagcttttcgagctcaaagagatgatagtatcaggcgtacagtctatgtttccgatattgatcagactatcaccgaagagcaacttgccggcttatttagtaattgcggacaagttgttgattgccgagtttgtggtgatccgcattcagttcttccctttgcttttgtagaatttgcagatgaacaaggtgcaagatctgctttgagccttgatgggacaatgctcgggttttatccttc

SEQ ID NO: 192313 - DNA, 528 bp, Gossypium hirsutum
  unsure (1)..(528): unsure at all n locations
nnnnnnnnnnnnnnnnnnnnnnnnnnnnnnnnnnnnnnnnnnnnnnnnnnnnnnnnnnnnnnnnnnnnnnnnnnactgatacccgagtatataatagaccacaagcatcaaatgtgggaaacatgacatacattactcgctagaaaataaatagaaacgggtatcaccacaaaaaaaaaagtagaaatgaaataaaattaacacaacatagtggaagacgaaacagtgctaacacaataaccagcagtagggtaaaagttttaggcaaggatttcctccaatggcttggcttcaagcttgggcttctcattctcagcctctttctccttcaactgttgctgctctttggccagcttcttcagcctggcaagctcaagatccttgctcatcttcctcctatacatctcagcaaatgtgatgggctcctcaaggattggtttctctccctctctgatcttcaagggatacactgtggcatcgggtgctgaattctggaatgtggctattgacaatctgctgcagattgag

SEQ ID NO: 192314 - DNA, 396 bp, Gossypium hirsutum
tttcatttatttacgtacgtaggtttgagcatagaaaacaagcataaaatgtaggcaggggccataagaagagtccaaatgcattcaattgatactaatacagaagtaaaatgaagtttatttatgcaaggatttgctcaagaggcttggtttccagttcgggcttcttggtcgtctccatctgctgctccttggccagtttctttagcatggcaagctcaagatccttgctcatcttcctcctgtacatctcagcaaatgtgatgggctcctcaagtataggtttctctccttctcttatcttcaggggatacactgttgcatcgggtgctgggttttggaatgtggctattcacaatctgctgcagtcggagttcaccactgcttggtgatcgg

SEQ ID NO: 192315 - DNA, 410 bp, Gossypium hirsutum
taaacaaaatatttggttttaggtatttcaagaaaggtttgccaaagggcaaaataaattgcggtcccccggttctgtggccagaaattccaacgttttaaacaggcataaaaatggaaagaagaaaattaagattacaaaaacagaaatccagatatgccgcctattctaccaaaacttgcgttctagcaaccaattatcgtttatgctgataactatgattttctcttcttgcttgttgatttcgaaccatgctcatctttacctctctttttcccacttttattcgattggacttcgctcctgctggatttcacactgatgacaccgcctgaaagcaccttttcaccaccattttccaaagcatcctccagttcaccttctctgccctcaatcgcaaactgttggag

SEQ ID NO: 192316 - DNA, 1266 bp, Gossypium hirsutum
ttaaaaccggcccccccctttattttatatttattttttatattaatattgacttgataatttaatatatatataagacaagtttatttttttttttctaaagaacaattatatttggttctcctcaaaatccgggaaaattattcagagttcagagaaatatcaactggctgcagttgcaattattccagttacaaaaacaacactaacaatgccctcaaagtccaaggcaaggaaaagcaaaattctgtaacaaaccttcggcattatctaataaaattataaaacttacgaaaacccaaaggaacgctaccaattcttaaccgataagcagtttgctctcatccaagaaggtgtaagtgggtacttccaggttgtatggtgctggacccttgcgaatcctgccagagacatcataatgggaaccatggcaagggcaaaaccatccaccataatcaccagcatttggcaagggaatgcaacccagatgtgtgcaaaccccaacaacaattaaccactctggattcttaacccttgctgcatcctcctgtggatcacgaagagaccctagatcaacactgttcgctaacttgatatcctcgtcagttcggcgcctgatgaagactggctttccacgccatttaacagttacggtgctgccaggttcaatgctggagagatcaacctcgagagaagccagtgcaagaacatccttactggctgacatgctcaggacaagcttgaggatgagcagacggataacagatgcgtacacaaacctaccacctgtcaggacaaaataggcaaatgcccgcttgctggggtcaccaggaggaaaacgttcatggttgtattcatcataaactattttagaactggggttcttaatagcagccactgttgctggaacatcaggaatcacactgtggtcactttttggggtgagtgactcagaagcaaaacctctggtgggaagaaggaattgagaagcgaaagagaaggaaaatgaggaggaggagaaattggatctgagacaatcagaagaatcggagccgtcgatgaaaggacgagaggcgatagcggaggtggcctggtgcgacctccacgcagacgaacaagaagtgagccgcctcgttgccactctcaacatcttcgatttgattggattcacaaagagagagagcgctttgtttcttcggtttttaccttcaagactcttccaattagctcgggaaatcgagaggaaaagtagagatataatttgtt

SEQ ID NO: 192317 - DNA, 457 bp, Gossypium hirsutum
aaaaaaatgatcataatgttaaataaaccatttattttttcctgatgaaaagaccacaataggtggtttagcatatcacaaaggctggtttcctggaacagtaacaggaataattgtcaaagctacatagatcacttacaccactaaagatcatcaatggttgtttctcttcctagctagctcccgagccatctcccttaattcctccggtgatggaggtcgtggtccctctggaggatacactatatacgaacgatttcccattaatttctggagattcttggtgttcttggcgaaagtgtatataagaacgatagggatcgtaacatagagaccgaatttggcgatttcaagaacaccctttgaagtgcctaaagaagacattctccttttcactttctacagagaaaaaaaattgatgagaattcgcgaggagactgaaaacttttgaaaaatt

SEQ ID NO: 192318 - DNA, 402 bp, Gossypium hirsutum
gcatcgatggaatttgcaactttttattgaattttcatacaagtttgaaaacaaaagtaatgaggggttggattcgtgaatcgaagtgtgtttctaatgacaacaaaagatacttcaaaatgaatatattcgcccccaaataaaaaaagcgaatgatggtgaaagtttttttttttttctcccatttaaaattctaccaaaattagtacagtattatctcatttcactaaacacttaacagtatcaatcttttttccgtggcagcagccatcgaagatgtttgttttagaagttcatcatgtgaatcatcctcttcttcatttgatgcagcactgccgggccctccaccagatctttgatatacagccgtgatgataggaatgcaaacaggctcaacttttt

SEQ ID NO: 192319 - DNA, 576 bp, Gossypium hirsutum
  unsure (1)..(576): unsure at all n locations
gggaagctgaaaatcaactaatagccaaaagaaatcggacccaacattgaataaggatgaacagtagtgaagggaagttgaaatcatcgagttccgaattggatttggatcgacccaacatcgaagattatctcccttctggatcttccattcaagaaccacatggcaagcttcgcctgcgggatttgcttgatatttctcccgctttaactgaagctgctggtgctattgttgatgattcattcacacggtgttttaagtcgaatcccccggaaccgtggaactggaatgtgtatctgtttcctctctggtgttgtggtgtggtatttcggtacttgattttgttccctatgagggctttagttttgacaataggatggataatatttctgtcatgcttcattcctgtgcactttcttctcaaagggaacgataacttgcggaaaaagatggagagggcgttggtggagctaatctgtagcttctttgttgcgtcctggactggagttgttaagtaccatggaccacggcctancatgcggcccaagcaggtgtttgtggccaatcatacttcgc

SEQ ID NO: 192320 - DNA, 531 bp, Gossypium hirsutum
gagaaactcaacaacgccactattcttgaacaacttggagccaggctttcctttcgcactattacggatacgaaaataatggaaaaagttggattcaattgtcaactgctcctatcggaaatacgattgactacggattcgagccatatacacatggtttcataaaaccgtacgattctcccgatctaaatcaagcaggttttacatgaacaacgtttgcctcaacatgttctattcgatacgaagtaggacaaagcggtatctttaaaaaaatagagaaatcagaccctagttaagatgatacggatcagccccttcttcttgcgccaaagatcttaccatttccgaaggaactggagttacatctcttttccagttccattcaagagttcttatgggtttccacgaccctttaagaccccgaaattttgacaaatttcttttcttttcttaggaacacagacaagattcgtcactacaaacaggataatggtaaccccacgattaattacttcatttatgaatttcaga

SEQ ID NO: 192321 - DNA, 1035 bp, Gossypium hirsutum
tgtcactgcaggaagctagacggtttgagttgagggagttgtctttggcgaccaaaaatttcagtgatagaaacctgatcggggaagggaaatttggtgaggtatataaaggtttgcttcaagatggaatgttggttgctatcaaaaagcgagctggagctcctagtcaggaattcattgatgaggcatgctatctttcatctattcagcatcggaatcttgtcactcttttgggctactgccaggaaaataatcaacaatttcttgtttacgaatatatacccaatggaagcgtttccagtcacttgtacggagttggtcaagtctcagcgcacaagataggattcaagcatagacgttcactagctctaggtgcagcgaaaggcttggctcatctccactctttaagtcctcgattggtacagatagatttcaaaccggcaaatgttcttgtagatgagaattttacaccaaacgctgcggttgcaggactgcgtaattttctgggaagaattgatgttgctggcccttcttcgcaagtgacagcagatgagatatttcttgctcctgaggtgagggagtctagacgtttttccgacaaaagtgatgtgtatagtttcggagtattccttttggagttagtaagtgggcgagaagcatcacaattaccaccttcaaactccacagagaaccttgtcgagtgggtgccaaatacccacgattacagcaacatttccagcatcattgatccgacgttgggcggtagcttcactcctgaaggcatggaggaattcataaggttaaccgtccgatgtttggaaccatcgagtgagaggagaccgaccatgagctatgttgtagcggaacttgatcggatactcgataaagagatgagcttgacgacggtgatgggggaaggaagcccaactgtgacccttggaagccagctttttagagcaacaaaatagaaaaaggaaaaaaaagaaaaccttgtagcctgcagcattcaaataccgggagtgacatgcgtgtgat

SEQ ID NO: 192322 - DNA, 511 bp, Gossypium hirsutum
ccttaaccgtagaagataacggggactgatcccccaccaccccaaaaaaaaaaaaagaaacacaaagggaaaatcgagggagccggcttttacttccaataattcatcattctcctaatcctctctgtattcaagctggcaacaccctctccttcctcttcttcttctcatctcagattttccatggaccctaaatctaaattcccgtttctatgaccaacaattctccaatccccatgctttaacacaaaattccttgtgagaacccctccccaaaatgatgattcctttaattgtttccacatgtattcaccttgttttcatcttcgcggctgtcagctgccagaaagattctatttacgatatcctaaaggcccatgggctgcccatggggttgcttccgaagggtatatcccgatttgacatcgacgatacgggccgcttcgaggtccatttggattatgcctgtaatgccaagtttgaaagccagttgcattttgataccaatgtg

SEQ ID NO: 192323 - DNA, 728 bp, Gossypium hirsutum
cccacgcgtccgcccacgcgtccgcccacgcgttcgcccacgcgtccgcccacgcgtccggggcaaacccttaattccagaaaataaaaaacctcagatacttggtcgaggaagaaggcaaagcacagccaaaatgtcgtcgtttttgcaatcacttttggatccgaagaagagctggttagcttctttgcatatgaaagcccttaccacacgcctccgcaaatacggccttcgttacgacgatctgtacgatccttactatgacttggatatcaaggaggcgttgaatcggctgccccgtgagattgtcgatgctcgtaaccaacgccttaagcgtgcaatggatctctccatgaagcacgagtatctcccagaagatcttcagaaaatgcagacaccatttaggagctatcttcaagatatgcttgctcttgtgaagaaggagagagcagagcgagaagcattgggagctttgcctctgtatcagcgaaccattccttaagggttttcatgccgtatctcatagtcattgctgttgaaatttgcgttcgattatctgtatgtgcgtatggtatttcgatagcggcagtggactgaatttttacaattcctggtttggttggtttacacagtcatctgtgtcagtttttgaactgaatcacttatttacgtttaagtctgttggcaaggtccccaatttattaaacaaaaactttttaacccccctt

SEQ ID NO: 192324 - DNA, 517 bp, Gossypium hirsutum
cccgcagatcaacatgtctaattaccattccgcgacgtttttatccaaggtggatcgtaaatttagggtgccacatcacttataaatcaggagccttttcttccttgaaatcaaaataaataggagacacaggcttggaagggaactaagctagaggtagagagaaagaagggagttgccaaaatgtcgtcgttcttgcagtcatttctggatcccaagaaaagctggttggcagctctgcacatgaaatccctttccaagcgcctccgcaaatacggccttcgctatgacgatttatacgaccgttactatgatttggatatcaaggaggcgttgaatcggctgccccgtgagatcgtcaatgcccgcaaccaacgccttaagcgttcgatggacctctctatgaagcacgagtattcttcccgtaaaccttttgcaaatgctaacaccatttaggagcttatctcaagatatgttttgctcttggtaggtctttgacctgtataactttatttac

SEQ ID NO: 192325 - DNA, 1189 bp, Gossypium hirsutum
gaaaatagcagctagggttcctctctccctctccaaaaactgaacaacaaaacaaaagagagatggcagtaatggcggatcaccattccctggctgttgtttttggtatattaggtaacatcatctcagtcctcgtatttctggcaccagtgccaacattctgtcggatttacaaaaagaaatcgactgagagtttccagtcactgccataccaggttgcattgttcagttgcatgctatggctgtattacgcgttgattaaaaagggtgctttccttctgatcaccatcaactcttttggatgtgttgttgagactatttatatatctatgttctgggcttatgcttcaaagaatagcaggatgtcggctatgaaactttttatatcaatgaacctggggctcttctctttcattctcatcctcacacactttctgctgaaaagctcgattcgcatccaagttcttggctggatttgtgttgccatctctgtatccgtctttgcagcacccttaaacattatggcacgagttatacgaacaaagagcgttgagttcatgcctttcaccttatcatttttcctcacattgagtgcagtaatgtggtttgcttatggactatttattaaggacctctgtgtagctctccctaacgtactaggcttcatcttggggatgctccagatgcttctctacgccatttacagacacagtgaaaaggttaacatagaggaaaagaagctaccagctgaacaaatgaaaagcatcaatgtcgtccttaccacattaggtgcctctgaagttcaccccgtagttttggatattcacactgatgatacaaaggaagaagataataaaaacaatgaacccacaggggagcctgataaacaaactgatgtgaaaatggaagactcgaatgaaagtccagtctgaatcgacacaacacaagagttctatgatttgttgagaaattaagatccagctctgatatgccatggatgcctggcctgaaaccccaccaccatacaccttctgagcctttgtgcaaaggaagaaacgagccaggacctagtaaaagaacatgactacatatataatatgttatagatgaataatattgtatttcagtttttaaccatgttgaataatcatgtacgtcattgatccaggaaatgtagtttattattttg

SEQ ID NO: 192326 - DNA, 718 bp, Gossypium hirsutum
acccaacgacgaggcaatggcgaagcttacgacggaccagttgagcgaacctggcgcgccggagcaaatcatatattgccatataatcccagagtaccagacggaggaaagtatgtacaatgcggtgaggagatttgggaaagtgtcgtacgatacattgaggttgccgcataaagtgttggctcaagaagctgatgggtctgttagatttgggcacagcgatggatctgcgtatttgttcgatcccgacatttataccgacggaaggatctccgttcagggtattgacggcgtccttttcccgctggaagagaaagctaaggaagaaaagaaacccatcaaagttgccactgtgaaacccagaagagggaagttgcttgaggctgcatgccgaatgcttgtggctattggacaagattcacgtttcacctcttgccgactatgaacacaacaattacttcccccatatcataaacaaatcttcaaacaacaaaaaaaggtgaaccagcatagtataaagtcctggaatgatgttttgctctctgcattaggattttaggtttctttttttcttctttccccttttttggtctatattctatcgttcataaggcagcaaaaaggtcaccctggttgattgctgatcctcaagtctacaagattttttctttcttttcttttctattctgtcaaattatgtgtgtaataatctggtgat

SEQ ID NO: 192327 - DNA, 1177 bp, Gossypium hirsutum
  unsure (1)..(1177): unsure at all n locations
gttaaacaagaatgatctcagaaattaaaagaaaaaatatcaattttattttattactaaagcgtgaagattcaagcttgcaatcgaattcctcatttgaaattctttgatgaaacaggtattagaactgtaatagagaggataaaaaaagatcattgttgaggatggcttgtaaaggatgcctagaatgcttgttgaagctgttgaacttcttgatgactcttgttggtttggcaatggttggatatgggatctacttgtttgttgagtacaaaagagctgctgatgttgccatgcttttgtcacctgtgggcactgaccaaatacagctcggtcggcccatgctcatggccgtgtctctttcgtctagtattttcgataatcttccaaaagcatggtttatatatttgtttattggagtaggtgtggttctctttgttatatcttgtttcggttgtattggagcttcgacgcggaatttatgctgtttgagttgttattcactgttggtggtcttgttgatcttggtggagctgggatgtgctgctttcatattcttcgacaaaagctggaaagaagaactcccgacggataaaacaggatattttgatatgatatatcaatttctggaagaaaattggagtattggcaaatgggtagctctcggaattgttgtcttagaggtaagtgtaacatgactgtgaccctaatcccgaggatttgaaaactacttcacattcatgaacaatcacgctcattgacttgcaaaaaactgatcatttagaatatgctaattgtatttttttttctcagccctcagaatttgtttctttgtatcgtcagttagctttggggaatatgataggattctttgggataacaaagcatggaatagtctaggactttcctatccttactgagtagattatctgttgcaaaaatatctagcatacaaaaagagataaaatcttatttaaattccataatcaagtcttaaagttgaaaagcattcaatntaattgtactanagcagacttgaaaacttcatcagctatcattaattgggaacattgcatgtttggttcttttctgtgtggattatggtntaagatgattgcatatgacataatagtcctagataactttaagaggctgntggttatgatcaccaaggana

SEQ ID NO: 192328 - DNA, 989 bp, Gossypium hirsutum
gcttcaaggtattaattgcatatccatgattcaaacagaggaatgaacatgctgagttattatatgccattgggaaaatgtaaacgatgaatggcaaatgtctattcaagcacgccatctgtttcgagtaaggacaaacaagaaaatgaacagtttgtgctgactgctgccgagtcaatctcgaaaattttcaaacataaatcaaaatgaagaataacatgtaaaaatccatatttctagatgtgaattggcttgtcataggtggccattgcagcttccttcaatgcctcactcattgtaggatgtgcatggcacactcgagcgatgtcctcacttgatgcatcataattaatggcaaggactgcttcatggatgagctctcccgcatttggtgccataatatggactccaagaattttgtctgtctccttgtcagccaatatcttgactattccttcagcatcatcaatagccttggctcggctatttgccaagaaagggaacttcccaacacggtaatcgacaccaagtgccttaacctgctcctcggtcttcccgacagatgcaacctcaggatgagtgtagacaactccagggaccttgtcataatcaacatgaccatgcttaccagctataaactcgacacaagcaacaccatcttcttctgctttgtgggctagcataggccctggaattacatctccaatggcataaacaccggccacatttgtagcgaatctgtcattgactaaaatccgtcctatcttatcagtttccactcctatcttgtccaagccaagtccggcagtgaatggagatctaccagcagagacgagaacaacatcggcttcaagtgtggtctgatcaccaccagcagcgggttcaacagtcaacttcacatcatttccactagtatcaacacctaccaccttagttttgagcattaatttcattctctggcttctcgagtgaacgtccggacgcgtgaa

SEQ ID NO: 192329 - DNA, 639 bp, Gossypium hirsutum
gacagctctaactgactctgccccagctgtacagcacagggccacttccatgcctactttccagcctgctacaaaccaaaatgatgtagctcctcacccaccttctgcaagttccgagactgtcacaaattttgactttgcgaactcattctctgcaaatgctcactctgcacccaatagcacaaactcccagtttcttcctcaagaaatgtcaactcaaaatcagggaagtgcttatagccaaacaacacagccaggtatctatggtcaacaggcacaatcaagtgctaatatgtacagccaaccgacacagccaagtgctaatccatacggccaacctgcacagcctggtgctaacgcatatgaccaagttggaccaacctagttctaatgcattatagccaatctgtgcagccgagtgttaacctttatagccaaccgcctcagctgggtgctaatccctacagccaacctgcacagtttaactttgggaactttcacggcagggtctcttgttccaattttttacagggtgctcacagatcacaaattacctgtggccaaaatatatagtttctaagggctaattcaaaaccggtcaagccacacaacggaatccacatacaggacactgttagt

SEQ ID NO: 192330 - DNA, 555 bp, Gossypium hirsutum
  unsure (1)..(555): unsure at all n locations
aaagcagagcagagatttataataattatgaaatgatgaaatattctgtacatatagaactaaagagagaactataggctagaaaatcagtttaaattcccccttgaataaatacattcattacccttacactttttcacatgtaagaaaaataacagcttgtatcatgatcactcagcatctgcttcgtaaactcaccaaaaatattgccaactgcaaaccaatttagcacccaacaccgacaaatgcagcagatggacactttacacaagcaaagtaaaaggcctatgaatctcaattcaacatttagttacaaacttcgaagtgtgtccactcgatcgatgacatccaatgccttgatccggttcgatatcaaagtccaatgaaaggaactgaggacagcagcctccgaataaggaaaagggattccttttcttagatctcactctcgttggagagnntggctagggtggcttttactacaacaaatatgggtgcttgaattaacttagggtttcttgccggacgggcgtggggtcgagcccgggtnnttcc

SEQ ID NO: 192331 - DNA, 524 bp, Gossypium hirsutum
tatggctcaggccactggaaaagtgtgtgtgacaggagccggcggctaccttggctcttgggttgtcaagcatcttctctccaacaactaggggttcgagggcaccgttagacaacctggggatgccaaatatgcccatttcaatcaacttgacagagcatctcacaacctccacctcttcaaggctgatgttctggattacgattctctttgttccgccactacaggctgcaccggtgtcttccatgttgcctctcccgttccctccaccatcgttcctaatccccaggaggaagtgattgaaccggctgtaaagggcacacttactgtgctcaaagcatgtgttgaatccaatgttaaacgagttgttgttgtgtcttctgtgactgctgtttccttgaaccctaggtggccggtgggtcagatcaaggatgaggcttgctggtctgacaaggaatactgcgcagcaacaaagaattggtattgcctttcaaagacagaagcagagagtgaggcttttgagt

SEQ ID NO: 192332 - DNA, 674 bp, Gossypium hirsutum
aaacggaggaactcactaaacttaacaaacagttgaatccttatcccattcactgagtctcaacaccgagtcatcatcactcatggctatcgaggcttggtttatggatgaaagcaaagaagaccaaaggcttcctcatcgacgcaaccccaacgaacctgtttcgttggagcacttggcagagctgggagtgttgtattggcatttgaaccccaaggattacgagaacgatgaagagttgaagaagattagagaagccagaggttataattacatggatttgcttgatttatgccctgagaaagttgacaactatgaggagaaactgaggaacttttacaccgagcacatccatgctgacgaagagatacgctactgcctggaaggcagtgggtattttgatgttagggacaaggatgaccgatggattcggatttggatcaaaggaggagatcttattatattgcctgctggaatctaccatcggttcactctcgacaccagcaactatgtcaagttgatgaggttgtttttgggagaaccggtttggacagcgtataatcggccccaggaaggaccaccctgcaaggaaagagtacattaaaagcttgactgagaaagtttgggtgccattagctgctcattaaagcctattgttacattaaatttcccct

SEQ ID NO: 192333 - DNA, 758 bp, Gossypium hirsutum
acagccattgctttttggcctgtccactggtaatgatgctacggattttgttcacttttgtgcaaaggcatcgttatatatcaactcacctgactatccaatcacatcgaccgtcgaatacaaacatcaccaatactgattgaaaaaccatattagaagcagaggaaaaaggtgttagagtgttgagtctaggcctcatgaaccaggctgaagagctgaacatgtatggtggggtgtggagacgggaacatccccagcttaaagtgaagttggtacatgggagtagcttggcagttgcagttgtgttaaatagcatacccaagggaactacacaagtagtccttacaggcaagctgactaaagttgcttgtgctcttgcctttacgctatgccaaaagcgcattcaagtctctgtattacgtgaggatgaatatgaaaagcttgataaattacttggcaccaagtctgagggtaaattggttctctcaaaaagttacacttgtaagacatggttagttggagatggattgagtgaagtagaacaaaggaaagcaagcaaaggaactctatttattcccttctcgcaattcccaccaaagaagttgcggacggactgcttctatcataccacaccggccatgcaaactccgttggcccttgagaatgtggattcttgcgagaactggttgccgaggagggtgatgagcgtatggcgtatagctgggttagtacatgcactggaaagatgggaggaacat

SEQ ID NO: 192334 - DNA, 426 bp, Gossypium hirsutum
agtttctgatttctctggtgaagcaaagaggtagaagaaaaagagagatccaaagatggcaccagaagcagaagacgagatcaaggacgagaaaaacccacgacctctcgacgaagatgatatcgcccttctcaaaacctatggattaggaccttattcaaccagcataaagaaagttgaaaaggagatcaaggagatggcaaagaaagtaaacgatttatgtggcatcaaggagtcagacactgggttagctgcacccagccagtgggaccttgtctctgacaagcaaatgatgcaggaggagcaaccacttcaggtggcaagatgcacaaagataattaatccacacacagaagatgccaagtatgttatcaatgttaagcaaattgctaagtttgttgttgggctgggcgacaaagtttcccc

SEQ ID NO: 192335 - DNA, 834 bp, Gossypium hirsutum
ggaagaaagtctccgcaaattgggagttgaaaaacttggcaaagatgatgtccagaagatgcaatgggaggttttggaggcaaagatcggaaattggattcactttatgcgtattgctgtcaaactactatttgccggagaacgaaaagttagtgatgaaatgtttgaaggctttgattctcttagtgatcaatgttttgctgaagttactgcaagtagtgtttctgttctacttagttttggtgaggcgattgcaagaagcaagagatcaccagaaaagttatttgtacttttagacatgtacgagataatgagagagcttcactctgagatcgaaacaattttcaaaggtaaagcatgcaatgagattagagaatctgcattgggcttaacaaagcgtcttgcccagacagctcaggagacctttggtgattttgaagaagcagttgaaaaagatgcgacaaaaactgctgtcctggatggaactgtccatcctttaaccagctatgtgatcaattatgtgaagtttttattcgactaccaatcaacactgacacaacttttccaggaatttgaaactggtgatggtacagtatctcagttggcttctgtaacaatgagaattatgcaggctcttcaaacaaatttggatggaaaatccaaacagtatagagatcctgctttgactcacttatttctgatgaataacattcactatatggtgagatctgtgcgcaggtctgaagccaaagacctgttaggggatgattgggtccaaagacacaggaggattgtgcaacagcatgcaaatcaatataaaaggaatgcttggca

SEQ ID NO: 192336 - DNA, 342 bp, Gossypium hirsutum
ctgaggagtgtgagtgatgctgatatccgaaagtaccaagcattcgcacaaacgttgcagcaatcgagggggtttggaagcgaattcaagtttgcagaaaccggttccagggctgcaacatctgatccttttgcaactacagcaggtggagctgatgaagatgatctttacagttaaaattgctttcatttgagggtttcttttttaaaagaattttaatttaatccactatggtaacaattattgaactaaacgagcctttgcttgtggcttacgcatcggagtccaaaataacagtttttgttgtttttggaactgagaattttacaattgtctattttt

SEQ ID NO: 192337 - DNA, 595 bp, Gossypium hirsutum
tccacgcgtccgtttccttcagtttggatccgaaggtgagggtgttgaaacatacgagagtggaatcgctgtcggtgtgaccgaagaagtggtcgcgttcgcgagggatctcgcgatgcatccagagacttggcttgattttccggtgcccgatgatgatggttttgatgattttgacatgtctgatgagcaacaagaacatgctttagctgttgaacgtcttgcaccaagattggctgctcttaggattgaactttgcccaggatatatgagtgagggttgcttttggaagatctattttgtacgtcttcgtccgcggcttaataaacaagatgcagaacttctgtctacttcccaaatagttgaagcaagagcaatgttaatgcaagggatacacaaccgatctaaggctaagatggaagatcattctgaaagtggcacttcaaatataaaggctgatttaccacatgaagagtttccttctgtgccttctcccgctcaatctaagctaacatcatttaatgaatctcgaaatgacgcagccgatactgctgtagctgttgactcttcaacacaaaaaccacctagtccagac

SEQ ID NO: 192338 - DNA, 466 bp, Gossypium hirsutum
tcttttaaaggaagcagtgcagagattataccatttttaaagacatgggttaatttgcctatggctgttgggttcatgttgttatacacaaagttggccaatgtgttgtcaaagaaggctcttttcgacactgttattcttccttttatagccttttttggtgcatttgggtttccattgtatcctctcagcaatcacatccaccctgaagcacttgctgataagcttcttgcggtgcctggacccagatttcttggtcctcttgctattatgaggatatggagtttctgtttgttccatgtcacggctgaactttggggcagcgtggtcatttctgttttattttgggggtttgccaatcagataactactgtagaggaagcaacaagattctaccctctgttcggtcctgcgaccaaaaaatccctcaattctctcggtaaaaatgttaacatccttctccaac

SEQ ID NO: 192339 - DNA, 440 bp, Gossypium hirsutum
  unsure (1)..(440): unsure at all n locations
attagacccaaatacaccaaacatgaacaacaccatctctttaactctgcttcacattgcattttgcttcactttagtttcattcactcctatttcagccctggaattgcacggaactggtgccaacatggtcgaaacaacctgccaaaagacacccttttacaatctatgcgtctcggctcttaaatccgaccctcgaagttccggtgccgacgtagcggggctagcgcaaatcggaactgataaactgaaggccaaagccaccgcaacgctgcggcagatcacagcgctgcttaaagtggccaaagatccgaagctgaaaatggccttgcgtgactgtgctgattattacaacgccattgttaaatacgatatcccggtagctgtagaagctgtcacgaaaggcgaccctaagttcgtgtcgagggggcgacngatgc

SEQ ID NO: 192340 - DNA, 733 bp, Gossypium hirsutum
attatttttattcttcagtctatacggtctctgtcgccgctacccatcacttctaaaacccttaagctatttcccgcctcaccggccaccgctgccgttgctcctcacctgcgccttcataagtcaacgtcttttattgggaagatgatggcggaagaggaaggacagtcattgccgtacgtatcagagatagtattgaagaaaaggaaaataagagatgagttagcgattacgaggaggacccagttggagttgggtaaatacggagccaagaagagcaagaagcaatccgatgtttctgacatcaaaagacctgaacaattaattaaagagttcagagacaaggaattggacctgatcagaacgaaacaaagggcaaagaggccaaaatcaatgataccaacgataaaatcaaatttgcttttcattatccgtatacaaggcaaaaatgacatgcatccaaaaactagaaagatcctatacaacctgagattgaggaaagttttcagtggagtgcttgtgaaggccactgacggtgttatacacatgctgcagaaggtggagccgtatgttacttatggataccctaaccttaacaatgtgaatgagctggcttacaagaagggctatgcactgattgacaagaaagcaaatcctcagaccgataataacatcattgaacaaacattgggaaagcattgcatcatatgcattgtagatatcatacatgaaa

SEQ ID NO: 192341 - DNA, 438 bp, Gossypium hirsutum
cttctgctgaaatgctttgctttctagtttctagacagaaattcgatcagctctagtagtttaataaggtatataaagaagaaagatctccttgaattttatttttgaagtaagaaggtgaatatgggtgcttcggaggagaacagtgccttgttcccaatctttgggttcacgataatggctctgccattagtgccagacactataggtaagatattaaacacattctcgaacaaggcaatgactatccattgccagtgttctgggtgttctccgtctgggaagtatacgaaatcaattttcaaacggatctcgaacttctcaacttgtagtaatctgacccctgtgcttccctggattgtcatggcggtgctgatatacgatatcaagccttacaagttatgaggttaaagtatttgagccaatcagtattcttgg

SEQ ID NO: 192342 - DNA, 783 bp, Gossypium hirsutum
cacactcatttgtttgtttactctgaaggggtgctctgagatcacatagaaaaatggtgaaagcagtggctgtccttagcagcagtgaaggtgttagtggaactgttttcttcactcaagagggagatggcccaactacagtgacgggcaacatttctggtcttaagcctggcctccatgggttccatgttcatgccctaggggacacaacaaatggttgcatgtcaacaggacctcacttcaatcctgctggaaaagagcatggtgctcctgaagatgtgaatcgccatgctggtgatctaggaaatgtcactgttggtgctgatggctctgcgagtttctctattgtcgacaaacagattcctctctccgggccacactccattattggaagagcggtcgttgtccatgctgatccggatgaccttggcaagggggggcacgagcttagcaaaagcaccggaaatgctggtggtagagtagcttgcggtattatcggtctgcaagggtgaaatttcagtcctggtgagcgggaataatacattgagtggagatgcaatggcctaggagcaaactctgtatgtgaactaggaagtttgtgaataaaagtaaaagaacccttgttttgtgttggttttcagactcaaaggagtgtggtctcttaacggatgctttagccatttatagtaagctgtcttttgctgccatgctcaactttggtgctttacttcctggtaagggtcccatgattcatgaatgcttcaagccactttcatgggtaat

SEQ ID NO: 192343 - DNA, 450 bp, Gossypium hirsutum
ataagcattctgaatctggctctcatcggtcaattgatgaatccaggcatcaaaatgaatcacttgcgcatacaaacatgataggaagagatttgggtccgaatcttactgacgatattgaactgttgggattcggaaatgcagattcagaggagagattaagtgatatatctgatggtgatctatcaatgggggctacagatactgatggctcaatctgtagtgccgtggagtttactcttttcccggaagtttcaaaacctcctgataaaccagagaaggttgagaaagcaagcaaatctgaaaaatctgatgatattgggaagtctatcgccccatcactcccgtctaagcttccaaagctatctcagaaagtgttgcaaacaaaacctactgctcgattgtcactgtcccggagcacctccaagatccatcaagttctaagaaaat

SEQ ID NO: 192344 - DNA, 1038 bp, Gossypium hirsutum
tttttctctcattcgtttaatctttttcagtatagtttctctaaaattatcaaattttttactttgagaaatttctcttctcgatctatccatttcgagtttgggaaaggagagacaagatagagagaaacagagagtgagaaatttggaatggcacatagagtagatcacgagtacgattaccttttcaagattgtgctgatcggcgattctggagttggaaaatcgaatattctctctagattcaccagaaacgagttttgtttggaatctaaatccactatcggcgtcgagttcgctaccagaactctccaggtggagggaaagactgtgaaggcacagatttgggacacggcaggtcaggagagatatcgagctataactagcgcttactacagaggagctgttggtgcacttcttgtctacgacataacaaagaggcaaacctttgataacgtccaaaggtggctgcgtgaattgagggaacacgccgattctaacattgtcgtcatgatggctggaaataaatctgacctgaatcatcttcgagctgtttccgaggaggatggtcaagctctggctgagagggaaggtctttcatttcttgagacatcagcactggaagcaaccaacattgagaaggcattccaaactatattgactgagatctaccatatcataagcaaaaaggcattggcagcccaggaagcagctgctagtaccgcaattcctggccaaggaactaccattaatgtcactgatacatcaggaaacactaagagaggatgctgttctacttagaaaggtgataggttacatttgatgctgttctaccttaaaaggtcataggttacatttgagaaggtaaaaatatttgctaggaagtaggccctttttctgtttttgtcaatttttggctgagagggagacatgtaaaatacatatatatattacctgaattgtgataataagcttgtgatgttttaaacaaccataaattgttggtacaaatagaatggaacgcctggttttacttat

SEQ ID NO: 192345 - DNA, 922 bp, Gossypium hirsutum
taaaattatctgtttttcacattgataatcttctcttctcgatctatccgcttcgggtttgagagagaagggataaagaatatagagaaaaagagggtaaaatggcgcatagagtacatcacgagtacgattaccttttcaagatcgtgttgatcggcgattctggagttggaaaaacgaatattctctctaggttcaccagaaacgagttttgtttggaatctaaatccactatcggcgtcgagttcgctactagaaccctccaggtagagggaaagactgtcaaggcacagatttgggatacggcaggtcaggagagatatcgagccatcaccagtgcgtactacagaggggctgttggtgcacttatggtctatgacataacgaagaggcaaacctttgataatgttcagaggtggcttcgtgaattgagggaccatgcggattccagcatcgtcctcatgatggctggtaacaagtccgacttgaaccatctcacagccgtttccgaggaggacggtcatgctctggccgagagggaagggctttctttcctcgaaacatcggcactggaagccaccaacatcgagaaagccttccaaaccatattgaccgagatctaccacatcgtaagcaaaaaggcattggcggcccacgaagccgctgctagtgccccgattcctggtcaaggaaccactattaacgtgggtgatgaatcggggaacactaagacagcatgctgttttacttaaaaaaaggtaattggttatatcatttcttgtacttactttttacttgattgtgatattttaaacaaaaccatgttgttagtagcttggaaaggtctgcatttttttttttggttatttttttaaattgacatgttttcttcaaaagtggaagattgaaagttgcgtttgga

SEQ ID NO: 192346 - DNA, 678 bp, Gossypium hirsutum
gaattccgggtcggggacgcgtccgcgacagttccaccaacctctccctcttgtctaggttcattgtctcttcccaaagagatatgaaggcgtcattgaaaggcacatacaccaatgacaagagcaccgccgtcgtttccctttccgccaacgctggcgatatcaagctacgcgcttccctgactgatgcgacattcatcaagggtcccagcctgaacggtttgactcttgctgttgaaaaacccggcttcttcatcatcgactacgatgtccccaaaaaggatttttggtttcagttcatgaactcagttagggttgcggagaagccgttgaagcttacttacattcacggcagaggggacaaccggaccgtgttggacgggacactcaccttagactctgccaacaaggtgtcggctaattacatgtttggtacgaggaactgtaaggtcaagtacagttactcgcacggaggggctacgacttttgagccatgctatgatttcgggaagaatgcgtgggattttgcaatttcaaggagagtgtatgacgatgtttttaaggcaacgtatcagacgtggagcagggatttggctttggagtggtcgaggaactctaagtttaatgggacttttaagatttcagcatccgtcaatctggccgaagaaactaagatcc

SEQ ID NO: 192347 - DNA, 613 bp, Gossypium hirsutum
  unsure (1)..(613): unsure at all n locations
cccattcgtccgcccacgcgtccgatttttttctattttcagaaatacttcatacaacgcaatacacagaagaaaaaaaaaaggaaatggaaggtcttatcccttttgtttacagggctatagtccagtacaagagcggaaaagaagatcacgttttagcaacatggttcaacgagtcaccctcggcttcttacatgagactccccaccggagattctgatcgcttccaaatatccgatgatcgaatctttgaatcagataattatgggaagttttccacttcatcatcatcatcatcatcatcttccatggttgctccttctgctagtactaagattattttatcaaccggagttcaatctcctgctgtctgtcgtttgactcctcgccgcgtcgttacatgaaaccatcgcatacttatgggttaatctagggtctgggaatttcatgtatgtagaaaatatatatgtatttctgtttacgttaatcattatgtatgggtacttaataagcgtatgaaaaatcccaaagggggaagcatacgctcaaatgttatgggtgtagggaggccaaagggatgaccctatngccttgtgtattggacatagatggt

SEQ ID NO: 192348 - DNA, 578 bp, Gossypium hirsutum
tcgacgtcatccttgaaaaaaaaaggatcagtgttgctttctgctcgtgtaataggcggggtttggttagtgccgcttttctgtggattactatgagcttcaccggtccttcggttggccctggtggtagaactgctagaagggcacttgagtttggaagaacctatgtggtcaggccaaaaggtacgcaccaagctaccatagtttggctacatggtcttggtgataatggttcgagctggtcccagctcctggagacgctccctcttccaaatactaaatggatatgtccaactgcgcctactcaaccaataagcatatttggtggctttccatcaactgcttggttcaatgtcggcgagctttcagaagatgctcctgatgatatagagggtttggatgctgttgcagcacatgttgcaaacttgctggcagcggagcctgctgacattaaacttggtgttggaggcttcagtatgggtgcagctacctcactatactctgcaacctgttttgctcatggaaaatacggaaatggaaacacatatcctgccaatttgagcgcagttgtaggactt

SEQ ID NO: 192349 - DNA, 446 bp, Gossypium hirsutum
tggaaactttgttgttcaagcattaatttcccatgcaagaacaaaagatcaaatggagctgatctgggaagagcttgggttgaaatttgcagatcttctcggaatggggagatcaggagttattgcttcccttattgctgcttgtcaaaggcttcaaactcatgaatataagtgttgcgaggcacttgctaccgctgttggttcaaaaaatgagacttccaagttcattgttcctcggatactgtttcttgacggttacttcagctatgacgataagtctagttggagctggcctggcggtgctaagatgcatgttatgggttctttgattctgcacgctatttttaaattccaaagtgaatggatacagccttatattctgagtgttacatccatggacgctgagcatgttcttgaggcacctcaagattctcgagggggggccc

SEQ ID NO: 192350 - DNA, 883 bp, Gossypium hirsutum
ccaacattgacttcaagcaaatggtggcctggtggattgggtaaagtatccacacatgctgtggtctatgcacgtcttataacaggtgctcaagaccatggagtgcatggttttattgtccagctgcgtagtttggatgatcactcacctcttccaggcataacagtaggtgatattggaatgaaatttggaagtggggcatataacagcatggacaatggtcttctgagatttgatcatgtgcgcattccaaggaaccaaatgctaatgcgtgtttcacaggttacaagacaagggaaatttgtgcaatctgatgtgcctcgccagctggtttatggcaccatggtctatgtccgacaaacaattgtatctgatgcttcttgtgctttagctagggcagtttgtattgcaacaaggtacagtgctgttcgtagacaatttggttcccagaatggctgtccatagacccaggtgattgactataaaactcagcaaagcagactctttcctttgcttgcttctgcctatgctttcagatttgtcggtgattggttgaaatggctatacgctgatgtgacacatatattgccagctaatgatctctttacattaccctgagctcattctagtactggaggctataaactattactaccttttgtaactgctaatcttttaatatagccgcatatatacttggtattggccattctttaactcggacttcctgtatctctcaagttaatttccactcttccctctaggaaccttgtcccgttcctgctcgttcttgattttatttaaccgcttcacttgatctcgcactaaccctcttcatcacctttattcatattatgtccctaggccttcgtatttctttccc

SEQ ID NO: 192351 - DNA, 492 bp, Gossypium hirsutum
cccacgcgtccgccagtctcaagcaaccaaaccaaacaaccccttatccttttccatctctctcaaagaaatggctacatctcagctaacagcgtcgtcagtgacagcatcagctaggaacttggcttcattacaagggcttaggctgtccactgtcaaattctcttcctttggaacattaaagcctggggctttgaccagcaggtccttcaaacgtttggttgttaaagcggctaccgttgttgcccctaagtacacttcagttaagcccttgggtgacagggtgttggtgaagattaaagaaacagaggagaagactgagggtggcattttgcttccaacaactgctcaatcaaagcctcaaggaggtgaggtggttgctgttggtgaagggaagacaattgggaataccaaattggaaagttctgtgaagactggtgctcaggtcatatattccaagtatactgggatggaggtcgagttcaatggtgc

SEQ ID NO: 192352 - DNA, 1023 bp, Gossypium hirsutum
  unsure (1)..(1023): unsure at all n locations
tcctcattgcatatataaggttgctntacccgagaataaggtaactcaagatgatggatctggtgcgatatatcaaaatggcagtgccatcatttcaaatccagcttccaatcctgaggggcctgatgatggaaacctggtctcagaatatgaatcaaaacaaacgagcaaattctcttctgaagagttcaaggaattaaagttggaaaacgaaaacatggcaagggatctttctcaatgcaccgaaaatctggagatgaccaagtctcagttacacgaaactgagcagcttctagcagaagctaaatctcaattggcttatgctcaaaggtcaaacagcttggctgagacacagctcaagtgcatgacagaatcttatagatcacttgaaacacgtgctgaggagttagagaccgaggtgaaccgtctccaggtaaaaatagaagctcttgaaaatgagcttcaagatgaaaagagaagtcatcaagatgcttttgcccgatgtaaggaactagaagagcaattgcaaaggaatgagacctgttctgtatgttcttcagcagccaagaatgacctcaagaacaagcaggagaaagaattagcagagaaactagcggaatgtcaagaaaccatattccttcttggcaagcaattaaaagctttccgtcctcagacagatataacgggatcacccttcaacgagaggagccataagggtgacgatggacccactaccagtggcatcaacttgcaggatttatatcaggcaaagatggacagtatcgctgctgctgctgcttctggcattggaagcagaggtggtgcggagtctcccctggagtcagttaacacaccaagcagcccatatgatagtgaagcaaactctttgagaacacccatcaaatcaaaacacaggtctacaacatcaatgtcttcatcttcttcttctaccccaactccagataaacattcacgaggctttagcagattcttttcctccaaagggaagaatgataattaaat

SEQ ID NO: 192353 - DNA, 572 bp, Gossypium hirsutum
gttgctgaagttgtagaattcttgatgatgttatgaaggccactgaatgttcgggacacaccctcaagaacggatggatcgagaatctttccaacaagatggtcatcaactcctggtccaaggttgtatatgtggtgagtgacaacatcgagggacttgtttgtcttatcaatatattccgtgaaccaatccgagtcatagaaccctcccggtgtgataattaacggcttcaaatcaacattctggtatatcttctgcactatactttgcagagctgctgtgtcagccgcatactggtctgcagagacccgagttccgaccccgcttccgcacaattcatttcctaactcccaaccgtgaatggtatagttcttgtcaacagtgtattgcataaaagattcggcattggtgtagtctcccagcacctacggctgaaccatcaggggctcacgcctcgaccagcatgtgcatttaacccaaaaataaccttagctcctgctttttgaaaaaagggattaaggtcatcccagctactcagcggcaaacatccttgtgtcaaaccaaacagtctc

SEQ ID NO: 192354 - DNA, 1218 bp, Gossypium hirsutum
  unsure (1)..(1218): unsure at all n locations
gtcataatcagcttaatggaagcattcctatggaaattggaggagctttctccttgaaggatttgaggctcaatgctaatttcctaggtggaaaaattcctacatcaattgagaactgcacctcgctatctactttgatcatatcacaaaacaacctgagtggcccaatacctgctgaaattggaaaactgaacaacctacaaaacgtggacctgtcttacaacaaccttgctggaaccctacccaagcaattggccaatctaccccacctcttatccttcaatatttcccacaacaatttacagggagaactgcctgctggtgcattttttaacaccatatcgcccacggctgtctctgggaatccatcactttgtggctctgcagttaacaaatcttgccctgctgttcttcctaaacccattgtgttaaatcctacctcctcttctgattccatttccgaggaaccgcctacgactgtcggtcataacaggataattctcactatctctgccgtaattgctattggtgcatctgctgtaaatgttgttggagtcattgccatcactgttcttaatctccgtgtcaggtcatcaacatcccggtctgcagccgcccttactttttctgctggggatgactttagccattcccctactacggacgccaattctggcaaacttgtcatgttttctggcgagcctgacttcagcacaggtgcacatgctcttttcactaaggactgtgaacttggccgtggtggttttggagctgtgtataaaacagttttgcaagatgggcgctcagtggcaatcaagaagctcacggtatcaagtcttgtcaaatcccaagaagaatttgaaagggaagtgaaaaaacttgggaaaatacagcactcaaatcttgttgctcttgaaggctattactggacaccgtcactgcagcttctcatttatgaatttgtttctggtggaagtctgtacaaacaccttcatgaaggatcggttggaaattatctttcttggaatgacaggttcggtatcattctagggacagcgaaaagcttggctcacttgcaccaatctaacattattcattacaatctaaagtcaagcaatgtccttattgatggctcaggtgaacctaaacttggagattatggcctancaaggttgctccctatgctagatcgctatgttttaagtagcaagattcaca

SEQ ID NO: 192355 - DNA, 796 bp, Gossypium hirsutum
  unsure (1)..(796): unsure at all n locations
cagctcgtgccgcgagttttttttttttttttttcttctactttccctttgccttacttaccactgaaaacaatgaaggagtccaagcatgaggctttcacactctctttcaccctgcttctcatgctgctgggtttggcatccagtgatgtgaaccaagacaaagcggaatgcactgatcagctagtcgggcttgctccatgtcttccatacgttggtggacaggccaaagcccccaccctggattgttgcggtgggctgaaacaagtgttggttaagagcaagaaatgcctgtgtgtgttgattaaagatagagatgaccccagtcttggcctcaacatcaatgctagtcttgctgcaaccctccctcacacttgtcatgacactgttaacattacggaatgcatctcccttctgcacttggcacccaactcccaggaagctaagttattccaaggatatcaaaagctgacagagaagcattccacatccccacctgcgagtggtaactccacaagcagtgctgcagagaagagtgatggaggaatgggaaagaaccgcgtgggagtagtaaagatagctatcggattttcactatgggttttcaacatacaccaaaactctgttgtgtgaatgatagaagtttacacacagctgcggctatgtttgttatatccataatttaagagtttggaccaggatccagttatgtttttatctaaaatcctctttagtttgtctttgatntnttttttttgcaattatatattcttacattttctctcctcccccccgg

SEQ ID NO: 192356 - DNA, 360 bp, Gossypium hirsutum
taacaccccaaaatagaaaaccacccaagaccaccgacacctccgccgatcatccaccgccgaccaccactacttccattcacttccctactggaaagatctttgggttttatttttaaatgtgtttttttattgcaattaatcatcatatcattctttgattcctcagttttagggaattttgggggtccttaaaaagaccaaaaaggggctcatatttttaaaaaaggcttagatcaaatcttaaaaaaatggggattattcggtggatttaggattttgagggggcctttgggttttgtgagggttttttttttaattgagagatggcttgatgccttaaggattaaatgaatctgc

SEQ ID NO: 192357 - DNA, 1103 bp, Gossypium hirsutum
ggtgaactgaatggcagattaaaaattaagggtgcagttgcccaacaatatctaagtacagaaagaatggaagaaaaagaagaagatgctgacagggccaacaggattacaccatcaagatcaaaagctattatacaaagacaaggagagggattccaaagcttttctagacatggcaggtgtgaaggacaagtccaaaattgttttagttgaagacccaattagtcaagaaaagaggttattggagaccagaaagaatgctaaggtagagaaggcttctaaatccatctcccaagtcagcttggaagttgataggcttgctggccaggtgtcagcttttgaaacaataatcaccaaaggtgggaaagtagcggagaaagacttgattaattcgattgagctgctgatgaatcagttgcttaagttggatggtattatggctgatggtgatgtcaaattgcaaagaaaaatgcaggtgagaagagttcaaaaatatgttgaaacattggatatgttgaagattaaaaacgccatgcctagcaccaatggagctcaatccgaaacacagaatcgacataagcatagtgttcgaaaacaagagcagcaatccaggcaaagattagcaccaattcaggagcaacaatcgagcaactcggtttctcatttgccaatccatcaacaataccagcacaagcaccagcaccagcaggcatctggtcccgtcgtagttaccacgaaatgggaaacattcgattcatccccggcaacattgccggtcacctcgacatctacatcttcatcaaccgctaataactcagccccaccgaagttcccttgggaattcttcgattaaagacagtatgctactatgtcctctttggttttcatttcattttttatctgtgtgaatgtgatttgggtttgcttcttcttcttgtacttagattttctcaagcaacccttttcttttcttttcttttttttcccactttcataaaatctggcattaagctcatcagacaaaaaatcaaaacaaactggggcgcctccatcatttaaaaaaaaacaaccaccctgtttctattctcttttatatcccagtc

SEQ ID NO: 192358 - DNA, 1125 bp, Gossypium hirsutum
ttttaccatttccagagatccaaaacagtaaatatccctcttttttaggaagatgatgaggatgaggactaaagcgacagggctgtcaccggcggtggcaaatggagaatcaggttttgtcggtggcggtgaaccgactgctcatgattgggagcttagacccggtggcatgttggtgcagaagcgagacctcgacagcggtcgtccccctatcccaccgccgacaattagggtcagagtcaaatacaagtcaatctatcatgaaatcagcagcaattctcaagctacattcggagagttgtagaagatgttaacaggccccacggggctacaccatcaagaccaaaaacttttatacaaagacaaagagagggattcgaaggcgtttttagatacggccggtgtgaaagacaaatccaagcttgttttaattgaagacccgattagccaagaaaagagattactggaaatgagaaagaatgctaaactggaaaaagcttctaaatctatctctgaaatcagcttggaggttgataggcttggtaatcaggtgtctacttttgaatctataattactaaaggtgggaaagtagcagagaaagacgtgcttaattcgattgagctgctgatgagtcagttgcttaaattagatgcgattacagccgatggagatgtaaaattgcaaagaaaaatgcaggtgagaagagttcaaaaatatgttgaaacattggatatgttagaagattttaaacacgctactgccaagcaacaagtggacgtcgggatggaattccaaaatcaacacaagcatacaaatgggcaaaaactagccccaacccaagagcaaaagcctaggcattttaactggcaaagactagcaccagttcaagagcagcaatcgagcaactcaattgcccatttgccaatccatcaacaccaccaatcagcatcggggcccgtcgtagtcaccacgaactgggagacatttgattcctccccagcatcgttgccggtcccctcagcatccacatcaaccgtcaataattcactcccgccaaaattccctttggacttctttgactaaacaccactatgccacgtttctgctctatatttctctggtgt

SEQ ID NO: 192359 - DNA, 485 bp, Gossypium hirsutum
ttcatcgcgtccggaaggctgtggttcatctcatatgttgtgccatgaagtaaaaagtctttcatgctcgccgtcctctgtagaagatgtttctactcagcattctaaattctctgggaaagaaccagtttcaactaacagcatagttattctgttagatacaatgcataacctgtcgaaattgcttctgcatcactgctccaatgagtcatctgaattgaaggaacaagatcgcaagtcacttgaaaaagtaataaaaaatcttaatacatgcatgtcaaaaaatgttggacaagaatcatttttaagcgatctacatgaggggacaagcatgggaacgccccaggtggcggctattgatgtctggagtcagcatgtacaagagaaaacgaagcattctggtaggaaagatgacaagtgttctgatttcattcctttcgagagtggtgcaggcataaaggcaagaaatgataaaatgacccagg

SEQ ID NO: 192360 - DNA, 616 bp, Gossypium hirsutum
cggacgcgtgggctctgtgggaaatttacagaattgtcaaaattgtcggatctttgtccgccaaactctacaaaccttggatattgtttagttctgaaaatcccacaaacttccctgctcttgtgagggagtgttcttctgtgtggtcaagttcaggacttgaagaagcccttcaaaatctgactgatttgacagatttaaaatatgatgttcaagctttacttggttccattcagagtattcatgatcctgatgcgcatgaactctataaacaagttttcttggagcaagaatctacatgttgtctgtcaggtttaactgcaggagcagtgccaggcatgaaaatggtgctttgggatggacggcattactttgtaaccattgtcaacttgtgggcaaatttaataagtcgcaatccaccaaatttgccgctcatacatgctcgaaaggaatgctgtcatgaaaagacgtacattttccaggagtttcacagcataggtcgcactgaatgaagtttctggattgtaatcagggttgccccagtactagaattttacgttggaaagaaaatgcagtaactctttgggttatccagaatccgatgtggtgcaaggtg

SEQ ID NO: 192361 - DNA, 930 bp, Gossypium hirsutum
  unsure (1)..(930): unsure at all n locations
gtatttcccagcaacaatggcaatggttttatggcttcttttttctccttttctgttcttatctgtttctgtcaacactcaaaccaaagtaaccgataaccctgcggatgaattggtggctgcgcttaatgccaataggacagctcacaagtcatcggctctcaccgacaacccaggcctggcctgcattgctttgcagtatataaaagcataccaaggtgactgtaaagctgtaggagaggccaagaagcccgctgactctgaattttctgaaacttttgcccccaactgtggtgtggaagcctcaaccctctctccaatcactggtcgtttacttggatgccaatcgaaatatgtagagccttctgaagctttctcgatgttgatgaaaaacgagaagagtttggaaattctttacaataagaaccacactgaagttggggctggtgtgaccggctccgatggtgggggtccctatttctggtgtgtacttctcagcaacggcaagcataacaatagctttgttgcacaaggtggtgtggctaaaatctcgagaccgggatgctttagtggtgccaatgatgaatgcagcggtgctaatgatttatctcgacttcatcacatgtggctgtacgccgtaacagctttcgttgctgcaggatatgccttcggaatatgatcatatcctatagtatccgaactctttatcattggattgttcattctgaggcctgcttcagtccgttgccttatatagctcagcctctctagtagttttttcgaggggtttatatattggtataattttattgatttgtttcttttttcacattgagcaagtttcacactgtgccattgaattctccagtttcatgtgtcaaccttcaaattgagtgaacctacttggaatgacaattactnttttttttc

SEQ ID NO: 192362 - DNA, 848 bp, Gossypium hirsutum
gtttcaagtttcaagtttctcctctacgtaatccatggaagcctgcttcttcgacactctcaaggctcaacctttctgggttattttccttttcactttgggttctttatcactcttgaagttttcatttgtttttctgaaatgggtctggatcaattttcttagacctggtaagaatctcaaaaaatatggctcctggggtcttgttactggaccaactgatggtatcggcaaaggatttgcctttcagctggctaggaaagggcttaatcttgtcttggtgggccgtaatcctgataaactcaaagacgtttccgattcaatcttggccaagtatgccaagattcagatcaagacagttgttgtggacttcactggcgatcttgatgaaggcgtgaagaagataaaagaaactattgaaggactggatgtgggggttttgattaacaatgttgggatttcatatccttatgccaggttcttccacgaggttgatgaggagctgttggtgaatttgattaaggttaatgttgaaggtaccacaaaggtaactcaagctgttttgcctgggatggtgaaaagaaagaaaggcgcaattgtgaacattgggtctggtgctgccattgtcatcccttctgatccactttatgctgtttatgctgctactaaggcgtatattgatcaattctctaggtgcctttatgttgaatacaagaaccgtgggattgatgttcagtgtcaggttccattgtatgtggcaacaaaaatggcatcaatcaaaagatcatctttctttgttccatcaacagacggatatgctcgtgcagcaatgcggtggataggctatg

SEQ ID NO: 192363 - DNA, 1022 bp, Gossypium hirsutum
aattcttaaaactcgtccccaatttctccgcttattagcgttgcctggaagcggtttttttttctttgtagaataaagtagatttttttttaatttgacggggaaaaaaaacaaacaaactatgaccatgggtgctgcagacaagagggaggaagtgattcaggcatggtacatggatgatagtgatgaagatcagaggcttccccatcaccgtgaacctaaggaatatgtatccttggataaactttctgagcttggagtactcagctggcgattggatgctgataactatgaaaatgatgaagagttgaagaaaattcgtgaagaacgaggttactcctacatggacttctgcgaggtttgccctgagaagcttccaaattatgaggagaagataaaaaatttcttcgaagaacatattcatactgatgaggagatccgttactgtgtggcaggaagtggttattttgatgtacgggatcataatgataaatggattcgtgtgtgggtgaagaaaggaggcatgatagttttacctgctggaatttatcatcgctttactctggatacagacaactatattaaggcaatgcggctctttgttggtgatccaatttggactccgtacaatcgtccgcacgatcatcttcctgcaaggaaggagtatatcaagaactttttgcgggaggaaggtggtggccaagccgttgatgctgccgcataaaatcaacattcatctggtggtggccaagtcgttgatgctgccgcataaaatcagcattcatctctggtatcgtgtcttataaaatatgaaaccccggatttgtggtaataaataagtctaggcttgtctgcttttgatgcgtggatatggatcgttttggttgttgcttgctatatattgcctattccatatcgaaaattcgcaaacttgctatgtatttctacattgtatgtgcttactaccagattggctcttaataatcaaagtttacataatatacatttcgtcgacgcggccg

SEQ ID NO: 192364 - DNA, 763 bp, Gossypium hirsutum
gctactcggaatgtttggggaaatgtaggccttagcaatgctacaaatgcttccagtcctgctagttacttagggtctggaaatggtagtttcggttctttaggaaatagtggggcaaattggagaccttctcttcctgctcgaagcggagggaacgcttctggttataccggtgggagtgccgatgacaactacagtttgggagggggaggatatggaagaaacatcggcattgttgcagcaccaccatcatcatttgctgggtcaactggtaatattgaatgttcctatggagatctttaccgtaatgcttcagtttatggtgactcaacttggaagtttgcatcacctgacttggatggttctagctcgtttggttatggacttggcaatacatccgcagatgttactacaagaccctctgaggattatgttggaagttacaatgtcgcaagtagacagtccaatagaggaattgctgcctaggagatccggtattcggatatcagatactataatgtagggtgaatggatttgcacaaattcgatatgacttgttactatgttggcttacatggaaattgatcttatggcactaacgacggttaatggtttgaaatatacacattcagagtgagcggtttcaaccgattttcaacaaggtttgagatttgatttttttttctttttactttatttaaaatagtgaaagaacaaaatttaggttcctttcttggcatttgagtgaggtttacaatcacat

SEQ ID NO: 192365 - DNA, 448 bp, Gossypium hirsutum
cagaaagttctccctcaattgcccttggaacttaggagtgatttgccactagatctgtcagagggagtgcttaaagccctttgtttgcaagcattaggccagggtgttgagattcaactgggaatggcaattgatagcattaaggccactctggccgtgaaaaggaggctagcatgtgagatggttaaatactggcatcaggctgaggaatacataaaggaacttccagtagcaaatggatggggagaaaagcacaagcttttcattcagtggaagcacattgaagctaaggctattgcatactatcttcacggattaatcctcgaagaagggaacacatctgctggcatagctgcagctgctctgcaagcagcagaagagtatctcaaagaaagcaaaatggcctgcgattctttccatgtgacactcccttcggtgagtaatccac

SEQ ID NO: 192366 - DNA, 464 bp, Gossypium hirsutum
cggtccgaaattccggggcgacccacgcgtccgcagcgttgcagcgacgagcacaagtcgaaaaaggaaattcctctcaacatcaccagaccacgacctccctgccgagctccctccctctccgttggtgatggcatctcagagctccaaggccgcgggcaccgccgcgcctccgccggaggttgcagccaccggagaggcggctccgggcgcggcttcttcaacaccggcacagaaccctaacgctgctgcaaccgcagtggccggggccacggctctagagaagatgatgcgccgcgcggagcggtttgggatgccagtactgatgtcagacgaggaaaagcgcagcaagtcgccgccgtagaggatgtttttggggggactggctcttcaagtgtaaaggaggaagagaagaagaagtccagggctgagacgtttggccttgcctcgccctcttcttcaga

SEQ ID NO: 192367 - DNA, 751 bp, Gossypium hirsutum
tcgtgatggccttaaaatgtcgtggtgagcatgtattaggaggtcttcatacaggaatcaatacccgacacattgtaatggcaagcaaaatggtagaagaatacacagggttacatgttcagccgcataaagccattgttggagccaagcctcccgctcacgaaagtggtattcaccaggatggaatgctaaagcacaaaggtacatatgaaattatatcccctgaagatattggacttgagcggtccaatgaagctggcattgtccttggaaaactcagtggacgtcatgctttgagcgaccggttgaaagagcttggttacgagcttgacgatgttcagcttgggaacatattctggcgcttcaaagaagtagctgaacaaaagaagagagtcactgatgctgatctagtagcattggtttcagatgaagtttttcaaccagacgtggtttggaagcttctcgatctacaggttacttgcggaactcttggtctttctactgcaacagttaaactcatcgatgctgatgggagaaagcatgttgcctgctcagttggaactggacctgtagattcagcttataaagctgttgatctcattatcaaggaatcggtttcacttcttgagtactcaatgaatgccgttacggaaggaattgttgctatagccactacccgcgttcttaattcgtgtagagaaaagtcacttatctactcatgcgttgactggtgaactctgtcatcgtacat

SEQ ID NO: 192368 - DNA, 923 bp, Gossypium hirsutum
  unsure (1)..(923): unsure at all n locations
ttattaaccacttcctctatcagagtgactgactcacttacttttgttgaacacttatcatcaaataatcacaactcccagattcataaattcacgtgaagaaaaatccactaaaacactcattaccgacgatggggaagaagcgggtaatggttccggccaaggaactggacttgttgaccgttaaatacgagaaagaaacaatccaagctcctcatttgacgggatcgatactgaagttgtttgtgaggataattgaaattccaattataggttctttgatcatatctttcatgaaaaaggagaataacatggttgagatgttgcagaacactgaaataccagaaaaacccatgtttaaacctgaatttcctcctcaagaagcagaaccttctgttgtcattgtggatgaagaagggaaacctactgatagagttgaatcagcccttaagtgtcttcctcattatgatcctgctagttgctggagtggggatacacttccatcgttccggtactggaagattcgtgactttgcttatgcttatcgatcaaaacttgtgacaccttctaagatagcagaacanatcatcacacttggacaattgaggggtgtaaatatcataaggccccaacaccattattgatttcatttgatgctgaggatatcaggaagcaagcaacagcttcaacacaaaggtttaaggaaggaaatccattgtcaatcttcattgtaccactcatctgcttgtctttctgcttgtcagatatcaacctggtgaagttagagcattcgggatgattgctggaggctctggcattacactaatgttccaagtatgttataaatcatgacagatacttctgtaatatatatgcaaggtttaaatgtttgaataatatgtcacttttattgaaaagaaaag

SEQ ID NO: 192369 - DNA, 717 bp, Gossypium hirsutum
  unsure (1)..(717): unsure at all n locations
tttatttccttccaaagccatttgcagctagctggaccggaccatggcttctaaaccaggaattctcacagactggccatggacacctcttgaaagctttaagtacataatcctgggtccttgggttacggagaccatatactcaattatgggtaaggatccaaaggaatgggacctgaccaacttttcggtaatcccattcatgttatggagaatgttgcacaaccagctatggattagcctttctcgttatcgaactgccaaaggcactaacaggattgtggacaagggtatcgaatttgaccaagtcgacagggaaaggaactgggatgatcaaatattgttcaatggaatcctgtttttcttggctaacaaatacgttcccggggcttcacacttacccctatggagaacagatggtgtgattataaccatgttgctccatgtcggtcctgtggagttcctttactactggcttcatagagctctgcaccatcattatctttactctcgttaccattctcatcaccattcctccattgtcactgagcctatcacttctgtgattcatccatttgcagagcacattgcatacttcctcctgtttgcaatacccatcttgacaacggtgctaactggtactgtctccattgtttgcctanctgcttacattacttacctgaactttatgaacaatatgggccactgcaatttcca

SEQ ID NO: 192370 - DNA, 1396 bp, Gossypium hirsutum
ataatttggtggagactgcatttttttggtatctgcagcgaaagaggcaaggggagatccgatactgaatcaacagcaacagcaatggctagacaagcttcacgacttattcagtctttgtcttccaggatttctcctcacaaacctcaactatccccgctcactccctcttcctcttcttctccgcttttgactcagtcacgctctttctcggcggctccggcgcctcaaccggcggttttcgtagacaagaacactcgtgtcatttgccaagggatcactggaaagaatggcactttccacactgaacaagccatagaatatggcactaagatggttggtggagtaacacccaagaagggtggcacagagcacttagggcttcctgttttcaactctgttgctgaagcaaaggctgaaaccaaggctaatgcttctgtcatttatgttcctccgcctttcgcagccgctgctatcatggaggctatggaagctgaattggatcttgttgtttgtatcacggaaggaattcctcaacatgacatggttcgtgtgaaggctgcccttaaccagcaatcaaaaaccaggttgattggtccaaactgccctggcatcattaaacctggggaatgcaagattggaattatgcctggatacattcacaaaccaggtcgtgtaggaattgtttctcgatcaggcaccttaacatatgaagcagttttccaaacaactgcagtaggtctggggcaatcaacctgtgtaggaattggtggggatccctttaatgggaccaacttcgttgattgtgtgacaaaattccttgctgatcctcagacagaaggcatcattctgattggtgagataggaggcactgcagaagaagatgccgctgcactgataaaggaaagtgggactgaaaagcccattgttgccttcattgctggactcactgctcctccaggacggcgtatgggtcatgcaggagctatagtatcagggggcaagggtactgcacaggacaaaatcaagactctaagggaagctggagtgacagttgttgaatcacctgcaaagattggtgttgcaatgcatgaggttttcaagcaaagaggtctccttaattagtgtgtgtgtgattttccctagaaaaagaaaagcaaaacaatatttcctggattagtttcaggtgacaaacttgttcgaaatgctttcattgtttttgtgaaaaatcaattttatactgaaatgagggaaaaacccaaccaaagaaaagcaacagtttgatggttgggtcgatgcaaaattaataaacctgagaaggttgagacttttgatgaataaaaataaaaaataaaatagaaacaattgaaccaataaaatctagagttaatagacg

SEQ ID NO: 192371 - DNA, 454 bp, Gossypium hirsutum
tcggcccacgcgtccgcagaagaagatgctgctgcactaataaaggaaagtgggactgaaaagcccattgttgccttcattgctggacttactgctcctccaggacggcgtatgggtcatgcaggagctatagtatcagggggcaagggtactgcacaggacaaaatcaagactctaagggaagctggagtgacagttgctgaatctcctgcaaagattggtgtagcaatgcatgatgttttcaagcaaagaggcctcctgaattaacacccttttttttttcctagaaaaaggaaaactttttttcctgaataagtttcaggtggacatttttcatataattccattggtcttcttttgtccaaaattatttttatactaaaaaatgagggaaaaatcttataccttagtcaatgaaaccagatttggcttaaacaagacgggcaatactttt

SEQ ID NO: 192372 - DNA, 409 bp, Gossypium hirsutum
tctgcggcatacatctaattcttccggccttccctttgaatattgttatgacctaagtgcaaatcaaaccagctttgagtaccccattgtgaatctgacaatgaaaggtggagactatttttttgttaatgatccaataatagtgatttccttgcagggtggagatgtatactgtttaggtattgtgaaaagtgacaatgtgaatattattggacaaaatttcatgaccggttatcggatagtttttgatcgtgagaggatggtgctgggctggaaagcatcctactgttatgatttagaggcctcgaacactttaccagtgaacccaccaactgcagtccctccagccattgctgtgaatcctgaagccacatcagggaatgctaataatacaaacatttcaggggcg

SEQ ID NO: 192373 - DNA, 1321 bp, Gossypium hirsutum
  unsure (1)..(1321): unsure at all n locations
cccaataaaaaaattgaagggaattgagtaggtgtttttatctctaagactttgaagtataaaaatgatgatgatgacaatggaaggaatgatggatcagggtgtattggacgatataataagaaggttgttggaaggtaaaggaagcaaacaggttcagctttctgaaggagagatccgtcagctttgtgttaatgctcgtcaaatcttcctttcacagcctaacctacttcagattcatgcccccattagaatctgtggtgatattcatggacaataccaagatctcttaagactctttgagtttggtggctatcctcctgcgacaaactacctgttccttggggactatgtacatcgaggcaagcaaagtttggagacgatttgtttgcttttggcctataagatacggcatcccgacaaagtttttctcttaaggggaaaccatgaagatgcgaagatcaatccaatttacggattttatgatgagtgtaaaacgcgattcaatgttaggctttggaaaatatttacagattgcttcaacagtttaccggtggctgcactcgttgatgaaaaaatactttgtatgcacggagggttgtctccagagttggaaaatttggatcaaataaaggaaattcaaaggccaacggaggttcctgataatggtcttctctgcgatctactttggtccgatcctgatccgaagatcgagggctgggcagacagcgatagaggaatttcatctacttttggagctgatgtagttgctgaatttttggacaagagtgaccttgatctcatttgtcgaggccatcaggttgtggaggacggctacaaattctttgctanccgaagattagtaacaatattttcagctccaaactatggtggagagtttgacaatgctggtgctttattgagtgttaatgaagatcttgtgtgctcctttgagatattgaaaccagctgataataaatcgttaccaagcggttctaagcccctgaagaagcaccaccaaagatggggaaggtttgatgttccatgaatagggattgctagggatgtcattctgctcaaacccaaaacatgatgagctgaattgacaaatgttccgattacttcattgtacgagtaaacttccataagattgttgcttgcaaacgaagtcgtcggaacagtctgtagattaactacccattttctcttctgtgcagtaacacatttgtttttgcatttgacacaagtttctaatcactatcagtgtgcaatctatggattgatctgccttgatttgtgttgatatacttagntatcacct

SEQ ID NO: 192374 - DNA, 405 bp, Gossypium hirsutum
aaaacactatgtccccacctttttttttttgcttctaggggtttgaaacccatcagcgccgccatcgtcatgcccccttgaagccactcgtggtttccactgtagacggtgatcgggaccacgtgaaatcgggtttttaaccccttttgaagcgagctcgacggcgagggtttcccagaccgaagaagatccataagaagaggcacccccacgacctctttgggccgaatccgacactggagaagtggtcttcgatgacggcgttgcgtggattcgggtgtcaatggtgcatgatggctggtggttcgcacgtcggtggcggcagtcagacatgcgtggagggaaacagcggctgcagctctttaggaggttttgggtttttttttttgctttctgaaaaatgat

SEQ ID NO: 192375 - DNA, 552 bp, Gossypium hirsutum
tccatggttaccaagtgtaaaagctgtgattttggtgagggttcgaatggatatcaacttaataatgaatccaatccccatgaaggaggagaagaaggtgttgaagggtcacctttttcacctcaatctgataatgaaaacgatgattttgacccttatggcggcttatttgatgatgagcaaaaaagggttcttgagattaaagagcgtcttgaactacctgatcagtcagaagatactttagttgatttgcttcaaagtttggcagatatggatataacatttcaagctctcaaggagaccgatattggaagacatgtgaacaaattgaggaagcattcatcaaatgatgttagaagattagtgaaacatcttgtcagaaaatggaaagatattgtagatgaatgggtaagggtgaatcaacctggagaacatgagcctgctgcacttatggatggagattctccgcagcaaaagccgcctcaaaacggtcgtcagcaggttcctgattttgcatactctccgaatccacacaatggcggttctggttcc

SEQ ID NO: 192376 - DNA, 873 bp, Gossypium hirsutum
cggacgcgtgggtccaattcccacacaaaaatccaattccattaacaaactcaaaatcatcaagttgttcaaaaaaaaaaaaaaaaaaccatttcagctttgactttaaggaattgtttttcttttgtcagctgaaaaaaattgtaaatttcaagctttgggcgtttttgttttcaatcagatctgattatgttgaaggtcaaatctttgatttgatacttggaagaaataggcgttggaatttgcaacataatcatcaacttttggttttaattgtaatggatttggatgatttcagatcagttcttgaaactgctggtgttgatgtgtggacttttattgataccgcaatcctggcagcttctttggattacggccaagagttgaagcaaaggagagatgggattgtggagaggctttatgctacttccatggttaatggatgtaaaacctgtgattttggtgagagatcaaatggatattcagttaataaaaaaggcaacctccatgaaagtaaaggtggggaaggacgaaaagggtcaccttttaagcctcaatccgataatgaagatgatgatctggacccttgtggaggcgtgtttgatgttgaacaaaaaagggtccttgaaattaaggaccttcttgaagtacctgatcagtctgaagattctttggtcgatttgcttcaaagcttggcggatatggatataacatttcaagcactcaaggaaactgatattgggagacatgtaaacaaattcagaaagcattcatcaaatgatgttaggagattagtgaagcaacttgtcaggaaatggaaagatattgtagataaatgggtaatggtgaatcagccaggagaacatgaatctg

SEQ ID NO: 192377 - DNA, 992 bp, Gossypium hirsutum
attttatgctggaacaggtaacttgttgtgtaagtctgaggatacagtatgtatatttgatctccagcacaggcttattcttggcgatcttcaaaccccttttgtgaagtatgttgtttggtctagtgacatggagagtgttgctttgctcagcaagcattccattatcattactagcaagaaacttgtgcaccagtgcacttttcatgagacaatacgagttaagagtggagcctgggatgagaatggtgtttttatttacaccaccctaaaccatgtaaaatactgccttcccaatggagatagtggaatcatccgaacgcttgaggttcctatatacctaactaaggtttctggcaacactatattttgcctggaccgtgatgggaagaacaagacgctggtcattgatgctacagaatacatttttaagctgtctctgcttcggaagaggtatgatcatgttatgagcatgataagaaactcccagctttgtggtgaggccgtgattgcttatctacaacagaaggggttccctgaagtggctctccattttgtcaaagatgagaaaactcggtttaacttggctatagagagtgggaacattcaaattgctgttgcatcagctaaggagattgatgacaaggatcactggtataggttgggtgtggaagcccttcgccaaggcaatgcaggtatagttgaatatgcctaccagaggactaagaactttgagaggttgtcttttctttatctcgtaaatggtaacctggaaaagctgtccaagatgctgaagattgcagaagtcaagaacgatgttatgggccagtttcacaatgccttgtatcttggtgatatccaagaacgtgtaaagatcttggagaatgctggtcatttgcctcttgcttatgttacagcatcagtccatgggctacatgatgttgcagaaaggttagctgctgagttgagagatgattgtcctttttttccgg

SEQ ID NO: 192378 - DNA, 770 bp, Gossypium hirsutum
  unsure (1)..(770): unsure at all n locations
cggaatgcagggccgacccgcgcgtcgcgttccaaaaagttaagagcaaaagaaaggagcagagtaagctaagctttgatcatcaatggcggagaagagtttcaagtacgtgatccttggcggtggtgtagctgctgggtatgcggcgagggagtttgccaagcagggagtgcagcctggtgagctagccattatttccaaggaagcggttgctccatatgaacgtcctgctctgagtaaggcgtatctcttccctgagggagctgcaagacttcctggtttccatgtctgtgttggaagtggtggagagagattgcttcctgagtggtacaaggaaaaaggaattcagttgatccttagcactgaaatagtgaaagcagatcttcctgccaagactctagtaagcgcagctggagaaacattcaaatatcaaattttgatcattgcaactggttcaacaattataaagggaacagttgcagttggattcacctncgactccatgganaggtgnnnggaagttaaacttaaggacggcagagctctagaactgcatcgnttgtgntggtgtttgtggaaggcctcttacacactatttaaggacaggttgaagaggaaaaggtggaataaagactgaggcttatttcgaaaaagtgttcccaaggatatgctggggtgatctaccccttttctctggagtatccatgaatgagaaggtggacacgttgcacttcccggaataactgactggcgtaaggtttcaggagggg

SEQ ID NO: 192379 - DNA, 849 bp, Gossypium hirsutum
aaaaggttaagagcaaaagacagggcagagtaggcgtaagctttgatttatcaatggcggagaagagtttcaagtacgtcatcctcggtggtggtgtcgctgccgggtatgcggcgagggagtttgccaagcagggagtgcagcctggtgagctagccattatttccaaggaggcggtggctccatatgaacgtcctgccctgagcaaggcgtatctcttccctgagggagctgctagacttcctggtttccatgtctgtgttggaagtggcggagagagattgcttcctgagtggtacaatgaaaaaggaattcagttgatccttagcactgaaatagtgaaagcagatcttcctgccaagactctagtaagcgccgctggagaaacgttcaagtatcaaatcttgatcattgcaactggttccacggttataaagttgacagattttggagtgcaaggagctgatgctaaaaacatcttctacttgagagaaattgatgatgctgataagttggtagaagcaatcaaagcaaagaagaatggaaaggctgttatcgttggtggaggttatattggtcttgagcttggtgcagccttgaaaattaacaatcttgatgtcagcatggtgtacccggaaccatggtgcatgccccggcttttcacctctggcatagctgctttttatgagggttattatgctaataaagggatcaaaattataaaggggacagttgcggttggattcacctctaactccaatggagaggtgaaggaagttcaacttaaggatggcagagttctggaagctgacattgttgtggttggtgttggtggaaggcctcttacag

SEQ ID NO: 192380 - DNA, 810 bp, Gossypium hirsutum
atcagtctcttaaaagagcaatacgaaaccaaaagcaaagaagcaaagtctcacactttggcagagaaaaaacaaaaacaaaaacctaaaaacccaaagttcataatggatgtaattaaaacccagcaaatttcatctcgacccatagagaaggtaatagttcatcctttggttcttttaagtatcgtcgataactacaatcgcgtcgctaaagacacgcgcaagcgcgtcgtcggagtcctccttggttcttccttcaaaggcaccgtcgatgtctccaacagctacgcagtgcctttcgaggaagatgagaaggacccgagcatatggtttctcgaccacaactaccatgaatcaatgttttcgatgttcaagaggattaatgccaaggagcatgttgttggttggtatagtaccggcccaaagttgcgggaaaatgacctagacattcatagattgttccacaactatgtcccgaatcctgtcttggtcatcatcgatgtccaacctaaggagttgggtatccctactaaggcctactatgatgttgaagaggttaaggagaatgccactcaaaagagccaaaagattttcgttcatgttccttcagaaattgctgctcatgaagttgaagagatcggagttgagcacttgctaagggatgtaaaagatacaaccattagtacactcgcaactgaggtaactggaaaactcacagctttggagggtttagatgcaaggttaaaaagagatacgttcttaccttgacctttgtatcgatgagaagcttccactgaatcatgaaatact

SEQ ID NO: 192381 - DNA, 727 bp, Gossypium hirsutum
cgaagctgctgctcctagaattttgcatagagatgtaaaatcgacgaatattcttcttgataagaactgtagagcaaaaattactgatcttggtatggccaaacgtttaagagctgatggacttcccagctgttcgagttctccagcgagaatgcagggaacctttggctattttgccccagaatatgcaattgttggaaaagcctcacctatgtctgatgtttttagttttggtgtagttcttctggaactgatcactggtcggcaacccatccacaaatcaaacaataaagaagaaagtcttgtcatttgggctacccctcgtttacaagatagtaagcgagtgacctcggagttacctgacacacgtttgaaagggaattttccggaagaagagatgcagataatggcttacctagcaaaagagtgcttgctgttggaccccgatgctcgaccaacaatgagcgaggttgtgcaaatcctctcaactattgctccagataaattgaaacgaagaagtattcctgtaaacttttaccagatgccatccgcctacaaaacgaataatgaagcttttctcgaaagacatcaaaccgtaatcgaggatttatatgacgcagaggaacacatgccaagtacatcgaagtcagcagagagctcgcggccatcaagcatgaatgatattagaatcgccggcaaacaaatagttacctgcctgcgagtgcat

SEQ ID NO: 192382 - DNA, 903 bp, Gossypium hirsutum
cccacgcgtccgcccacgcgtccggtgatccgaccctctcatcatcacattcactttatttaggcttcctattttttttcttttttcttttttttgtataagtctcaaagaaacttagaccccttcgtattctccgctcataccccaaatccccataccccttctgttcaacagcaaagatggcaactgtgcgggttacctcctctagtatcgttcaagcttcaatcccgaaccgattcacgagtgccattgtcaaggccccgacttctcttggatcttttaagaacatctccaaatcttttggcttgaaatgttcctccaatcacaaaacatttatggcagcttataagattaagcttgtaggaccggatggtgaggtgagcgagtttgaagcccctgacgatcaatacattttagatgcagccgaggaagcaggagttgaactgccatactcttgccgagctggagcttgctccacatgtgccgggaagattgtgtcgggttcagttgatcaatcggacggatccttccttgacgaaaaacaaattgccgatggttacctgctgacttgcgtttcgtacccgacctcagattgtgagatccacactcacaaggaagctgatctttactaggtattttatggtttgaaatcagtagaatctatctaaaataccccagaaatttcatctgaatttgttggaaaataaagggtaaatgactaaatgtttatcagggacaatttgttgcttaatatgcttagtgtttgctctaaagtttgtagctgaaattagggtttcaataatttttgtggatttgccatacaaaatatataccaatattgtcttttatgatctaaattggtttcaaaaacgaatcttcaaagtatcattgctcatgttgtta

SEQ ID NO: 192383 - DNA, 440 bp, Gossypium hirsutum
cgatttagatgttaatcaagcaatatcaatagggacagatgttgtgcagtttaatgaaacaattgaagatattcaaatacaacatggatatgaatgcacacaaggagatccctcaaccagttctgaattacatgcagatgctgatcgtggctccaaggatgttgaggaagaaacaatgcagcagcttaaaactgcaacatttgagagtgagactagtgaccaaccaatgaaaaaccatctatcattatcttcagagcttaatgatattgaggaagataaagttccggatacaccgacttccatcgacagtctccatctgttgcacaagaaattgttattgcttgacagaaaagaatccggaaccgaagattccttggatggaagtgttttcagtgacattgagggtggtgatggggtactgactgttgacaagttgaaat

SEQ ID NO: 192384 - DNA, 1074 bp, Gossypium hirsutum
caggacccgacccggtaggatcaagtaggtcaagagaattttcctcactcagcttagcgtacatccttgtcctcaagtctctcccggattccactctctccattgcaggttcctcaaacgcattattgctttcccagagctcaaacttactgagtccggaccgagtcggtgtacgagttggagtgagaggagagccgggtcggagcatggagctccttggagaaacaaaacatgatccccgagaacaagtagttcccattttagctttaccaatctgtagattacgtacggaagaggtgagttcacttaccgagttaaatgagccgctcggcgacgtaggtggtgagtcagaaggtggggatattggaggcgaagccaaaatggaagttggtgaagaaacatagtctaaacgatagcggataggcgagccaaagtaatccatatcacttgacccggacccggacccggacccattccctttcggactctgctggggtaagacccgtagttgctccggcgtgtgagcaaaaaaacaaaccctccgtttacaacaagtaccgtccttgcatggctgagtccggtaacgagttgggtggagccaacactcaaacacgccatgagcgaactcacacgaatcgccttttttacagtttcctttgcggaaatccgggcaagcggatccagagtaatggaacttcctcggatccctccgccgagccttctccccagggtgggcgtacggacactcggtccagtcatgtgacctgccacgagcacacctcctcaccttgaactcgtacatacggaaatgatcgcacgagaatgcatcgatgatgtgtacgtcggagtcgtcactaagggtgtcgggctcgagatcgttcgaggggaggtaacggcggagcgccgtaaggtattctacgggacaagggctgcagggtgcattgcagttaaagccgacagccagaaagttatccgccgaatcatttaacggttcccagtcggggatattgacggtggggaagggtcgtgtaatgggttttctgatcatcatattttggacatccttcgttctgc

SEQ ID NO: 192385 - DNA, 531 bp, Gossypium hirsutum
caaaaatgatgatcggagaaccaacacgaccaaatcccaccgttaaaatcccggcgtgggacccactcaatgatccgacgtctaattattcttccgttaattataactgcaatgcgccgtccagtccttgtcccgtcgattacctctcatcgctccaccgttacctcccgtcaaacgatttcgagtcgtccgactctctgagtgaggattcggattttcctgttgacgcgttctcgtgtgaccatttccgtatgtatgagttcaaagtgaggaggtgtgctcgtggcaggtcacatgactggactgagtgtccgtacgctcaccccggggagaaagcccggaggagagacccgaggaagtttcattactcgggtacagcttgccctgatttccgtaaaggaatctgcaaaaaacgcgattcgtgtcagttcgctcatggtgttttcgagtgttggctgcacccatcacggtaccggactcagccgtgtaaggatggtaccagttgctacaggagggtctgttttttcgctc

SEQ ID NO: 192386 - DNA, 1008 bp, Gossypium hirsutum
ccaaccaaataatgctggaaatctgattgatagaattggtatatgacgttacattttttaaatgagaacaaaaaatccaatttcacgcgcaaatttcaacaccaaaaccataataaagaattcatcaaaatggaaaacctttatccctcgtctcaaaacgtccatttccagatcttgatacggagatcaaccttacatttggcgccggagacattggccgccgccggcaacttacctttcgggacaacccctttaatcccatcgcacgtaattctaatcccaactttcttgctcatcaatccacccatttttgctgtcactttagtatccatctcaactttcaacgacactccattccctgtcttcagttccggtctcaagttgttcaccgtctccgcgtccaaatccgacgacgacgccaccgtaacccccctgaaagtcgactcctctttgccgtcgctgacgaatgccggcaacgttccgttccctatcagaacatcgccattgctggtcacacatgaaatgacgaatgggtcgtacgagaaggagagatgagagttggggtttttggaagaaagggttaagttgaaaagggttgaaagatgggaagaggaggagtcgccggcggttttgagcttcaagcggtggatacggagggaagcgagggtgaatgaagggcggtgagggcggtaaaggacgtaaaggacggtgccagttatggctactaaaagggcgagcacgaggactatgaggatgatccagaaacagcagcagcaacagtagttgcgccgtggacggtagttgcgacgtctgttatggggctgtggacggtagggtaggcgggcggtggggttaatgaggtgggattttgtagttccgccgttggttgtggtggtggtggtggtggtagtagtagtaggagctgctgatccaccaggggcagcggtggcggtgggtttggaggaagggaatactttgtccgccattgtcaaaaaccggacgcgaggg

SEQ ID NO: 192387 - DNA, 410 bp, Gossypium hirsutum
aaatgaaataattaaaataattgctgcctaaggtatcattaagtctccaaatggtgaacaatgggataagtcaaacaaacttaggatcatgccttcccatttttaccttaatttgctacgaaaaaagctttcaacatcctaacaggaatgtcgaatagattaaatcacccctaaaaagttgcattttgcttatattatctcacaaaatgaagagcaatccatcctaccataaagaacttaaaagaatacgaattcagtaccgtacattttggctgtgcaataactcaaccacagcagacactactccctttccttcaacagatatatcaaatccaggttcttcaacctttctgttcaaaagcttgtcaagttccccacgcagtttccgtatcaagtccagtacactcttc

SEQ ID NO: 192388 - DNA, 435 bp, Gossypium hirsutum
cggcacgaggtttttttttttttttttttaaaaatgccttgcataatgactgaaaatgttacaaagtccaacaataacaagcttacacactgtgaaacgtacgtatgaagtaagaaaaaacaaatttgggtgaaaaatgaaaagcagaaacagaagaaatacaattagactgcacctttaattaaatttatgtgacttgggaacagtttcttccctcaaagtgtgttattgatggaaactacagcacaaccctggagacagctcgtgttgagacctgaacagtactttcgctcaagcatcaccactgaaaccctctcatgctaatgtcttcaatgtatttggcatgccatccgcggcattgccacttttttacaagatgctctccaacacagtaatcaaagcaaattttttatgattaaaaacctatactttctg

SEQ ID NO: 192389 - DNA, 723 bp, Gossypium hirsutum
gagattttacagcaatttgattgggaagttccagattgggtcattgttcccggtggaaatcttgggaatatttatgctttttacaaaggattttcaatgtgcaaagagttgggacttgttgataagattccaaggttggtctgcgcccaagctgcgaatgcgaatccgttgtatttgtatttcaagtctggttggaaagactttcagcctgtgaaagcgaaaacaacatttgcctctgccatccagattggtgatccagtttccattgatagagcagtatatgccttgaagaattcaaatgggattgttgaggaagccaaagacgaagagttaatggatgccatggcacaagctgattccactgggatgtttacttgcccacatacaggggtggcattgactgcactgaataagcttaggagaagtggggttattggtcctactgataggacagtggtggtgagtacagcccatgggttgaaatttacacacagtaagattgattatcactctaagaatatcaaggacatggcttgcagattggcaaaccctcctgtgcaagtcactgcagatttcgggtcggtaatggatgttttgaagaagtatttattaagtaaatctcattaacttgattggcaaacccgaatttcgggtcggtaatggatgttttgaacaagtatttatcaagtaaagctcattaagccgattaatatgagcatgatc

SEQ ID NO: 192390 - DNA, 499 bp, Gossypium hirsutum
tcctctcgtacggactactagaaccctaaccaaaaacaagactcttcctgaaagaaacgcaggtcttgaatttgtttgcttggggcttgtaaagaaggagaagaaaaagatggcagatgatagcacagctacctgcgtagatatcctcttagccatcattttgcctcctctcggtgtcttcctcaagtttggttgccaggtggagttctggatatgtcttgtactcaccctgtttgggtacatccctggtattatttatgctatctatgccatcaccaagtagtcctctaatcccgtccttctcatctgtggagatttggagtaggattctggttttgtttgaatatgtgtcggttatagtattttatttcaattaatattttgtctgttaatttgatggtgatgtaaagcttgttgttatgttatgatgatgatttatattgtggggaggggggggggtgtcccagggtcatgttacgtttgtgtcgatctactgatc

SEQ ID NO: 192391 - DNA, 897 bp, Gossypium hirsutum
gtgcatcctaggagaagaaagcagagaagaagaaacaaagatgagcagcatcggaactggttacgatctctcagtcaccactttctctcccgacggccgcgttttccagatcgagtacgccgccaaagccgtcgataacagcggaactgtgattggaattaaatgcaaagatgggatcgttatgggagtggagaagctgatagcatcaaagatgatgttacctggttctaatcgtagaatccactcggttcatcgtcattccggcatggcagtggctggattagcagctgacgggagacaaattgtggcccgtgctaaatctgaagctactaattaccaaagtgtgtatggtgaacccattcctgtcaaagaacttgctgaacgtgttgcaagttatgtgcatttatgcaccctttactggtggctcaggccctttggctgtgggataattctcggaggttatgacagagatggtccccaattatacatggttgaaccatctggcatctcttatagatactttggtgctgcaattgggaagggaaaacaagctgccaaaacagaaattgaaaagttgaatctgtccgaaatgacatgcagagaaggggttattgaagtagccaaaatcatctacaaggtacatgatgaagcaaaggataaggcctttgaacttgagatgagttgggtctgcgatgaatcaaagcaacaacatcaaaaggttcctgatgacctgttagaggaagccaaggttgctgctaggactgcactagaagagatggatgctgattaaattgtcagtgaagccagaatagtctttgctattgatattttcatcttcatgaatccccattgttatggtttaaactttcctcgtatcattttcatataagatccctg

SEQ ID NO: 192392 - DNA, 688 bp, Gossypium hirsutum
gggctgcaaaaatcagcaccagactgtctctatatttctcctcagatctctctgtttttctttcacccaaataaagcattccctcttttttctctccatttctctctcattttccctcttgccaaacagggttaaaaggtcaagaaaatgcattctatttgctttcaagctactggagttcctggatcgaattacattttcgattcttgttctcctgctttagctatatccaagccgatcaatctccgtttctgcggacttagaaaggaagccttcggtttctctggtttgactcactcgagttctggccgagttcatttctcgagtcgtggacattctaagaaagtctctgcttccgctgaaagcaacggaagtcctccaaaatcgttcgattatgatttgattatcatcggtgccggcgtcggtggacatggagctgcgttgcatgccgtcgagaagggattgaaaactgctattatcgaaggagatgtggtgggaggaacgtgtgtgaacagaggttgtgttccttcgaaagctctcttggctgtgagtggtaaaatgcgtgaactccagagtgagcatcacatgaaggctttgggtttgcaggtgtctgctgccgggtatgacaaacagggagttgctgaccatgcaaataatcttgcttcgaagattcgaagcaatttgacta

SEQ ID NO: 192393 - DNA, 652 bp, Gossypium hirsutum
cggacgcgtcgagtttcaagctttcttattaccttccctccattcttctgtaagttcattagttgccgcttgggagaaaatgggaccaggtgggccaggagggccaccggggccaggtggaccaggagggccaggagggcctccggggccaggagggccaggatggggcggtcctccacccggaccaggagggccaccaggatggggcggtcctccacccggaccaggagggccaccgggatgggggggtcctcctcccggaccagggggaccaccggggtggggcggccctccggtcggaccagggttttttggtggcttctgtgatgtaattggtgcttgtgtcaacttcctgtgctgctgctggctgtttcgagattgttttggtggtccaatgggtcctccagggccacctggacctccaccaccatagttacatgctttcttgctccttcataaatagaccttctatctgggtttgaacttagctatctaattacaatatttatgtaagaattgtttgctttttagtagtagaaattaatatgaaggaaatctgttgagtgattatttttctgtctcaaagagcgattcatcgataaatatataaaggcatgatctattgatgtgatgcgttaaagatgggtagatc

SEQ ID NO: 192394 - DNA, 455 bp, Gossypium hirsutum
cccacgcgtccgcccacgcgtccgctccattgtcaagtgtaagttcaccagttgttgctagggagaaatcaaaatggggccaggtggaccaggaggacctccgggatggggcggtcctcctcccggaccgggtttttccggtggcatttgtgacttcattggttcttgtttgagctttctgtgttgctgctggctgcttggagactgttttggtggtccaatgggtccaccagggccacctggaccacctggatttggacctccaccaccctagttatatgtctaccatcttcatattccaacacaaaaattggaggcttttctagcttctatctgggtttcaacttagctatctaaaatacatatttatgtaataattgtttgcatttttagtagaatttatgtttattgaaattaatctcaataaattgatctttcaatcttttttctttgct

SEQ ID NO: 192395 - DNA, 714 bp, Gossypium hirsutum
  unsure (1)..(714): unsure at all n locations
cggacgcgtgggtccggacgcgtgggaaaaaaaaatcctctctcgtttcttctgaaacggaagagaggaaaagaaaaattaaaaggaaaaaaaaaatcattgcaatttcctcctccttctctctgtccctgcaacagccgttcgacgatctataaaccttctctcctcaggattttagggttttttttttcattttctactgtaaactccaaaatgcataaactgggcagaggccatcgggacaaagtccagcagttcatgactataactggagcgagtgaaaaacttgctcttcaagctttgaaggcgggtgattggcatcttgaaggagcttttgattttttctatggccagcagtctcatattaaaagttataccagatactacatatttggaagaactttataaaagatataaagatccttacacagatatgatactgcctgatggtattactcttctatgcaacgacctgcaggtggatccccaagatattgttatgttagttgtttcatggcacatgaaggcctccaccatgtgtgaatattccaaggaggaatttttcactgggttgcaggcactanggatagattctttggagaagtttcgtgagaggataccatttatgcgttctgagctgaaagatgaacaaaagttccgtgagatatataactttgcatttggctgggcaaaaaaaaaaggtcagatatcttt

SEQ ID NO: 192396 - DNA, 993 bp, Gossypium hirsutum
aaaaccctaaaatcttctcgagctgccgcagctgagatccgacactccacatcgcagcaatgggtgaggaagtaaaggctttggttcctgagtcactgttgaagaagaacaagaggaatgaagaatgggagcttgccaaaaagcaggagctcgaagccgccaagaagaagaaagtcgagaaccggaagttgattttcaacagggctaagcaatatgcaaaggagtacgaggctcaggaaaaagagttgattcaattgaagcgggaggcaaagttgaaaggaggattctatgttgatccagaagctaagcttttgttcattgttagaatccgcggtatcaatgccatgcacccaaggaccagaaagatcttgcagctcctacgtttgagacagattttcaatggtgtttttcttaaagtgaacaaggcaacaatgaacatgcttcaccttgttgaaccttatgtgacttatggatacccgaatctcaagagtgtgagggaactgatttacaaaagaggttttggaaagttgaacaagcagcgagttgccttgaccgacaacgcaattgttgagcaggcactaggcaagttcggcatcatttgtgttgaagatctcatccatgagatcatgactgtgggacctcatttcaaggaagccaacaacttcctttggccatttaagctcaaggcaccattgggtggtctgaagaagaagaggaaccattatgtcgaaggaggagatgccggcaaccgtgagaattacatcaacgagctaattcggagaatgaattagacgttggctttatttgttaattcagtatttttggtttgttttgaaggatcctgatatgatttcttttggccttttagaaacagttttgtttaaaaggatgaatatttttcacggtgtttaccataatcttcttaatgaactctgtcaaagttttgttgcttaaaaaaaaaaaaaaaaaaaaattctgcggtcgacgcggccg

SEQ ID NO: 192397 - DNA, 866 bp, Gossypium hirsutum
  unsure (1)..(866): unsure at all n locations
ccgttccggaaanacccgggcggcccaagccttccgaaagcccttgttaactctccagcagccgcttccaagtaagagatgggtgaggaggctaaggctgtggttcccgagtcactattgaagaagaataagaggaatgaagaatgggaacttgctaaaaagcaggagcttgaagtgccaaagaagaagaaagttgagaaccgcaagctgattttctctagagccaagcagtatgcaaaggagtatgaggctcaggaaaaggagttgattcaattgaagcgcgaggccaagttgaaaggagggttttatgttgatccggaagctaagcttttgttcatcattcgaattcgaggtattaatgccatgcacccaaggacaagaaagatcttgcagctcttgcgtctgagacagattttcaatggtgtttttcttaaagtgaacaaggcaacaatgaacatgctttaccttgttgaaccttacgtgacttacggataccctaatctcaagagtgtgaaggaattgatttacaaacgaggtttcgggaagttgaataagcagagagtcgctttgactgacaatgcaatcgttgagcaggcgcttggcaaatacgggatcatctgtgtcgaagatctcatccatgagatcatgacagtgggtcctcattttaaagaggccaataacttcctttggcctttcaagttgaaggcgccgttgggtggtttgaagaaagaagaggaaccattacgtcgaatgaagagatgccggtaaccgggagaattatatcaacgagctgattagaagaatgaattaaaaattggtatttttttcggtgttaaatggatcgatttcgtatttaaatttaattt

SEQ ID NO: 192398 - DNA, 404 bp, Gossypium hirsutum
atttccggacaccgctagatcctcttcatctgccgcatctcagtacctccgcagttcactgagaaatggatgaggaagttaaggctgtggttcctgagtcactcttgaagaaacagaagagggctgaagaatgggagcttgccaaaaagcaggagcttgaagttgcaaagaagaagaaagtcgagaaccgcaagctgatttacactacggctaagcagtatgcaaaggagtacgaggctcacgaaaaagagctgattcacttgaagcgggaggcaaagttgaaaggaggattctatgtagatccagacgctaaactcttgttcatcatccgaacccgtggtttcaatgccaagcacccgagaacaagaaagatcttgcagctattgcgtttgagacagattttc

SEQ ID NO: 192399 - DNA, 645 bp, Gossypium hirsutum
caaaatactagccagaaaaaaaaagttaattaaaaaaaaaaaaaaaaaaaaaaacccaggtgccaccacgatcaccaccagccgttttatttcagaggagtgaaaacgacgccgcatttgaaaccttttctttactcttcaaccaagctgctgctcattcatccctttctctctctttttggtttcattattaaacacaccaaaaaaaagaatttcaaattattggttttaaggggatcgtatttatgatcacgtcgtagctctctattccacgccattgttcttctgtttaactcgttttgaggaggttattgtttgatctagggaagaaatggttgtttctgggccaattacgcctggacaggtgtcttttcttttaggaattcttcctgttttcgttgcatggatatattcagagttcctagaatacaagagatctgcatctcattctaaagtccatgcagacaataatctggttgaatcaggagatgagaaaattaaagaagatgaccgggctcttttgcttgacggaggtctcactagatcaacatctgctaaagtccatagttcaaccatcaaaacaaacttgattaggtttttgactatggaagactcttttctgttggaaaatcgagcaattttgag

SEQ ID NO: 192400 - DNA, 627 bp, Gossypium hirsutum
  unsure (1)..(627): unsure at all n locations
catttttatagtttgttgaaatggtttaaggctttaaggagagattcaaaatcctactctccggggaaaagagagagataggcatactcttccatgggtctttgcacctccaaaccctccccaaacccttctgattctacaaatgcctctatcaatacccggaataacgatatccaccgcaagcctaactctgtttcggcttctcctttacctgatggtgtaaactccaaggaagatcaaggtaaacaaggagaagaagaaaaagaaagctccaattccaacaatgaaggcaagaaatcgccgtttttcccgttttatagtcccagtccagctcaatacttgttttccaaaaagtctccggcgagatcttcaaccaattccactccaaaacggtttttcaggaggccattccctccgccgtctccggcgaagcatattagggcagtgcttgcgcggaggcacgggtctgtgaagccgaatgaggccgcgatcccggaaggaagcgacgcaaaggcagcgggagctaccggtaccggactggataagagcttcggcttctcgaagcacttcgggagcaaatatgagctcggagaacaaatangaagagggcatttcggttatacttgt

SEQ ID NO: 192401 - DNA, 722 bp, Gossypium hirsutum
  unsure (1)..(722): unsure at all n locations
tttggctttattgtgatggatggcaatggaactctttgtgggacattaagtggtaacaccagggaggtacttcataagttcagtgttgatcttccaaagaagcatgggagaggtggacaatcagcccttcgttttgctcgacttcgaatggaaaagcgccacaactatgtgaggaagacagctgaacttgctactcaattttttatcaacccttccaccagccagcctaatgtatctggattaatattggctggatcagctgatttcaaaactgagctgagtcaatctgatatgtttgatcagcggcttcaggctaagattctgaatgtggttgatgtctcttatggaggagagaatggtttcaaccaggcaattgagctttcctctgaaatactggcgaatgtgaaattcatacaggagaagcgcttaatagggaaatactttgaggagatcagtcaagatactgggaagtatgttttcggagtggatgacacactgaaggccttggagatgggagccgttgagacacttatagtgtgggaaaatctggacataaatcggtatcagctgaagaatagcactactggtgaaattaccataaaacatttaaacaaggagcaggaagccaatgagagcaacttccgcgatccagatcacttgcgattgagttgtgagagatcactgtnagtgttgctatgatacagcgttgctgagcttagtcc

SEQ ID NO: 192402 - DNA, 612 bp, Gossypium hirsutum
  unsure (1)..(612): unsure at all n locations
attggctggatcagctgatttcaaaactgagctgagtcaatctgatatgtttgatcagcggcttcaggctaagattctgaatgtggttgatgtctcttatggaggagagaatggtttcaaccaggcaattgagctttcctctgaaatactggcgaatgtgaaattcatacaggagaagcgcttaatagggaaatactttgaggagatcagtcaagatactgggaagtatgttttcggagtggatgacacactgaaggccttggagatgggagccgttgagacacttatagtgtgggaaaatctggacataaatcggtatcagctgaagaatagcactactggtgaaattaccataaaacatttaaacaaggagcaggaagccaatgagagcaacttccgcgatccagtcagctctgcagatctggaggttgttgagaagatgccactgttagagtggttggctaatgaatacaggcagtttggctgtagccttgagttcgtaccaacaatccaggatggttctcagtctgccgtggtttgcggtatggagcatcctcgatccaacttactgcgacattgaggatttctgtgagagttatgagatttgatacn

SEQ ID NO: 192403 - DNA, 845 bp, Gossypium hirsutum
gggtcgcccacgcgtccgttaacaatccctaatttattgtcagtacgaaaagaaacctttgattatttaattcccgttttctaatctttttgggaaatcggtagcaaaaaaatgtcgtcgtcggggaggaagatcacccttaagagctcggacggcgaatcattcgaggttgatgaagcggtggcgttggagtcgcagacgattaagcatatgatcgaggacgattgcgctgataacgggataccgttgcctaatgttacgagcaagatcttagcgaaggtgatcgagtactgcaagaaacacgtcgaggctcctaagacagacgatcgatccgccgatgacgagctcaagagttgggacgctgactttgtcaaggtcgatcaagccactctctttgatctcattctggcagcgaactatttgaacatcaagggcttgctggatctcacttgccaaactgttgctgacatgatcaagggaaagaccccagaagagatcaggaagactttcaatatcaagaatgacttcaccccggaagaggaagaagaggttcgtcgggagaaccagtgggcattcgaatgaagggtcaatttcgagtgccggttcaattgtatcaaactcatctatatataaaaatgtagtttgttgctctgacttttcatttgtactcttggatattctgtgagctcttttgaaactcttcaaagtgtcttcttctatgttctttgcctgtcttcactaaaaaccagtctgttgtatccaagtaatgtcctttaatcgtggtctgtgatatgaatgagaatggttgtctaataaactgaagagaaccactgaaagaaccaaaa

SEQ ID NO: 192404 - DNA, 595 bp, Gossypium hirsutum
cacgcgtccgcccactcgttcgcctgattatttttacatattccttgttgtcgtaacaatcacgcgagaatgtaggcagttttaaattttatcaaatatataaatcggatctctctgtcgttgaaaagaaatttcagaaatctgtaaaagcgaaggagagaaatggcgagcggaggaaaagtgtcttttaaagtcactcttacctctgatcctaagctccctttcaaagtgtttagcgtgcctgaagcagccccttttacagccgtcttgaaattcgcagccgaggaattcaaagtccctcctcaaaccagtgctatcatcaccaatgatggtgtgggaatcaatcctcagcaaagtgcaggaaatgtgttcctcaaacatggatcggaacttcgcctgattccccgtgacagggtgggagccttttgaaataacaaaaacttcatttgttatctctgagtgagaagactggttatgactttgtttggttatggatcctttgttttggtatgtatgtttaaacttttacttgatgtagaacatgacggatagcaacttccttttttcctacagaaaatatataagagcaatataa

SEQ ID NO: 192405 - DNA, 650 bp, Gossypium hirsutum
ggctcttgcttatagaacatagccgaaagcaaaacccaagcctactcaaagcaaagaaaaacacagcaatggagagaagcaaggcgatgatgatggcagtggcagctgtcggattggctttagtgctaatggtgcctcaggccgatgctacaaggtacattgttggagggggaggcatcggttggactactaatgtcaattacactgtctgggctcgaggaaagcacttctacaatggcgactggctttattttgtatatgatcggaaccagatgaatgtgctagaggtgaacaagactgactacgagtcatgcaatgctgatcatcctcttcacaactggacaaccggagctggaagggatgtggttccgcttaatgtgactcgccactactatttcattagtggcaaaggattctgctacggcggcatgaagctagcagtgcgtgttgagaaccctcctccgcctccaaaagctgctccattgaacgaaaagagtggctcctcaccaagttccattgtctacagaggccagcttgttttaccagctgctttcgccattgccgcactgtgggatgcattcgttcgaatctggtagtttcgggatcgagatcgaacctggacaattccttcatcaattgtgaaacgaatc

SEQ ID NO: 192406 - DNA, 1311 bp, Gossypium hirsutum
atcactaaaattaagttaaatttcatgctacaaaaatcactaaaattaagttcagatttcatgctacaaagcaaatgcacaacatgcagtctcgtggggaaacagataattcaaacaggcatagataaagctcaatcaaatgataaaaacatattaacccacaatttcaacagattgaaaacctttctccatcgacgccttcacagcattcaagaacaattgtgtcttccggctgattgtcggccactttttatccggttgtgctccattctttttaatatttgcaaccaagctggcaaactctctcaccatgcaggctttctgaggtagatctacagtgacagtgtgctcactcggaagttgcacccatccggttacaagttcgttaaattcaggttttgcggatgtagtatatgatgcctggtgttcttggtaaggaatgatgaaatctgttagatgtagtgttccccaatgttcttatagcagtgagattcattgtcaaatttgataagaaagaacaatggaaggttgcaattttgccatctgcccaaagtagtgacgctccacactctagtagtacacctgcttcatttagaactggatttctgaaggctgtaacagttttcggtagctcatagtcagctgcccacaagattgacctgatgccataccacccggcatcaccgagagctccaagagcatcaagatctggcttcacacgaatatcattcttgagaaaatccggatcggcaaaaaatgtgaagcaactgtttaccgttctaagctgaccaaactgctccttgtcgtttaaaaactgcttcattttatgggttctgggattatgcacccacatggtaccgtccataatctgaaccccgttttcttcacaagcctttagaatctgatcaaactcggccacgctcaaggcgacgggtttctccgtgagcagatgcttctttttctgagccgtcaaaacagcccatttgaggtggaggctagtgggtaaaggcaaataaacggcgtcgatgtcggggtcgtcaagaagggactcgtaggagccgtagatcttggtgtcaggtgggaagccattagccttggcgaaattggcggctttgtcgaaggagcggctggcaacggcggagacagtggcgttaggagcaagctggatagctcgagaaactttgcgggctatctcggcacacccaatgattccgaatctgatcggaataccagccatcgtttggctatcaggaagagagagatgatcagaaggatactatttgtagtcagtgtaccgcaacaccgatattg

SEQ ID NO: 192407 - DNA, 1397 bp, Gossypium hirsutum
  unsure (1)..(1397): unsure at all n locations
gatcccccgggctgcaggaattctgcacgaggacagtatatatctccactgtggagatgaaaagagagacgactacaataaagagctcagcggagaagatgaacaaagagacagccttgaaaataaataactcagctgagaagatgaagaaagaaacatcattaaatagctcagctgagaagatgagacaagagacagctgcagaaaatggttcagctgaaaagatgaagaaagagacagccttgacagtaaatatctcagctgagaaagatgaacaaagagacagccttgacaataaataactcagctgagaagatgaacaaagagatggccaggacagtgaatagctcagctgagaagatgagacaagagacagctacagtaaatggctcggctgagaagatgaagaaagagacggccttgacagtaaagagctcgaacgagaaggtgaagaaagaaacagccttgacagtaaataactcggctgagaaggttaagaaagagatcgcttcaacagtgaatggctcagctgagaagatgaaaaaagagaccactgtggcagtttcgaaatcacctgacattgaaactatgctggggccattagggatgaatgagacatcagatttatttcatgcagatccttttgttgctgattcaaagccttcgatagatagtatcgttaaggatgaaaataatcccatagcaaacgtggagctgaacaggaagggcgattcaaccaacaatgagaatcagaagtctggcaggaaagcttctaatcctgcaaaacaagatcatactgagaatgggcctcaaatcagtcctgcactgccaagctacatggcagcaactgaatctgccaaggctaagctgagactgcaaggctctcctcgatttanccaggatggaggtgaaaaacataacctcgctcgtcgccagtccctgccaatttcagccaatagtaaaatccactcacagtcaccaagggcgcggagactggttcatgcagggaaggaagggagcaaaagcgacagaccactgtcatccagagacagaaatgccaaggcgactcaagtagagtggaggaggtgatcttattgagatttgaggagttgttggcactattaggttcaagattcatatgctttgtggtgtaaattaatagaacttgctttgaaactgaaaccgggtcgataggatgtgtgcgcgggttgagtgcctctgaaaattcaatgtttctcagtgtttgtgagtgaatttgagtgtaaatcaatagattttgaactttcaaacatgccgcaaaataatcatcgttgtgataaattgcttcattccgtttgtttcttctaaacttccccccgctatttttagttaaaaaaaaaaaaaaaaaaaaactcgag

SEQ ID NO: 192408 - DNA, 561 bp, Gossypium hirsutum
gaaccgcttttaagtacaggcgtgggaatacgacgtgaacagggatgaatggaccgagttggctcggatgagtcaggagcgagatgagtgtcaagggatggtgattgggtcggaattctgggtggtgagcggatatagaacggataatcaaaggattcgaggggagcgcggagttgatggatttgaggacgggcgaatggagacgaagtgaggaagcttggaaggcgagccagtgtcctagatcttgcgtgggtgttgggaaagagcagaaactcttctactggggcgactgtgactcggcgatacgagtgggagcatgtgctgtacctttgggagaacgcacacttgtgtctggatcagcttaccaaggtggtccacaggggttctttttggtggaaggtcacggtgaaagatttaagagaatcgatgttccaccccagttttctgggtttgtacaatctggttgttccctggatatctaattccttttgtaatgaagttggtcggctgagctgatggccgctttatgatgaagtaaatctaagatcaggaaggataata

SEQ ID NO: 192409 - DNA, 635 bp, Gossypium hirsutum
ctcagaagcgccattccttcgtctctgcctcctctcagagtctctaatagtgcccccgtgacaccaccactttcttctccaacctccagaaatcctaagcccattcccaactgggaggcccttgccaaagagtccatggcctcttttaactaccctttttatgctgtctctgcaccagctagtccaacccatcgtcatttccatgcccctgctactatacccgaatgtgatgaatcagacacgtccacagttgaatctggtcaatggataagctttcaaaagtttgcaccttctacatctcaagtgccgacttcgccaactttctttaatcttgtgaaacctttgcctccccaaagtttgcccaccggtttgggcgtaaaagataaaggaagaggtgcagagtttgagtttgagagtggacaggtgaaaccatgggaaggagagaggattcatgacataggaatggatgatctggagctcacgctgggaagcggaaagcctcagtgttaaaccgagcctaatggtgtcgccaaagcatgttaaaaccaaagacaaaaaaaagctcacagttctgttcttcatctgctctgttctgtcttcttttatatcttttttggtttttttttggtcttttt

SEQ ID NO: 192410 - DNA, 1355 bp, Gossypium hirsutum
  unsure (1)..(1355): unsure at all n locations
cccacgcgtccgcccacgcgtccgcccacgctttctcccacgcgtccgaacagaagaaaaacttaatcatggctcggttgacgttggtgtcctccatcatccttctgctatgctccgtcgccgccggatcaactttcgaggactccaaccccatccagatggtatccgatggcctcagcggcttcgaatcctccgttcttcgtgtcatcggtcacactcgtcatgctctctccttcgcccgttttgcatacaagcatgggaagaggtatgaaaacgtggaggagatgaagctacggtttcagattttcaaaggcaacttggatttaatcagatccactaacaagaagggactgccttacactcttgctgtcaatcagtttgctgattggagctgggaagagttccagaaacacagattgggggctgctcaaaactgctctgctaccacaaagggcaatcaccagctcactgatgtcgtccttcctgaatcgaaagactggagggaatcgggcatagttagcccggtcaaaaatcagggctcctgtggatcttgctggacattcagtaccactggagctcttgaggcagcttaccatcaggcatttgggaaagggatctccctatctgagcagcagcttgtggactgtgctggagcttttaacaacttcggttgcaacggtgggttgccatcccaagcctttgagtacatcaaatataacggcggccttgatacggaggagtcatacccttacactgcaacaaatggtctatgcaaattctcttctgaaaatgttggtgttaaagtccttgactctgtcaacattaccttgggtgctgaagatgaattaaagcatgcagttgccatggtccggcctgttagtgtggcatttgaagttgtcactagtttccgtttttacaaaagtggggtttataccagtaaaacatgtggcagcacacccatggatgtgaaccacgctgttcttgcagttgggtatggagtcgaaaatggcgttccatattggctcattaagaactcatggggtgcagaatggggtgacaatggctacttcaagatggagatgggcaaaaacatgtgcggtgtggcaacttgtgcatcatacccaattgttgcttgatccaatcgatgaaccgttttggatcatgtcatttctgtgttatagaaggcttctagttatggtctacaaatgttgttgtagttgttcggggttatggtctagttgaaaccgatgggttcatgtacaataaggatccaaagacatgtaagatgcaaatctgctgtacacaacaaagacaggtgtaaatttttatgttttaatgcttgtaacaatacanaa

SEQ ID NO: 192411 - DNA, 452 bp, Gossypium hirsutum
aacagccattgggaatcccctgctttaaatttctatattccacaaaaatagcgtaacagagcaagaaacacagagaaaaggaaaaccccataatcatggctcgattaacattggtctcctccatcatccttatgctatgctgcgttgccgcagcatcaactttcgaggattccaaccctattcggatggtatccgacggtctccgtggctacgagtcctctgttcttcgtgtcattggccatacacgtcacgctatctccttcgcccgctttgcttacaagcatggaaggaagtacgagacggtggaggaaatgaagcttcggtttcagattttcaaagagaatttggatttgatccgatccactaacaagaaaggcttatcttacactcttgctgttaatcggtttgctgattggagctgggacgagttccaaaaacacaggcttggagct

SEQ ID NO: 192412 - DNA, 404 bp, Gossypium hirsutum
cccacacatccgcccacactttttttttaatgcaacataattatggctgccttcgcgttaatgtcctccgtcatctttctgctatgctgcctcgcctcagcatcaaccttcgaggacacgaaccccattcagatggtatccgatggtctcgactcctctgttcttcgtgtcatccgtcatactcgtcgtgctatctcctttgctcgctttgcttacaagcatggaaagaggtacgaggatgctgaggagataaagctaccgtttcagattttcaaagataatatggatttaatcagatctactaacaagaagggattgccttattctctatctgtgaatcagtttgctgatttaacatgggatgagtttcgaaaacacaggcttggagctgctcaaaactgctc

SEQ ID NO: 192413 - DNA, 647 bp, Gossypium hirsutum
  unsure (1)..(647): unsure at all n locations
ctgatatgcgtgtgtcagcagaagctagtataaaatctgcaatgcagctgtttattaaattctcggcaggaattgtactagattcactccatgaatctaacagatctcatctcgttgccaagcttgtatttctggaccaactctgtgacatttcactataccttccaagaagctctcttgaggcccatgttccttatgctattctccgttcaatatatagccagtactacgcgaactctcctttgatgccaatggcattattaagtgcttcaccacgccattcacctgctgtatcattggcccatgcgtcccctataatgaggcagccccgtggagattcgactccacagtacagtgctaatgattcaggttatttcaagggttcatcatcacacagccaagagcagctctatgatgctgaaagtgcaaatctacgaggcgttgaaaacaaacatagaaatgttcgccgctccgggcctctggattacagttcaagccgtaaagtcaagtatgaaggatcgtcgtcaggaggtacaggtcccantccgctgccaaggtttgcantatcnaggtctggntccatatcatacaattaggatgaattgatggtccacttcaacaaggaaatatactttactaaattatcc

SEQ ID NO: 192414 - DNA, 335 bp, Gossypium hirsutum
gacgatatgccattgatgcctcaattgtacgtatcatgaagagtcggaaagttctgggtcaccagcagttggttatggagtgtgttgagctattgggccgcatgttcaagccggatttgcaaggccgtttataagcgaattgatgacctcattactcgagactatcttgagagggacaaagataaccccaatacattccggtatttggcatgataacctagtcattatcccgcaatgaagcggtgactggtgccgctgcaaataactcgtagcggctggatatgatcggttcgtgacgaaagtttcatacacataaaaatatgctacttatattc

SEQ ID NO: 192415 - DNA, 536 bp, Gossypium hirsutum
gaaccacaacaataggcgatttacaaatgtatagacaaaaaacacaaacgtagaacttgaatttattaagttatacgtcacgaaattacacacaatgtttttaatagcaaattcagaatgaaactagagcatcaaatcatcccaactatcacaatagaaacaagagacatcagcataatagatgttttaatcccaagacaggactcgataagttcggtttagctcgggtttttaagaaactcatttcttgccactcttcttaagaccagaaccaccaaatgatcccttttgtgatgcctttgctctcagctctctaagggccttctcttcttctttctttttctgaatgttagccaaatcatgctcgtcgtattctttcttctcagctttgggttgcttcaaaggctttgctttgccaccttgcttggaagacataattgagagtttaggatcagggtctgtaatgaaaattcgaagagataaaaagaacctgatgaacacagaaaataaagagccctaaccggacgcgtggacga

SEQ ID NO: 192416 - DNA, 734 bp, Gossypium hirsutum
aaacaccgacaggtcctgcttttcctatgcaaataaaagttcagacacggaatgatatcgtcctaatctcgtacattcaaatcgaaaaacgaaaatgtttctaccgagcccacaattcagcacagttttgacacatttctcaagtctctggagaaaaaagaacttaactcggctagaaatcggctcacacatcgattgttagaaggaatgtagatcttcacttgtcatctttgggttgttcatcttcttctttcttttcttgcggctcagattggctgggcaaagatgctagcaaatcttttacttttggatcgttcgggtcaactcccggaagcgatgaaagaatggatgacataaaagactgatcccccaacaccttgctgacatctgattgagctgacgaatcttttgaaccgtcctgcatagacatctgaagtgccaaggcgaattcctggtcgtcattagttgcctctgacatttgagcatcacctgcagaagaatcagatccggggatattcatcgacaatgcaagggcctgctttagcaaagcgtcatcctcatccattgggtcagaagctttttcagtagcattcattgttgcattctgagaatcggactgtggttgtgcttcctctcctttttcttgtctagtggcttcctcagcagctctcttggcagcagcttcttgccttgacctctcctcttccatggaaacccttagagcaagagccagc

SEQ ID NO: 192417 - DNA, 425 bp, Gossypium hirsutum
cgattttgtcggattatttatatatatttatattcaatagaaatgaataagaaagcactggccattttgatgcgagctagaatgagacctaatcatctcaccaacttcgccctttctcccatttccaatgagttgaatcaaattctgtcaaattctcatggaaaccgatccggtgaaaacggggagcatcatgccatggaacatggaaaagaaacgctcaatcatcaaagatcatttgaggttgtacgagaatcaatgcactccgtgatatcaatgaataaaactgaagttggtgattctgtacttaatgagtttttggaaggttattggagcctttcttttgagaaccggaggaaattattgctcacacttgccaaagagtattatctcaacaaggcacaaattcgtgagcttattaaacaata

SEQ ID NO: 192418 - DNA, 379 bp, Gossypium hirsutum
atattcaaccaaaggacgagatgataaaggggtatcagctagcactgtgggattataattatatcgttggtgattcacatttcatctacaagctggatatcttgcctcatgccattgtaataatgctataccatgccagtgtaaacagtcaaacaacaaatttgttttttcacaacatagctaagcatatgcacaactcttgacattacttgaatgtcaagaaactaaacataaaaatgcaaatgcctatgcagttccttgatccttaaggaacatgtattaacttgagatttagattgagatgctgtttgggattcccttgcctgtgagtccaccttcttttgagtaatctgaagtgttggggaaaagcaatgtgtat

SEQ ID NO: 192419 - DNA, 384 bp, Gossypium hirsutum
cagtcaaaagcgctttttcagttaaacagataataattatgactaggaaagctgccaagtctataagcattattaccaaccctgatcaatggaaacaatcactaacaaaatgctctctccctctctctctcactaattatttaactgagaatcttaatctagctaactacaacacattcacaacatatggtacacaatttcctttgcttcaagcatttcccaagctcaaaattcacaactgacaaagcttcacaagttcttttcttttttcctttgcttcaagatataaaacgtgttcttcatgcaacgcatctacataaggccacctgtatatggattgtacgtttgaaccggcatacctgaacttgaaaggtgtacaagggc

SEQ ID NO: 192420 - DNA, 365 bp, Gossypium hirsutum
agaaacgggggtatgatgctttggtatttaccagctctaactaaaatatcatcatgtaatagaaaaacaactccaattcaagacttctgttaaaaggaaaaaaagaatccgaaacatgtgaagccggcagtcttgaaattctccgtatgtatgttcagtttttttgtgttaacatttgttgtcatccgaaaaggagggggaaaatggcaaaatacatcagtatcacacacacctatagacaaacattcccttttcaatttcttatagatgtagcatttgagtcctcatgcttttgactacctgacacatctcagttcaaatcaataaattaaggcataatgatcttaaataagcggacgcgtggg

SEQ ID NO: 192421 - DNA, 508 bp, Gossypium hirsutum
cccacgtttccgctgactcaaattgttggacttgtcctagtggtacaggatttatgataagaggaaagacttacttaaaagataatgccaaaataatgggttcagatccccttctcaaactaatagctgttgactggttcaaagtcgatacagccacagataaaattgcattgcatccaaggtctctagctcagtctgatgccggaaaaaagcttccatttatccttgtgattaatctcgaggtccctgcgaaaccaaactatagtttggtcctctactatgctgctgaaaggcctgtgaggaaagattctttactgggaaggtttgcggatggaacggatctgtttcgtgatgccagatttaaactgataccaagcattgttgaagggtattggatggtcaagcgtgcaattggaacaaaagcttgcctacttgggaaagctgttacatgcaaatacttcaggcaagacaattttctggagattgacgtggacattgggtcatcatc

SEQ ID NO: 192422 - DNA, 466 bp, Gossypium hirsutum
gaaaagtttatcgccggatacaattgatactaacgaagttgaagatggagaactcaatgaacctcaggttgctacaaatgaagagggtgatgctacagacgaacttctaatgtactcgaacgaggatgaatatgaagaattcaacttacgaattgttcataggaaaaacaggaccggattcgaagaaaacaaggacctgcctattgtgctaaatagtgtcattgctggaagatattacgtaacagaatacctaggttcagctgcttttagtaaggtcgttcaagcgcatgatcttcttacgggaatcgacgtttgtttgaagatcattaaaaatgacaaagattttttcgaccaaagtttggatgaaatcaaacttttaaagcttgttaataagcacgaccccggagatgagtaccacattttgcgcctctatgactacttctatcatcaggagcatcttttcatc

SEQ ID NO: 192423 - DNA, 749 bp, Gossypium hirsutum
cggtcccgaattggagttccgggccagacccacgcgtccgctttgtctctcttaagtcttaccataaaacagagcagagaaggtaaaacccaaagtttgaaaaccatcaaaaatggttcaaaggctcacttaccgtactcgccatagctacgctaccaaatccaatcaacaccgtgtcgttaagacccctggtgggaaattggtctatcagacaactaagaaaagagcaagtgggcctaagtgtcctgtcactggcaagagaattcagggtattcctcacttgagacctgctgaatacaaaaggtctagattgccaaggaaccgccggactgtgaatcgtgcttatggtggtgttttgtcctgcagtgctgttagagagaggataattcgagccttcttggtggaagagcagaaaattgtgaagaaggttctgaagatccagaagtccaaggaaaagcaagcttcaaagagctaagaaattagatgtcgaatcatcatttcaattctgatatgtgatcagcaaggctttggaaagtgccaccaatgacttcagaagattagaggttctctttttctattggcaaatggacttcaatgtttacaatgttttgataattttggattacgttttgatcatcgaatttaaaaaaaaattatggtatgatcgctaatgttattacttttttgtattttgatcattgagtcattaattgtcatttacacagacatgttatatcatcattttagac

SEQ ID NO: 192424 - DNA, 761 bp, Gossypium hirsutum
ataaaatcaaatcaaagtcctaaaaattaaacaaagtccaatccaatcgagacacaaattcatagaaagtaaaactccgacgccatgtccagctccgatcccaacaagctcatctccaaagccgacaaactaacaaagctaagtcttacaaggtggagtgcagattggaaaagtgctactcttttatatgaacaagctgcaaatggatttcgagtttcaaaggattatgagaaagcaaagttggcattcgagaaagcttccaaaggacaagagatgctagcttctccctgggatgctgctaaacacatggagtctgctgctgctttagcaaaggaactacgcaactggactgaggttatcgatttttacagaagggcatctgagctatacatgcagtgtgacagaccacagcctgcatctgattcacttgccaaggctgcccgtgctttggaggatgctttgcctgatgatgctgttcagctatataccgatgcttgtgttattctcgaagatgatggaaaggaacagatggcctttgatctgtatcgagctgctgctagtatttatgtaaaacttgagaagttcactgatgctgctactttcctattgaggttgggcttagcagctgacaagtgcaatgctagaaatagtcagtgcaaggcgtatcttagtgcaattattgtgtatctttatgctcatgacttaaagcaagcagagaagtgctacaatgattgttcacaaatcgatgctttcttaagaag

SEQ ID NO: 192425 - DNA, 770 bp, Gossypium hirsutum
cccacgcgtccgcccacgcgtccgtaaaaattaaacaaagtccaatccaatcaaacacaattcatagaaagtaaaactccgacgccatgtccagctccgatcccaacaagctcatttccaaagccgacaaactaacaaggctaagtcttacaaggcggagtgcagattggaaaagtgctactcttttatatgaacaagctgcaaatggatttcgagtttcaaaggattatgagaaagcaaagttggcattcgagaaagcttccaaaggacaagaaatgctagcttctccctgggatgctgctaccaaatccaatcaacaccgtgtcgttaagtcccccggtgggaaattagtctatgagacggctgcccacgcggccggtgggcctaagtgtcctgttactggaaagcgaattcagggtatgccgcacttgagacctgctgggtacaagccgtctcgattgcctaggaaccgtaggacggtgaatcgtgcctatggtggtgttttgtctgggagtgctgttagagaaaggataattcgggccttcttagtcgaagagcaaaagattgtgaagaaggttctgaaaatccagaagactaaggaaaagcaatcatcaaagagctaggaatttttaaatgctgatgaagctggattgtgtttggcttgttagatttatctgagagaaaatttttgtttggtattatggtgaattgatgaaatgtggaactgagtttgagtacttttctcattttgtaggttcatactgatatta

SEQ ID NO: 192426 - DNA, 383 bp, Gossypium hirsutum
tcgttcacgcgtccggctttcgcgtttctttctgaaactagagctgagaaaataaaacccaaagccttaaaaactatcaaaaatggttcaaaggctcacttaccgtactcgccatagctatgctaccaaatccaatcaacaccgtgtcgttaagacccccggtgggaaattgatctatcagactactaagaagagagcgagtgggcctaagtgtcctgttactggaaagcgaattcagggtattcctcacttgagacctgctgaatacaagcggtctcggttgcctaggaaccgtaggacggtgaatcgtgcctatggtggtgttttgtctggaagtgctgttagagaaaggataattcgagccttcttagtggaagagcaaa

SEQ ID NO: 192427 - DNA, 1132 bp, Gossypium hirsutum
  unsure (1)..(1132): unsure at all n locations
cacttacctaaagacatggcttcatcatctcctctttctcccattctcctctctctgtttctagtattcatttgtggggtgtcagctcaaacggctcccgcccctgccccctctggccccttgaatttcactggaatccttgacaaaaatggccaatacacctacttccttcagcttttggcacagactcaagttgggagccaagtacaaactcaactcaaaaccaccactgaaggctttaccgtctttgctcccacagataatgccttcaacaacctcaaacctggtaccgtcaataacctggacccacaacagaaagtacaactagttctataccacgttattcccaaatactactccttgaacgatctccaatttgttagcaaccccgttagaacccaagctggtcaggatttcggcctcaacgtaactggcctgaacaaccaggttaacgtctcaagcggggttgtcgagactcagattaacaacgcattatatcaaaagaaacctctggcaatttatcaagcggacaaggtgttgttgcctgaggagttttttgaagctaaatccccagcggctgcaccttcaccggcgacaaagaaatcatcaacagggtctaaatcgaactcaagagcatcagcaaccgcagatgagccagcttctgctgataattcaggctcaaccggaaggaatatggggctgggattcgttgttgggcttgcattggcttgcatgggatttctctcatgagcggatatatatgaagttggtctgcattttttactataaattttcgtttttcaaatggatcgataagggtctgattggtcgttgaacatattcttgttatccacattatttgtatttccagaattttttgttgattttgcttctgcgcgctgcttgatgttaataataatatatgtgagtttctgaaaatgctttagtctccccatctctcttttcctaccaaatagatcccagtttaatgttgagcataaattcaagggattaatcctataaaaatgtagggaaggatgtagttatatataaagaaatgaagtgtaatacagatgatgaaggtgattggcacctccttttgcaatatnnnnnnnnnnnnnnnnnnnnnnnn

SEQ ID NO: 192428 - DNA, 451 bp, Gossypium hirsutum
acaaaatagaggaaggaaggggtacagacagaaaagtaaagcgctaaggagaagaggaagaagagatggcagtgagcgcaacggtgatcggagcacttctgggactgggcacccaaatgtactccaacgctctccgcaagctcccttatatgcgacatccgtgggagcacctgttggggatgggtctgggagccgtgttcgttaaccagcttgtgaattgggacgctcagctccaacgggaccttgacaatatgctcgaaaaggccaaggctgccaacgagcgccgctactttgatggagatgatgattaatgctttcgccctatcatcagataagacattcatgcgccaagctactgtggtcataaaccggttcagattgtgagtgggtgactttggactctttgtttgggttgattccaagcctgttgaaccttcttttgcttttattt

SEQ ID NO: 192429 - DNA, 661 bp, Gossypium hirsutum
aaatactatagaaatccaagaaaaaattttttaaaaaacccctaattctataaaaagatcgaattaaagtagaatcagaagcaaaaatcgccgaggaaaacaagatgtcggggcagcaagaagaagataagaaacccggcgatcagtccgccgctcacatcaacctcaaagtcaaaggccaggacgggaatgaagttttcttcaggatcaaaagaagcacacaattgaagaagctcatgaatgcatattgcgaccgacaatctgtggatttcaactcgattgccttcttgttcgatggtcgccgcctgcgaggtgagcaaactccggacgagcttgagatggaggatggtgatgagatcgatgctatgcttcaccaaaccggtggtactgtgtgaagcgagtactactttgccgcatttagtatttgatgagttagttatggtctgattatgtaagatgtttccaatgtttttatatacgaccttattgccatgttatgaagacttgtggaccttgttttgagtcatcttgctcttatagaagagcttgagtttctagtgtttacaaagtgagatggaactcgggactttgttccgatatgcactcggtttgaaggctggttaacagtcactatctataagtattgatttctgggttgctt

SEQ ID NO: 192430 - DNA, 619 bp, Gossypium hirsutum
ttcctcgcgtccggtttgttttgtggaaaatgatttccatgatttccataggaaaacattttacaaacacgggtaaaatccaaagcaaaattttggaaattgtcttaccgatttctaatccgtaagacattttccctttctcctttctcttctaagcaaattttcttccacatcctctgcctcctcatctccgttcaccacctcacctcacctcaccatctccgtctgtcatctccgtcgaccgtcagccttacttgtattttgaagaaaccctaaaaaaattagcagccacagtcaagaaaagaagacccagaagcagtggttctctctctgtcatcaacaggatgggaatgaagttttctttaggatcaaaagaagcactcaactgaagaagctcatgaatgcatattgtgatcgacaatctgtggatttcaactcgattgccttcttgttcgatggccgccgcctgcgaggcgaacaaactcctaatgagctggaaatggaggatggtgatgagatcgatgttatgcttcaccaaactggtgacacaagcgcttgatgttgtcaactgtgtgaagattgggacattagtattggagcataaggatgagcgcgattt

SEQ ID NO: 192431 - DNA, 612 bp, Gossypium hirsutum
  unsure (1)..(612): unsure at all n locations
cttgagggaaagaaaaaaaaagaagaagaagcttgaatctatttttttgaagatggagggtaaagaagaagatgttaagctaggagcaaacaagttctcagagagacaacctattgggacatcagcccagacagacaaggactacaaggagccaccagcagcacccttctttgagcctggtgaactcaaatcatggtctttttacagagctggtattgccgagtttgtagccacctccttgttcctttacatcaccgtcttgactgtcatgggtgacaactattttatgaatatgcttattattattattattatcgccataaatttttatgtctgtcatgttgacatccatatatttgagtattaagtttgttgtcttgaatggctgtaaatttgttgtttcattcaaacatggttttggttttccacccttggtaatgttttttttttctttttcaatttattttacatcaaagagacaagttgattgggaaagtggacccttgaaagggccattgccagcataaaatgtggaccaatgctttagttggcaagcatggctcctcttacattttttgtttggatgtaactaaggtgttgtntttgtcaatc

SEQ ID NO: 192432 - DNA, 1102 bp, Gossypium hirsutum
ctttaggttgggttgcacttgagggaaagaaaaaaaaagaagaagaagcttgaatctatttttttgaagatggagggtaaagaagaagatgttaagctaggagcaaacaagttctcagagagacaacctattgggacatcagcccagacagacaaggactacaaggagccaccagcagcacccttctttgagcctggtgaactcaaatcatggtctttttacagagctggtattgccgagtttgtagccaccttcttgttcctttacatcaccgtcttgactgtcatgggtgtgtctcagtctaaaaccaaatgtgcaaccgttggtattcaaggcattgcttgggcttttggtggcatgatctttgcccttgtttactgtactgccggcatttcaggtggtcatattaaccctgctgtgacctttggattgtttctagcaaggaaactgtcacttacaagggcattgttctatatgatcatgcagtgcctgggtgctatctgtggagctggtgtggtgaagggattccaaggagataaccgatatgagatgttgggtggtggagctaatgttgtgaaccatggctacactaagggtgatggtcttggtgctgagataattgggacttttgtgcttgtttacactgttttctctgctactgatgctaagagaaatgccagagactcccatgttcctatcttggctccacttccgattgggtttgcagtgttcttggttcatttggccaccattcccatcactggaactggtattaacccagcaaggagtcttggagctgccatcatatacaacaaagaccatgcttgggatgaccattgggtgttctgggttggacccttcattggagctgcacttgctgcagtttaccaccagataatcattagagctattccattcaagaccagagattgaaatgattaaatctgtgtgtgtgtgtgtgttgggatcttcatctactttttgtgttcctactagtcctttgttgtgttgaactgcattttgaattatggtgttaatgtgtgtaaattatccctagagttgtgctgtattcagcttttattaatggaggattcttttatgg

SEQ ID NO: 192433 - DNA, 480 bp, Gossypium hirsutum
tgttttttgtgaggaaaaagaagcttcaatctttggttgttaagtgggtgaaacaaaaaaaaaaattggagggcaaagaggaggatgttaaactaggagccaacaagttctctgagagacaacctattgggacatcagctcaaacagacaaggactacaaggagccaccaccagcaccattgtttgagcctggtgagctcaagtcatggtctttctacagagccggcattgctgagtttgttgctaccttcttgttcctttacatcactgtcttgactgtcatgggtgtcgtctcaatctaagaccaaatgtactactgttggtattcaaggcattgcttgggcctttggtggcatgatctttgctcttgtttattgtactgctggcatttcatgtggccatattaacccaactgggacctttggggttgtactggcaaggaagctgtcccttacaagggcagtattcttcatgatcatg

SEQ ID NO: 192434 - DNA, 358 bp, Gossypium hirsutum
tgagctgccattatatataacaaagaccatgcatgggatgatcattggatcttctgggttggacccttcattggagctgctcttgctgcaatttaccaccagataatcatcagggccattcctttcaagaccagagcttgaaaatgatataatcattattttgcatcttttcatagtttccttctacatgttgtcctttggtgcatctacttcactgatgtgtctctcaactctttgtctcacttaatttggattatgttttatggtgttaattaatgtgtgtaaattatcctagagatatatgcttgtatttagttatcaatgaaggattcttttttatctccatatgttcccctct

SEQ ID NO: 192435 - DNA, 1073 bp, Gossypium hirsutum
gttttaactagataaacaaatcttataaaacattaatcaagctaggctgaaataaagccaagagtcgctccataattcaattttctagaacatgcaaggctccatagatacaagtgcctggtgcatatcaagttgtaattatggcaacattgttgtgcaaccctttgtcatgaaagctgtaatatttaaagatacatcatcccgaatttcttaaataaaggccaacatttaacttgagcaaattagaagacatctaaaatataatgcactgccccgtactccatggcttccaaaaacggaaaagaagtaatctctctactctttcccaaaatcagtactgtagtgtgcactagattccagtttcttggcttcgttcaactttcttactgccttcatgaaatcttcgtggatgacataatcacgttctgcacgaattgctgacattccagcttccgtgcaaacatttcgtagatcagcaccattaaagccctcagcaagtttaacaacagcctcgtagtcaatttcaccatgcttggctatgccagcagcatggatcttgaggatttccattctcgactgctcatttggcaatgggatctctatttttctatctagccgcccaggacgaagaagtgcagggtcaagtacatcaggtcggtttgtagccatgatcattttaacctttccaagctgatcaaatccatcaagctgattaagtaactccatcagcgttctctgtatttcacggtcagcgcttgttccttcactaaaacggcgtccaccgatggcatcaatctcatccataaagatgatgcaaggttggtgatcacgagcatatccaaacatttctcttatcagcctcgcactttctccaatgtatttgtcaattattgcacttgaaacgacctttaaaaagttggcatcaatattgcttgctattgctctggctaacaatgtcttgccagtaccaggaggcccatagaggaggacacccttggcaggtttaccccctcctctaaggaaaagctcggggttcatgagagggggctcaattgattacccggacgcgtggt

SEQ ID NO: 192436 - DNA, 713 bp, Gossypium hirsutum
caaattttgctccttttcttgtgtttcttcagaaggaagaaaatcccatcccttatttgctctttattttcgcatcttacttcttaaggagaaaaacaaacacgatcattgtcggctacactcccaaacactcaactctccttcctctcatatacagtttttccccaattcttcaagaaaaagaaaccctagctaaacatggctgttcccaaactagaaatgagacctctcggaaacaccggcctcaagctcagcagcgtgggcttcggagcttcccctctcggcagcgtcttcggttccgtttccgaaagcgacgctgtcgcctccgtcctcgaagccttccgcctcggaatcaacttcttcgacacctccccgtattatggagcgacattgtcagagaagatgcttggtaagggacttaaagctcttggagttcctagaagtgaatatatagtttcgacaaaatgtgggagatatcgtgaaggttttgatttcagtgctgagagagtaactaaaagcattgatgaaagcttggagaggttgcaacttgattatgttgatatatttcaatgccatgacattgaattcggctctcttgatcaggttgtgaatgagacgattccggcacttcaaaaactgaaggaagcagggaagattcgtttcattggtatcaccgggttgcccttggaaatttttacttatgtgcttgattc

SEQ ID NO: 192437 - DNA, 1016 bp, Gossypium hirsutum
gtcttgagttttttttttttttttttgaagaaacagatgggatatggtatttccaacaaaagagttgggcacaatttgttctaagtaaacagacgttctaagcacatatttaaatgcaatagtgtaagaccctgttcttcgtaatcctcttgtctactaacaataacagtcatcagggaaaaaaatgaatgaaaaattaaatcaatctctgctcagatctactttaggcacccttttaagaaaattttacaaaaccaaggtttatgatgaaatcgaaaccccggccgcatcatttaaacaatctgacttcagattagtgtgatcatcctagcttgagcagcaacctcccttcttcatagctgacacgtctttacccacatcgattttctctccctttgatgggacagctgaagcattcccttcctcgctggtctccatagctttcttgctcacgatatggtagatctgtgtcagaacttcggcaaaggcattgtcaacattggtggcctccagggcagaagtttccatgaagtagagggattctttctccgcgaaggatttcccctcttcggttgagacagccacaaggtgacgaagatcggatttattaccaatgagcatgactacaatgttgggatctgtgtgatccctcaactctcttaaccacctctcgacattttcgaatgtggagtgtcgtgtaacatcatacacaagaagtgcaccaacagctcctcgataataggcacttgttatggcacgatacctttcttgaccagcagtgtcccaaatttgagccttgatgacctttccatcaacattcaagctacgtgtagcgaactcaacaccaatagtggacttggactcgaggctaaactcgttcctggtgaacctcgagagcagatttgactttccgacaccggaatcaccgatcaaaaccaccttgaaaagatagtcatagtcatcctcagctctgtaaccagccatctttattctttctccctcgtgccggcacgagg

SEQ ID NO: 192438 - DNA, 410 bp, Gossypium hirsutum
gactacaatgtgggatctgtgtgccccccaccctcttaaccacctctcgacattttcgaatgtggagtgtcgtgtaacatcatacacaagaagtgcaccaacagctcctcgataataggcacttgttatggcacgatacctttcttgaccagcagtgtcccaaatctgagccttgatgacctttccatcaacattcaagctacgtgtagcgaactcaacaccaatagtggacttggactcgaggctaaactcgttcctggtgaacctcgagagcagatttgactttccgacaccggaatcaccgatcaaaaccaccttgaaaacatagtcatagtcatcctcacctctgtccccagccatctttactctttctcagaaccacagctgttaccctctttctttgcgtcaag

SEQ ID NO: 192439 - DNA, 823 bp, Gossypium hirsutum
cttcctcaaatcttcttcttcctttttgttttctgtgtttttttttttagtccccaaatggattctccctttccgttcaaatggcaacccctcccctttcatcccctacttatctcaccaccaatttaggcgtcggctacgccatcgtcgtcgccctcggcttcctcctcctcctctccactctcctcctcgcttcctacatttgcttccgctcttcctcaccccttccacctcgtgccatttccccaaaccccatttcaacacccaccgccgccaactccgacggtatcgtcctccccaggattgttttcatcggcgaagaagaccatgaaaacgacgaggaaaacgtcgtcgtctttgggcttgatcgtgccgtcataaactcttaccccaagttccggttcagcaaaaaggaggtgtctacggcggtggaggtgacgggttctagtgctgggaacaccatttgttcgatatgtttgtgtgagtatagagaatcagagatgttgaggatgatgcctgaatgtaggcattgttttcatgtaacttgtattgatgcttggctgaaacttaatgggtcttgtcctgtttgtcggaactcaccgcttccgacaccgatttctacgcctttgtcggaagttgtacctttgtctcagtacgatgctgatcggaggtggtggtgacttttggcttttgggttaccatctttttcattttttttttcttcaatttttttcctgtgtgcaaatttggttttttgtcatggctgcttttttttggctcaatgaatggtgatatggtataaaaataaaaaaacataaacaca

SEQ ID NO: 192440 - DNA, 1049 bp, Gossypium hirsutum
cttcctaacaattgagcaattttcagttattttctctctcgacaaacaatggaagccttcacttccttcttcgattcccaatcgagaaacatctggagttacgatactcttaagaatttccgtcagatctctcccatcgttcaagctcatctcaagcaggtttatttgaccttatgttgtgcactgattgcctctgctgttggagcttatctccatattctttggaacattgggggttacctgaccacatttgcatgcttaggaaccattatttggctcctttccacccctccttgtgaagagcaaaagagggtttctcttctaatggcatcggcagtgtttgaaggagcttcaatcggtcctctaattgacttggctattcaaatcgacccgagtgtattggtagcttcatttgtgggaacagcattggcctttgcatgtttttcaggagctgctatgttagcaaggcgacgagagtacctttaccttggtggcttgctctcatctggtgtgtccgtgcttctctggttgcattttgcttcctccatctttggtggttccacagccctctttatgactgagatctacttagggcttttggtgtttgtgggatatatgatagtcgacacgcaggacataatcgagaaagcacacttgggtgacctggactatgttaagcatgcccttacccttttcaccgactttgttgccgtattcgtccgcattctgataattatgttgaaaaattcagctgagaagagcgagaagaagaagaagaggcgtgactagatcatgctaaagctgaaagcagtagcagcggaggtttgctaatctgatatcatttttcttttttatctttttctcttttgccttggaagatgaagtttgtgatgaatacaagtcgtttttcttgcgctttgtactaaagcaccatgttaatatgtcaaaagaagataggttttactttctgcatcttttgatggtattgattagtacttggaagagtacatcaaattaataacacgttactatgtttgcatttttcgttt

SEQ ID NO: 192441 - DNA, 466 bp, Gossypium hirsutum
cccacgcgtccgcccacgcgtccggtttctatctctcttcctaacaattgagcaattttctgttattttctctctcgacaaacaatggaagcgttctttgaatcgcgatcgagaagcaactggagttacgatacactcaagaatttccgtcagatttctcccgtcgttcaatctcatctcaaaagggtttatttgaccttatgttgtgccctggttgcctctgcttttggggcttatcttcatatcttatggaacattgggggttacctcacatcattcgcatgcttcggaaccatgatttggctcctctctatccctccttatcaggaacaaaggagagtttcccttctgatggcatccgcagtgttcgaaggggcttcaggtggtcctctgattgacttggccattcagattgatccaagtgtttaggtagctgcatttgtgggaactgcaatagcctttgcat

SEQ ID NO: 192442 - DNA, 539 bp, Gossypium hirsutum
  unsure (1)..(539): unsure at all n locations
cccacgcgtcctccacgcgtccgtggacgcgtgggttcagattgatccaagtgtgggggtgtctgcattagtgggaactgcaatagcctctgcatgtttatcaggagctgctatgttagcaaagcgcagagagtaccttcaccttgggggcttgctctcatctggtgtgtccgtgcttctctggttgcattttgcttcctccatctttggtggttccgctgccctctttatgtctgagatctacttcgggcttttggtgtttgtgggatatatgatagttgacacgcatgacatattcttgaaagcacacttggttgacctggactacttgaagcatgccctgactcttttcactgattattctgctgtatatgtcctcattatcgatattatttattcaatatcatctatttttattttgataattaagtaaaggagtgactaactttcaaaccattatttttttaacttatttctatttatctttttcttttagtatatttaataatggngttctttttttttttatatcttttttt

SEQ ID NO: 192443 - DNA, 337 bp, Gossypium hirsutum
cttcattcttttcaaagggtcctaattcattgtaccagacattgcggaagcccgatataagtgcaccaggagcggatatattggctgcatattcaccggtagcttcaccatcgataactacaaccgatccaaggcgagtttaatactacatactatcaggaacctcaacgtcttgtcctcatgttgctggtgtagctgcatacgttaagacttttcacccgcattggtctccctcagccattaaatctgctcttatgactactgcttgtccgatggatgcaccgacgaatcaaagagctgaatttgcttatggatcatgacatatgaaccctgtcaa

SEQ ID NO: 192444 - DNA, 903 bp, Gossypium hirsutum
  unsure (1)..(903): unsure at all n locations
cggacgcgaaagttgaaacacaaaagaccaaagagatggatagatcaaggttgcggtctctcaccttgctttgcactttggttcttcttggatctctagcttctactcaggcaaagaagtccaaggaagatctgaaagaagttactcacaaagtttactttgatgttgaaattgctggaaaacctgctggtcgaattgtcatgggactcttcgggaaggcggttccaaaaacagcagaaaacttccgagcactatgcacaggtgaaaaaggtgttggaaagagtgggaaacctctccacttcaaaggaagtgctttccaccggattattccaaacttcatgattcaaggtggtgattttacacttggtgatggaagaggtggagaatcaatctatggtgagaaatttgctgatgagaatttcaagctgaagcacactggacctgggcttttgtcaatggcaaatgctggtcccgacaccaacggctcacaattcttcatcacaaccgtgacaaccagctggttggacggcagacatgttgtgttcggaaaggtgctggctggaatggacgtggtttacaaagtcgaagcggaaggaaggcagagtgtgcacacccaagagcaaagttgtgattgctgacagtggtgaactccctctgtaattatcaaagctcaaacttgggtcttttctttattccaattaagtccatgataaatcctccaagatgaacctttttttttttttttgcttttttgcttttttgtcctagcagactcggttttgtcctagctgataggaatcatatctttcacttgctctatgatatgttatgcgttagcctttaaaacttataagatttgggttactgggtgattaccatcttattttttnnnnnnnnnnnnnn

SEQ ID NO: 192445 - DNA, 785 bp, Gossypium hirsutum
  unsure (1)..(785): unsure at all n locations
tcctcgcgtccgcaggaaattactgtaacaaccgagtactaaattaagggagatgagaagatgatctgcatgagctacaaaaagctggctgttgatctgaagcctgggaataccattttgtgtgcggatggtacaatcactctttcggtgttatcctgtgatcctgctgctgggactgtgagatgccgatgtgaaaacacagcgatgatcggtgagaggaaaaatgtcaaccttcctggtgtcgtggtggatcttcccacactcactgagaaggataaagaagacatcttgggatggggagttcccaacagtattgatatgattgctctttcctttgtacgcaaagggtctgatcttgtcaatgttcgtaaggtcctcggtccccatgctaagaagattcaattgatgtcgaaggttgagaatcaggagggtgttatcaactttgacgagatcttgcgtgagactgatgcatttatgggtgcccgntggtgacccttggatggannatccngttgagaagatctttctagcacanaagatgatgatatacagtgtaatcttgcggcaagcctgtggtactgcactcaatgctgaatcatgataagtttcgaggcaacccggctgaagcaacgtgttgttatgtgncctgacgtgaccatgtgaatgctcagggtaaatgctgtgagctttccanactgcnggagaatggttcaatgatgaggcgactnccttgttgagcactcaagaatgacgtgatccttcagagcnctgagagtgtctattca

SEQ ID NO: 192446 - DNA, 466 bp, Gossypium hirsutum
aaagggtctgatcttgtcaatgttcgaaaggtcctcggtccccatgctaagaagattcaattgatgtcgaaggttgagaatcaggagggtgttatcaacttcgacgagatcttcgcgtgagactgatgcatttatggttgcccgtggtgaccttggaatggaaattccggttgagaagatcttcctagcacaaaagatgatgatatacaagtgtaatcttgcaggcaagcctgttgttaccgccactcaaatgcttgaatccatgataaagtctccgcggccaacccgggctgaagcaaccgatgttgctaatgctgtcctggacggtaccgattgtgtcatgctcagtggtgagagtgctgctggagcctatccagagcttgccgtgaagatcatggctcggatttgtattgaggcagaatcttcccttgactatggagcaatcttcaaagaaatgatccgatcg

SEQ ID NO: 192447 - DNA, 445 bp, Gossypium hirsutum
gagaagcatttttaattctctcatcttttgctcctgggctagttcaagctacttgagcagcatagtagtgaatgttgtgcatcatgtcaccggaggccacggccaccccgactggttgactaatgatattaatgctggcagattggattacttttactacattctagcagtgatgagcgccttcaatttcctttatttcctctatgttgctcatcggtatcgttgcaagggccaagcacgaatagaaccgaaatctgaacccgatgtagagctaagttcgatgtaaccatgaaaccaattaagctgttgtagttttaatgtatatcacatgctaccaaataataaaaaacgtactcatttgaggttaaaaaaaaataatatatataataaaaaatattatttttatttatttttatttatttttatattatattttaattaaatg

SEQ ID NO: 192448 - DNA, 700 bp, Gossypium hirsutum
attagatgttttgaatcatgtaaagatcaatgttgagcttgaaactcctatagctacacttagaagtgtcatcaaaagttcaaaatcagatttgtcattcagcaagcaagaattgaggactgcgaaggaaaaaatcacccaggcttttgtagaattctatagaaaacttagacttttgaaaagctactgcttcttgaatcagttggcattttccaagatcatgaagaaatatgataagatcacattgcgaaatgcatcgaaagcttacttgcaaatggtggacaaatcatatcttggcagttctgatgaggttagtaagcttatgggaagggttgaggatacttatgttaaacactttgctaatggaaatcgtagaaaaggactgaaaactctaagaccacaagctaaaaaagaaaggcataggattacatttctctatggcttcttctctggttgctccattgcactaatagtggccattattgtgagcatacatgctagaaatcttcttaagagtcaaggaagagatcaatacatggtcaatatatttccactttacagcctatttggttacattgtcttgcatatgctcatgtatgctggaaatgtattcttttggaagcgttatcgagtcaacttttcgtttatatttggtttcaagcaaggaacatagttgggatatagagaagtacttcttctt

SEQ ID NO: 192449 - DNA, 669 bp, Gossypium hirsutum
cccacgcgtccgcattaccaaatcaaagccaaaactagtggttgttgaacttaaaacactgttctgttctccccctttcctcttggtgtccggtttcagttccatctatttgtccatggatcttacacctcagcaacttatccagttcaacggctccgacccatccaagcccatctacgttgcaatcaatggtcgcatctacgatgtcaccgccggcaaatccttctacggtcctggtggtgcctacgccatgttcgccggcaaagatgccagcagagctcttgcaaagatgagcaagaacgaagaagatgtctgtcccaaccttgacggcctctctgaaaaggagatggatgtccttaacgattgggtcaagaaatttgaagctaagtaccctgttgtcggccgcgttgtctcttgaaaatttgcacctttcctctatgttgggtgtaatttgtttcgtttttaagtgtctttagactctggttattacttatctatcaattgtgtttggtgttttgcttagctcagagcaatttctaggttaaataaatgggtgaaaattaataaattgagatacttatgggcttgcgttgtgttggtatctcgttgttgtttatgttagagaagtttcatcatcaatggagaaattcattttaattaaaaaaaaac

SEQ ID NO: 192450 - DNA, 422 bp, Gossypium hirsutum
atcgttttgaatttgcaaccgaaaaccgaatcaagatcttcgcaatctcatcgagctacaaaaaagaaaaatggatctcagaatcatgggtttcgattctccgctcttgaatactctccaacacatgatggatctttctgacgatacggagaagatcccgaacgcaccatcaaaggtttacatgcgggatgccaaagccatggctgcaacaccagcggacattaaggagtaccccaagtcttacgtgttcatcgtcgacatgccggggctgaaatcaggggacatcaaggtccaagtggaggacgacaatatgctcttgatcagcggagaaaggaaacgagaggaagagaaagaaggagccaagtacgtgagaatggagaggcgggtcggcaagtttatgatgaaatatgcgttgtctgaga

SEQ ID NO: 192451 - DNA, 557 bp, Gossypium hirsutum
  unsure (1)..(557): unsure at all n locations
attttggcaagaatggtgggttgcaaactcattggattttaacaaggactatgatgccagtgttttcgagacaaccataagagttgtaggtggacttcttagtgcatatgatctttcaagggacaacgttttcctcgaaaaagctagagatattgcagatagattgctacctgcttgggatactactactgggatcccttataatgttagcaacttggctcatggaaatgcacataaccctggttgggctgggggtcaaagtattcttgcagactcagggactgagcaactagagtttattgctctttctcaaagaacaggagatcccaagtatcaggagaaggtggagaaggttatagttgcccttaataaaacttttccggccgatggtttgcttcccatctatattaatcctgaaactgcaactggttcatactccactataacctttggtgctatgggtgacagcttctatgaatatctgctcaaagcctggatacaggganacaaaacatcatcattaaagctttatagagatatgtgggaaacatcaatga

SEQ ID NO: 192452 - DNA, 667 bp, Gossypium hirsutum
tcttgtttcattttcattcactaacgaacatgaagaggactttcatgcacgaaaacccaagggacatatagaaagaaagcgttggtggttgtttaatacgttattgccgaaacaaaagcctagggacagattcttcaacaaatcaattaccaaatggaagaatattcaaaaggaaccctagaggtagaggactcccagaatgaacaagtgcatgaagaagaaaacaaggaagaatttggtgtagttaatggtggggaagatgattccaattcaagtagtagcagttcggacaaggaggataattcagaggagaaactggtttctgagtcagttggggtttctttgacggaagataccgagccatcagttgagaaattgggagactctgatgttgctgaattggatgataaagaaacagaagagaatgtctcaccatctttagagttagaccacactaatgctatagaaacagaggagttgtctgctgctgagaccactgtattgtccgaactctcaccacatgtggaatctcaggacacgggacaggatgagactaatgactccaccgttggtggatctgtggttgcccaccaacgataccccgaacaataaggtgggaatccccacgttcccctgaattgtcttctaccctagatcttgaagatcc

SEQ ID NO: 192453 - DNA, 544 bp, Gossypium hirsutum
gctttgcaaagtatggaagaagaagcagaacgaatttataaagatgagcgtggattgcttcttgatgatgaagctgcgtcaacaagagatgcaatgtatgagcaggcagaaaatgtggagagggaactggagcatatgacggaacagatcaagtcgattattgagacagtaaactctagtcagggtggggaactcgaggcacttgacggaatgactcccctagatgtggtggtcaagatcttgaataatcaactaacttctttaatgtggatcgatgagaaggctgaggaattctctggtcgtattcggaagcttgcagcccagggtaatgctgcagatggagaattaattgctgctccaaaatattggatgtcctgacccttccagaagttgctgttgttgagtttagtaactacagagggagtatggttaatttttccaaattattttggcatcagatggattatgtataagacctgactttcagacttggtctaactgattgcttcattaagaaaaattgaagtttcaaggcctgtaaaaa

SEQ ID NO: 192454 - DNA, 798 bp, Gossypium hirsutum
  unsure (1)..(798): unsure at all n locations
gattttacttgtacccctagcagagagagaaaatatacagaggaaaagaaaagaaaacttagaacgagcttcgtgggtggagcttgttttcgttgcgtttattattattatttctgatattcccaacacagagaaaggaagggatggagagcgattcagcgatggtggcatttccattgctgactacgcccatcgaatccaactacagggcatgcaccattccttacagattcccttccgataatcctcgaaaggctacccctactgaaattgcctggatcgaccttttccgcaattccattccctccttcaagaagagagctgagagcgatactaccgtggttgatgctccaactaaagctgagaaatttgctcaaaggtatgctgatatacttgatgacataaagaaagatccagaaagccatggcgggccacctgattgtactcttctctgccgacttcgggaacaggttcttagagaactggggtttagagatatattcaagaaagtcaaagatgaagagaataccaaggctatctccctatttccggaagtagttcgtcttaatgatgatattgaagatggggggaagcgccttgagaatctagttagaggaatatttgctggatacatattcgaccttgggtctgcacagcttgctgaagctttctcaggggatgaatgtccctttggtagntgtcaaatcttgttctcgacttggtcatgatgactanacactttaagcanatgaacaaaaatcttgaaaaagcagcatttgagaaaacttggtgcgatga

SEQ ID NO: 192455 - DNA, 714 bp, Gossypium hirsutum
tcgagttttttttttttttttgttggttcccttgcctgaagtttacttgttagctaaatcttgcagtaaccaaactatgagtagaggtgggagctacggaggcggccaaagttccttgggctacctctttggtgatgatgagcagcaaagtgcaccaactgtgacaccacctatccagcccccatatgggatagatgttaccgcagagatgcccccagctcccagtaaatcaagttcaaagaaccaggaagagaaaaacttcagcaacaccaacaattaccaagggctcaaggacagaattcagggaaactttataactgatcgcccatcaacaaaagttaaatcggttcctggtggagattcatctctgggttacctgtttggtgagaagtaatgcttcctcctttataagtttaagtatattgcctgattgcctgattgcctgcagttctcaatagtatgtctgcagtagtactgctggctaaataatggattcagttcccctatcagtgttgaacttgcagtgctccgtctactactatattagcatgatgtggtattaagcttttcataaattaatctgccagagaagtggatttcagtaatgaagcatacaggtaaaacaatgtatggttttacttttaccagatttgcataattagcagaagttcaagttcctgccaatgcgtttaatatacatataaaccttgagca

SEQ ID NO: 192456 - DNA, 570 bp, Gossypium hirsutum
gcgcccacgcgtctaacgcaagcaaaaaatttaaagttcgataatactttattttgataaaaataaaatgccgatttctcgaatcgcagtcgggtctccggccgaagccggccaagctgatgcactcaaggctgctttagccgagttcatttcagtgcttatttttgttttcgccggtgaaggctcgggcatggctttcaacaagttgaccgacgatggctcctcgacaccggcgggtttagtagctgcggcattggctcacgccttggcgttgtttgtggcggtttcgatcggggctaacatttccggcggacacgtaaaccccgccgtcacgttcggtgctttcgtgggtggccacattacattggtgaggagtattttgtattggatagctcagttgcttggatctgtcgttgcttgcttgcttctcaagttctcaaccggtggaatgacaacatcggcattttccttatcatccggggtaggagcatggaacgcactcgttttcgagatcgtgatgaccttccgcctggtttaacacgtttacgccacagcggtcgacccgaaaaa

SEQ ID NO: 192457 - DNA, 1134 bp, Gossypium hirsutum
gtggttggcagctggcatggaaatggactgaaaaggaaaccccggatgggaaaaaggaaggggaatttaaaagaatctatttgcatcaagagactgtacctgaatctaggcgtgggtcagtagtttctctgcctggtggtgatgtccctgctgacactgagtatgtccaagcagccgctttggtgagtcattcggctctttattcctcagagcttgtgaagcaacatccggttggaccagctatggttcatccagctgaaacggcaaagggaccaagttggactgatatctttgaacccggagtcaagcatgctttatttgtagggattggaattcaaatacttcagcagttctctggtataaacggcgttctatactacactccccaaattcttgagcaggcaggagtcggggttcttctttctaacttgggcctcagttcatcttctgcatcgctgcttatcagtggcattacaaccttgttgatgcttccaagtatagctgtcgccatgcggcttatggatatagccggtagaaggagtttgctactcaacacacttcctgtcctgataatatctctcgtcgtcttagtcgtcgctagtgttgtgaaaatggggagtgttgtgcacgcatcaatctcaactgttagggtggggctctacttctggtgctgtgtgatgggattcgggccaattcccaatatactgtgtgccgagatcttcccgacacgggttcgtggcatctgcattgctatatgcgcccttactttttggatttgcgacatcattgtcacgtattcgctcccgttgctgctgaaatcagttggccttgctggcgtctttggcatgtatgcagttgtatgcgttatatcatgggtgtttgtcttcttaaaagttccagaaaccaaaggcatgcctcttgaagtcattacggaattctttgcagttggtgcaaagcagattgcagctaccaaggacaactgagttcggtttatttctttgattttcatggatattgaaagttttgatttttgttcaaaatttctccttctcattcgaataggcagagtttgatttatgtagaacaagaaaaagaaaacataatgtgtttctctattgtttgttgcaattcaaa

SEQ ID NO: 192458 - DNA, 866 bp, Gossypium hirsutum
cccacgcgtccgcccacgcgtccgctgagaactaaaggaaacaaaggccttcatcttagcactccgccgccccttatctcatcgcaatcatgatcatcccagaaaagaaccgcagggagatatcaaagtacctctttcaagagggtgtttgctacgccaaaaaagattacaacttggcaaaacacccagaaatcgatgttccaaatcttcaagtaataaagctgatgcaaagcttcaaatccaaggaatacgttcgtgaaacttttgcttggatgcattattactggtaccttaccaacgatggcattgaatttttaaggacataccttaatctcccctctgagattgttcctgctactttgaagaagcaaactaggcccggtggtggtcgtcccatgggtccttctgatagccgcccacgtggtccgccacgctttggcgacggtgagaggcgattcggtgacagggatggataccgtggaggtccacgaggaggcggtgatttcggtgataagggtggtgcgcctgctgattatcagccttcattcaggggccctggttcaaggcctgcttttggtcgtggaggcggtggttatggtggtgccggttctgcaagcggcgcaggtcttccatgagttttgtcagtttaggttgaatggcacttcctagttcattttggggtgtgcttttttgcactcaaatgattgagattatctatgttcttttttcccccttgtttttgatgcttttgttgcattgattttccttgtttgaattagacagtaaataccgaagttgtgcagctcaatttcggaagaaacattaattattataatatataatgaaatcagtatctttggcatttt

SEQ ID NO: 192459 - DNA, 676 bp, Gossypium hirsutum
tctggtagacaaggaaaaacaaaagcctcttccttagctaactgtctaagcggctactttataccgcatctcaaccatgatcatcccagaaaagaaccgccgcgagatctccaagtacctcttccaagagggcgtttgctatgcgaagaaagactataatttggcgaagcaccctgaaattgatgttccaaatcttcaagtaataaagctgatgcaaagcttcaagtcaaaggaatacgtgcgtgaaacttttgcttggatgcattactattggtaccttacaaatgatggcattgagttcttaaggacttacctgaaccttccttctgagattgttcctgctactttgaagaaacaagctaaacctgctggtcgtcccatgggccctcccggtgaccgtccacgcggcccaccacgctttggtgacggtgagaggagatttggtgacagagatggctatcgcggtggtcctcgaggaggcggtgattttggtgataaaggaggagctccagctgattatcagccttcattcaggggccctggaacacggcctgcttttggtcgtggaggtggtggttatggtggtgctggacctgctggtcttccttgagagatgatttttcatgatggataattttgtcagtttaggtttgttatcatatggagttcatagaag

SEQ ID NO: 192460 - DNA, 924 bp, Gossypium hirsutum
  unsure (1)..(924): unsure at all n locations
cggacgcgtgggggaaaatctccattttagcagactatcttcgccgcctcctcttcctcctatctcatagcagccatgatcattccagagaagaaccgccgcgagatctccaagtacctctttcaagagggtgtttgctatgcaaagaaagattacaacttggcgaagcacccagaaatcgatgttcccaatcttcaagtcataaagctgatgcaaagcttcaagtcaaaagaatacgtgcgtgaaacttttgcatggatgcattattactggtaccttaccaatgatggcattgagttccttaggacatatctgaatcttccttctgagattgttcccgctactttgaagaaacaagctaagcctgctggtcgtcccatgggccctcctggtgaccgcccacgtggtcctcctcgctttggtgacggtgagaggagatttggtgatagagatggctaccgtggaggtccaagaggaggaggtgattttggtgacaagggaggagctccggctgactatcagccttcattcaggggccctggaacaaggcctgcctttggtcgaggaggtggtggttatggtggtgctggacctgcaggtggtgcaggtcttccttgagacagatgctttttcatgacagatagttttgtcagtctaggtggttgttgaagttgatagaagtttgtgttatgcttttcaatttagttatttgatgcttataaaatattgctactcttcggttcatccgaaaggaatttaggaccaatgttttctttgctatttgatcatacacattttgtggtgtttgttgcactgtagtactgaaattttcattcaagcttgtaacattatggaatcctgctctcatcaaacatataattctacatgttttatgnnntataannntttttttatttttttttt

SEQ ID NO: 192461 - DNA, 486 bp, Gossypium hirsutum
gtggcatagatgatctatattcagccttcacaaacctctcgtcgtcacaaagcaacatctgaagggaggatgtttcagaattctccctgcttgttgaggaagagagaatgaggtcatattcttttccccggttcttatggtcactcatatctaaaacaactgcaactttgcccttagaaataagctgaagtgccttttcttgcaaagtgaaatttgttcccagcttctcctcacttgtcgatggagtaaagcgtttttctgatatcctcaatctatttctcaccagcttagttccggcgagtgattcagttatagtccatctctttgaagctatctcaacattctccaatgcctgctgaagcaatttggaattaacactgacaatctgatcggcaagtaagctcgcttgggatttctctccaaatctgaacccatgaaatacatgttgccggacgcgtggtcggacgcgtgggcggacgcgtagga

SEQ ID NO: 192462 - DNA, 1004 bp, Gossypium hirsutum
ttcactagttttttttttactctcataggaacctctgtcaccgggatgggttcaattcaaagagggggcttcttctttcacaggccaattgcaatacgcaagtacttcacatttacgtaatagaagaaactattttaattatgacaatgactggtatgtttttacaaaatgatcccagcaccccattgcattttctaagaaaattaagtctacataatatccccaccctacaattcaaactataactacaggtaggggaccacttatttcccttaaaagacaaattacggatggcacacaatttgccatttgtctttagaagctaactacttcttatcaactagtatcactaagctcccgtcccttggtatcataggggaagagttggattcaaactatcgacacaactatagcgaccaaaaatagcgctacagctgctgtttgatgacattcattcaccaatcccactgcaacaagaggacataccataccaccaattcttcctatagcacttgcaactcccgcccctgttgtccgcaccgaggttggatataactcaggggaatatatggaggcaactgtaaaggttcccatggcattcatacgagctccaaataataagcaagtagttaacacagcaggctgctggattagcagtggtgaaaggaaaataaatgctaagccgaacataattgccatcgactgcttgcggccaaccctatcaaccaatattgctgacagaagaagcccaggtagctctgccatactggtgatgaatgcatttaggtagagaccatcatcgtggggatttatattgctttggagagatgggaaacatgtactttgtccactacttagcttagaggtaagcaatatgataccataatatgaaaatgaatctccaaagaataatacccataggagcagcgttgttataatgcggtcggaagagaaaagcataaaaaatgatgagaagcctgattttgattgtgtggtacttttac

SEQ ID NO: 192463 - DNA, 528 bp, Gossypium hirsutum
ctttctataaacaacaggatccaattttttcacccagttcgtcctcaacttattccaatgtttcctgctcctcagcagcctgcacttcattgaattctgctacaggtaactcgcctggctgctcagcatcaacttgtgtctatggcatccaatatggagattcatctttctcgattggattgtttgctaaagaaaagctcactttgacatcaaacgttgtgtttgacaactttctatttggttgtggccaaaacaatcaaggcctttttggtggtgctgccggtttgctaggactaggccgaaataaactatcttttccatcacaaacagccataaaattcaagaaaatattttcctactgcttgccatcatctccaagctcaaccggcttcctaaaattcggcaatgatggtctctcaaagtcttgtaaaattcacaacattatcaacaatctccggaggggaatccttttatggcattaccattattgctatgagttgtggtggcaagaaactattaaatctcgca

SEQ ID NO: 192464 - DNA, 421 bp, Gossypium hirsutum
tcgattaaaacagcgcagatttctggttgtgagaggaaaggagatatggctgagagtaacgtgaaggtattgggtacatgggcaagcccgttcgtgatgagggtgaaaattgcccttcacctcaaatctgtccgctacgaggacgtggaggaagatttgttggcacccaaaagcgagcttcttcttaaatctaaccctgtttacaagaaaatcccggtcttcttccatgctcataaccctatctgcgagtccctaatcatccttcagtacatcgatgaggtttggaccacctctgcttcttccatcctcccttccgatccctatgaacgttcccaatcccgattttgggctgcctatgtcgacgataagtttttccctgccttaagaagactgttgataggtgcaacggaggaagataaaa

SEQ ID NO: 192465 - DNA, 605 bp, Gossypium hirsutum
gcagaattggtgataatgggctggttcacttgacaggtcttcggagtttgaaatgtttggagttgtctgatactgaagttggaagcaatggtcttcgctatctttctggtttgtgtaagctggagagtataaacttgtcattcactgttgtttctgatggtggattaagagaactgtctggactaacgtctcttaaatcacttaatctggatgctcgtcaaatcacagatgctggacttgcagctcttacaagtttgactgggctgactcatcttgatctttttggagcccgtatcacagattctgggacaagccacttacgaaatttgaagaacctgcgctccttggaaatctgtggtggaggattgaccgatgctggtgtgaagaacattaaagatctttcatccctgtcgctgctaaatttgtcacagaactgtaacctgacagataaaactttggagatgatctccgggttgacaggattgatctctttgaacgtttcaaattcccgtgtgacaagtgcaggattgagacatctaaagcccctgaagaacttaagatctctgaccttggaggcttgcaaggtcacagcaaatgacataagg

SEQ ID NO: 192466 - DNA, 767 bp, Gossypium hirsutum
ttctatttttttaagaggtgaaggaaaaaaaaatggaagattcatcatcaaagtcgttcttgagaaagcaatgggatgaatacaaagaattctgggccgatcgatttccgttcactaatgtctattcaagatacatcggccgtgaacagtcccttccttcatggtctgaatccgatgttaacgagttcatcgcttctgatccggttcatggacccaccttgaagactgccagggaagcagcaaacatcgccttatacggaagtgctatcggagctatcacaactgcaggttttgcctggaaatactcgaagagtttacatggtgctggactgtctttcgtaggaggagccgtttttggttggacatttggacaagaaatcgcaaatcatgcgtatcaactctacaggttggacacaatggctgcacaagccaaatttatggattggtgggaaaacaagtgccggaggtgatctttaaaaaaccttattgtgatgtcgaaagcagcacctggactcgctttccatttggttaaataatggcggcatgtcgaaaacataacgtttggtccaatgctttggcttttgttataaactttcgcatctgagtttgaaaggatttggagttgacttttttttcccttttggaagcaacttgacggaaccagttgtttacattacagtgctttgaataaatttgatgcagttctatccttgacaaaaactacgaccgacaccgagcctggaacttcaagtcctactactggaacc

SEQ ID NO: 192467 - DNA, 698 bp, Gossypium hirsutum
  unsure (1)..(698): unsure at all n locations
cacagcttttccaagccagaaaatccagcaccaagtcagcagattctagtcttgactttggaaatgaagaagtaccggttgaacccaaaacagatcttgggctttccccttcatttatttcctctagtgaaaacctgaatatgagttccgaaagttgttgttcagaaaatgcaaccttcagtactaacagttcacctctgccaattggcagacctttgcaagtagataattctttgaaaagccgaatccggtaccaatgtgcccccaccagctaagagcagagagacttcaacagttcacctctctgacgagtatttgagcttctgttacacttgcaagaaaaaactagagaaggatgaagaagtttacatgcacagaggtgaaaaggcattttgcagttttgattgccgcactgaggagatttttgctgatgaggaaatggagaaaacttgtaataattcctcatccaacagttctccagaacagagcaatgatgaagatgtcttcctaatggccattgatgatcggagcattcggagcataaatcacaattcatggatagcacagcatagagtttaatttataatccgaagatagatataatatcattagactggtgcattataattttgattaaatgaattagtaacggcaggaaaccccatctcatcaagtttccttttattatatnctttttg

SEQ ID NO: 192468 - DNA, 949 bp, Gossypium hirsutum
gcggccactgtcatcctgatgtggtcgacgcaatcgtcaaccaaaccaagcgcttacaacactccactatcctttacctcaacaatgccatcgctgatttcgctgaggcccttgccaataagttacccggcaatctcaaggttgtattctttacaaattcagggacagaagcaaacgagttagcaatgatgatagcgagattatatactggatgccatgacattatatcattgaggaacgcgtatcatgggaatgcagcaggaactatgggcgccactgcccaaagtaactggaagttcaatgttatccagagtggagttcatcatgccataaacccagatccataccgaggcgtatttggttctgaaggggagaaatatgcaaaagatgtccaagatcttattcagtttggaacttctggaaacatcgctggtttcatttctgaagccatacagggtgttggtggaattatcgaattggccccaggttacatgcctgctgtttatagcaccataaagaaagctggaggcctttgcatagctgatgaggttcaggctgggtttgctcgcacagggagccatttctggggatttgagaaccatggagttgttcccgatatagtaacaatggcaaagggcattggaaatggcatccctctcggtgccgtagtaaccacccctgaaattgcagaggtcttgacccgcagaagttacttcaatacctttggtgggaatcctgtatgtactgctgcagggttagctgtcctgaaagtgatcgaaaaagaaaagcttcaggagaatgcacatgttgtgggatctcatttgaaggagaggctaactgcattaaaagataaatatgatcttattggggatgttagaggaagaggattgacgcttggagttgaacttgtcactgatcacaagctcaaaactcctgcaaagcttgaaac

SEQ ID NO: 192469 - DNA, 631 bp, Gossypium hirsutum
cggacgcatgcgagaactttgaagagcggctgctcagattttgcctatttctcagatttttctctcagtttgaaacgatgtctacggctggcgaagctgcttgttcttacgctgctttaattctctatgatgatggcattcccatcaccgctgagaaaattgcaacaattgttaaagctgcaaatgtctcggttgaatcttattggccaagcttgtttgcaaagcttttcgaaaagtgcaacattgaggatcttataaccaatgttggtgctggtggtgctggtgctccagttgccgcagctgcacctgttgctgctggtggtggtggtggtgccgctgctccacctcctgctgaggaaaagaagaaggaagaaccagaggaagagagtgatgacgatatgggattcagtttgtttgattagaagttcctttcagtgcttgatttggttgattactgttttaatgcattaaagctgtgacagtagttgttgaggtttcttggtattattattatttatctgcttttgagtaaaaactttctttgagttgtatgtttgaatcttctatatataaaagtcttctagaccaatttttggccaaaaaaaaaaaaaaaaaaaaattctgcgggcgc

SEQ ID NO: 192470 - DNA, 610 bp, Gossypium hirsutum
agaaaaagaatgagagttttgtcatatgagttcttttccttaaccatggtttataggctgagaagatttctacactagttaaagctgcaaatgtctctgttgaatcctactggccaagcttgttcgctgaagctttttgagaagtgcaacattgaggatctcataaccaatgttggagctggtggtggtggtgccccagtagctgcagctgcacctgttgctgctggcggaggagccggtgctgctgctccacctcctgctgaggaaaagaaggaagaaccggaggaagagagtgatgacgatatgggattcagtttgttcgattaggtgtgttttggtcaattactagttatatcacatgaaggtagtgacgcttttagagttgtattgctattggtatttgcatgttgattagaaatattacgtttttgttgaatgaagttgacactaagtagctctttcttttgtgatctgtttttctgaatcttcctacatatagtaagtattatagattctggaccatataaaatgtattaacagctaccttttttttttattcatttttaaaaatctttattttttattatttcttatttttatttacttttct

SEQ ID NO: 192471 - DNA, 403 bp, Gossypium hirsutum
cccacgcgtccgcccacgcgtccgcccacgcggccgaacatattgatctcagagcggcgctgcacagcttgccgataacccatcactcctatattcatctttcagcataaacgatgtcttcggttggcgaagctgcttgctcttatgctgctttgattctctatgatgatggcatccccatcaccgtatcctttatgcaaataatttagggttgtatgatttattattcaatttttttaattctttgataggattattggaaaataggaatttgattattgctgttgagagattcccaatttgtatgggaacataggtatctttttttctttggggggggggtctttaactgtcattaataggctgagaagattgccgcgctagttaaagctgccaatgtctc

SEQ ID NO: 192472 - DNA, 397 bp, Gossypium hirsutum
cttgctttcagaaaggtgttcgaagtccctgatttcgcctctcagtggaaaagatgtcttcagccggcgaagctgcttgctcttacgccgcattgattctctatgatgatggcatccccatcactgctgagaagattgcaactctagtcaaagctgcaaatgtctctgttgaatcttattggccaagcttgtttgctaagctttttgaaaagtgtaacattgaggatctcataaccaatgttggtgctgccggtgctggtgccgcagttgctgcagctgcacctgttgcagctggtgctggtgggggagctgctgcttcacctcctgccgaggggacgaaagattgaagaaccataggaagagagcgatgatgatatgggattcagcttatttgatt

SEQ ID NO: 192473 - DNA, 387 bp, Gossypium hirsutum
tcttcgcgtccgcacagcttgccgatgcccccgcactcctatattcatctttcagcataaacgatgtcttcggttggcgaagctgcttgctcgtatgctgcttcgatgctccatgacgatggcatccccatcaccgctgagaagattgccgcgctagttaaagctgccaatgtctctgttgagtcttattggccaagcttgtttgctaagccttttgagaagtgcgacattgagaatctcataaccaatgttggtgctgctgctggtggtgctccggtcgccgcagctgcacctgttgcagctgctggtggaggcggtgctgctgctcctgctcctgcagaggaaaagaagaaggaggaaccagaggaagagagtgatgatgatatg

SEQ ID NO: 192474 - DNA, 343 bp, Gossypium hirsutum
cggacgcgtgggcggcgctgcacagcttccccaagaacccatcattctcagattttctctcagcgtttaatagtgaaacgatgtccactgtcggagaagctgcttgctcttacgctgctcttattctttatgatgatggcatccccatcaccgctgagaagatttctacactagttaaagctgcaaatgtctctgttgaatcctactggccaagcttgttcgctaagctttttgagaagtgcaacattgaggatctcataaccaatgttggagctggtggtggtggtgccccagtagctgcagctgcacctgttgctgctggcggaagaagccgtgctgctgc

SEQ ID NO: 192475 - DNA, 413 bp, Gossypium hirsutum
tttcccacgcgtccgtggaggagaatttgaagaagacctcctgctgaggaaaagaagaaggaagaaccggaggaagagagtgatgacgatatgggattcagtttgttcgattaggtgtgttttggtcaattactagttatataacatgaaggtagtgacgcttttagagttgtattgctattggtatttgcatgttgattagaaatattacgtttttgttgaatgaaagttgacactaagtagctctttctttgtgatctgtttttttgaatcttcctatatatagaagtattatagattctagaccaataattattaaaaaataaaaaataaaaaaaaaaattaaaaaataaaacataaaaaattatataataattaaataataaaataaattttaatataaaaaataaagg

SEQ ID NO: 192476 - DNA, 1337 bp, Gossypium hirsutum
cttttagggttgatgcttgagagcatcatttcttactctaagtacttaaatagaaataagagatacatacatctcgtctctagctcctctcctctcctcaacttactcactctctcgcttgaaatcaaatccgactgtcacttgagcttatttgtacattttgattcttctcgtctggtggagctgcacatggaccagtacgagaaagtagagaagattggtgagggaacctatggcgttgtttataaggctcgtgaccgtgtcaccaatgaaacaattgctttgaagaagattcgcttagagcaggaagacgagggtgtacctagcactgcaattagagaaatctctctcttgaaggaaatgcaacatggtaatatcgtcaggttgcaggatgtagtgcacagtgagaagcgtttatatttggtatttgaatatctggacttggatttaaagaagcacatggattcatatccagaatttgggaaagatccacgaatgataaaagcattcctttatcaaattctccgtggcgttgcttattgtcattctcatagggttcttcatcgagatctaaaacctcaaaatttgctgatagatcgccgtaccaatgcactaaagcttgctgattttggtctggcccgagcatttggtattcctgtcagaacatttacacatgaggtctgttactttgtggtacagagcacctgaaatactgcttggatctcgccattactctactcctgttgatgtatggtcagtgggctgtatatttgctgagatggtgaatcaacggccattatttcctggggattctgagatcgatgagctgttcaagatcttcagaatcttgggtactccaaatgaggatacatggcctggagtgacttcattgcctgattttaagtcttcttttccaaagtggccagctaaggatttggcaactgttgttccaaatcttgaatctactggaattgaccttctttctaaaatgctgtgcatggatcccagcaaaagaattacagcaagaagtgctcttgagcatgaatacttgaaggatatagggtttgtaccctgaggataccttttgaaccgccttcccccaactatcttcctgagaaagtgtctatattagttaaatgtattgtgtagcaatttgtgggattttaattgtgagaaattaaatggtgtgtggtctagtctattatatttttctttgttttgttttgtttcgctgtgttcaatttcccatggacggagcagatagattttatatacttttattaaatggaactggcttttttgcagttaaaaaaaaaaaaaaaaagtcgacgcggccg

SEQ ID NO: 192477 - DNA, 403 bp, Gossypium hirsutum
  unsure (1)..(403): unsure at all n locations
nnnnnnnnnnnnncccacgcgtccgttgcatggtacttctattgattttattgtctcttgtttgaattggatgcattcttattcatttgcttgcttccctgtttcatttctatagttgggcttttcaaggattacaatcagttcatatttccgagattcatgtttgagatgagttaattgtttttttccctcttcgttttagcttatttgtacattttgattcttctcgtctggtggagctgcacatggaccagtacgagaaagtagagaagattggtgagggaacctatggcgttggttataaggctcgtgaccgtgtcaccaatgaaacaattgctttgaagaagattcgcttaaagcaagaagacgagggtgtacctagcactgcaattagagaaatctc

SEQ ID NO: 192478 - DNA, 659 bp, Gossypium hirsutum
  unsure (1)..(659): unsure at all n locations
ttttaggaaaaccctctctcaaatcttggctcgccagtcgcctctctttcttcttctgcttcttcttcttcattctgttggctgctgctgctgctttggtggcgtgatttagaagccacaactcaatttcatataaagaaaaaaaaaagagtgagatggatccagacgcagtagccaaggccttcgtcgagcactactactccacattcgatgccaaccgggccggtttagccaatctctaccaggaaggttccatgttgaccttcgaaggtcaaaagatccagggctctcagagcatcgtcgctaagctcaccagccttcctttccagcagtgcaagcacaacatcaccaccgtcgattgccagccttccggctccggcggcatgctcgtcttcgtcagcggtaacctccaactcgttggcgagcagcatgctctcaagttcagccagaggtcctctcagtgctcactctgaacaattatctgccatctcccttgatgttgtttcttgcgactctactggatataaaagaaaatccactaccacatgccccttcctcacctggagacattgatgatntccttatggtttatgtctttcattcacgtggagcanacttttatatgtgtttcatctatgttgatagttaaccaatgtttc

SEQ ID NO: 192479 - DNA, 787 bp, Gossypium hirsutum
ggataaccctctctcaaatcttggctcgccagtcgcctctctttctcctgcttcttcttcttcattctgttggctgctgctgctgctttggtggcgtgatttagaagccacaactcaatttcatataaagaaaaaaaaaacgtgagatggatccagacgcagtagccaaggccttcgtcgagcactactactccacattcgatgccaaccgggccggtttagccaatctctaccaggaaggttccatgttgaccttcgaaggtcaaaagatccagggctctcagagcatcgtcgctaagctcaccagccttcctttccagcagtgcaagcacaacatcaccaccgtcgattgccagccttccggctccggcggcatgctcgtcttcgtcagcggtaacctccaactcgctggcgagcagcatgctctcaagttcagccagatgtttcatttgatgccaacgccacagggaagcttttatgtgttgaatgacatattcaggttgaactacgcgtgaagacgatgattaatcaagggatgggaatacaatgcctgaggatttaaaacacgttttgcctattttaggctctaatgaaatttggaattttgtttttttgggggatgattatgtttcgtgttccattatggtttccatatctctccatatttcagggactgattggttcagttggtcaaagacgctatcctgtgaattggatgttttgattgagacttatttcagttattttcaaatcaaatgaatcattgatatgtatattccattgtgtg

SEQ ID NO: 192480 - DNA, 855 bp, Gossypium hirsutum
cccacgcgtccgggtttttaaattccactcgatccaatggcaaccttccagttctctccattgccataatccacaaaaataaataaataaataaacactgtcgctttctcattagccagcttcgaagaatcgcatattactttgatctctccaacgaaatttaagtaataaaaatggtgttcgaggtgatgaaagttccaacgacgacgtttgaaggccagaagccaggcacttctggtcttcgtaagaaggtgaaagtttttgttcagcctcattatttgcagaatttcgttcaagcaacattcaatgcccttacacccgagaaagttaagggtgccacacttgtcgtttctggtgatggtcgttatttctcaaaggatgctgttcagataataatcaagatgtcagctgcaaatggagtaaggcgtgtatgggttggtcaaaacggattactttctactccagctgtatcagctgtaatacgcgaaagggttggtgcagatggatccaaagcaactggtgcctttattttgacagctagtcacaaccccggcggccctcatgaggattttggaattaaatacaacatggaaaatggtggacctgctccagaggctatcactgataagatctttgagaacacaaaaacaataacagaatacttgattgctgaagatctaccaaatatagacattagtacaattggtgttgcaaacttctcggggcctgaaggacagtttgatgttgaggtttttgattcagcaagtgactatgtgaaactgatgaagtcaatttttgactttgagcttattcgcaagctgctttcctttttcgaagtttacattctgctatgat

SEQ ID NO: 192481 - DNA, 495 bp, Gossypium hirsutum
ggtaagttccaggcaacaacaatttgtattatacgataacaaagcaacgagtccacattgagaaccacaaaaaaaaaaaaacacacacacacacattaaaatgcgcgggtctaacacgacagttccgatgaaaacaagtcgtcagcatagccaaatcctcattactagagagacacctagcaattacaccattattacgagaaacattaccttcaataaacatatccacatcatgtcgacacattttgtaacaagcaccaaactgaaagacaaccgtcaacttgagatcaccacgttcaaaggccgccaggaccattcgtgttcttctgctttgccgctgctgccgcctctaattcatgtctagatggaaacttgcactgcagagatgttattgttgatctcaacaaactatctccgactatcaatctcagctttttgacaaaatcatcacgacttatcttctttgccctgaatagttcataatgattagtaact

SEQ ID NO: 192482 - DNA, 901 bp, Gossypium hirsutum
tcgtgacgcgtgggcggacgcgtgggcggacgcgtgggctgagtttgaagcttcaagtgctaaaatctagggatttgcgggtggagaagacgagagctcatctctctgcttcaaagctcctgtccaggtagaattctcttcttcctttgcgttgtgttctttgttgttcaatcgccatggcttcaaagcggattttgaaggaactcaaggatttgcagaaagatccacccacttcttgcagtgctggtccagtagctgaagacatgtttcattggcaagcaacaatcatgggaccctcagatagcccttatgctggaggtgtgtttttagttactatccatttccctccagattatcctttcaagcctcctaaggttgcgtttaggaccaaggtcttccatcccaacatcaacagcaatggaagcatttgtcttgatatcctcaaagaacaatggagccctgcactaaccatttccaaggttctgctctcaatctgctcgttgctgaccgatccaaaccctgatgaccctcttgttccggagattgctcacatgtataagactgatcgggccaagtatgaagccactgctcgtagctggacccagaagtatgccatgggatgacagtggttggtgtgtaatacctatcagctttcttatgtgttttggggaaggaagggggtgttttttcttaaagtaacttgccattgtgctttggatatgggaaagatatggaacattctttttatttatttcgtgctttataacttgtgtgaaacccttgtttcgttcaatgtcaaagttgctgtggaaccctttgtttcgttcaatgtaacaaaaaagtctttagttctaaaccaactgaagtcaaaaccgcaaaggctgctgaatcagctaaataa

SEQ ID NO: 192483 - DNA, 941 bp, Gossypium hirsutum
gttttgaatctagggatttgcgggtggagaagacgagagctcatctctctgcttcaaagtttgttcctttattcctttcaaaccctttcctttttttaacttgatttcattttctcagatttgttctttttctctctctctctctctctccaggctcctgtccaggtagaattctcttcttcctttgcgttgtgttctttgttgttcagtcgccatggcttcaaagcggattttgaaggaactcaaggatttgcagaaagatccacccacttcttgcagtgctggtccagtagctgaagacatgtttcattggcaagcaacaatcatgggaccctcagatagcccttatgctggaggtgtgtttttagttaccatccatttccctccagattatcctttcaagcctcctaaggtcgcgtttaggaccaaggtcttccatcccaacatcaacagcaatggaagcatttgtcttgatatcctcaaagaacaatggagccctgcactaaccatttccaaggttctgctctcaatctgctcgttgctgaccgatccaaaccctgatgaccctcttgttccggagattgctcacatgtataagactgatcgggcaaagtatgaagccactgctcgtagctggacccagaagtatgccatgggatgacagttgttggtgtgtaatatgtatcagctttcttatgttgccaactgtgtcgaaccattttatgttttcttttggggaagggagggggtgttttttcttaaaggaatttgtcattgtgctttggatatgggaagatatggacattctttttatttattccgcgctttataacttgtgtgaaacccttgtttcgttctcgaagtcgctgtgaaaccctttgtttcgttcaatgtaacaaaaaagtctttggttaaaaaaaattaattaattttattaaata

SEQ ID NO: 192484 - DNA, 373 bp, Gossypium hirsutum
ccctgatgacccactggttctggagatggcccccatgtataagactgatcgggcaaagtatgaagctacagcacgtggctggacccagaagtatgccatgggatgatggtggttagtgggtaatacgtattggcttttgtacgatgccatgtatgtgttaaaaccttcatatattttggtttgggaaggaacttgtgattgtgcttagatttggatttgaattatgtggacatcttatatcaaaggtgggtctatggttgtaagagagaatgccattccattccatgtctttttatagcttgttatatgatgaagcatttcctaaaactttcatgcttattaaaaaaaaaaaaaaaacaaaaaaataactact

SEQ ID NO: 192485 - DNA, 1011 bp, Gossypium hirsutum
cggatacccggtcgaccacgcgtccgatacgatctaacattctggtttagatttaacactttgcagagttgagttttgaggaaacaaggtccaccaaatcactgaagcgagccatcaaatggctgctatggctcggtatcttttctcggacctgccgagacaatcacctaacatgactgatacctgccgcctcagatcacaaccacctcatgttgtttccttcccaagaaaccaaccgttccgttttcagtgttctcagatgtccattccctagctacgtatttcatgcggcggaggagacggtggaaaccatggagttggtggtaccggaggtggtggcacaggaggaggtggcgggtccaattccagcgatgatccatggaagcgttttggcattctgggtcttttcctaagtggatggagagacagggttgcagcatatccgcagtttccattcaaagttttaatggaagagttggtgggagtcactgcttgtgttcttggagacatggcttcacgtcctaattttggtcttaacgagctcgacttcgttttctcaactctcgttgtcggttccattatgaatttcactcttatgtatcttttagcaccaacagcttccgcagcttcttcaagtctcccttctatctttgcaaactgtcctcaaagtcatatgtttgaaccgggtgcttttaccttaatcaaccgtttcgggacttttgtctatataggaactgtgtttgctgctggtggactggctgctggacttgtcgggactgcaatctcaaacggcttgatcacgatgaggaaaaaaatggatcccacctttgaaacacccaacaagcctcctcctaccttgttgaatgccatcacctgggccattcacatgggtgttagcagcaattttaggtatcaaaccttgaatgggatcgagtttgtgttggaaaagggacttcccccccttgcatttaagtcatcagtggtggtcctgagatgcttaaataacgtaat

SEQ ID NO: 192486 - DNA, 484 bp, Gossypium hirsutum
ccaaaagcaaaggttcggagacgcccatttcgtttcactctttttttgtgcgtaaaatctacagaaacgaaggcaagagaaagtgaactaaccgaagaagaaaaccatgggaatgccgctagtttccattgctgcagctcccaaaagcgcctttgttcccaattccatctctctaccttcaattaaggtgcgtaatattccatcttcgacagcttccaccggtggggtgtcgatagaatgttcgtcgaggccgcagaagaaggcaacgaagcatcatatgaagaccaggccacgcaagacgcagccatgggacataaggaggaaacccaccgtttacgctcctttgcctccgctgcctcctgattgggccttagtttcaagcgtcggagaaaatgatggcgccgatgttgctgaggttggtctcgctggctctgctctacaggctcctgcttcaactgggtagtttttttttcactgttcatcg

SEQ ID NO: 192487 - DNA, 872 bp, Gossypium hirsutum
gagatcaaagatttcaatggtaaggaaaaggttaatcaattagcccctgcccttaagtcgagtttctttaaggttattgaattaaatcgcgagatctgagcaatggcgacagattcatcaaatggggaacaaaagacaacctcaaagccaccacctttgccatctccattgcgcttttctaagttttatcagtccaacatgaggatcctggttactggaggagctggttttattggttctcacttagttgacaaattgatggaaaatgagaaaaatgaggtgattgttgctgataactacttcaccggatccaaggacaatcttagaaagtggattggccatcctagatttgagcttattcgtcatgatgttactcagccgttgttggtcgaggtcgatcagatttaccaccttgcatgtccagcttctccaattttctacaaatacaatcctgtgaagacaataaagacgaatgtcattggcacactgaacatgctgggacttgcgaagcgagttggagcaaggatcttgctcacatcaacttcggaagtgtatggagatcctcttatccatccacaacccgaaacatattggggcaatgtgaacccaatcggggttcggagttgctatgatgaagggaagcgtgtggctgaaacgctaatgtttgattaccataggcagcatgggatagagatccgcattgctagaatcttcaacacatatgggccacggatgaacattgatgatgggcgtgttgtaagcaatttcattgctcaagcactgcgtggtgaaccactgacagttcaaaaacccgggacacaaactcgcagtttttgttttgtctctgacatggttgatggtcttattcgtct

SEQ ID NO: 192488 - DNA, 882 bp, Gossypium hirsutum
caaggagtatctggtggataatagccttgaagatttaatgggaggtctcaaccgagggaaaatggaggacaatctcctggacttctttccatctgcaaagcgatcccctgaaggtttctctgaacatttcaccaaggaagggttggcgcccttggttgaatacaatgagaaaaaaatatttgaagtaaaacttaaggaactgaagtctgctttgacaacccacatagcacaagaatctgatatatctgaagtcattgagaatgtcaaacaacgtgttggggatgctaaatcacctgatattgaggttgtacgaattctttgggatgtaataatggatgctgttcagtggtctggaaagaaccagcagcagaatgccaattcagctttacgacaggtcaaaacatgggcaaagctgttaaattcgttctgcagcagtggaaaacttgaactggagcttatgtataaggttcagatgcaatgctatgaggatgcaaaattgatgaagctattcccggagattgtgaagtctctctatgaccaggatgtccttgcggaagacacgattctttactggttccgcaaaggatcaaacccaaagggcaggcaaaccttcgtgaaagccctggagcccttcgtgaattggctggaggaagccgaagaagaggaataagcgcgtcgataataatagtgttatcaacaatcaagaagttatgataattaaccttgttatcttttccttgtctttattgagctatatgtttgccgaactcttttaacatttggtgtgtgcctgctaaaatatttgctgcgctcgtatgctaagcttaatggattattaacttaaataaagaaatatggtgctttttgtaccatctctgtggt

SEQ ID NO: 192489 - DNA, 931 bp, Gossypium hirsutum
agccttccgttgggtcttgggcttatctatcatttttgcttcacagattgttttgaaaaacaccatctttcttgtgaattctgcaacctttggagtaacttaagaagaaatgggggaaaagagtttaattgccaaggatgtcaccgaattgatcggtaacacgccactggtatatctcaacaatgttgtagatggatgtgtggctaaaattgctgccaagttggaggcaatggaaccctgctccagtgtcaaggacaggattggatatagtatgattgcagatgcagaggagaagggtctcattgtaccaggcgagagtgtgctgatcgagccaactagtggtaataccggaatagggttggcattcatggcagctgctaagggttacagactcataattacgatgccttcttcaatgagtttagaaagaagaatggtcctccgagcttttggagctgagctggttcttacggatccagcccggggcatgaagggggctgttcaaaaagctgaggaaattatgtcaaagactcctaattcttacattcttcagcaatttgaaaaccctgccaacccaaagatccattatctgacaaccggaccggagatatggaaaggcagtggaggaaaggtagatgtccttgtctctggtatcgggactggaggtactgtaacaggagccgggaagtatctgaaagagcagaatcctggcattaagctcgttggcgtggaaccagttgagagtgcagtgctttctggagggaaacctggtccacataagatccaaggaattggtgctggcttcatccctggggttttagacgtcaatttaatcgatgaagtcgttcaaatatcaagtgaagtagctattgaaactgcaaaacaacttgctctgaaagaaggattgttggtaggtatatcatccggtgct

SEQ ID NO: 192490 - DNA, 476 bp, Gossypium hirsutum
caccgggtggaatcattcttcatgggaagagagctacggaagaggccctgaagatgatgaaactcctcaaattcctgttataactggtgtccgatctagaccggtgagtggggaattcccaggagcaggtgctcttgcttatggcgagcatatgccaaatgcttctcttcataaacgagtgcacccatatcccatgtctgaaactgaaggagctgaaagatgggatgataagaaagagggaggatggaaagagaggatggatgattggaaaatgcagcaagggaatctcggtcccgaagctgatgatgcgtatgacgacatgtccatgcttgatgaagctaggcaaccactgtcaaggaaggtgccaatagcatctagcaagatcaacccttaccgtatggtgatcgtggctcgtttacttatcctggctttcttcctccgctatcgaattttgaacccggtgcatgatgctattg

SEQ ID NO: 192491 - DNA, 396 bp, Gossypium hirsutum
cacctgagtgagaacataattttttttttgcttttttagggattgggaattaagctaatttttttggttttttttagatagtgataggaaaaaaaagtagaattatgatttcgtagctacttttccttcttcttcttttctttcttcttcgcatttagattaacctaacctaaccctaggttttttttttggtgttcttgttaattttgtatttgtttggggtttaaggtaaaagacgcaattctaggtttttttctcccttcttttattttattttttttagagatttttttacttgattgatcatctggatgtttatgggttgtcggtgcggttgatttgaagtttagtgtcgccgtataatttcctcgcttatttaacgggagggattttttt

SEQ ID NO: 192492 - DNA, 1150 bp, Gossypium hirsutum
cccacgcgtccgctcagcttaattcagctgaaaatggcaccttcatctctgccacaaacaccgccgtccgccgtggttattgtcctcttcttactcttctccacggcattgctttgtgaatcaaggttaagcttagattactactccaaaacctgtcccagtttcaccaaaatcatgcaagacaccataaccaacaagcaaatcaccagccccacaaccgccgccggtgcactccgtctatttttccacgactgtcttcccaacggttgcgatggttccatcctcatatcttccaccgcattcaacaaagctgaacgtgatgccgacatcaacttatctctccctggagatccatttgacctcattgttcgagctaaaacagcccttgaactcgcctgtcccaacaccgtctcttgctccgacatcctcgccgtcgctactcgtgacttagtcaccatgcttggtggaccgtactacaatgtttatctgggtcgcaaagattcacgagtttcatcagcttcttcactagaagggaagttacctaaacccaccatgagtatgtcacaacttataaatcttttctcttcaagtgggttcactgttcaagaaatggtggctttaagtggagcgcatacaattgggtgttctcattgcaaagagtttagctcaaatataagcaacgatacccattataatcctagatttgctcaagcattgaaacaagcttgttcaggttatccaaataacccaacattatcagtttttaatgatattatgacccccaacaagtttgataacttgtattatcaaaatctaccaaagggtttggggcttttggaatcagatcatggattgtatggtgatcccagaacaaaaccatttgtggaattgtatgcaagggatcaaaacaagttctttcaagatttcgctaaagctatgcagaagctaagtgtttatgggatcaaaactgggagaagaggagagattagacacaggtgtgatgctgtaaactgagagcttttttttactttgttaattttggtttgttcttttgagatatatttattatacccttgtctttatttgtatcaattgtcacatcaggcttaaaatttatacatatttacatattctgtgttctgggtttcaa

SEQ ID NO: 192493 - DNA, 1413 bp, Gossypium hirsutum
aacacattgcactatccttcaccacacattccccatagctacatgctactactgtgtcattgaccctactctttgccttgttgtattcaccaaatttcttgtttttgattacacaaaatctcccataccttatcttcagtttcctggattctcgtccaatcacttgcgtctctcttgtatcctgttttgattctaagctttgtttgcttacttgtgtgtctgttcatcacatcatctacatttccctccactgtttctctcttctatattttcccaagattattttctctttccgttttttcctccctattttttttctcgggaaaaaaagacttttttttaggtatacccagatcttgtttagttccaagctttaggttgtcatcgttttctcgaggttttaaactatgggtatctcttgaatttgtgaagcaaagggagaaatattggttaaaaactagtagcagtgtattgaatcaagttttacaaaaaaagaagttaaaaagaaagatgaaaatccagtgtgatgtttgtgagagagctccagcaacagtgatatgttgtgcagatgaggctgcactttgtgctaaatgtgatatcgaagttcatgcagctaacaagcttgctagcaaacaccaaaggcttctccttcaatgcctttctaacaagcttcctccttgtgatatatgtcaggaaaaagcagctttcatcttttgtgttgaagacagagctcttttctgccgggattgcgacgaaccgatccatccagccggcagccttgctgcaaaccatcaaaggttcctcgccaccggaatccgagttgccttaagttcgagttgcaataaaaacactgaaaacaatgtgttggagccacccaacaagagtgcacctcagacttcaatgaagaggcctgcgcatcaacaacactcgagcttttcatctccatgggctgttgatgatctgttagaactttcagatattcaatctctaaacaagaaagagcactctgagcttggagagcttgaatggctagcagacatcggtctttttggtgatcaattgccacaggaggctttagcagcagctgaagttcctcaacttccgatatcgcaatcaagcagtacaaacttataccgacctaccaaatattccatggctcttaaaaagcctagaatcgaaaccccggatgaagatgacgagttcttcacagtccctgatctaggttgagttggataacgagactcgtgtgtcagtagttcgaccaaactatagtgtttcatatgttgagtacacttatgcacgtactcatcttatcacgctttactatgttgcctttgtttttaagtatccgacatatgttcaaacattgatatgttgatataatcttttatatacttttcaaatacttaaaat

SEQ ID NO: 192494 - DNA, 649 bp, Gossypium hirsutum
ataagggatcagggatccggaaaagtacatgctggaggacgagtaacctacaagttcgaagaggtagaccgacaaaacttacgagccggtttgcgacagtcattgaggatattagtagcagccggggcagtcgaggtgggtactcatcgtagtgacggccagagaataagatgtaaagggataagcaatgaggagtttgaggagtttttggactcggtttctatgttaacaagcccgttgtgtaccggggaaaactgggtggtgcacaccactgctcaccagatgggaagctgtaggatggggataaatgaaaaggaaggtgcagttgatgaaaatggagagagttgggaagctgaaggattgtttgtttgtgatgcaagtgttttgccaagtgctgttggtgtaaatccaatgatcactgtccagtccactgcttattgtctgtcaaagaagattgcagagtctttaagacaacaaaaatagccttctgaattatagtaatccctcatcaaacacctacacattgttgtgcttttctaaatttgtttgtgtgtattggattgtaagaataataactgaaaagatggtctatccatttttaagatttttgtactcttatgctccttattcgaataaacatggaagtgtt

SEQ ID NO: 192495 - DNA, 609 bp, Gossypium hirsutum
  unsure (1)..(609): unsure at all n locations
gagctattcagatgcgaagttctttatcattaaatcctagagtgaggatgatgtccacaaaagtatcaaatacaatgtgtgggccagtacatctactggcaacaagaaacttgatgcagcatttcacgagaccaaggggaagcctgatagctgtcccgtgtttttattgttctcggttaataccagtggacaatttgtcggattagcagagatggtgggccctgttgattttaacaaaactgtagaatattggcaacaagacaagtggaccggttgcttccctgtgaagtggcacatcattaaggacgtcccgaacacttcgctgaggcacataacacttgagaacaacgagaacaagcctgtcactaatagtagggacacccaagaggttaattttgagcaggggatccacattcttaaaatttttaaagatcatcccagtaagacgtgcattcttgatgattttgaattttatgaagctcgtcaaaagacaatccaagagaaaaaggctaagcatcagctgttacaagaaaaggttttgagtggagagcctaatgatngctgtatggagaagaaagaaatgtggaatagcaaagacgctcggaaaat

SEQ ID NO: 192496 - DNA, 663 bp, Gossypium hirsutum
cgcaaaaccctccttgcagacgtcttctgcttcttcctccaaacaatctccaaggaaacgaaaatggctgcctcttccgcttttctttctacttttatttctccccaaacggtctccttctcacccaaatcctcctcttctcttcgcctccttcctccaactagcgtgcgcatggtacgaactgtgaccctagccaccgcttcacagcccgccaccagcccccggacgccacgcggcatcatgaagccgcgtcgtgtaacgcctgagatgcaggatgtcgtcggagtccctgaaattccccgaactcaagcccttaagcagatttgggcttacattaaagagcacaatcttcaggaccctgaaaacaagaagattataaactgtgatgagaagctgaagaagatatttggtgggaaagatcgcattggatttcttgaaattgctgggctgattagtcctcactttctttgatgaatcctagcgagagagagtgttggtttggagaataggtaggtaaaaacttcagttggttgatcctctctttgaagaaaataatgcttttttgttttcaattttaacagtgctacttggttactacacaagtacctttttaagggttttgttttatttacgcattccctaatatgtagactggttttatga

SEQ ID NO: 192497 - DNA, 461 bp, Gossypium hirsutum
gatttcgacctgccaattgtcacttgatctcatcgtttggcccgtctattcttctcggcgatttagattaattaaatcgtaacagcatgaatttcctgcttggagctttcaagccggcatgcaatatcttgatcacattttccgatgctaaaactcgcaagcaggtccccatgaaaaacgaaaatggccaaatggttatggtaccgcttttccaaagtcaagaaaatattgctgcgaagatctccatagaaccacttcaagggaagaaaattgaacataatggtgtgaaagtcgagcttctcggtcaaatagagatgtattttgacagaggcaacttttatgatttcacctctcttgtacgtgagttggatgttcctggggatatatatgaaagggaaacttacccatttgagttttctacggttgaaatgccatatgaaacttatagtggtgtgaatgtg

SEQ ID NO: 192498 - DNA, 449 bp, Gossypium hirsutum
tctggatcccaaacgtttaatggatccgaaaaccggattctgtcaccaaaccggaacttacagtggccttagacggcccctccctttgccgccaatcaatcaaccgctttccgtggccgaattttgtctctcccttttccagcggacttccactgacggctccaccactttcgtcgtcaatgaaaccgccggcgaatcgctatctcactctcaattcgtttctcaagtacgttccctagcttactctctacagcagcgttactctctttcccaaaacgacgtcgctttcgttgtctcaccgccttcgattcatattcccgttgtttacttcgccttgctgtctttgggaatcatcgtttctccctcaaatccactcagttccaactcggaaatcgcttaccagatccaactcagtaaatccggtattgccttcgctacttcaaaagcct

SEQ ID NO: 192499 - DNA, 739 bp, Gossypium hirsutum
cccacgcgtccggttttctgtcttcctaacttctaaccttttttgtgtgattttcttcggggccaaacagctattaagagcaaatggcagattcgacggtcatcaacggcgaagtggagaatcagatggcggacaatttctacgacgctgatgaagccaaattcactgaacaggatagcaaaattaaagcgcttgaaagtgagaagctggacctgagcaacgagaacaaagagttgaaggagaaggtgaaaaaggcgaccttagaaattgatcaactgcgaaacaaggaagaagaaatgaggcaagaaatggataactgggacgaagataagaaggtcctgaaatcagttgccacgagatcggctgatctcgaaaccgaggttgcgaggcttcaacatgatctgatcacttcgatgagtgatgcagatgaagcgaacaagcagtcgatggagttgaagagagaattggaagagaaagggttggagattaggagattgggcaaggaaatcactgaactgaagaaagagaaagttgagagcgagaagagagagagggagttggagaggaaattaggggttctagaagtgagggaatcggaggagaggagcaaaaatgttaggatggaagaggagctgaggcaacagctggatgtattcaagaataaagttaaggacctggaagcagaggtggcgaaaacgagggttgaactggagacgactataggagaacaacgagaatc

SEQ ID NO: 192500 - DNA, 592 bp, Gossypium hirsutum
gaggaaggtaattttggattgactgagaatggtagtactactgaacctgagaagcgaagggaggttcacagttccaacattgaaaagaaaagtaaatctgttgaggataggaattctaagaagtctaataaacagagtggaaatcttgctaaagtgtcagcttcttgcaaggtgaaaggcaaagataaagaatgcagtagttctaagggcaaagagtgttcgggtagtgaaaagtctgctaggagtgagcttttggctgaagctccagttctcaggtggggttcattcatggataattggggcttagtctctaacaaggatacattattaaatcagaaaggcttggagtttgacaatcactggggaagagtagattatgatgccgtgattccagccgagaaaattgcagaattgaatcttcaggcgattgtttacgaggaaaacttaggagagatccaaccatgtcatgcgcctttaaaaaaaggtggactttgtcagagaagagacttgaagatttgcccatttcatgggcccattatacctcgtgatgatgcaggaaaccaaatcaatcagagttcttcaacagatgata

SEQ ID NO: 192501 - DNA, 1124 bp, Gossypium hirsutum
ctcgaagaagaagtgaagaagaatacccctcttaaaacagcctgagtgaaacgtagcgagagaggaaaagcaacgattttcagtggaagaaagcctagcaatttgaatcggtgtcgtacggaaaatgttcaggaaccagtacgataccgacgtcactacatggagcccagctgggcggttgttccaagtggagtacgcgatggaggccgtgaagcaaggttcggcggcgatcggtctccgatccaagacccatgtggtgttgggttgcgtcaacaaggctaattccgagttgtcttctcaccagaagaagatcttcaaagtcgacgaccacatcggcgttgccatcgccggtctcaccgctgacggccgcgtcctttctcggtatatgcgaaacgagtgtattaactacagcttcacgtacgaatcgccgcttcctgttggcagactcgtcgtccaactcgccgataaagctcaggtctgcacccaacgctcttggaaacgaccttatggtgttggcctgttggtggctggcttggatgaatctggggctcatctttactataactgtccaagtggaaattactttgagtaccaggcttttgccattggatcacgctcacaagctgcaaagacgtacttggaacggaggtttgagaactttacagactcctctcgggatgatctggtcaaagatgctcttatggcaataagggagaccctgcaaggagaaactctaaaaagctcaatatgtacaattgctgtggtaggggctggagaaccgttccacgtattagatcagggaactgtacagcaaatcattgataccttcgagactgcagcggagcaagaagaccccgctaccgaacctgatgctgctacaggtcaggaggctgccgctgagcagggcactgctgctgatcacggtggttctacagatgaaggtgcagccccaatggatatttgaggatgcaagaaccggggttccatccatgttcggcagttgaaaacattattgtgttggatatttccttcttttattctcttacgcaaattgtctttttacccttggtgcaaacaatcaaatgctaggcctgaaactttcacattcacgctcagagatcctg

SEQ ID NO: 192502 - DNA, 404 bp, Gossypium hirsutum
acaaggggaaaaatcaagtttttttttgcttgggtagaatcaaatagataatgttcaggaaccaatacgataccgacgtcactacatggagcccggcgggccggttgttccaagtggagtacgcgatggaggccgtgaaacaaggctcggcggcgatcggactccgatctaagacccatgttgttttgggttgcgttaacaaggctaattccgagttgtcttctcaccagaagaagatcttcaaagtcgacgaccatatcggtgtcgccatagccggtctcaccgccgaccgacgcgtcctatctcggtatatgcggaacgagtgtatcaactatagcttcacgtacgattcgccgcttcccgtgggccgactcgttgttcaactcgccgataaagcccatgtc

SEQ ID NO: 192503 - DNA, 542 bp, Gossypium hirsutum
cccacgcgtccgtaacaatcgctgttgtgaacaaacaaacgcagacttgagcttcaatggcggtgaaaatcttgatagcgtcaatcttagtaattgcagcatctctttgctgggtatcgtcggctgattcgtctgaagctgctttcgtcaaaaagaccatctctgcccacaagatcgtcatcttctcaaagtcctattgcccgtactgcaggaaggcaaaatctgtgttcaaggagttgaaacaagttccattcgttgtggagcttgatgagcgagatgatggatggaatattcaggatgccttgagtgagattgttggtaggcgtactgtaccacaggttttcattaatgggaaacacatcgggggctcagacgatactgttgaagcatatcagagtggaaaattggctaagctgttgggtattgaggtagagaacaaggatgatctctgagtccataaacaaaattgaatgtttgttgccagagtaaattttgattttattgcttttacgtacttctttattgtacttcaactttgaact

SEQ ID NO: 192504 - DNA, 407 bp, Gossypium hirsutum
aaaaacgaaagccaattggagattattctcatgtcgtgtatgttccaagtatatggtctactaaacggagtaattaccggaggaatggtaaatttaacagtaggacctaattccaaccatcaccataaaaatacaaacaaaacatttgcatattcccattacaaacataacacccttactgcaagcctctaccctgctgcttgaaaatccccaaaatcatcctcctctatgtcttctgtgctctgactttcaccacattgttgttcatctctatgctctttctcggacttcgaagccttcttttctgaagttccgtctaactggagatccgggggcgagcttgttggagaattcccagtcgtttctacaggtgaaagttgtgctggtggatgtggctggggtgactt

SEQ ID NO: 192505 - DNA, 431 bp, Gossypium hirsutum
gggataggccaagaaaaaactgtccctatttcttcatcgaggttgaagaagaagaagaagccatggaaaaacaaaacaggtcgggaactgcaggaaaagttataagatgcaaagctgcagtttgcagaaatccaggggaaccacttgtgatagaggaaattatggttgacccacctaaagcttgggagattaggataaaaattctctgtacttctctttgtcattctgacgttaccttctggaaaatatccattggaccatttgcactttttcccagaatttttgggcatgaagctgttggtgttgttgagagtgtaggggagcatgtggaggaatttcaggaaggagatatggtggtacctgtgtttcgtccgaattgtagagaatgtatggactgcaagtcccaaaagggaaatggttgttccatattc

SEQ ID NO: 192506 - DNA, 818 bp, Gossypium hirsutum
  unsure (1)..(818): unsure at all n locations
gaaagttaaatggtttttcacagacaacataaggaagtagacaagcatgatgatgagttcaaataacatggagtgttccgctaaagcgaaggaagaagaagagatcaccaaaataagtcttatgagaagcatggttgaaacacaagatccttcttccaaggaagtagatgatatgacaatgagaagatttctaagaggtcgtgatttagatgtggagaaagcatcgagcatgttcctcaagtacctgaaatggagacgaagctttgttcctaatggtttcatttctccatcagaactcacacatgaaatccaacagaacaagatgtttttgcaaggttccgacaagaaaggacgacctatttctgttcttcttgctgcaagacatttccagcataatggcggcctcgacgaattcaagcgttttatagtctacattttcgacaaaatactgaccaggatgcttccaggacaagataaatttattgtgatcggagatcttgaaggttggggatatgcaaattgcgacatccgggcatacctttctgctctctctctcctgcaggattactacccagaaagattaggaaagatgttcgtagtgcatgcaccctaccttttcatggcagcctggaaagttgttcaccctttcatcgacgtcaaaaccaggaagaagaatagtattcgttgagaacaaaagcctgaaatcaacattgcttgaagaaatagacgagagccanctgccacanatatatggtggcacgctaccattgattcgcattcaagacagctaaaaagcacacccatgaatatgtatatgt

SEQ ID NO: 192507 - DNA, 522 bp, Gossypium hirsutum
  unsure (1)..(522): unsure at all n locations
cgtcaacgaagctcaatgtacaataatgatgctgtaattgctaaaagcacgtggctatcccggtgcaaaattatctattatacagtttttagcatgatgtatggaatggtgggatctcgtgcacatcttgtaatggtcaactcttcatgggctcagtctcacgtcgagaagctttgcggtagtcctaagcgcattaagcgacgttatccaccttgtgatacttcaggacttcaggcacttcctttggaaaggtcggtggaaactccaaaaatcatatctgttgcacaatttcgtcccgagaaggcacatagtcttcaacttgaggccttttctgttgccataaaaaaactagataaacactctcgaagacctaagttgcagtttgtaggtagtttccgaaataaatcagacgaggaaagactccagaatntgaaagacaaagcagtgcaattgaacattcatgacaatgtggaattccataaaaacgtgatgtatagggacttggtaagtcttttgggcggg

SEQ ID NO: 192508 - DNA, 1748 bp, Gossypium hirsutum
  unsure (1)..(1748): unsure at all n locations
cccacgcgtccgcgaaattggcagaaaatgaaggtttccgtcaaaactctcaaaggcactcacttcgatatcgaagtcaaacccgaagatgcggttgcggatgtaaaaaagaacatagaaactgttcaaggggcagatgtttatcctgctgcacaacaaatgcttatctataagggaaaagttcttaaagatgacacgacactggctgaaagcagtgtcactgaaaatagctttattgtgatcatgttgacaaagaataagggtgcatctggggagggttcaactgcttcagctgctcctacaaagaaagctcctgaggcaagtagtctgccaacagctccagcaccagcttctactgcacctgttgcaacgtcagctatggctgcacttgccgctgaatctgctcctgttgcttcaagtactcctctgtcagattctgatgtttatggccaagcagcatctaacctggttgcagggagtaacttagagggaacaatccaacagattcttgatatgggtggagggacctgggacagggacactgttgtccgcgcccttcgtgctgcttataataacccagagagagctgttgaatatttgtattctggcatccccgagcaagctgaagctccacctgtggcccgtgctcctgtagttgggcaaaccactaaccctgcagcaccacctcaacagcctgcacaaatggcagctattcctactagtggacctaatgcaaatccattagacctctttccccagggccttccgaacatgggtgcaagtggtgctggggctggctctcttgattttttacggaacagtccacagtttcaagctttgcgagcgatggtgcaagccaacccacaaatattgcagcctatgcttcaagagttggggaaacaaaatcctaatctaatgagacttatccaagagcatcagggtgactttcttcgcctgatcaatgaacctgctgaaggtggagagggaaacattttggggcaattagctgaggcgatgccacaagctgtgcaagtcacacctgaggaacgtgaagccatagaacggcttgaagcaatggggtttgaccgtgcaactgtgctccaagtgttctttgcgtgcaacaagaatgaggaacttgcagccaactaccttttagatcatatgcatgattttcaggattgagttggtaaaagaaatggcttggggaagtacaatatcattttctctttcgttctttgggggtccattgtcattcatgttccccctcccctccccccaaaactctaccgactttattcttaatcaagtgatgtaagtgtttggtgtagagacaagggatgtgaagatgttaacttcatttttttttcttttttctttttatttccgaaggacccattatttataacgttatatacaagtttctttctaagcttgtgtgttttgtacttcacattttatgctattagaagcacttgccacaaggagctccacccaactttcaagtttttcgatcaacactcttccctataccttgtgcatgaatttggtagcccgtcagaatggttagagttggcagtggaaactctagaaccgtggaaacagtttgaataatatgcagtgaaatttatggtcgcaaaacatgtaaaatttttctattttccaaatatgttggccatgtataacacctttagtgtattcgtaatatacattatcgaatatcannnttnangaanaannnnnngannngg

SEQ ID NO: 192509 - DNA, 1062 bp, Gossypium hirsutum
acgcgtccgctagacgccacaaggatagccctatagcagcagcagcagaagcagaagcaaagggtttagagacgaaatggcagcgaaaaggaagactcccgtcaagaccagaaacccagatctgatccgtggtgtgggaaagtattccaggtctaagatgtaccacaagcgtggcctttgggcaatcaaggccaaaaatggcggtgctttcccccgccatgatcccaaacctaaggcccccgctgccgctgagaaacctcccaagttttacccggctgaggatgtcaagaagccgctccttaacaagcgcaaacctaaacccaccaaactcagagcaagcattacaccagggactgtgttgattttgttggctggaaggtttatggggaagagagttgttttcttgaagcaacttacttctgggctccttttggtcaccggaccattcaagatcaacggtgttcctttaaggcgtgttaaccaatcctatgtcattgctacttccaccaaggttgacatctcaggggttaacgtagacaagtttgatgacaagtactttgccaaggaagtagagaagaggaagaagaagactgagggagagtttttcgaggctgaaaaagaggataagaaaaaactgcctgaagacaagaaagaagaccagaaagcagtcgacgcctctttgataaagtccattgagggagtcccagacttgaaggcctacctcgccgcaaggttttctctcaagtctggcatgaaaccgcacgagcttgtcttctagagggtattttgcattcccttatgttaaagggattttacttttgaattcttttggtttagattatctatggttttattatggggtgctattgctatatgtccagaacctaaattttggatagtatcttctgttatgcaagaacttaaagtttccttaatttcgtttgtgttctgggctttaatttgattgaagcttgttctattttaatgatggccgatgggaacacaagtatttctacctgaataattttcatatcagtaaataaaatctcttaaatattgaac

SEQ ID NO: 192510 - DNA, 743 bp, Gossypium hirsutum
cccacgcgtccggaaaattatcatttcgtgatatcggtatcgcacgttaaatcacgtgatggcgagtgctgacgtggaggccgtggatttcgagccggaggacgacgacctcatggacgaggacgccgccgctggtgacgcatcacctcaagtctccatgcctaagctcaagtctgccatcactggcggcgcttccgtttctctttctggccctaagaagactaaaggccgtggcttccgccaggacgacgccgaccgtcactcccatctcgcttcccgcgactttgactctctcggctctgacggcggccccggtccacagagatctattgaaggatggataattttggtcactggtgtacatgaggaagcacaagaggatgatttgcacaatacatttggtgaatttggtgagatcaagaatttgcatttaaatcttgatcgtcgcactggatttgtcaagggatatgcactgattgaatatgaaaagtttgaagaagcaaagaatgccatatctgcaatggatggagcagaacttcttacgcagactatgaatgttgattgggcctttagcaatggacccagtgttggagcctctaagagaaaaaatatgagagccggacggacacatcgctctcggagtcctaggagaagatactaacttgaactctattacgagaatcaatttgtaacaagagattttaagatttggtgcttgaaatttactggaattatggaatttt

SEQ ID NO: 192511 - DNA, 596 bp, Gossypium hirsutum
gtatattttaaggctggcagattcattccagataaagttttcatgatgcagaacaaatgggcggttctaagaagaaagctgctcgtgaactcagtgagatcaacgtcgttgatgaacaagaacttacagaagcttcagctagtattgaaccaaagcatcacaacgacgttgcagatttaataaatagttacaaaagtttatacccaaaatgggtttttgtcctcagcaggccttacaccagggactgtgttgattctgtgtggctggaaggtttatggggaagagagtatgttttcttgaagcaacattacttctgggctcccctttggctcccctgtgggcattacatattttactgctatccttgtctcgtcattgatttgcttactgcttgaaaatattggatgtatgatatatgttattcaattgcgagctggatatatgaacatgtttgttaaaacccttgttattgatttattttaattttgattctaaatttttatttttactttaatatttacgacaacttgagttttaaaaaaaaaaaaaaaaaaaaaaaattttattttttataatatatttttattttttttttt

SEQ ID NO: 192512 - DNA, 468 bp, Gossypium hirsutum
tttttccagttagttccacagcacactgccgaattttgaatccagtaacaaatggattttgttgaacactttcgaaaagttaaggcacgttcagatcgcagtgatggccaatgctgacgtggaagcggtggatttcgagccggaggaagatgacctcatggacgaggacgccgccggcgacgcctcccctcaagctcccatgcctaagctcaagtccgccatcactggcggtgcttcagcctctctttctgcccctaagaaaaccaagggccgtggcttccgcgaggaagatgctgaccgccactcccgtctcgcctctcgcgacttcgagtcccttggcactgatggtggcctcggtccccagagatctattgaaggatggattattttggtcagtggtgtacatgaagaagcccaagaggatgatttgcacaatgcatttggtgaatttggtgagatcaagaattt

SEQ ID NO: 192513 - DNA, 774 bp, Gossypium hirsutum
ggtgaatctgctccagatcctgggttgatggatgaggttgttccagatgaaatagatagagaggatcctctcaatgacagccgagaaatgttgtctcgctctctaggaagggatgacagcggatcaaaagttgatggctctgccaaggcagagtctattgagagtggtgaaaagataagccaaagctgcaaagtaatcctggataacaatgctcatccttctctttcttgcaatgcaaatgtgtactctggtaatgaaacaaccaaggagataaaaaatgctggaaaatcatcttgcataaacaactgtacatatccagattcagatcttgctgtcgcaactgggatagggccaccaaaaggagaaagcaattatgaagaagctatagaatttgatccaattattcatcacaaccagttctgcctctgggtgaatgggaatgtagctgctgctggctgcagtggctactccagctccacctcctgctccaatgctgatgttgttgcactttgtgggtggcagctgaccttggatgctctggatgccctgcgatcactggggcatattcctgtacagacagtacagtcagagtcggcagcatcattgcataaggatgatcagcaaactcctggtagaagtctccttcaacggcattctgtgaacaaaagtcatggccaacattgatagtcgaacatgaagtgcaaggaaacctgcaatgaaacctgcatggagcagtgtaattacgatttccctctggctttcatgtatgcacca

SEQ ID NO: 192514 - DNA, 939 bp, Gossypium hirsutum
gttctgcactgctgccttttcttcttcttcgagcgatctaaaaccctaaatcagaatgaattttacggcttcaaagcaacctgaaagttgcttgcttggccctgaatcggactcccaaaggacactgtacccatatgtgacaggaacatcagtcgtggctttaaagtataaagatgggattttgatggctgctgatatgggaggttcgtatgggtccaccctgcggtacaagagtgtggagcgaatgaagcctattggcaagcattcccttctgggtgctagtggggaaatcagtgatttccaagagattttgaagtatcttgacgagcttatcttatatgacaatatgtgggatgacggcaactctttggggcctaaagaggtgcacaattacttgactcgagttatgtacaacaggcgcaacaagttcaatccattatggaactcccttgtacttggtggagttaaaaaaggagagaagtatcttggaacggtcagtatgattggtgtaaactttgaggacaatcatgttgcaactgggttcggagaccaccttgctcggccaattcttcgtcaagagtggcatgagaacttgagctttgaagatggtgttagactattggagaaatgcatgcgtgttctcctgtatcgtgatagatcagctgttaacaagcttcagatagctaaaattactgagaatggggtaccattttccaagacatatatatggaacacactctgaaaattctgcgtttgagagacctgtgcacagggctctatgagcacaggggctcgtgcaaactcttcataccctttgggaacttctatgcgctcatatgataagaacatcttacatcgatgggagacaacttgttgcatgatgttatatgtctggaagaaacttattgagtttgatgctgattgtcatttgatttaatg

SEQ ID NO: 192515 - DNA, 887 bp, Gossypium hirsutum
gaaggcctcgaacgaccgcacgcgacccgcgcgtcggaccctgcttacctggaaaaaagtgttttatggtttccaaagggctcaactttcggtgccaagggcagcaactaccctccatgccccaaacctgacctaatcaagggactcagggctcacactgatgctggtggaatcatcttactcttccaagatgacaaggtcagcggccttcagcttctcaaggatggtcagtggattgatgttcctcctatgaaacactctattgtcatcaaccttggtgaccaacttgaggtaatcacaaatggtaaatataagagtgtgatgcaccgtgtgattgctcaaacagatgggaccagaatgtccattgcttccttctacaacccgggcagtgatgctgttatatatccagcaccagctttgctagagaaagaagctgacaaatctcaagtgtaccccaaatttgtgtttgaggactacatgaatctctatgctgacctcaagttccaagccaaggagccaaggttcgaagccatgaagaccgtggagtctgcagttaacttgggtcctattgcaactgtttgagtccttcagtgattgaagagcgatgggttttaattagcagtgtgtttctgttaataagtttagtcggctgatggataaattctgttaattatagttctggaattagagagtgcctgcaggtgtggagcttagtagtttaaaataagctgaaaaagcttgtactaagaattcctcagttatatatggtgcctggtcgccagtggctgtgctttaaatgagatgttttggctgtcggaagtgaccaaattatatttgatatgaaaaattgtccttaagattcttaatatattttcatctctatattt

SEQ ID NO: 192516 - DNA, 476 bp, Gossypium hirsutum
agctatcataacctcattgatagaaaagcttagtaaaagccccgggataaacaaaaaatggagctcactttccctgtaatcgacttctccaaactcaatggtgaggagagagcagccgccatggaaatgatcaaagatgcctgtgagaattggggtttctttgagctggcgaaccatggaatatctcatgagctgatggacactgtggagaggctgacaaaggagcactacagaaagtgcatggagcataggttcaaagaaatggtggccagtaagggtcttgaggctgttcaatctgagatcactgacatggattgggaaagcaccttcttcttgcgccacttgcctgaatctaacctgtctgaaattcctgatctcgaagatgattacaggaaggtgatgaaggaactccacagcaagggcagatgatgttgttagccactctcttgtaacttagattgatcaatgtagagatg

SEQ ID NO: 192517 - DNA, 792 bp, Gossypium hirsutum
cccacgcgtccgagctaacataacctcattgatagaaaagcttagtaaaatccccgggatggacaaaaaatggagctcactttccctgtaatcgacttctccaaactcaatggtccggagagtgcagccgccatggaaatgatcaaagatgcctgtgagaattggggtttctttgagttggtgaaccatggaatatctcatgagctgatggacactgtggagaggctgacaaaggagcactacagaaagtgcatggagcaaaggttcaaagaaatggtggccagtaagggtcttgaggctgttcaatctgagatcaatgacatggattgggaaagcaccttctttttgcgccacttgcctgaatctaacatgtctgaaattcctgatcttgaagaagattacagaaaggtgatgaaggaatttgcagtggagttggagaagcttgcagagcaacttttggaccttttgtgtgagaatctggggttggagcctggttacctgaaaaaagtgttttatgggtccaaagggccaacctttggtaccaaggtcagcaactatcctccatgccccaaacctgacctaattcaagggactcagggctcacactgatgctggtggaatcatcttactcttccaagatgacaaggtcagcggccttcagcttctcaaggatggtcagtggattgatgttcctcctatgaaacactctattgtcatcaaccttggtgaccaacttgaggtgatcacaaatggctagtacaagagtgtgatgcaccgtgtgattgctcaaac

SEQ ID NO: 192518 - DNA, 474 bp, Gossypium hirsutum
caaacacaaacatattactgctcactatagcctaatagtggaattgttgaaagagaaaacaaaaatggaggtagctttccctgttattgacttgtccaaaatcaatggtgaggagagaggagccaccatggacatgatcaaagatgcttgtgagaattggggtttctttgagctgacgaaccatggaatatctcatgaactgatggacactgtggagaaactgacaaaggagcattacaaaaagtgcatggaggataggttcaaagaaatggtgacaagtaaaggtcttgaagttgttcaatctgagatcactgacatggattgggaaagcactttcttcttgcgccacttgcctgaatcaaacctttatgaaattcctgatcttgaatatgattacaggaaggtgatgaagcaatttgcagtggagttggagaagctggctgagaaacttttggacatactgtgtgagaatct

SEQ ID NO: 192519 - DNA, 1579 bp, Gossypium hirsutum
aaagaaccccgcctactgctgtaggcatcattcaataaacttccttcaacgtcctttactgtttcttcttgtattccagtttctccattgccaaactctccctcaaagctcaatcacttttttctttttcgttcaaacgacagaaatgaagagtttgagtccttcaaataatttatatttcttcctcctccatttttttattatcacagtttatttcgcctcattgtctttcggtctcaagatcggggaaacatgttcttcttctggtagtagtagttcatgcgactccggcttaacatgtcaaacttgcgccgcaaatggaaatacccgacccagatgcactcggattcaaccactcagccctacatcaaaggtaaaaggtttgccatttaacaaatattcttggctcacaactcacaactcttttgcactcaaaggggtaaagtctgaaactggatcctctattattgcacccactaaccaggaagacaccatcaccaatcaacttaagaatggggttcgtggacttatgctggatatgtatgacttcaacggtgatatatggttatgtcattcctttggtggccaatgcttcaatgccacagcatttcaacctgccattaatgtgctcaaagagatacaggcgtttctagaggcaaatccatctgagattatcaccatatttattgaggactatgtggtatccccacaaggcttaacaaaggttttcaatgcatctggtttgaggcagtactggttccctgtttcaaagatgcctaagaatggtgaagattggcccacagtggacgaaatggtcaagcagaaccaacgacttgtagttttcacttccaaatcagctaaagaggcttctgaggggattgcttatgaatggagatatgttgtagaaaaccaatatggagatgatgggatgaaggctggttcctgcccaaaccgtgctgagtcattctcctatgaatacaaaatcaagatcattgattcttcaaaactattttcctactaatccgaacgagacagcagcttgcgcagaaaattcagctccactggtaaagatgctggacacttgtcataaagcagctggagatcgctggccaaacttcattgctgttgatttttaccagaggaatgatggtggaggagcctcggaagctttagatgtcgccaatggtcatctcacttgtggctgtgacaatatggcctattgcaaggccaatgctacatccggcacctgtgaagtccctccaatgtcacctcctccaccggctgccgccactcaaaccaccacagaaaatcctgcagcgtctaactccaacattgctaacacggatgccagacctctccaattgcggtggttattggccacaattttgaccaaactcctattgttacagttatggtaaatcaccagtttgcctgtctaaaatttatttttagtttgtaagattcgagtcacacggctgttgtttcacagagcaactcctgagcgtcttctttaggttcttgttgttaatgcacctctgcttctcatttgttatataaaataatattaatatattgctcc

SEQ ID NO: 192520 - DNA, 1155 bp, Gossypium hirsutum
gatagaatttttgaaggagtttgccgtccttttaaagtgagagttgagcaagttttacagtcacaacctagtcttataatctcttataaacttagtaacactctagagttctacagctacactatatcagatctactggggagagagacatctctctgcaatacgctttgggcactcaaagatgctgctcagaaaacattctttgaaattctgaaaagccgcggggaaaagcttttacgatatcctccccttgttgctgttgatctttcacctgcaccagctgtaagggaaggagtctctgtgctgctcgagataattggcacatataacagcatgatgggtcctgcttcagggaaaaagccaccttttgaatccggttattcctgccttaactggatccatttattcacatgtgtgagcaagcagcagaggcacacaaatcaaagggagctggccactcatcaagaagaagtcgaatgagtcccgactcgggccaccttagtaaatctgcagttgatgcaattttgtcaattaacaactcggctaccttctctcagaatactgaagctccatccaagatcttccttatcaactgcttgtgtgctatgcaacaaccattactcggacatgaggttgcagctgaatatgcaaagaaacttggcactacgattgataatcatgtaaatgttctcgtggaaaaagaagttgacacaattcttagaagatgtgatttatcaacgaagatgcatcacttccataattggtttaacaaggatacaacagctgggacgccattggctgagttagaagacacaactccagcttctctttcagagtgtttgaaggcctttttcggatttattttgggaagtgacagttcgctgcctgagtttgaacaaatgcaagttccaaagttgcgttctgatgcgtgtatacaggtagctaagtcattagcagacacttatgagcttatttacaatgcaatcatggatcccaaaaacaaatacccagatcccaaatcactggcaaggcatcctccagatcaaataagaaccattttgggaatatgaagctgtaaaccatatttgcttttaaaatggttgtaaagaaacagagtcatgctttggagtaatggaaacttttggtggcttttta

SEQ ID NO: 192521 - DNA, 1063 bp, Gossypium hirsutum
taggatcaaagcaatttgtcctaaccagatcagaatcgagcaaatggagttcccattcggtcacaatcactctcacactcatcaccacagaaatgatgatgaggaaaaccaagaaagacccccaccaccacatcttcaccaccatgaatttactccgccgtaccctccaccaccaagctaccagcagccacctggctttgatggaccctatcctccgccacctccatcatcatacttgcaccaacctggctttgatggtccacccccaccatcttactttcagcaacctggatttccaccacccccaccacaccaaccaccgtcatatcagtaccaacagccaccccatgtgactcatgtccaccgccagcctgaacacagtccatcgaactactctccaccaccagcatctgtttcaaatgtttcccatgaaagtagccaaggaagggttgatgaccatccttcttttagaccccatttgccacctgaattctacaagaaacctactgtgaaagtctattgcaaagctgatcctaattttcatctcaccatcagagacggtaaagttattcttgctccatctgatccctctaatgaattccagcactggtacaaagatgagaagttcagcacaagtgtgaaagatgaagtgggtttcccaagcttttctctggttaataaagccactggtcaagccattaaacattccattggagcttcttatcctgtccaactggtaccttacaaaccagatcatcttgatgagtcagttgatttcaggtgctctgatgtgtcctccaccgttgatgcatcactcaccatggtcatgggagacgacatggttaaggtgattgcttggtacgacaatgagtggggttactctcaaagagttgtagacttggctgacattgttgccaacaactggaagtgattcgaaatacttgtctgcagtgtgatatggttaatttttgctcacctcatttcttttcggctttcatcaaagatgtataattttaacgtggactgtatgcaataaaaatcgtgcttgcactttgatggcctt

SEQ ID NO: 192522 - DNA, 1462 bp, Gossypium hirsutum
  unsure (1)..(1462): unsure at all n locations
cccacgcgtccgcccacgcgtccgcccacgcgtccggtccgtctctctgttttactccacaaccactatcactaccattatggcttcggctactgtttctgtagccaaacccaaccttcagattcaggcaaaaggaaagggtgttggttttgcagatttctcaggcctacacaactcctctactagccttccctttgccaggaaaacctctgatgacttccattcactcgttgcttttcagacatctgctctaggaagcaataatggcgggtacaggaaagggatggcagaggcaaagctaaaggtggctataaatgggtttggtaggattggcaggaacttcttaaggtgctggcatggccgtaaagactccccacttgatgtcattgccatcaatgacactggtggtgttaagcaggcttctcaccttctcaaatatgattccacccttggcatcttcgctgccgatgtcaagcctgtcggcactgatggcatctctgttgatggcaaggttatcaaggttgtttctgaccgcaaccctgccaacctcccatggggggacctaggaatagatctagtcatcgaaggaaccggtgtgtttgtcgatagagaaggtgcaggtaagcacattcaagcaggagccaagaaagtgctgattactgccccaggtaagggtgacatccccacctatgttgttggagtgaatgctgacacctacaacccagatgagcctatcatcagcaatgcttcttgcaccaccaattgccttgctcctttcgtcaaggttctggaccagaagtttggtatcatcaagggcaccatgactaccactcactcgtacaccggtgaccagaggctacttgatgctagccaccgagacctcaggcgtgctagagccgcagctctcaacatcgtcccgacttcaactggtgcggcgaaggccgtggcccttgtactccctactctcaaaggcaaacttaatggcatcgcattgcgtgtaccaacaccaaatgtgtcggtggtggacctagtggtccaggtttcaaagaagacgtttgctgaagaggtgaacgctgctttcaaagagagtgcagagaaagagctacagggtatactttcagtgtgtgaagaaccccttgtttcagtggacttcaggtgctctgatgtgtcctccaccgttgatgcatcactcaccatggtcatgggagatgacatggttaaggtgattgcttggtatgacaatgagtggggctactctcaaagggttgtggatttggctgacattgttgccaatagctggaagtgacttcaatgtgctatacatatatgcataacaatgtcaccgatggttgattnttgcatgctcacttcattnntattctttcggcttcagcaatttctcattttgtcaaggctactatataatctgtaatgtaatgttggatacatacaatctctaata

SEQ ID NO: 192523 - DNA, 557 bp, Gossypium hirsutum
cccacccgtccgccacgcgtccgaaaaaccgcgtccggtgtgcctctgctacgcaccacttcttaagcagcttcctctacgatcataatggtgtcggttactgtttctgtagccaaaccaacccttcaggcaaatgcaaagggttttgcggaattctcaggtctgcgcaactcagctagccttacctttgccaggaaaacctcggatgactttcaatcagtcattgcttttcagacttctgctttgggaatcaataatggtggataccggaaaggcgtggtagaggcaaagctaaaggtcgctattaatgggtttggtaggattggcaggaacttcttaaggtgctggcacggccgtaaggactccccacttgatgtcattgcaatcaatgacactggtggtgttaagcaggcttctcaccttctcaagtatgactctacccttgggatatttgaagccgatgttaagcctgttggtgataacgccatatcttgtgatggcaaggtcatcaaagtcgtttctgaccgcaaccccgtgaaccttccatggaaagactt

SEQ ID NO: 192524 - DNA, 669 bp, Gossypium hirsutum
cccacgcgtccgcccacgcgtaggctcgggtctagaatttttttataaccaaaggcacaacggctactacgtatgcatatactggtgaccaacgatcactcgatgctagccaccgcgacctcatgcgtgctagagctgcacctctaaacattgttacgacttcaactggtgcagctaacgctgtggcccttgtactccctactctcaaaggcaaactaaatggcattgccttgcgcagaccaacaccaaatgtttcggtcgttgacttaattgaccaggtcacaaagaagaccttcgctgaagacgcgaatgctgccttcagagaaagtgcagagaaggagcttaagggtatcctttctgtatgcgatgaaccccttgtctcagttgatttcaggtgctctgatgtgtcctccaccgttgatgcatcactcaccatggtcatgggagacgacatggttaaggtgattgcttggtacgacaatgagtggggttactctcaaagagttgtagacttggctgacattgttgccaacaactggaagtgattcgaaatacttgtctgcagtgtgatatggttaatttttgctcacctcatttcttttcggctttcatcaagaatgtataattttaacgtggactgtatgcaataaaaatcgtgcttgcacttaa

SEQ ID NO: 192525 - DNA, 497 bp, Gossypium hirsutum
agccttccggcattcacccaattacctaactaactactttgttctgctctcttctacttatgcaatctaaaacctctgccatctgcccggctctctgttttactccacaaccactatcactaccattatggcttcggctactgtttctgtagccaaacccaaccttcagattcaggcaaaaggaaagggtgttggttttgcagatttctcaggcctacacaactcctctactagccttccctttgccaggaaaacctctgatgacttccattcactcgttgcttttcagacatctgctctaggaagcaataatggcgggtacaggaaagggatggcagaggcaaagctaaaggtggctataaatgggtttggtaggattggcaggaatttcttaagatgctggcatggccgtaaggactccccacttgatgtcattgccatcaatgacactggtggtgttaagcaagcttttcaccttctcaaatatgattccaccc

SEQ ID NO: 192526 - DNA, 991 bp, Gossypium hirsutum
ctcagcttatcctctcttacactctcgactcttatcaaattcaatctttctctcaccatggcacaaacccttacacgtgccgccacatccaccctcacgcgccaccttactctctcctttatcctcccaaagcgcctcctttcctccaaatccatcacccatcctcctcccatcccttccctccgcttctcccgccgccctcttacccctctttcccacgccgtccgatgtctccctctcgctcccacgcgcttcacttccatccgttgccgcgtcaaccgctccgggaactccgcctactctccgctcaactcggggtcgaacttcagcgaccggccgccgactgaaatggccccgctgtttccgggttgtgattatgagcattggcttatcgttatggataagcccggtggagaaggagctactaagcaggaaatgatcgattgctatatcaaaacccttgctaaagtcgtcggcagtgaggaagaagccaagaagaagatctacaacgtttcgtgtgagaggtactttggattcggatgcgagatcgacgaagagacctcaaataagctagaaggattgcctggtgttctctttgtgctcccagattcttatgtcgatcccgagtacaaggactatggtgctgaattgtttgttaatggggagattgttcaacgatcaccagaaagacaaaggagggtggaaccacaaccgcaaagggcccaagacagaccaaggtacaacgatcggactcgttatgttcgtcgcagagagaacatgaggtgaaaagtataattagaaagaaagaaaatgatttatagaactccttttaagtgtttcttgagatatgggagcattactattatgaagataagacatggaaaagaaaagcttatgttgatgttttttaatgtaggtctgaatctgaacttgaatgttttgtggtctgcttgagtttcagcgtaaaactgatgtaggattattatgatgt

SEQ ID NO: 192527 - DNA, 690 bp, Gossypium hirsutum
tccacgcgccaccctctctcaaaatctcaaacccagatttgttctctctctctctctctctctatttccaatcaattaattcctccattggaggagcttagggtttgttggtgttctggtctttgctttgtctgaaaaataaacagaattataaacgaacaccaacgccatgggaagatttgaagagagaggattcgattcagtggtttgccctaagcctatccgaacctttagatggtctaccaacagctgttatcagactgagatggctgattcaaaaactggtgcagagcttcttgatataatcctccccgagggagggtatggggccgagaatcccaccaaccaaatggcttcatcaccaccgtatttctgtggatcaccgccgagcagggcgtcgaatccggtaatccaagatgcccgattcaacgacgagcagccggtgctacctccactaacatccccagcaacctcctcaaggggaggatgcgtgagggtgaaattcgggcagatgccagctgctgtacgaatcgagggatttgattgcctcaccagagatggccgccatcgcagcatctccgccgtggcttaaaaaaaaccaagatatgagaacaaaaatgtgagaggagagagggaggagaggagagagggagatgataaaaataaataacaacttggaatagtgtgggt

SEQ ID NO: 192528 - DNA, 1066 bp, Gossypium hirsutum
  unsure (1)..(1066): unsure at all n locations
aaccgggccgacccacgcgttcggccaacccttccgttaaaaccaaattttgttttttctctctctctctctctccaaggaggggaattcctccttgggaggagctaagggttggtgggtgttctgaccttggctctgcctgaaaattaaccagatttttaacccacaaccaccgccatgggaagatttgaagagggaggattcgattcagtggtttgccctaagcctatacgaacctntagatggtctaccaacagctgttatcagactgagatggctgattcaaaagctggtgcagagcttcttgatataatcctctccgagggagggtatggggccgagaaccccaccgaccaaatgggcttcatcaccaccgtgtgtctgtggatcaccgccgagcagggcgtcaaatccggtaatccaagatgcccgattcaacgacgagcagccggtgctacctccactaacatccccgggaccctcctcaaggggaggatgcgtgagggtgaaattcgggcagatgccagctgctgtacgaatcgagggatttgattgcctcaccagagatggccgccatcgcagaatctccgccgtggcttaagaaataccgaggggaagaaaattttgatatgagaaaaaaaaattgagaggagagagggagatgataaaattaagttacaacttggaatagtgtgggtagtgttggatttgtaaatagaagattaaaatgagatgatgggtgttaaattgttgggtctttgatgattttgggatgggattttccttgcataaaagaactagaggggagcaaaaacaaggttgattgcccccactcttgttagggttcctttttctttttttgctttctttaattattaattactgtatttggtgagaggagaggatggatgggagacttttttgtaatatatcgtgtttgatcaatgacactctcatccttcctccttcgcatgtaattgtaatttgaaggaaatggaggttttaatttttcttttgccttnnnnnnnnnnnnnnnnnnnnnnnnnnnnnnnnnnnnnnnnnnnnn

SEQ ID NO: 192529 - DNA, 639 bp, Gossypium hirsutum
cccttgcgtccgcaaacccagatttgttctctctgtctctctctctctatttccaatcaattaattcctccattggaggagcttagggtttgttggtgttctggtctttgctttgtctgaaaaataaacagaattataaacgaacaccaacgccatgggaagatttgaagagagaggattcgattcagtggtttgccctaagcctatccgaacctttagatggtctaccaacagctgttatcagactgagatggctgattcaaaaactggtgcagagcttcttgatataatcctccactaacatccccggcgacctcctcaaggggaggatgcgtgagggtgaaattcgggcagatgccagctgctgtacgaatcgagggatttgattgcctcaccagagatggccgccatcgcagcatcttcgccgtggcttaaaaaaaaccaagatatgggaacaaaaatgtgagaggagagagggagatgataaaattaagttacaacttggaatagtgtgggtagtgttggatttgttaatagaagattaaaaagagatgatgggtgttaaaatgttgggacttttatgattttgggatgggattttttcttgcataaaaaaactaagaggggagcaaaaacaag

SEQ ID NO: 192530 - DNA, 622 bp, Gossypium hirsutum
  unsure (1)..(622): unsure at all n locations
taccttttctgatggaacagtctacaaggggactttatgaagtggggtcgaaatagcagtgacatcaactgcgatttcgtctcgtgaagactggtcaaagaatttagagacacaatttagaaacaagatagactcgttgtctaaagtgaaccacaagaatttcgtgaacctcattggctattgtgaagaaaatacgcccttcacaagaatgatggtttttgagtatgttcctaatggatcactctttgagcatctacatatacaagaagctgagcacttggactggggaatgcgcctaaggatagccatgggaatagcgtactgccttgagcatatgcatcagcttactccccctatagcccatagaaacttgcagtcttgctctgtgtatctgactgaagactatgctgcaaaaatatctgatttcagcttcttgaataatgctaccgcagccaaggtgggatcggctaccatggagctcttagaatctccatcagcagatgcagagagcaatgtttacagcttcggggtgatattgtttgaaatgataactggtaggatcccgtattcgatagacaatggctcccttgcagactgngcctcagactacttgaaaagggac

SEQ ID NO: 192531 - DNA, 542 bp, Gossypium hirsutum
gcagttctatcactgaggcaactcaatcggttgatcttattagtgggactaaactgctggcaggtgggatgacatcagatcagatggaccttcttgttgagcaagttaagatgcttgctggagagattgcatttagcaccagtaccctgaaacgcctggtggaccagtctgtaaatgatcctgatagctcaaaaactcagattcagaatttggaaagagagattcaggagaagagaaggcaaatgagggtgttagagcagcgtataattgagagtggtgaagcttcaatcgctaatgcttcatttgtggatatgcagcagacagttatgagattgatgacacaatgtaatgaaaagagttttgagctggagataaaatcagcagataatcgtatcctccaagaacaattgttgaacaagtgttctgagaatgaggaattgcagaataaggtgaatctcctggagcagcggttggcatctttgtccggcgacaaattatccttgtcctctgaacaaggaatatctgaagaatattctgatgag

SEQ ID NO: 192532 - DNA, 1562 bp, Gossypium hirsutum
cttacatttaaggcttacaaacatgtttctgcactaagagctactgctctaatgtctaatgaagtgaaacctgagcaattcgcggttctcgttagagacttgccgaatgccacttcaggtcaaactcgaaaacagcaggttgatacatacttcaaatctatatatcctgagacattctacagatcaatggtggtcactaacaacaaagaggttgataaaatctggggagagttggaagggtacaagaagaagcttgcgcgcgcagaagccatatatgcactgtcccagggaaatggtcaaggcacgagaccaaccaacagaaccggcttccttggtctctgtggtaaaaaagtagacagcatagagtactacaatgaaaagattaaggaattgacacaaaaattggaagctgaacaaaaggtcaccctccgagaaaagcagcaaggttctgctttggttttctttaccagtagggtgactgcagccctggctgctcaaagcctacatgctcagatggttgacaattggaccgttactgaagcgcccgaacctcgtcaactcatatggagcaacctgaccatcaagttttacaataggataatacgacaatatgtcgtttatattgtcgtgtttctgaccatagttttttatatgattcccattgcttttatctctgcagtcacaacccttaagaatctgagaaaacttctgccattcttgaagcctattgttgatatagctgcactaaagacggtattggaggcatatcttcctcagcttgcactcatcatattgagggcattattgcccaagttcctcttgttcctctctaaaaccgaaggaatccctagtgggagccatgtcataagggctgcatctgggaaatacttttatttcatcgtgtttaatgttttcattggtgttactattggtgggactttgttcgcttcaattaagaccattgaggagaaacctaactccgttttcgacatgctggcaaaaagtctgcctggcaatgcaactttcttccttacattcgtggctctaaagttctttgttggttatgggcttgagctttctcgaatagtccctttaatcatatatcatttgaagaggaaatatctttgcaagaacgaagccgagttaagagaagcttggtttcccggagatattaactatgcaactagagttcctagtgacatgcttatcgtcacaatcgttctttgctactcggttatagctcctgtgatcatcccatttggagtactttactttgccttgggttggcttgttctccggaatcaggcactcaaagtttatgttccagcatatgagagctatggaagaatgtggcctcacatgcaaatccgaatcattagtgccctgttcttataccaagttaccatgttgggttactttggggtgatgagattctactatactcccatcctgggtccgctcccgatattatctcttgtcttcgtctttgtctgtaggaagaaattctatggggctttttgtcacacggtgctagaggtcgcttgccatgaactgaaagaaac

SEQ ID NO: 192533 - DNA, 1151 bp, Gossypium hirsutum
gtccacttatttatcttcttatccacttccctctggtatttcatttatccctcgcccgtattctctttcactgcaaactgtgagcgagtgagtgagatggcttgctcagctacttcatcggccgcggctctcatctcctctaagccaagggctttctcctccaattccaagcccttctcccaatccctttctctccccaatcccttcactggtctccctgcccctctcctttctcgtcccgcctccttttccctctcccgcacctccccttctcgcaagtctttcgtcgtcaaagccaccagtgagcttccattggtgggaaatcctgcccctgattttgaggctgaggccgtctttgaccaggagttcattaaggtcaagctctccgaatacattgggaagaaatatgtgattctcttcttttacccgctggacttcacatttgtttgccccacagagattactgctttcagtgaccgctatgaagaatttgagaagctaaacaccgaaatattaggtgtttctattgacagtgtgttctctcaccttgcctgggttcaaacagatagaaagtcaggtggtcttggtgatttgaagtatcctctcatatctgatgtcacaaagacaattgccaaagcctatggagtgttgattcctgatcagggaattgcattgagagggcttttcattatagataaagagggaattatccagcactccaccatcaacaatcttgctattggacggagcgttgatgaaacaatgaggactctccaggccttgcagtatgtgcaggaaaatccagatgaagtatgcccagctgggtggaaacccggagagaaatccatgaaacctgaccctaagctcagcaaggattactttgcagcaatttgaggtatagcctagaaagcagaaggtatgtgttgcgtccattaggattgactaaatgagtttttgtttttcaatgtatcttttttgttttaaagaattgcttagccttggatggtaatataaaagtatggggaaataatcaaatattaatgtttggattgtgtcttttgtatcttcaaaggctgaagcataataatcttactgtctggactgcctgcatgatgatttttctactattttttgttaaaaaaaaaaatact

SEQ ID NO: 192534 - DNA, 522 bp, Gossypium hirsutum
gtctaaactagaactacggatccctgcatctatacgaatccagcacgagttttttctttttacagaatggaattttccatgagagaatcgacatgagaagatttctttcaacatacatcggaaaacagaggtattccccaaatcaacgctaaaaaagaaaaaaataataaaaaataaaagctcagccccaaaatgagcattaaaagtttatatctgaaagcatgattagatcttaaccttgaactgtaacctaagacacacaatagcgattatctcatctgaaaacatgatcgaatctaagaatcatgattatatatgataaaagcatctcccgttttacacattaatcgatcttgacagatgagtagataagccttgtgaaccaaaaacatgcataaaacccaatggggcccgttagcccgaaaaatgcatatgaagcaactagcatgtatccaaaatacagcatcccagaaaccagcttagtgatctcaagcttcgcgaacgcgtgggcggacgcgtggg

SEQ ID NO: 192535 - DNA, 795 bp, Gossypium hirsutum
tcttttgttgtgaagaaaaaaatggttggtgtgtttaggttagtgagggggtatccgggaccaagtggctttggttcagcctccaccgcccaagaggttaccgaagggattgatggaaccaacttgactgctctagttaccggaggagcaagtggaattgggttggaaacttctagagtattggctcttcgtggagtccacgtcatcatcggtgcaaggaacatgaaagccgcgaatgaagcaaagaacaaaattgttagagagaacacaagagcccgtatagatgttctggagctggatctttgctctactagttcaatcagatcatttgccgacaatttcattgctcttcatcttcctcttaatatcttaataaacaatgctggcatcatgttttgtccctttcagctttctcaagatggaatagaggtgcagtttgcaactaatcatataggacatttcctcttaacaaaccttctactggacacaatgaagaacacagttaaagcaactgggatccaaggaaggattgtcaacttatcatcaatagctcaccactactgttataataaagggatccgatttcataaaatcaatcacaaacaaggatacagtgagaaaagagcatatgggcagtccaaattaccaaatatattgcatgccaatgaactctctcgtcggttgcaggaagagggtgtgacatcacaattaatcggttcacccgggattgattatgacgcctctgtttaaacactccgctgctctgatgaaacttttgaaattctccatttcttt

SEQ ID NO: 192536 - DNA, 743 bp, Gossypium hirsutum
  unsure (1)..(743): unsure at all n locations
tgtttccttgaaccccataagagaaaaaaaacctagacatcctaaaacatatatttgcatatatcattgttgtctttgtcattgtttttccaagaaagcacaatgaatgtagacgaggaggtggagagactcaaggaagaaatccaaagactaggccagatccaatcagatggttcttacaaggtcacattcggggtgctatttaatgatgatcgctgtgcaaacatctttgaagcactagttgggacactaagagcagcaaagaaacgaaaagttgttgcatatgatggtgaactactgctgcaaggagttcatgacaatgtggaaatcattctcaaagctacaacaccagcagcagcccagagtagcaactaatgcagttctaaacaaataattgcaattatagttttgcagcaaaagtttgatgatattctatgtaatttttcaatgtttatcatgtttgaaagcttcttcagcataagtgcataaccgtatttttgaatactcttttatgaaattttccagagtgtactacacccagatttgtatatgttttcttttggttatgttcaaactttgatgtcttcatctattatttgctttttatggcataaactacacaggattggataaaaaaaaaaaaaaaaaannnnnnnnnnnnnnnnnnnnnnnnnnnnnnnnnnnnnnnnnnnnnnnnnnnnnnnnnnnnnnnnnnnnnnnnnnnnnnnnnnnnnnnnnnnnnn

SEQ ID NO: 192537 - DNA, 817 bp, Gossypium hirsutum
  unsure (1)..(817): unsure at all n locations
aaaataattatttacaaaatggcatccgcttttgcttttgcttctggaacctcaccttgattcttaccctctaacagcctcaaacccaaacattcaccgcttcgtcgtcctttggcgcctattaacataagatccgaaagcatggctactgagaaactcggcatcaaagttgaaaccaacccctcagaatccaagctttctcagcttggtgtacgccagtggcccaagtggggttgtcctcctagtaaattcccatggacatatagttcaaaagagacatgttatctattggaagggaaagtcaaggtataccctgaaggtagcaatgactttgttgaaattggtgctggtgatttagttgagtttcctaaagggatgagttgcacttgggaagtttcagtggctgttgacaaacactataagtttgagtgagtgcttttataacctcatgctcttcttttaccttcttttctccattgttattatgaaataaaatataaatgcttggggtgatgtaagatacctctatattgttcaagtttgattatgatttggagctcagtacttcatgtttatttagcttattaaatatggtcttattctaaaagaaaattatgctggttcctggctgaatttgcttcaatgaatattggctgtgcctatatgcacgtacactgctgaaacacaggaaaagctttattgtgaatttcaaatgcgctcatttcgtgtaaaagatgatcatggatctctanatgaatanaggttcanancaaaaaaatgactttgattactgaatnaataatgtgtttatgtccag

SEQ ID NO: 192538 - DNA, 789 bp, Gossypium hirsutum
  unsure (1)..(789): unsure at all n locations
ccatttttgcttttcaacacacttttaaatcccaaagtttctctctacctttgaaactctataattttctctttgttttctgggaatccttgatcaaatcgttatccgcaagaacaagcaacaagaacgtacaagccaagctggtactgcttggggacgtgggaactgggaaaacaagcttggttttgagatttgtcaaaggccaattttctgattttcaggaatccacaattggagctgccttcttcactcaggttctgtctctaaacgaagccacggttaagtttgatatatgggacacagcaggacaggagagataccatagcttggctcctatgtactatcgaggtgctgcagctgccatcgtggtctacgatatcacaaactcggaatcctttgagcgtgccaaaaaatgggttcaagaactgcaaagacgaggaaatccgaatctgataatgttcttggtagcaaacaaggttgacctggaaaaaaagagagcggtgggaaatgaggaaggtgaagtatatgcccaagaaaatggtttgactttcatggaaacatctgcaaagaccgcacagaatgtctgcgaactcttctacgaaatagcaaagaggttggcaaaagctgctccttctcggacaagtggaatgaaattgcatanccgacggcaagaaagcggaagaaggctattctgttgctcctcgtgatacaaaggtcatcnaaactgaagattatgctggttcctggctgaatttgcttcaatgaatattggctgtgcctatatgcacc

SEQ ID NO: 192539 - DNA, 631 bp, Gossypium hirsutum
gttaagtcacgcctctctcttaaatctctgttcatttcttcttcacttcttcttaaaacccctcaaaaggactgcctcaaacaaggaagtcaatggcgttttctgagttcaggccactagacgagaactcgctcatcgaatacattaaagccacgccgtctttgtcatcgaagatcgtcgacaactatgatggtttaaagattaaggaagttggagatggcaatcttaatttcgtctacatcatcgttggcccttctggttcttttgtaatcaagcaggcacttccctacatacgatgtattggggaatcttggcccatgactaaggaacgagcatatttcgaagcgttggcgttaaaacaacatggtgcgttatgccctgaacatgttcctgaagtttatcactttgaccgtaccatgtccttgattggaatgcggtatttagagccgccccatataatcctgagaaaagggttaattgctgggattgaatatcctttgttggcggaacatatgtcagaatacatggccaagactcttttctgcacatctctcctatatcggtcaaccacagagcacaaacgtgctgtggccgaattttgtgggaatgtggaactatgcaggctcactga

SEQ ID NO: 192540 - DNA, 431 bp, Gossypium hirsutum
  unsure (1)..(431): unsure at all n locations
ccaggatggtaagcagtgggtatggaggtagcatagcgaatcaaggaatcgctgcctttgggaagcgtccggttaaagagtatgacgagaaggtgatcgttgagatctacaaatcgttggtgatggctcacggtcaggtggtgccgcgggaaccaggggggctttgctctgccatcatctgtcaacgctgaaaatcagattaagtaaagggtttattttcaagtatgtcagattatttttcgccacaaaactgtggtgaaaatagcagttattagttcgtgaaaattacagaaagcacagttcctaaagaaaagcagataaaatatgaaaatccttcctttagttttagtttttttattttattttttaatctctccaaaaatgttgttattaagtaaggcatantaaattgttcagtttagcaataagct

SEQ ID NO: 192541 - DNA, 700 bp, Gossypium hirsutum
gaagaatgtcgaaaacgctggtgcaaccgatagggcaaaagcggctgacgaatgtggccgtcgtgcgtttgaagaaacacggcatgcgatttgaaatcgcttgctacaaaaacaaagtcctctcatggcgttcccgggtcgagaaagatgtggacgaggttctacagtcccatacggtttactccaatgtttcgaaaggggttcttgctaagaccaaagatttggttgctgcttttgggactgatgatcagactaaaatttgtttggagattttggagaaaggggagctacaagttgctgggaaggaaagggaatcgcaattttcgagtcagtttcgggatatagcgacgattgtcatgcaaaaaaccatcaatcctgaaactgatcgcccttacaccattagtatgattgagagactaatgcatgaaattcatttcgctgttgatcccaatagtacttccaaaaagcaggctctagaggttattcggcagcttcagaataacttccccataaaacgggcgcccatgagattacgactcatagttcctggacagaactttcattctctttgtgagaagctgaatgaatggggtgctacccttgtttccaaagatgaatccggaactcagctgtcagtaatttgtgaaatagaaccagggctttttcgagaatgtgactcccttgtgaggaatttacaggg

SEQ ID NO: 192542 - DNA, 906 bp, Gossypium hirsutum
cggacgcgtgggaaaaaaattagtgaattttgagtggattgttcttggatccaattttttggagattacagagaaaaaaagattgatttgcaaatacacaatacgaataatcgcgatgggtttcaagatatttgtggtggcgatgatggtgggttccatcgcagcggctcagatttcattagcatccaccgtgcctgcttttctatgggctcctggtttctctagcgttgaatcgaaggaatctgtaaattatcagatcaagtctccaaaggatctagctaactctgttctctctcaagggggatggtctgacttactgtgctccgagaggaaaaatgagcgccctgttgatctcgccgttgtttttgttggtagagagttgcactcttcagatgttgcagggaacaaacatgcagatccggctcttttgaacttgcttaaggactcttttaccaagtccaacttctcaatggcgtttccatatgtagctacttctgaggaggaaacaatggagaatttgttggtttcaagttttaaggaagcctgtgcccacggtttgggagttgctaatgttgcaattttggaatcgtgctctatagagggtggagatttccagaaacttgcaaacttgcattcagtccatgatcatctagttaaaaggatggaaaagagaacaaagggggagactgatctggttgtcctatgccatggaggctttcagtctctgaaagagcttgaccaaccattcccagagagtgagattttgactgaagtcatgagttctgtggagcaatctggggcaaaatatgcagccctttatgtttctgacccttttaagtccatccactatcccggttatagagagcttgaaaggtttcttgctgatgatactgcaaagaatggttc

SEQ ID NO: 192543 - DNA, 1114 bp, Gossypium hirsutum
  unsure (1)..(1114): unsure at all n locations
cggacgcttgggcggacgcgtgggcggacgcgtgggaaactgtatggcagtcacaaacgaacacttcgcgactgctcttggaacaagcaatccatcagctctgcgtgaaactgttgttgaagtgcccaatgtcagttgggaagatattggaggccttgagaatgttaagagagagcttcaagagacggttcaatatccagtggagcatcccgagaagtttgagaagtttgggatgtcaccgtcgaagggagtgctattctacggccctcctggatgtgggaaaacccttctggccaaagctatcgcaaacgaatgtcaggcaaatcttcattagcgtcaagggtccggaattgctcacaatgtggttcggagaaagtgaggccaatgttcgtgaaattttcgataaggctcgccagtctgctccttgtgtccttttctttgatgaacttgactcaattgctactcagagaggaagcagtgtcggagatgcaggtggtgccgccgatagggttctgaaccaacttcttaccgagatggatggcatgtctgccaagaaaactgttttcatcatcggagccaccaaccgaccagacattatagatcccgcacttttgcggccaggtcgtctcgatcagttaatctatattcccctccccgacgaggaatctcgtcatcaaatctttaaggcttgcttgaggaagtcaccacttgcaaaagaagtcgacctccgtgctcttgccaaatatactcaaggctttagcggtgctgatattaccgaaatttgccaacgtgcatgtaaatatgccatcagagaaaacattgagaaggacattgagagagaacggagaagaagggagaaccccgaagctatggaagaagatgttggatgaccaagtggcacagatccagccggcgcatttcgaggaatcgttgaaatttgctcggagagtgtgaatgatgctgatattcgaaagtaccaagcattcgcgcaaacgttgaacaattcgaggggttctcgaagcgaattcaagttgcagaaacggttccaggctggacatctgatcctttgaactacagtggtggacctttaaaagatcttcaggtaattgctttn

SEQ ID NO: 192544 - DNA, 793 bp, Gossypium hirsutum
ttatacaccataccggtgatttatatgacttagatttatcggaccttgatgttaaagacgatgaagctttagccatcaactgtgttggcacattacattcgatcatggatactagtcgggacatcgttatatcgagcttccggcgattaaaaccgagggtaatcaccgtcgtagaagaagaagccgacctcgatatcggtgtcgatggggtcgatttcattaaaggtttccatgaatgtttaagatggttcagggtttattttgaagctttagatgaaagtttcaatagaacaagcaacgaaaagttgatgcttgaacgagccgccggccgggccatcgttgacttagtggcttgttcgccgtcagagtcgatagagcggcgtgaaccagccgcgcgttggtcaaggcggttccatgcaagtgggttcagtcctgtgggtttgagtgatgaagtgtgtgatgatgtgcgcgccttggtgagaaggtataaagatggttggtcgatgacacaatgccctgacgccggaatattcttgtcgtggaaagatcaggtggtggtttgggccagtgcatggcggccttgacgacggcgaccggtggcagatggcgtttttcttttcttttcctttttgttgcatggcaaggggagtggttcacacgtgtgttatggttttttttctcgtacgtgtaatgtggattggcgtatttttttctttataatatggtattggggagtgccaagaatttgcttattttcaataggattgggagtaattaaaaatttattttcact

SEQ ID NO: 192545 - DNA, 403 bp, Gossypium hirsutum
attgaatcaacattttccttggatgttaattcgaaattggattgggaatcaattggcaaaattcttgcacgaggtcatagtcgtatccccgtttatgctgtgaatccaaaaattttcatcgggtggttactggtgaaaagtcttctcacggtccgaccagagaccgagactccagtcagggctgtttccatcaggagattgcctagggtcccagcccatttgcctcggtttgatatcctcaatgaatttcaaaagggcagcagtcatatggcagctgtagggaaggttaaaggaaagaccgaagaccctcattttttggttgacggacagaaaatttgacgagcacatagttaccaatggaaattctcaactaaccacccctttgctgaccaaatatgactct

SEQ ID NO: 192546 - DNA, 415 bp, Gossypium hirsutum
actaaaagaaccatttaatttattccaaaaacaaactacattttaagagtttgacaaaataaccaaaacctctgtgggttgcaaaaccataaaagctaagggaacgttcaaaatagagatcatactagtaaatgtgggcatcaaaataatggttaagattttagtcaacttcctccatcttgctgccctcgccatctgcatcctccaatgggggcatgtcagcatcagcatctgcatcaccagcatcctcgtcgatgctcaacccaagtttcaacatcctgtgaattctgttgccgaaggtgtttggatcatcaaggctgaagccagaggtgaggagagcagtctcacagaggaccagaccaaggtccttcacagacaagtcatacttgtcagcatcagctctctttctcagctc

SEQ ID NO: 192547 - DNA, 406 bp, Gossypium hirsutum
gctcgattaccggaatgcttcctttgttataccccttcacctgaggctggacctgtatcaccaactcctgctcttgccaatggttttattacatttggcagctttaataatctggccaagataacacccaaggtattgcaagtttgggcaaggatattatgtgctgttccaaattcccgtctcgtggtaaaatgcaagccattttgttgtgacagtgttcggcagaaatttctatcaacattagagcagctcggtttagaatcgcttcgtgtcgatcttctccctctaattcttcttaaccacgaccatatgcaagcttattctcttatggatattaggttggacacatttccgtatgctggaacaacgacaacatgtgaatctctatacatgggagtaccatgcg

SEQ ID NO: 192548 - DNA, 1141 bp, Gossypium hirsutum
caaatccctctgaaaaatcctctcagttttcatttccccatccaaacgacgccctaaaccaaaagtcatggccaccccttccgcacgtgaggaaaacgtttacctggcgaaactcgccgagcaagccgagcgctacgaggagatggtcaagttcatggagaacgtcgtctccgccgtccctgcccccgacgaactcaccgtcgaggaacggaacctcctctctgtcgcctacaagaacgtgatcggcgctcgccgtgcctcttggcggatcgtttcctccatcgagcagaaagaggaaggacgtggcaacgccgaccacgtctctgtcatccgtgagtacagggccaagatcgaggccgaattgtccgagatttgcgccggaattttgaagcttctcgacgagaagctcgttccggccgccgggaccggtgattccaaggtcttttatctgaagatgaagggagattaccataggtacttggctgagttcaagactggcgatgacaggaaagcggctgccgagaatacgctcactgcgtataaatctgctcaggacattgcagttgctgagctggccccaactcatcctattcgtttaggattggctctgaacttttctgtcttctactatgagatcttgaactctcctgatcgtgcttgcagtcttgcgaaacaggcttttgatgaagccattgccgagctggatactcttggagaggattcatacaaggacagcactttgataatgcaacttcttcgtgataacctcactttgtggacctcagacatgcaggatgatgggactgatgagatcaaagaagcttccaaacctgaggaagagaaacaaccgtgaagtccccaatcttcatggtagtattttacttctctggttgtttttgtatggagaagtcgcttggtcccactctcgtcttcagttacttgcttttagttgatcaggcctcgatttatgaaccttggaagtaactgctataaatttcttagcatttcactgcttattcattttgagttgtagctttctaattgcagtgaggctatgtgcactctctttcttgattgtttcttgacaataaggaagttaacgattgagatatttctaagctaaatttttaagttgttttct

SEQ ID NO: 192549 - DNA, 705 bp, Gossypium hirsutum
cttttagcattttctctcaaaactcaacctcccaaatcctctgtacctttttttttctctcaaatatcaaatccctcgaaaaatcctccccatccaatcaccacccgaaaccatggccactccttccccacgcgaagaaaatgtctacatggccaaactcgccgagcaagccgagcgctacgaggagatggtcaagttcatggagaacgtcgtctccgccgtccccgctcccgacgaactctccgtcgaggaacgtaacctcctctctgtcgcctacaagaacgtcatcggcgcccgccgtgcttcctggaggatcgtctcctccatcgagcagaaggaggaaggccgtggcaacgccgaccacgtcgccgtcatccgtgactacagggccaagatcgaggccgagttgtccgagatttgcgctggaattttgaagctccttgacgagaagcttgttccggctgctggaaatggggattccaaggtgttttatctgaaaatgaagggagattaccataggtacttggctgagttcaagactggcgatgacaggaaatctgctgccgagaataccctcactgcctataaatctgctcaggacattgcagtatctgagctagccccaactcatcctatccgtgtaggattggctctgaacttttctgtcttctactatgatatcttgaactctcctgatcgtgctcc

SEQ ID NO: 192550 - DNA, 705 bp, Gossypium hirsutum
ctcactcgtccgaaaaaacatcaaaggcatggctccttttagcattttctctcaaaactcaacctcccaaatcctctgtaccttttttttttcttccaatccagacagcacccaattccatggccacctcttccccacgtgaggataatgtctacatggcgaagctcgccgagcaagccgagcgctacgaggagatggtgaagttcatggagaccgtcgtctccgccgtcccctcctccgacgagctctccgtcgaggaaaggaacctcctctctgtcgcatacaagaacgtcatcggcgcccgacgcgcctcctggaggatcgtttcctccatcgagcagaaggaggaaggacgcggcaacgccgaccacgtctccgtcatccgtgagtacagggccaagatcgaggctgagttgtccgagatttgcgccggaatcttgaagcttctcgacgagaagctcgttccggcagccaagaccggggattccaaggtcttttatctgaaaatgaagggagattaccataggtacttggctgagttcaagactggcgatgacaggaaagccgctgccgagaatacgctcactgcgtataaatctgctcaggcttttgatgaagccattgccgagctggatacacttggagaggattcatacaaggacagcactttgataatgcaacttcttcgtgataacctcactttgg

SEQ ID NO: 192551 - DNA, 600 bp, Gossypium hirsutum
  unsure (1)..(600): unsure at all n locations
ttcccccacactcatctctatttcggattggggattagtggtcctcaacatttgtctgtacttgtactatgagatcttgaactctcctgatcgtgcttgcactctcgcatacaggcttttgatgaagccattgccgagcttgatacacttggagaggattcatacaaggacagcactttgataatgcaacttcttcgtgataacctcactttgtggacctcagacatgcaggatgatgggacagatgaaatcaaagaagctcccaaacaagaggatgagaaacaaccgtgaagtctctaatcttcatggtagtgttttacttctctggttgtttttgtatggagaagtcgcttggtcctactatcgtcttcaattacttgtttttagtagatcaggcctcaatttatgaaccttggaagtactcctaagaatttcttagtgtttcactggttattgtttttgagtttgaagccttctagctttcgtaatggcagtgaagttatgtgcacacttgcttaattgttttcatgacaataatggagctgatggttgagatattttctatggttaaggtttgaaatttgttttcaaaaaanaaaa

SEQ ID NO: 192552 - DNA, 464 bp, Gossypium hirsutum
aaaaattccattaaagtccctctggtaacatccaaggcaagaactctcatttcgtttctccacaactcaaacctctcaaatctttttcagttttcatttccccatccaaacgacgccctaaaccaaaagtcatggccaccccttccgcacgtgacgaaaacgtttacctggcgaaactcgccgagcaagccgagcgctacgaggagatggtcaagttcatggagaacgtcgtctccgccgtccctgcccccgacgaactcaccgtcgaggaacggaacctcctctctgtcgcctacaagaacgtgatcggcgctcgccgtgcctcttggcggatcgtttcctccatcgagcagaaagaggaaggacgtggcaacgccgaccacgtctctgtcatccgggagtacagggccaagatcgaggccgaattgtccgagatttgcgccggaattttgaagcttctcgac

SEQ ID NO: 192553 - DNA, 407 bp, Gossypium hirsutum
cggacgcgtgggctcaaatccctctgaaaaatcctctcagattttctttccatcccaccatcccccaaaagcaccatggccgctacttcaccacgtgaggaaaatgtctacaaggcgaaactcgccgagcaagccgagcgctacgaggagatggttaggttcatggaaaccgtcgtttcctccgtcgttgctcccgacgaactcaccgtcgaggaacggaatctcctctccgttgcctacaagaacgtgatcggcgcccgccgtgcttcctggaggatcggttcttccatcgagcagaaagaggaaggacgtggcatcgccgatcacgtctccatcattcgtgagtacagggccaagatcgaggctgagttgtctgatatttgtgccggaattttgaagcttctcga

SEQ ID NO: 192554 - DNA, 608 bp, Gossypium hirsutum
  unsure (1)..(608): unsure at all n locations
ttttattttctcttttggagatcatctatctctggttttcctttttttttgattcctttggctcttgcgcagctagcaaaacaagatggcagatggcgaggatattcaaccactcgtatgcgataatggaactggaatggttaaggctggatttgccggtgatgatgctccaagagctgtgttccctagcattgtaggtcgtccgcgtcatacaggtgtgatggttggcatgggtcaaaaagatgcatatgttggggatgaagctcagtccaagcgtggtattctgactctaaaatatcctattgaacacggtattgtcaacaattgggatgatatggaaaagatctggcatcataccttttacaatgaacttcgtgtggctccagaagaacacccggttcttctcactgaggcaccactgaacccgaaagccaatcgtgagaaaatgacccaaatcatgttcgagaccttcaatgctcctgccatgtatgttgctatccaggctgttctctccctctatgctagtggccgtacaactggtattgttctggactctggagatggtgtgagtcatactgtccccatttatgaaggatatgccctcncat

SEQ ID NO: 192555 - DNA, 1067 bp, Gossypium hirsutum
gcgaacgaaagagagagagagagagaaagagagagatcgagatcgccttctgaggcgtggtgtgccctaagaattctcacttttctcgctgtaaataagggcaaaaggcggggaacttttggggacgtgttctttctgaggttcagagccttcattcgagggttcttgttcttccttagcatggcaaccaatggaaatcttccaccaaatgctataaagcaactggcaaaggaattgaagggtcttgacgaatcacctccggaaggcattaaagttggcgtaaacgatgaatgatttttcgatcatttatgctgacattgaagggccagctgggactccatatgaaaatggtgttttccgtatgaagttgttactgtctcatgatttccctcattctcctccgaaaggctactttctgaccaagatttttcatccaaatattgcacccaatggggaaatttgtgtaaacacactaaaaaaggattggaatccaagtcttggattacgacatgtactcatcatagttaggtgtttattgattgagccatatccagaatctgcactaaatgaacaggctggcaagatgctgcttgaaaattatgacgagtatgcccggcatgccaggctttatactggaatccatgcgaaaccaaaaccgaagttcaaatcaggagctatttgcgagtcaactacagcattaaacgtggagcagcataacacctcggttctgaatatcgagcagaaaaatgcagcaagtggggccgggttatccttgccatccccactcgctccgtcatcgacaaaaggaggcaacaatccagaccatcagccgcagcagcagcctatagttccggcaactgaaactggagttagtggaaccgccgttgtaggaatatcgggaactgctcctaagaaggaaggtctgtcgaaagttccggcagacaagaagaaaatggatgctagaaagaaaagtctcaagagattgtaaaaccataggttttttttataagtaataagatataattaaaagaactttgtaagggttcggaaaaaaaaaaaaaaaaaaa

SEQ ID NO: 192556 - DNA, 483 bp, Gossypium hirsutum
ctgggccgtttattaaagattgggcgacgtggaatcaggtattcttgctagttgatattatctgctgttgcgccattattttcccaattgtttggtctattcgttcgttgagggaaacttcgaaaactgatgggaaggctgcgaagaatttggcaaagttaactctgtttaggcagttttacatcgtggtgattggatatctatattttacgagaattgtggtgtttgctttgaggacgattgcagcttacaagtatcaatgggtaagcaatgcagcggaggagactgcatcattggcgttctatttgattatctttttcatgtttaggcccgtggagaaaaatgagtactttattcttgaggaagaagatgaagaggctgctgagctggctcttagagatgaagatttcgagctttgagaacctgggggctgttgataagtgaattggtataaagggttactctggatttttacctttgatg

SEQ ID NO: 192557 - DNA, 420 bp, Gossypium hirsutum
agcaattgaaaatgtttgatgatttagctaagaacttcgcagatcttacgtcaaaaccgagtttgtttgaaacagatgggaatttagatgaggatgttttaaggcagtttgagaaagaagtgaaagatagagtgaaatttgctaggttgatggtagctgaatctaaagagaattatgataatcagttgaaaattcagaagttgaaagataccattttctctgttagtgaatcattaggtaaggcaaaaaagaatggagctttagcgagctctattgctgctaaatctattcctaagagtttgcattgcttggcaatgaggcttgtggaggagagaatttcacacccggagaagtataaggaagagtcgcctacggctgagtttgaggatcctagtttgtatcattatgctgtattttcag

SEQ ID NO: 192558 - DNA, 1490 bp, Gossypium hirsutum
gctctcagaatttaaggaaatggtttttcaattcaattttctaggtcttctattatgtcttatgtttttaatgtgtggcagaggcaatgcagtaagggatttggaagagaaatatgatcttgaaagccatggcagagacgacgaagtggagagtttagatgacaagtacgttaccgcttactttcatcaaacttttgattctgcaaatcactttgatggaggtgatgaagtgaagaatttagaagacaaatattcagcggcttacttccacaaatcgttagattctggaaaccatggcagagacgacaaagcaaagatattggaagacaattatgctactgcgtacttccacaagacttctgtttttgaaaaccatggtgaaggtgacaaattaaagagtttggaagacaaatattccacggcttactttcacaaaacaatatcttccaaaatgatgaaggatcacaacatggaacatcaccacctttaccataaccatgttgaaagtgcagagataggcttgttcaccattgatgaactacatacctttcacgtagggaagaaattacccatctttttccctgtaaaaaaccactctctttaccctcctctattgcctaaacaaattgctgacaccatccctttttcatcttcccaagcttctaatattctacgattcttctcagtttctccggactcccccaaaggcaaagctgttcaagatacactcgcaaaatgcgaactcggagcagcgcaaggggagaccaaaatctgtgctacctctttagaatctttacatggttttctaagcaatgcatttggaccccatgttgatttcaagttcataagcacaaggcatcccaccataacaaccccactctttcaaagttacacaattttagaatcccctcaggagattgaatctccaaagaaagtagcttgtcatccaatgccatatctttatgcagtttatttctgtcactttgatgccactgagactaaagctttcaaactccgtttagttggtgatgttacaggagataaggtggatgctgttgttctttgccatatggatacttcaggttggagctctgatcatgtcgcttttcgcatgcttggtattaagcaaggaaacactgtttgccatgtattttctcaaggtaattttgtttggattaatcagccatcggatatcgctgccggtgccatataagtgttgaactgttcgatggagcactcatttgccactacgtatggagactctgatcccgatataagtatttaaaagctagtcttatgttcactaggtttcatggtgtttcgttaatggtgtgactttctatctgtattaagtatcaagtaattaagcaataaaaagtatgtattagagttaaaattatattattttagtcgtcattacattaatgccacgccatatatttttaaaaattattaaataatataacacttgtgtttttatttttcttaat

SEQ ID NO: 192559 - DNA, 563 bp, Gossypium hirsutum
ataaaaatcaatactaataaattttaactctaatacatactttttattgcttaattacttgatacttaatacagatagaaagtcccaccataacaaccccactctttcaaagttacacaattttagaatcccctcaggagattgaatctccaaagaaggtggcttgtcatccaatgccgtatctttatgcagttcatttctgccactttgatgccactgagaccaaagctttcagactccaactagttggtgacattagtggagataaagtcgatgctcttgttgtttgccatatggatacttctggttggagcaccgatcatgctgcttttcgcatgcttggtattaagcaaggaaacgctgtttgccatgtcttttctcagggtaatcttgtttggattcagccaccggtcgtcactgtgagtgccatgtaaatgtttggctgttcgaaggagctctcatttgcttcaagtagtttcgttcatggtatgctagttccttctttctatctgtactaactatcaagtaattaagcaataaaattatgtatcttgggtctcagg

SEQ ID NO: 192560 - DNA, 634 bp, Gossypium hirsutum
ctttttccttgttagagaaaacaaagatcttcatttccttttccactttccccactttttcaacaacaacaaaaaaaagaacccttcctttctcgtagctatggcgtttagaaccttagatatcaacgttatctctgcaaaaggcttgaaaaacgtcaacctcatcgataaaatggacgtttacgccgtcgtttcactcaagggtgattcatcgaagcaaaaattgaagacgctggtgcataaagattgtggcaaaaccccgaattggaattttccggtcaagttcaccgtcgatgaatcattggctaaaaacaataagcttagcatcaagttcaaggtcatgtgtgaacgtatattcggtgataaagaacttggtgtagtcaacgttccggtcaaagagcttttggattcgccgggcgatggtgggtcaatgaaattcgttagttttcaggcgaggaaaccgtcagggaaacctgaagggacacttgacttttcttacaagtttggggacaaagtttcggagcccgtcggaaagaataagggtgacgatcatcctcatcatcagtctgttcctgcgtatccagcggcgcatgtggcggctggatcgagttctgctgttccgtatggtggtccg

SEQ ID NO: 192561 - DNA, 741 bp, Gossypium hirsutum
aataaagccaaatgaattaaatccaaaagacgcagcttcgatcttatccatttctcaaaatccatcatcaaaattagggtttctgtaaagtaaaaaaataaattgaaatcaaaatcgttttgaaatcttagggaatgcggccgaattgttgtcatgtttcgtttgcttttgttctgaagttcttgaattttctccaagctttccttggagtgtcgattttactctactcgttttggatgttggatcaatggaatcatcacgtccccatttctcctccgccgtcagttccgtggccggattcttctctctcggctctcttcaattcgagaccggaggttgggggagctcgaggagccaaggttttcgatgatttagctgccggtttggtctccgggttggataatggagtcgggtttgaattgagttcggtgaagctacctgctccatggttcatctactcttttttgggtgtgggcattgtgctgtgctgcattagtctcattggttgcattgcagctgaatctattaatggctgttgcctttgtttttatacactcatcaaaattgttctcattttaatagaagcttctttggtggcatttattgcaattgatcgtcattgggagaaggacattccgtttgacccaactggagaacttgacagtcttcgctccttcatagaagacaatatcgttatatgtaaatggggttggccctcaatgtggtcataaatacaaggta

SEQ ID NO: 192562 - DNA, 567 bp, Gossypium hirsutum
aaaagaaggattaaaaaaaatcaatggaatcgaagaaacgaacggcggaatcagccccggtattccaggaaggaataagcttaatcctcactcggtggtcggctctcaccgccgccgttgaaaacgagtggggcggccgtgattctctcggcaaagccaacgccatctgcacggacgtcttcgcattcttcactgaagccagagcggagccgctttatatagatgatttggaaaatcttttagaggaaggtttgcttagtcttaatacgttggttgaagatggcagcattgaggaggtggctgagaaattaatgattatgcatgaagagtgtttggaaggtaactatcaatctgttgaaaaactgaggacaacgaatcctcctccagtcgctcatgtccgaccgagtaacgacgaagatgaggatgaggatgatgatgaagatgatagcatgagtgcagacatcgcggcaaacatgatggtggatgtaccaaactctcagtcaagtttgaatccagtcagtatgctgacagatgagccaaagcaaaaccagtcagctgaagctgaag

SEQ ID NO: 192563 - DNA, 537 bp, Gossypium hirsutum
  unsure (1)..(537): unsure at all n locations
ggaaatccagctaggtttgttcgggctttgacccatgaagaaaccttagaaatccctaaacttgccgtggctattaatgatctaagcaaagaacatttctccgagttccttccgtactcaacagtatatttagaagttgagaagttaaagaagtccctaggaataaccatttgattgcccttcatttttcattattccataatatcggtctccccgagttttccttgcgaagaaataagcaaccaaagaacacctagaagaagaatcttttctgttgtttatccatgcacttcatcatgttggctgttgaaagaaaaaccttttaatcatgagtgtcctatgaaatggaatatggattgtaggtgaattaatttcattttgtatgatgttgagtttattggggcttggcctttgtgttgactgtgatggcatgtataaaattgcaagtgcctttcacattattaatatttataaattgaattgaatgattgatgaggacgtatgttgaatcananaaaaaaaaaaaaaaaataatat

SEQ ID NO: 192564 - DNA, 808 bp, Gossypium hirsutum
cttttcatttcttccacaaatcccccatttttcttcttctccctaagacgcttcgccccataacccatctaacaatggtagcctcaaaattctgttttgctttgtctcttgctattctttcaatctgggccgttgatgctgcccaacaccatgctctggcgccctctccttcttcccccgtggactgctcctctctgattctcaacatggcggattgtttgtcctttgtgtcgagcgggagcaagacgtcgaagcctgaaggaacctgttgttctggcttgaaaactgtgttgaaagctggaccgcaatgcttgtgtgaggcttttaagagcagtgcttctctgggtgtcactttgaatgtcaccaaggccatgactttgcccgctgcttgcaaagtctctgctccttctgccactcggtgtgcattgtctctcagtcctactggtgcaccaggtatggcaccgtcagcaatagcaggtgcgccggcagcattctcaggaggagcaaatgaggcagcaccggcaccatctcccggcagctcaggctctcaagttgtttctgcttcaatgggatctcttatcttaggcttcataattatgttaacctctatgtactaagctatcctctcgtgttgatttacttccccttttgtattgatgatgaaggtggagtaggtggcattgatttggtgagctttggaccatccttgtgagccatattagattatatattactctgatatctgcacctcgtattctatactaatatcccataatgcatgtccaatttttctatgcttaaatttatt

SEQ ID NO: 192565 - DNA, 608 bp, Gossypium hirsutum
caatcagtcatcgccgctaaaaacttgaaagaacaaaaaaatatcttctaacaacaagaaacccggaaatgtcggacgaggatcatcatttcgaatccaaggccgacgccggcgcctccaaaacctatcctcagcaggccggtactatccgtaagaacggctatatcgtcataaaaaaccgtccctgcaaggttgttgaagtttccacctccaagactgggaagcatggtcatgctaagtgtcactttgttggaatcgatatcttcactggcaagaagctggaagatattgttccctccttcccacaactgtgatgttccgcatgtcaatcgtactgactaccagttgattgacatttctgaggatggatttgtgagtttgctgactgatagtggagacactaaggatgatctgaggctcccaactgatgagaacttgttgaaacagatcaaggatggttttggtgagggaaaagacctggtggtgtctgttatgtcggcaatgggggaagagcagatctgtgctctcaaggacattggtcccaaatagtttcaaatccatttattgcaaatcttaaatggaaccataaaagactttggtagtactat

SEQ ID NO: 192566 - DNA, 592 bp, Gossypium hirsutum
ggttcagcaaaaggaaaatataggtgaagacaagcaaaatccagctgaggaagacgaagaaatatcaactttagatctcaacagcaatacatggggttcttgttctgatcatcaagaaactgtgaaaaatgcattatcaagagacaagaacagtacagaagagggcctgctgactattggattaggacattcaaaactaaaagctggccgaactggatttaaaccttacaaaaggtgttctgtggaagccaaagaaaacagagtgatgaacactggcagtcaaggtgaagagagaggtcccaagagggtacgcttggaaggggaaccttcgacttgacttttacgctattgcatgcaattaacaaatgcgatgtttgtttgttgaatgcaatccctaattttttttccccatatcttatttccttttcatatgttgatcttaaagacgagcattacattgcagctcacgagacgctttcgtgtggtggtgttgtactatctaatatctacattgacttaatcgtctttatagacttttttgaattaaaaactcctctgagatagaagcatgaaagtaagtactgaatctttt

SEQ ID NO: 192567 - DNA, 926 bp, Gossypium hirsutum
agcttttagaaaacgcagcatatttttctaatcaccttccttcaaatcaatcattattggaaatcaacggctactcttcactcaccggactcactggataacaacgaataaaaattgaaaaccctaagatttcttaaagattaccccaatttctataaatataatacgcccacgccttcctcatctgcgccgcccccaattttctcccttactaacaacaaaaaccctgaaatgtcggacgacgatcatcatttcgaatccaaggctgatgccggcgcctccaaaacctatcctcagcaagccggtactatccgtaagaacggctatatcgtcattaaaggccgtccctgcaaggttgtggaagtttccacctccaagacggggaagcacggtcatgctaagtgtcacttcgttgggatcgatatcttcactggcaagaagttggaagatattgttccctcctcccataactgtgatgttccgcatgtcaatcgtactgactaccagttgattgacatttctgaggatggatttgtgagtttgctgactgagagtggagacactaaggatgatctgaggctcccaactgatgagaacttattgaaacagatcaaggatggttttgctgagggaaaagacctggttgtgtctgtgatgtctgcaatgggggaggagcagatctgtgctctgaaggacattggtcctaagtaatttgagattttattttcagacttttattgcaattttagattataactttttattttttttaagaactttaatagctttgtgtcttggaatttgggtttttttttattttttttattttaatatatctggatacgagaaaaacaccattgctgttatcttattgttgtgatatgattctctcttttactacttcaaggttttgttcttgggttttc

SEQ ID NO: 192568 - DNA, 708 bp, Gossypium hirsutum
ctttgtgcaaaaccagaaagtaaaaagaacagagcttggatatcctaagctaatgtcggacgaggagcaccatttcgagtccaaggccgacgccggcgcctccaaaacctatcctcagcaggccggtactatccgtaaaaacggctacatcgtcatcaaaggccgtccttgcaaggttgtcgaagtttccacttccaagactgggaagcacggacatgctaagtgtcactttgttgggatcgacatcttcactgctaagaagctggaagatatcgttccttcttcccacaattgtgatgtgccgcacgtcaaccgtactgattaccaattgatcgacatttctgaggatggatttgtgagcttgctgactgacagcggagacactaaggatgatctgaggctcccaactgatgaaaacttgttgaaacagatcaaggatgggtttggtgagggaaaagacctggtggtgtctgttatgtcggccatgggggaggagcagatctgtgctctcaaggacatcggtccgaaatagtttgaggtttggtgattctaagtatgttattacaaatcttaaatggaattatttttataagtggcttttaatatcttgcccttccaagacttggggtagggtatataatgttgtttgaatgggtctgttttgtttggtgtggatgctaaagataaaaaggaaaaaaaaaacacctt

SEQ ID NO: 192569 - DNA, 456 bp, Gossypium hirsutum
cccccacgcgtccgctactccgcccatcgtctgcttttgccaaaagacagctaaagacgccactttgaaaaccggaaatgtcggacgaggagcatcatttcgagtccaaggccgacgccggcgcttccaaaacctaccctcagcaggccggcaccatccgcaagaacggttacatcgtcatcaaaaatcgcccctgcaaggttgttgaagtttccacctccaagaccgggaagcatggtcatgcaaagtgtcactttgttggaatcgatatcttcactgccaagaagctcgaagatattgttccttcttcccacaattgtgatgttccgcatgtcaatcgtactgactaccagttgattgacatttctgaggatggatttgtgagtttgctgactgatagtggagacactaaggatgatctgaggctcccaactgatgagaaccctgttgaaacaa

SEQ ID NO: 192570 - DNA, 367 bp, Gossypium hirsutum
cagaaacataactcggatcctttctggcgttgaccctgtttactgaacaatttaacttgtggggatggcaccgtcagcaatagcaggtgcgccggcagcattctcaggaggagcaaatgaggcagcaccggcaccatctcccggcagctcaggctctcaagttgtttctgcttcaatggcagctcctatcttacgcttcataattatgttaacctctatgtactaagctatcctctcctgttgattcacttccccttttgtattgacgatgagggtcggagtaggtggcattgattttgtgacctttggaccatccttgtgcgcatattagattatatattagtctgaaaaaaaaaaataccatggg

SEQ ID NO: 192571 - DNA, 417 bp, Gossypium hirsutum
agacagagagacatcaacattagaccttaatagaaagatgttagattctcgttccgacagtcaagaagtagagaaaaatgcattatcaaaagatgagaagaagaatgcagcaggccggtactatccgtaaaaacggctacatcgtcatcaaaggccgtccttgcaaggttgtcgaagtttccacttccaagactgggaagcacggacatgctaagtgtcactttgttgggatcgacatcttcactgctaagaagctggaagatatcgttccttcttcccacaattgtgatgtgccgcacgtcaaccgtactgattaccaattgatcgacatttctgaggatggaatttgtgagcttgctgactgagagcggagacactaaggatgatctgaggctccaactgatgaaaacttgttga

SEQ ID NO: 192572 - DNA, 903 bp, Gossypium hirsutum
  unsure (1)..(903): unsure at all n locations
aaattaccgggctggatctcaaagggattcccaccgtttacctccccatgagaggtcccttggcagtcgtcttcaaggtaaaataaagcttcctgggagatctgtaaatggatctgatttgcattctgaaagggagatagaaagagggcgaaattggggacgacactcacctggaaagcctcaaacctcttcccaagggaggctccgtgacagaataaaaggaaaggtggaaggggatttcaacaataatgaaggtcgaaattttggtggcccgaggatcagaaaaaaagtaacagatgggagaaatgctgggttggcaggtccaaaaagtcttgctgagctgaaagttgggaagaacagtgataataagcagcatcagtctcttggaaagcgaaggagtgttggagatcatcaacaaattgaaggtaatctttcattcaaggggccaatgcctctaagtgagattctgaagagaaagagacaatctgaaggtgccgcttctggggatggtatagcatctgtaaataaagaagatgttgaccagaagcaaagcaagggaagcttgattagtggctccaataacaaagaagtatcggtgacagggaaagaggcgaacaaagatgaagaatccaaggttgcagctacagatatcggaataacggaagccactcatggtgaatcttctcaaccactcaacatgagcgagcacgaggctgacgcagatgctgaagatgggatcattggagatgagagaatagaagatcacgaagtcgaggcagatgaccagagggatggagagtattattatgagcaggttgacgaangggaatacaactatgaggaggatgaaaacgtggacccggaagaggaatacatagaggaggaagatggtgatgactttgc

SEQ ID NO: 192573 - DNA, 1290 bp, Gossypium hirsutum
tttcaagatgagaaggatcatgaccgtccctttcttcaccaacaaggtcgtgcaacagtacagacatggatgggaagccgaggttgccagtgtggttgaagacgtgaagaagaacccagaagcggccaccaatgggattgttttaaggaggagattgcagctcatgatgtacaataacatgtataggatcatgtttgataggaggtttgaaagtgaggatgatcctttgtttgttaagctcaaggctttgaatggagaaaggagtagattagcacaaagctttgagtacaactatggtgattttatccccattttgaggccattcttgagagggtatttgaagttatgcaaggaagtgaaggaaatcagattgcagcttttcagggaccaattccttgaggagaggaagaagcttgcaaccacaaaaagaattgacaacaatgctttgaaatgtgccattgatcacattcttgatgctcaacgaaagggagagatcaatgaagacaatgttctttacattgttgagaatatcaatgttgctgctattgaaacaaccttatggtcaattgaatggggcattgctgagcttgtgaaccatcccgagatccagcagaaactccgcaacgaaatcgacaccgtactaggacccggtgtgcaggttaccgaacccgacacccataagcttccatatctgcaggcagtgatcaaggagacactcaggctccgaatggccatccctctactagtcccacacatgaacctccatgatgcaaagcttggtgggtatgacatccctgcagagagtaagatccttgtgaatgcatggtggttagccaacaacccggctcactggaagaacccagaagaagttccggcccgaaaggtttttcgaggaggaatcgaaggtagaagcaaatgggaatgacttcaggtatcttccatttggtgttggaaggaggagctgtccagggattattttggcactgccaatcctagggatcacattgggacgtttggtgcagaattttgagctattgcctccaaaggggcagtctaagcttgatacatcggagaaaggtggacagttcagtctgcatattctgaagcattcaaccattgttgcaaagccaaggatgatttgatttaacaagtctttcgaaaatatgaacttgcatttagctttgttgggtattaatttgtaacatccatgcatgcacgcattgtttgataaaatcaatctcttcataaagcttttatgtattgatattttagttttcatggtgtggaaac

SEQ ID NO: 192574 - DNA, 698 bp, Gossypium hirsutum
caactccaaaagcaaaacaagttgcattatctaatataacattcggagcgatataaaaattgtcacagtgcatcaatcaaaatttgatcaacataaaatatctcttcatacaaacatcaaataaagcatccaaagttgcaaggataagacttcattttagaggaatgaacctggaagaatgggtagcaccaatacctggtctaccgtgcttgactggcttgtacgaaatagaaaactcagcaaggtaatggctaatcatttcaggcttgatttcaacttggttgaatgtcttgccattgtacacaccgataatgcttccaatcatttcgggtacaatgatcatgttacgcaggtgggttctaactggttccggcttctcaccaggtggagcctcccttttcgccttgcgaagcttcttaattagagccatgggctttctcttcaaacccctctggaaccttctgcgagctcgagcagggaagagcttgacaagctcatcagtggacatatcaaggagagcatccaaatcgacacctcggaagctaaacttcttgaatgttctcttcttgggcacaccggccgccgcaacctccgtctctacacccgccatagttaaaagcttcgtgtgttatgaagctcgagtagtagtcgccgcctaaaggtttcgattgtggcgaacgcgtgggcggacgcgtggg

SEQ ID NO: 192575 - DNA, 929 bp, Gossypium hirsutum
  unsure (1)..(929): unsure at all n locations
nnnnnnnnnnnnnnnnnnnnnnnnnnnnnnnnnnnnnnnnnnnnnnnnnnnnnnnnnnnnnnnnnnnnnnnnnnnnnnnnnnnnnnctaaaccggccgcccttttttggttgttaaagtctgtgtaattgaagatttaatatcttttactagtccactatggttcaatcgacaaaataaacaaacttcatcttcaccacaaaatctaaagacatctccagctatcataactaatagatgaaacaaaccactctttaaaacattgtcaagtctcattatctaaagaagcaaccaaaagggtgtgaaattttcattactaagagtgcaacaaacaaaatttaactctcaaatagtaaaccccaaattgaggctccaagcagcatgaaagggcttcacttcagagggatgaaccttgaagaatgagtagcaccgataccgggtctcccgtgcttaactggcttgtacgaaatagagaactcagcaaggtaatggctgatcatttcgggcttgatctcaacctgattgaatgtcttgccattgtacacaccgataatgctaccaatcatttcgggtactatgatcatatttcggaggtgggttctgactggttctggcttctcacctggtggagcctcccttttcgccttgcgaagtttcttgattaaagccatgggctttctcttgagacccctccggaaccttctgcgagcacgggcaggaaagagcttgacaagctcatcagtggacatatcaaggagagcatccaaatcaacacctctgaagctaaacttcttgaatgttcgcttcttgggcactccagccgccgccacctccgtctcaacatccgccatggtcgaaaggcttgaattctagagctgtagccgttagggttttgtttgggggaggttagttaaaattcggacgggtggg

SEQ ID NO: 192576 - DNA, 647 bp, Gossypium hirsutum
cccacgcgttcgtctatatcgcgagcgctttcctttttttttatttttttttttttttggtgggattaacaaaagatgtgtcaaattaccaaaatcctcatccttaacaaccttaataataaatgagcaagcgtaagtctcagtatctaacataacttaaagcatatgacactgtcattaaataaaaatactagaggtgcagcaaccaaaatgtctcttccaagtaaagatgcagaaatggacttcatttcagaggaatgaacctagaagaatgggtggcaccaataccaggtctaccatgcttaacgggcttgtacgaaatggaaaactcggcaaggtaatggctgatcatttcaggcttgatttcaacctggttgaatgccttgccattgtacacaccgataatgcttccaatcatttcgggtacaataatcatattccgcaggtgggttctgactggttctggtttctctcccggtggggcctcccttttcgccttgcggagtttcttaattaatgccatgggctttctcttgagacccctttggaaccttctacgagcacgtgcggggaagagcttgacaagctcatcggtggacatatcaagaagcggccgcgtgggcggacgcgtgggcggacgcgagaaa

SEQ ID NO: 192577 - DNA, 650 bp, Gossypium hirsutum
  unsure (1)..(650): unsure at all n locations
aaattaagtcaaaattctcaactttcacatcaaattttagatctaagataaatccaaaattgataaacataagaaatgaaaagaggaaagggaagancaaattacgcccttgcgaagtttcttgattaaagccatgggctttctcttgagacccctctggaacttataataataataataataataataataataataatgatagtggtaatagtaataaggaaaccccatttcatatttttcacttatagcaattaaacaaacatattttgcaaaaacaaaatgaaacttgcttctgttttcttattaccttctgcgagcacgggcaggaaagagcttgacaagctcatcagtgggcatatcaaggagagcatccaaatcaacacctctgaagctaaacttcttgaatgttctccttcttgggcacaccggccgccgcaacctccgtctctacatccgcctataaaaagttaccggtaaatacattacacagtaggccaaaaaaaataaaaagagaaaagaaataatactaagaaagaaaaagaagaagaaaaggagtagctatggtgggtgaatttagtgcagtgaaatgaaaaggaaaaaagaaatttgggggcaaattttgagagtagaaaggaaaaagaaatttg

SEQ ID NO: 192578 - DNA, 713 bp, Gossypium hirsutum
  unsure (1)..(713): unsure at all n locations
cgcgnncgattttccacttaaaccagcaacaagaaccaaaaaggggaagaactgagaataatggaaaaaagtgaaaagggtaatggtgttgctcctgctacaaggtctccaatggctttaatggggtcatctagaaatgaaaaccaagaagtgaataccagcatgagaactgccgagaccatgctgcggttggtgcctatggctttaggggttgctgcacttgttgtcatgctcaaaaactcacagtccaatgactttggctccgtttcatactcagatcttggtgctttcaggtacttggtgcatgctaatggtatttgtgcaggctattcccttctttcagctattatagcagctgtgcctagtccttctactatgcctagagcttggactttcttcctactcgatcagattctaacatacgtaatcttgggagctgctgctgtttcaaccgaggtgctttacttagcaaacaaaggagactcagccatcacttggagtgcagcttgtgggacatttgctggtttctgtcataaagccacaatagccgtggtgatcacgtttgttgcagtcatttgttatgcggtgctatcactggtctcttcttataaacttttcaccaagtttgatgccccagtgaactaccccagtaagaccatagaaactactgttttccatggttgaattatgttattactgaaattaatttactt

SEQ ID NO: 192579 - DNA, 364 bp, Gossypium hirsutum
aaaaatatgatattagcctggattttgagtctcagctccgccatggcagtagctcgttgccaagatttttactcccatgccggaccatacgttccgcctccacaaaaagtaacctatctccacttctttttacacgacactgtgagcggcaacaaccctagcgcagtccccatagtcagtccaaacaccaccacctcgacgggcttcggcggcgtgatagctttcgatgatccactcaccgttggccccgacataacatcagaggtcatagggaacgctcaaggcctctgggtgtcgacaggcaaagacgttttgactctgatggcgtacctggacatcgggtttacgaaaggtgaatttaacc

SEQ ID NO: 192580 - DNA, 408 bp, Gossypium hirsutum
ggccgcccttttttttttttttttttagtcgagaatatatatatatataataaaccagggatgttcaatgtacctaatcctggagccaattatcgaaacgtgacatcattggtgtataattcaaaaggttgccacaccttgcttcaaaacataagtgcccacagttcacatgttcctactttttagaatgaaccaaactcatggtacacaaaaggataacacatgaaaaaatcgtacctatcatcatcatgtgtgctgtaaacaaggtttggcaatattgaatcatcggagttactgcacaacttgcatttgctgggcatgatcacttcacgaaccaaaagcgaatttcgccagtgtctcaggttctctctcactagatggcaaaatggttttttgcggacgaaagaa

SEQ ID NO: 192581 - DNA, 921 bp, Gossypium hirsutum
  unsure (1)..(921): unsure at all n locations
attcgctgctgattactttggtcaccagtatggtttccaaatgcgacaagaaaaactgatgaagaagatgaaccgaagtggaagtcccactttaagagtggtatccctcctccttatgttaaaccaagtaccaaaccaaaggatcacaggcatgatgccaatgtgggatcttctcttgctggttttgacagcaatggggtgtccgatgatccttcgacacatgacagggcgtatgtggttaataggacagataagtacaaggaagggttagatcatcctggtaaagaagagcagataattccgcctgttagagtgaatagtcatgatcgtgatcgtgagaaagattattactataatcatgatgcaagtgatgcccctgtaccaagacgaagatcatcgagaaggcgacattcgaaatcaacttctggtcttactgaagttgataatgctgaagatactgaatctgcaaggagaaaacacagaagcaggaaaagagatgactcanaacgaggtctgcaaattttattcgatgatgagcagcataaagacaatgaggaggaaaggatgattgacaagctgttgatacagtacagtaagaaaccgccatctggtgaagagggaaagataagaagaaagtctaaaagtcgtcatgcacatcatatgggaagtgatgtgtgtgaagctcctcataaatcaagtagggatacatccgatgatatgtccgagaccatttcccgtccagcccgttcaatatctctccctcctgcacaaacagctgaatcaaaaggaaccaaagtttatgctcgtgctaactcattcgagtctgataagtcgagtgcaacccagcatgtgcattcaaagttaccagattatgatgaattggccgctcactttgcaacaatgaaagggagataaagcttt

SEQ ID NO: 192582 - DNA, 828 bp, Gossypium hirsutum
  unsure (1)..(828): unsure at all n locations
atggggaagtttaaggaagcgctaaaggattttcaacaggtcaaaaagatttgtcccaatgatcctgatgctaccaagaaattaaaggaatgtgagaaggcagtaatgaaattaaaatttgaagaagcaatttctgtacctgagtctgagaggcgttttgtagctgactctattgattaccatagcatagaggtggagccacaatattcgggtgcaaagatagatggagatgttgttactttggattttgttaagaaaatgatggatgacttcaagaatcaaaagtgtttgcataaaagatatgcattccagattgtcttacaaatgagaaaaatgcttcgatctcagccctctcttgttgatattaatgttcctgatggcagtcatttcactgtctgcggtgatgtacatggccagttctacgatttgataaatatttttgagcttaatggtctcccatctgaagagaatccatatctctttaatggtgactttgtggatagaggatctttctccgtggaggtcatcctcaccctgtttgcacttaagtgcatgtgtccatcagctatttatcttgctagaggaaatcacgagagtaggagcatgaacaagatatatggttntgagggcnaggtcangtcgaagctgagtgagaaatttgtggagctctttgcagaagtattctgntgtttgcctttggcgcatgtaatanatcanaaggttnnttgtgttcatggaggcctntttagtgntgatggggtgaaactctctgacatcaaagcatagatcggttttgtgagccttcttagaaaggntgatgtgcgaatt

SEQ ID NO: 192583 - DNA, 701 bp, Gossypium hirsutum
attagatacggtaaatttccagagcagcgtatgcacttaaatggtggaagtaccatggaagatttacatgggaaagatagaaatgggaaatatacaccttttgatgttgaaaatgagtatgttggggatggaagatcatcaaatatcagtgttgatggagccaattctactggcagcccaaaagcatctagcaactctatttctactgcagatgtgttgaagacattgttctttatacttgtatggtacactttcagcacatttttgacattgtacaacaaaaccttgttgggagatgagttggggaagtttcctgcgcccttgttgatgaatactatccacttcgcatttcaagctttattatcaaatgcaataacgtggtattggtctcatagatttcagccttcggttgcaatgtcatatagggattacttctacagagttgtacctacagctctttcaactgcactggacgttaacctgagcaatgtatccctggttttcatatctgttacttttgcaacaatgtgtaaatcagcagctcctatatttcttctcctatttgcttttgcattcaggttggagtccccaagctttaaactcttagggatcattgtggtaatctctattggaattctattaacagttgcaagggacactgaatttgagttttggggttttatctttgtcatgcttgctgc

SEQ ID NO: 192584 - DNA, 706 bp, Gossypium hirsutum
cccacgcgtccggatcaatttgactaggaacggatcacagagactgagagtgaagacacccacccaatcaaccttgtgaaaatggcgacaccccaattcctatcatccttccggtactccgacagtctaacagtcgtagctatctccttttgcactgccattgtctgcgaagccatctcatggctcttaatctaccgcaccaactcttacaaatccctcaaatcctctatcgacaaagccgccaagaaactcgaaatcatgaaaaccgaccaaaaccctagcaagttatccaccaaaaaatccaaaaccaagaagatcgaccgtgtcgaaaccagcctcaaagaatccagccgtgacctttccttattcaagttcaaatctggggctgtcgtcgccctcgttttgatcgtcgtttttggcttcttgaattctcttttcgaaggcaaagttgtcgccaaattgccctttaagcccatcgggatcgtgatgaagatgagtcatagaggattaaaaggggacgattctaccgattgctccatggtctttctctacttcttgtgttccatcagtataaggactaatttgcagaagtttttggggttttcgccgccgcaaagtgctgctggcgctgggttgttcccaatgcctgatcccaaaactaattgagtcttcttttcagggattaaggatctgggtatgtgtttca

SEQ ID NO: 192585 - DNA, 606 bp, Gossypium hirsutum
cagtaatgtttaggacagtgatggagtatcagttgaggggaatcatgaatcaaaggaagaagatagcttcgagaaccatcaaatccgagaggatgttaaccagaatacccctgctgatgcagttttgtatttagaggaatcattggctaacttcgaggaggagaggctatccattcttgagcaactgaaggtcttggaagagcaattgatttcattgaatgatgaagaagaacaacaacattttgaggatataaaatcagttgagtatttgtacgaagagaatggtaatggcttccgtgagattcataatttcggccatgaaacaaatggggttgccaatggtcatttcaagggagtgaatgggaagcatcaccaagacaaaataattcccgtggctacaaaggcaaagagacttctcccactttttgatgccaccgatgcagaaactgaagaaaagatactgaatggacatgaaaacggcttcaattctgttgccttgcaacatacgttacctgaacttgagaacaaaatgatcacaatagaggaagaagtggaccatgtttatgaaagattaccagcacttgaggcagatagggagtttctaaa

SEQ ID NO: 192586 - DNA, 679 bp, Gossypium hirsutum
cttaaccacagtttgatttttagagttagggttgctatataaatagcgaaaggatcttgtggcaaccattgccagaccttgaaaaagcttacaattttttttatataatttctgttagaaaaaaacccagttcacttttcagttcttggtaccttggctgaccatttttgtttgaattgcaggttaccagggtttagccatttgcttttcatttgaagctctcctccccattgtttttaaggtcatatatttattatatattatcagcacaaaaagaaaaaaatgggtctctcaagtcttccagctccatcagaaggagtgttatgtatactcttggtaaacacagctttatctatatctatagttaaaggcataatccgatcgatccttcacgttgtcggtatccatctcccaccaccaccatcggattacactgaaaatccctcggaagcattcgatttccaccttaatactcctgaaagttacatcgaggaattccggagtaggaccccaacaattcatttcggtgctgttttatgtagctgcaaacggcctcagcacgactgtcgggtttgtctgactcagtttgagccaaaatccgagattaaccacttgtcgtgtggccatctctttcacaaggtgtgtttggaaaaatggttggattaattggaatattact

SEQ ID NO: 192587 - DNA, 454 bp, Gossypium hirsutum
gttgctcaaaattttaatttttaacaaaaaggaaatcatcgcctttctctgtatatgattttctgttagcttagtgcaatccaagatttgggtacctacgcgaaaatggaggatgattaagaaggattttccaggctatccttgagttgaatccctacatgactctttttcggcgcaggaaccattgagggagcttcgagatatacagggtgtacaaggattataaagatgagaagtccgttatgaaaatgggggacatgctaccaacgaagcttgatgaggagcaaatggctcaactacgagaaatattttcttctttcgatcggaacaacgatggtagcttaacacagctggaactgtggtcgctcgtgcggtccttgcggctaaaaccgagccttgaccaggaggtagcccttatacaaaaagctgattccaataacaatgggctgatcca

SEQ ID NO: 192588 - DNA, 525 bp, Gossypium hirsutum
gttggctatatgtggtatgaatgtatttacaagctggacaaggtggcttacaacaaatatcacccatacacatcttggattcctataactgtctacatttgcttgcggaattgtactcagcagcttcgaagttacagtttgactctctttgcgtggcttggcaagataactctggagacttacatttcacaatttcatatctggttgagatcagacatgcctaatggacagcccaagtggcttctttcttttatcccggaatatcccctactcaacttcatgctcacaacagctatttatgtcttgatatctcatcgtctgttcgacttgaccaataaacttaagtcagttttcattcccacaaaagacaaccgacggctgctatataatttcattgctggagtagtcgtttcagtgtgtttgtactgcacttcactcattcttcttcagattccccattcaactgcctgagaacgcatgaagttggatagcgagcgcttttacatcggacataccaaaaacata

SEQ ID NO: 192589 - DNA, 703 bp, Gossypium hirsutum
ttcacgcgtccgcccacgcgtccggtaaaatccgacgaaattgccgtgaaggaagaatgggaaggtggagtcaattcgtggttgcggtgactattctggcggtgggcctcctttcggcatcagccaccgctagaccctgcaagacattcttcgtcgcctcctattctttctcttttgaaaaccctaacgacccttcttcctccaccggattcgtcaccgtcttcaccgagatcggtcaattgaacgtcgtaccaccaagacccaagccctccgatgtcttgagctctctccgtgagcgcagtaaggacatccttagcgtggtcgtcgctcttctcttcggcgtcggtagcggcgctctcacggcggctaccctctacttggtctggaccctcttctcggcccggtctgattatcatcgtgcttgtttggaggatgatgagagcgacggagaacttagccctaagaaggttgggtatgtaaccattcccaccgttaacgttaaggaagtcaattgatcaaattatgtgtcttaagtctttaatatgaaataagaatcatgtataaattgttgtgcatttgggcgaactcatgtctatgtttatgtattttatttaaagatctttgataaaaatgtaatctaaagatattactggatttgctacttcaaatgctatatacttgctttggtctaatggtgcttttc

SEQ ID NO: 192590 - DNA, 545 bp, Gossypium hirsutum
taaaggctcaaaaaagtcgtttagaaattctaggggtttttttttcctaatctaagaaagaagaggaagaatcaagcttgattttctctcaggatgtcagaggtaccattcagacctagggaaaagcttatcgagtatcagaaatattttcaaggcatccacaaacacacttacttgaaaggtccttacgataagatcacatctgtcgccattcccgccgctctagcagcaagttccctggtttttaatcggacgagggatctataacatgtctcatgggattggaaaaaaggaatgagagctctcactcgtggttagaagacatgtttttcttttttgggtttcattttagcatgaaattgcttgtttatttgctctaataattgtttggtttttatgccaaatggagatcttaaaagataccctttggggttatgttttttagtttggttttggattctcttgaaagctaaatgataagaagctcaaggattcaacatgatgttttatgattattattgcataatttggatttggattttgag

SEQ ID NO: 192591 - DNA, 873 bp, Gossypium hirsutum
  unsure (1)..(873): unsure at all n locations
nnnnnnnnnnnnnnnnnnnnnnnnnnnnnnnnnnnnnnnnnnnnnnnnnnnnnnnnnnnnnnnnnnnnnnnnnnnnccagctttctaatttcttggttataattgattgcagaacaagaaccattcaaatcagtcaaatatgatattcagaggggaaaaactgaaaattacccacttcaaataccttcataaacaagttcacataaagcttaataagttgagtaccaattaaggttgaaacaactataatggttcaaaaatggaacataaaattatagagaaaaaaactatcaaaaataagcataacaaacttaagatttaagaacccatcaaatccatggatacccaccacttaaaatctccttccgggtccaccaccgcgaccgaacccgatttggggaaccgcaacagcaaccggatcgaccttaacaaggccgggaatatcagccatcccgagaaccgaaagcatatcgagagtttccttatcgacttcgatttgatcaaccttgatggcggattcgtcggggacgaaatccatgcgacgttcacgctcttcttcttggagcttcaaagagatgccacgaacgggacccttctggatccgcttcatgagatgggtggaaaagccggcgatcttgttgcggagacgcttggaagggatgatagccacttcttcgatgatcttcttgttggtgtggaaatcaagcgtcatgcgagagtagtacctctcgatcacatggcgagaggatttctttaccgtcttggtacggactcggcccatggttcggagaggcggcggggaagtggctggctaggggttttgcagacttgaaaatgagacggtggcgacgcgtgggcgcccgggattccggc

SEQ ID NO: 192592 - DNA, 495 bp, Gossypium hirsutum
tgtgatgcgaatgaatgaagggtatatcaaggaaggaagcgcgggtagtgtaatgggagttgttcacagaaatgacaatgtgcttatgattgttgcttcgcctgagccaattacaactggatgccagtgggccaaatgtatctgaccagcaagtctcgagggtattgtattgagatgtgaagacacatcgaatactgatgccataactgtttagtagtatgtgcatcgtaagctcttttcataaacacaaatttattctattttttcccctttctattaaatatctggcgatgatggtggctgtggtaaggtcgactgatgagcatgagcccctctggtcgttattatcctttttaactgtgtatagcttttccgaggttttgttgtcaaccttttatcttgtaggtttgaagggtgtttttgctttagggtcgggttcatgcagcttacgtgttttgcgaaggattcgggatgatgttactaagaattaaaaac

SEQ ID NO: 192593 - DNA, 782 bp, Gossypium hirsutum
cggacattttactcaccattttccctcttatttcgactcttggtttcttctgtctctaatctcctcacttaactcaaaattacaacaatggcaatggctatggcaatggcagaagcggtatggcttctcttggctcccgggcttttcctctctggttctgcccttactcaaaccaaactaaccgataacccagcggatgacttggtggctgtgcttaatgccaatagaacggcacacaagtcatcatccctcgcagacaacccaggcctggcctgcattgctttgcaatatataaaagcataccaaggtgattgtgaagctgtaggagggtctgatgccaagaagcctcccgactccgaatttgcacaaacttttgccccttactgcggagtcgacgcgtcgaccctctcaccaatcaccggccgggttcttggatgccaatccaaatatgtccagccttccgaagcgttctcaatgttgataaaaaatgaaaagagtttggaaatcctctacaacaagaaccagacagaaatcggagctgctgtgactggcattgatggtggagctccctatttctggtgtgtgctgttgagcaacggtaagcacaacagttgctttgatctggaagacggtgtggctaaaatcagcagacctgggtgcttcagtcgtgccaatgatgattgcagcattactgatggcccatccccgattggtcataattgggtgtatgctattacagctttcattgctatgggatatgccttctgcttatgatcataacc

SEQ ID NO: 192594 - DNA, 508 bp, Gossypium hirsutum
gcaaaactccgttccagttaatggcatcaatgaacaggctgcaacagctgccttgacaccagaaccagagccaactcatgacaatcttgcagaagacccattaacttacccagaagacgaagatgtttttaatgatgctgaagtttttgatccttcggataaggaggaaggatcagtgattgaagatgaagttgttgaaccccaaaacattacaagtcctaatgaaactgttgtggttgctgattcacctcctgtggttttagaggatgctcctaagaaatcatatgcttcaattgtcaaagtgatgaaaactaatacagcgtctgctccggtctatgttcctaccaataatgtgagggtggcacctaaagaacctcactccattgtttctgcaaaacctgctgccgcaactgaggtagcattacctaacagtgacaatgcacctgaaagtagcaatgacaatgaggtagctgtaggacacttcatatacgtacggaatttgccttac

SEQ ID NO: 192595 - DNA, 872 bp, Gossypium hirsutum
ccagtttccacttcgatttcgtcatttttgggaccaattctttatgtgcttttgctcttaatctagctgtgttcttgcttgttggaaagacttctgctttgaccatgaatgtagctggggttgtcaaggactggttgttgattgcattctcatggtctgttattaaggataccgtaacacccatcaacttgtttgggtatggtctggcattcttgggtgttgcctattataatcattccaagttacaggctttaaaggcgaaagaagcacaaaagaaggctgcacaagctgatgaggaaggtgggaggttgctggatgaaagggaaagtgagggaactgacaaaaagagcgaatctgagaattagatcttgtcggtggttaattttaggatatgagatatggaaggaggtagcagataagggctaaagggagagtggttgggatgatgatcgtgaaggtttgcatttaaaggcaaaaggaaatgaggggatcggatttcttttgccccatttggctgcatttgggttttggtatgttgtgtttttaggcctccgttccatagactagttattatggccatttcttagtaataccaggggattgcgattcacatatgttgcttatttcacaggttaatgtatgttagtagaggaagaacaatctaaaatgccctgtactctgttgttttttatttaatttttatgtcttcttccttttgggatgttgacaaatattaccgtaggtactccttccattcacggggttttaatgcttttttattttattttatatatgtttcttccttattatctggtttctttgttttgttcaatgtttcgctcacagcttgattaataacatacattggatct

SEQ ID NO: 192596 - DNA, 929 bp, Gossypium hirsutum
ggagggacctgctctgctgccttgcctcgcctcgcctgggcttgccttgcctttttacgtttactctctctctcacgttttcaatcatcatttgccacaaagccatttccaaggaaggctctctgattgatccttgaaattgaaacataaattgtgttcatatcacaagaagttttcttcaaatgctaaattttgccagaggaagaagccagacaaggtcaaccagatctatgccttttgctggcatggaataccatgatcccaagaggaagagcaattttgtaggaaaaatccttatggctgctgcccttacagccgtttgcatcatcatgctcaagcaatctcccacattcggtactccaagtcagttctcccgacatgaagaaggtgtaactcatgttcttgtaactggtggtgctggctatattggttcacatgctgctttacgacttttgaaggagtcataccgtgtaactattgtggacaatctttcacgtggaaacataggtgccgttaaggttctacaaaagttatttccagaaccaggaaggcttcaattcatttatgctgatctgggggatgcaaaagctgtaaataaaatattttcagaaaatgcatttgacgctgtaatacactttgcggctgttgcatatgttggggagagtacacttgatcctctcaagtattatcacaacattacttcaaacaccttggtggtgttagaggcaatggctgctcacggtgttaacactctgatatactctagtacatgtgccacatatggggagcctgaaaagatgccaatcacggaagaaaccccacaggttccaatcaatccatatggaaaagctaagaagatggcagaggatatcatcctggattactctaagaactcagacatggcagtaatgatcctaagatacttcaat

SEQ ID NO: 192597 - DNA, 896 bp, Gossypium hirsutum
caacacttcccacgcagctaaactctcctgagtcaaaacatggcaattatctccgagtttcaagaagaagaggccagaccttccgcttcttcatcgccgaaagcggtgccgtttaacgccagcttggatccgtcggaccctgttgggtttctggagaaagttttcgattttctggccaaagaaactgattttcttgagaaagagaacttcgataaggagattgcagtggtcgtgagagttgctaaggagaaacgtaagcagaaggttgaagaggtggctccgaaggtggagataaagaaggaggaagtgaagaaagagaaggagatcaaggaagaagtgaatagggaggcaatggaggtcgataaaaacgaagaccagtctagctctggtttgaaagttccaaacaaaggcaatggacttgatctggataagtactcttggacacagtcccttcaagaggtcactgtcaatgttccagttcccaatggaacaaaatcaaggtttgttgtatgcgagataaagaagaatcatctaaaagttggacttaagggccagcctcctattattgatggggagcttttccaaactgtcaaacctgatgactgttactggagcatagaggatagttgtgcactgtcgatccttttgaccaagcacaaccaaatggagtggtggaaatcattggtgaaaggagatcctgaaattgacactcagaaagtcgaaccagagaacagcaaactatctgacttggatcctgaaacacggcaaactgtagagaagatgatgtttgaccagagacagaaggcgatgggccttccaaccagtgatgagcttcagaagcaggaaattctaaagaaattcatgtccgagcaccctgagatggacttttcaagggc

SEQ ID NO: 192598 - DNA, 979 bp, Gossypium hirsutum
  unsure (1)..(979): unsure at all n locations
tcgttggaagtctcgctcgaaaactccggattctggaacatctgccccaccctttccgtatatataattaaaccctgacgaaacttcaagacccgaccgacgattctactctacgacgcacttttgcctgagccagagtaaggttttttcttttttgttattgaatggcaataatctccgagttccaagaagacgaggctaaaaagccctcgccttcttcgtcgccggcttctaaaccgctgctgtttagcgccactttggatccgtcgaaccctgttgtgtttttggagaaagttttcgatttcattgggaaagagagtgattttctagtgaaagagaacgccgataaagagatcgcggccatcgtgagagcggccaaggagaagagcaagaagaaggctgaagagatggctcggaaggtggagaccaagaatagggaagtgaaggaagagaaggagataaagaaagaagttaaggaggaagcaatggaggtcaataaaaaggaagagactaaggatgaagagactagctcctgttcgagagttccaaacaagggcaatggtcttgatctggagaattacgcttggacacagtccttgcatgaggttactgttaacgttccatttccaagtggaacaagatcaaagttggttgcatgtgagataaagaaaaaccatctaaaagtgggactcaagggccggcctcctattattgatggggagcttttccaacctgtcaaacctgatgattgctactggagcatcgaggataaccgatcnatctcaatccttttgactaagcacaaccaaatggagtggtggaaaatcttggtgaaaggagaacctgaaattgacactccaaaagttgaaccagagaacagcaacctatccgacttggatccccaaaccccaaccgctgtggaaaaaatgatgtttgacccaggaccgaagggcctgggccttccccccagtgatgaact

SEQ ID NO: 192599 - DNA, 965 bp, Gossypium hirsutum
  unsure (1)..(965): unsure at all n locations
cccacgcgtccggccacgcgtgcaccctccttgtatctttattttctcgcctgtgacgagaagccgacgctgccatggttcacgtcagtttctaccgcaactatgggaagacctttaagaagccacgacgtccgtatgagaaggaacgattggatgctgagttgaggcttgtaggagagtatgggctccgatgtaagagggagctgtggagggttcagtatgctttgagccgcatccgtaatgctgctagggaccttctcactcttgatgagaagaaccctcgtcgtatttttgaaggtgaagcccttcttcgtaggatgaacaggtatggacttttggatgagagccagaacaagctcgattatgtcttggctttgactgttgaaaacttccttgagcgtcgtttgcaaactctcgtgttcaagactggtatggccaagtcaattcaccatgcacgtgtgttgatcaggcaacgacacataagggtcgggaggcaggttgtgaacatcccgtccttcatggtgagggtcgactcccaaaagcatattgatttctctcttactagtccgtttggaggtggccgccctggaagagtgaagagaaagaacccaagagcagctgccaagaaagctgctggtggaaatggtgatgaaaattaataagagtggaccttgggctactatccagcgcccctagggaaccctttaaaaaccctttgtttggaaactttacaatatccctccactgggttaaacatgggtgttggagtctttgttttcccccaaactttgtttgttgctgggattctcgaaaataatggtgcgggccagtttcctatgtggccggtctttggttccgagattgcaaggttcaaattaaattgttcctgtttttctgggaattagaagcnaagaggcctcccttttgttgttggagggagaacaaaaaaattttccgccggccca

SEQ ID NO: 192600 - DNA, 764 bp, Gossypium hirsutum
ttcgctttctcgcctccgagaagaagccgacgccgccatggttcacgtcagtttctaccgcaattatgggaagacatttaagaagccaaggcgtccatacgagaaggaacgtttggatgctgagttgaggcttgtaggagaatatggtctccgatgtaagagggagttgtggagggttcaatatgctttgagtcgaatcagaaatgctgctagggatcctctcacgcgtgatgagaagaaccactcgtcgtattttcgaaggtgaagctcttcttcgtaggatgaacaggtatggacttttggatgagagtcagaacatgctcgagtatgtcttggctttgaccgttgagaacttccttgaacgccgcttgcaaacacttgtgttcaagactggtatggccaagtcaattcaccatgctcgtgtgttgattaggcaacgtcacatcagattcggaaggcaggtggttaacatcccatcctttatggtgagggttgactcccaaaaacatatcgacttctctctcactagtccgttcggaggtggccgtcctggaagagtgaagagaaagaaccaaagagcacctgccacgaaggccgctggcggagatggcgatgatgaggaagacgagtcacacctttcgctagtgaggggtactaccacccttagttacccttaaatagttttggagcttgccatttccttctcccctttattaaatatggtacgtatcttgcttctagacctttatctttagcgtatcttg

SEQ ID NO: 192601 - DNA, 609 bp, Gossypium hirsutum
cccacgcgtccgggacttttgtatgagagctagaacaagctcgattatgtgggggctttgggtgttgttaacttccttgaacgtcctttgcaaacactcgtgttcaagactggtatggccaagtcaattcaccatgcacgtgtgttgatcaggcaactacacataagggtcgggaggcaggttgtgaacatcccgtccttcatggtgagggtcgactcccaaaagcatattgatttctctcttactagtccgtttggaggtggccgccccggaagagtgaagagaaagaaccagagagcagctgccaagaaggctgctggtggagatggtgatgaagatgatgaagagtaaaccttaggctactatcaaccaccagtaggaaccctttaaaagcctttgtttggaacatacaatatcctccattggtagacatggttttgagttttgtttccagaactttgttgtagtggatcttgatatatgttttgcattgactattgctgttttggtcggatttgaagttaattaagtgtgctgttttaagattaaaaaaaaaaacatctttattattgtgttctctaaaaaaaaaaaaaaaagtcgacgcggccg

SEQ ID NO: 192602 - DNA, 957 bp, Gossypium hirsutum
gtattctttttacgttttaacttaaaaaaaaccattgaaaattcagcctaacccctttcttctccttcttcttcttcttcttcttcttcttcttcttcttcttcttcttttctttttacttctttccacaaaattgacattaaaaaaaaaaaaaaagaacctaaagtaaataaaaaaagaacaagtccaatttgattccaacatgtagtgactacccaatgcctgacgcaaagccaaaattgaaaaaagaaaaaaaaaaagcaaagaaaaattatcaaaacaaaataaaaaagcctcacgaaaacaaaagctgaaaggtcttcaacaacgtcccacggaaaacgcagactagtttaagcttcctattaacccaatttctctctctctctctctctcccttcttcttcttggtcggtttagtcaggcaaaaacctcaatccatacccttcaaggatttctttgttattcaatttcttttgggggtgaagtgggttttattggtttgatcacttggggtaaggctgtgcttatgcgatgaactgggtatttgttacttcacgagagaggcagataacatggctcataccgcggcagcatgtgctgagagggcaaccaatgatatgttgattggtccggattgggctctaaacattgagctatgtgacattataaacatggacccagggcaggctaaggatgcgttgaaaatcatcaagaagcggctgggcagtaaaaatccaaaaatacagctattagctctttttgtattggattctctcagcaaaaattgtggcgagcatgtttttcagcagattgttgagcgcgatatcttgcgtgaaatggttaaaatagtaaagaagaaaagaaaaaaagaaaaaaagaaaaaagagaaataaaagaataaaagtgaatgaaaatttctctcgtttgagaagtgaatcactacaaaatatatat

SEQ ID NO: 192603 - DNA, 521 bp, Gossypium hirsutum
caaaactgatcttgtggacaaaaggcaagtctcagttgaggaagccgaagccaaggctcgtgacctcaacgtaatgtttattgaaactagtgccaatgctggcttcaatatcaaggctctttttcggaagatcgcagccgctttacctggagtggaaacgctttcttcaacaaaacaagaagacatggtcgacgtcaatcttaagtctacaaacgcaaattcatctcagtcgcagcaagaagccggaggatgtgcctgctgaggatacatacatacattacactcactcacacacatcatttgatccgaggtatgtatggttttctcaacatttagtgttttctgtaaaaaggaaaaaaagaaatctgttctctcccaccccctttttggtagcattgggcatatttggatttgatggaatgttttgaagcataaaagttgcttgagagagaaggttcttaaattttaccaatggtagttaggctcgtcctaacctgtcctatatgtgtacgggtcttgac

SEQ ID NO: 192604 - DNA, 644 bp, Gossypium hirsutum
cacacatcttggccgcggacagcacagctttataagcctgccttgatcgtgtatcgaagtacaagtctttaaatttattacagggaaaagcaggaaagcagaactagatcgagatggtaggattttcttcccaaacagaatcttgggttgccaccagaaactcaatctacgaatcccagaaagaggcagatagcttcgaattggatctaaaacgtctagatctgataaagatagatcaagaagacgagaataataatattaacagccaagataagattagcaccaccaagaagaacaagaagaaaaatcaggtgttgctggaggggtacgtggaggcggttgatgaggaggatgaactgaagaggacaaagagcttgacccgtgatgatctacaccaacttaaggggtgtttagatctggggcttggcttcagcttcgaggagattcctgacctttgcaacaccttgcctgcacttgagctatgttactctatgtctcagaagtacttggatgaccaccagcaccatgcatctccagacaccaccgctgcccccgaacccgtcgccaattggaagatctctagtcctggtcagtcttttctcttttttaccatctttctttggtttatttttctatttgccatc

SEQ ID NO: 192605 - DNA, 577 bp, Gossypium hirsutum
gctatatagcccatggaaattgctatgcttgtgattatgccggaacttatagtgaccagaaatgccgaactaactgcggagagcctgctcaaagatggtaccatgtaccacgttcatggctgaagccaagtggaaactttttggtggcgtatgaagaatggggaggtgatcccaacgggattgctttggctaaaagaacaacagcaagtgtatgtgctgatatatttgaagggcagccaacaatgaagaaacggggaatgctaatcgcaggaagaatcagtagaccgaaagcccatttgtggtgtcctcctggccagaaaatttctaaaataaactttgctagctatggaatgcctgaggggagttgtggaaacttccgtgaaggaagctgccatgcccacaagtcctatggcgcattccaaaagaattgcatcggaaaacaatcgtgttcggtaaccgtggctcccgaagtattcggaggagatccatgtccaggtagcaggaagaagctatcagttgaagctgcatgcaaatgaagaagtctaaatagagtgatacattaaagaaacctagactc

SEQ ID NO: 192606 - DNA, 775 bp, Gossypium hirsutum
  unsure (1)..(775): unsure at all n locations
tttatattttttatataaacacgccccaacaccggataaaaattttataacaaagagggccaccagccccacaaatcaatatttcaccaatatattcattaagaaaaaaatttgtgttgacgcaatttgcggcctcttattcaaccctcttatcggcaattttttttaaagctaagtccccacctttttctaagcctaaaaccagctataaatggaactaatgcaacattcacatatccagaactttntcctccaaagtaagtcttgtctcaaagctctccttccaacagcttcaggcactcaataaattctttctttgcatttgcttgttcttctccctttgtcttccatattttgctccccaggtcatatatcttcttgtcaacgaaatcaacccagaatctggcaacagctctttgataaggatcagaagggatcaaaggagctttatcatgccagacctcatcaatatactgaacctgaatgacagactcacaaacgggtttaccattatggataagaacagggattttcttgtgaacagggttcatctgcagcaacaaatcactcttgttcctcaaatcttcttctctgtactcgtatggtatccctttctcagccaaagcaatcctggatctcatcccaaatggacttggccagaaatccaacaatactaattcccctgccattcttgtaatctaaactattcaaatactcaaatcgatactaaatttataatcttgggtttcttcggacgcgtgggcggacgaatggg

SEQ ID NO: 192607 - DNA, 525 bp, Gossypium hirsutum
tcaaaatgtttgtaagtaattgaaagataacatcaacagtagcaaacaaaaccatggaaacctttcaaacaatagcattggcagcacttgcaattctaggccacaggtcagcacactcttttccaatgggaccagtgatagcagatcctttcatttctcccttgggattgacaatgacaccagcattatcttcgaagtacatgtagacgccgtcctttctacgccaaggtttgcgttgtcggacgatgacggcgggcaacaccttcttcctcaaatcgggctttcctttttttacggtggccatgaccatgtcaccgacgcaagccgatgggagcctgttgagacgccctttgattcctttgacagaaatgatgtaaaggttcttggccccagtgttgtccgcgcagttcaccgtagccgccaccggtaaacccagcgacattctgaacttgttccccgcactacctccccttcctcgcttcgacattttggatcggccctactctgcgccggcggacgcgtggg

SEQ ID NO: 192608 - DNA, 496 bp, Gossypium hirsutum
accaaaagattaataactttcatatgaactaaaagtactttagaaattgagaactctttaattcaaatgacaatcccaaccagacatgcaacaactaaatgctcttttatttaaaaccacatataatggtactacatgcctgaagcttggatcccaactcccatgaattgaattactcaattccaaagactttcttcaactgcagaacaaattcatagactttttcttggtcaggaagactcttggctacactctccttttgcaggcaccttttaacccaagcaatcatcttgggacactctgcttcaatgctgaagtccccacacttctcataagcataaaaccagctataaaatggaactaatgcaacatccacatatccaagactttctcctccaaagtaagtcttgtctccaagctctccttccaacagcttcaggcactcaataaattctttctttgcatttgcttgttccggacgcgtgggcggacgcgt

SEQ ID NO: 192609 - DNA, 415 bp, Gossypium hirsutum
cttcttgtcttctcccctttgtggtccataatttccttcctagatcatatatcttgttgtcaacaaaatcaccccaaaacctagcgatggctctttggtaaggatcagtagggagtaggggagttttatccggccaaatctcatcaatgtattgaacctgattgagggactcacacacaggttttccattatagattagaacagggattttcttatgaacagggttcatcttcagaagcacatcactcttgttcctcaaatcttcttccttgtacgcgtattttatctctttctccgccagagcaatcctcactctcatcccaaaaggacgtggccagaaatccacccataccccatcttcatcaccctttttttcaatctcaaaacaaattcaaaatgatttaactcttttttc

SEQ ID NO: 192610 - DNA, 380 bp, Gossypium hirsutum
ttctcccttgggattgacaatgacaccagcattatcttcgaagtacatgtagacgccgtcctttctacgccaaggtttgcgttgtcggacgatgacggcgggcaacaccttcttcctcaaatcgggctttcctttttttacggtgcccatgaccatgtctccgacacaagccgatgggagcctgttcacacgccctttgattcctttgacagagatgatgtagaggttcttggccccagtgttgtccgcgcagttcaccgtagccgccaccggtaaacccagcgacattctgaacttgttccccgcactaccttgtaatctaaactattcaaatactcaaatcgatccccaatttataatcttggcggaaacgtggaaaa

SEQ ID NO: 192611 - DNA, 441 bp, Gossypium hirsutum
agaagaattggccaaaacttccattggggatcagacttctcattgctgctcattctatgtctgtggatgcttttagccgctacgatggcaacgcagtaaatcgacgtctcatgaatcttttcgaccctaaagcctctccatcaagaaaacctgataatggcgttgtgtcttccgacgtcgtggttgacaccacccgcaaactttggttccgcctatacagcaacactaccaccgctggcaaaatgtccattcccattatagtctacttccatggtggaggctttgcgtatatggcggccaattcaatgagctacgatgacttatgcaagctacttgcgcgtgaaattcctgctgtagttgtttccgtcaactaccgtctgtcgcctgagcaccgatattcgtcatcagtcgaatatggttttactgtttaaagtacattga

SEQ ID NO: 192612 - DNA, 568 bp, Gossypium hirsutum
tgccgcctcccgcaagctttgaggtttttttaggttgctcttggaacatttagcagccaaccaaaaatggttctccaaaacgatatcgatttgttgaatcctccagcagagcttgagaagaagaagcacaaactcaaacgtcttgtccagtctccaaattctttcttcatggatgtcaaatgccaaggctgtttcaacataacaatagtgtttagccactctcaaacagtggtggtatgtggtaattgtcagactgttctttgtcaaccaacaggaggaagagctagactcaccgagggatgctctttcaggaagaagggtgattgatctcatattttgctattttatgattcacaaaaacaaaagaaagtaatctttggatcaaatatgggaatcatatgagtaatctttttcatgtgtttcagttatgacatatgtttgaagtttatttttgtagtaagtttgttcctaagctttgatacttgatgatggtattaatcaattatggattgtctttgtagtggatggaagttatttttttatgatatgagtatttggagtaattttt

SEQ ID NO: 192613 - DNA, 522 bp, Gossypium hirsutum
acgacccacgcgtccgaaaatcctctcatagcgccgctgtcgatctttaacctttcataccgcaaacaatggttctccaaaacgacatcgatttgttgaaccctccggccgagctcgagaagaagaagcacaagctcaagcgtcttgttcaatctcccaattccttcttcatggatgtcaaatgtcaaggctgcttcaacataacaaccgtatttagccactctcaaactgtggtggtgtgtggaaactgccagacggttctgtgccagccgaccggcggtagagctagactcaccgagggctgctctttcaggaaaaagggtgactaaatccgatccagcggcaacgattcgaggaagaggttttttttgtatgatcccactctggttatctttttgatgtggtaaaatttgtctcaaatcttcgaagtagaattaaggattttagaatgactattatgtgctattgttcttgatttagtgtggatggtttttgggtttaatgaattttgttttgagttgc

SEQ ID NO: 192614 - DNA, 609 bp, Gossypium hirsutum
gagaagtctaagcctgaagacaagaaagaagagcctccggcggcggttgtcacggtagtgttgaaggtttacatgcattgtgaagcttgtgcaatggaaatcaggaaacgtattcaaagaatgaaaggggtggaatcagctgaaccggatctaaagagctcagaggtgacagtgaaaggagtgtttgaaccgccaaaactggtggagtacgtctacagaagaaccgggaagacggcggtgatagtgaaactagaggcggagacaccgaagacggaagaagaaaaagccaaagatgccaacaaggacgagaaaaaaagtgaagaaagtggcgaaaaagacaagaaagaagccggtggagaagagctagactcaccgagggatgctctttcaggaagaagggtgattgatctcatattttgctattttatgattcacaaaaacaaaagaaagtaatctttggatcaaatatgggaatcatatgagtaatctttttcatgtgtttcagttatgacatatgtttgaaagttatttttgtagtaagttggtacttgatgatggtattaatcaattattgattgctttgtagtggataaagttatttttttatgc

SEQ ID NO: 192615 - DNA, 469 bp, Gossypium hirsutum
gaaatagatgacactccacctgtaactagctccttatctcatgaagctgttcaggcgaaaggaggaaaagaaacagacagggaaaaactgctaggtgcagcagatgattcaacacccagggttagaacagctcaagaaattattgcaaaatatagaaaagctggggacgcctcttcagcagcagcgcatgcgagaaataaactggtagaaagacgggaaaagctggagagaatcagcagacgcaccgaagagctgcagagcggggcagaaaactttgcgtcattggcagatgaactggtgaaggcaatggaaaatcgaaagtggtggcaaatataactggacacaaatggggaattatgtctcgtgatcatttcttcatactccatagtagttgatcacttccgagctcatgatggcgccattgttgttcacagtaaaaaatttggaatcatatgagttggttggtgaa

SEQ ID NO: 192616 - DNA, 709 bp, Gossypium hirsutum
  unsure (1)..(709): unsure at all n locations
gaaagagaagaagattaaaaattaatggacngttggtttttaagatggggaatagtggcaattaccatgtcaataaatttgctgaagaatggatttaaagtcactgtttggaatagaaccctttctaagtgtaatgaattagtggctcatggtgcatcaattggaaaaaccccagctgaagtgattaacaagtgtacgatcaccattgctatgctatctgatcctgctgctgctctttcggctgttctcgacaaagacggtgttcttgaacaaatttgcggcggtaaaggttacatcgacatgtccaccgtcgatcccgaaacttcttgcaagatcaatgaggcgattacatcgaaaggtggacgattcctcgaggcccctgtttccggtagtaaacagcctgcagaaaccggtcaactggtgattcttgccgctggagataaggcattgtatgaagcagcaatgccagctttcgatatcttggggaagaagtctttcttcttgggacaagtcggaaatggagctaaaatgaaacttgttgtcaacatgatcatgggcagtatgatgaatgcattttcggagggactcacactagctgatcgaagcggactgaacccacgtgaccttcttgatgtgctggacttgggtgccattgctaatccgatgttcaaagggaaaggaccagcaatgctccaaaacaactattccc

SEQ ID NO: 192617 - DNA, 1002 bp, Gossypium hirsutum
gtgagttggtaactgagtcaaaatcttccaaatctctgggcctctccaaagcgaaccctctcttctctagaaaccaccgtcgagccatggctctaatcacccgaaccaccgccaatcgcctccctcacctcctctccctacagcgtgccctcgctattcacaccaccgtcccttctctctcctcttctgccaccccaaccacatacgctcgcccttctccgccgtccacctccggcactccctccagtctgtctaagcctgctgagtacgtgatctccaaggtcgatgacctcttgaactgggcccgtcgtgggtccatatggcccatgactttcggcctcgcttgctgcgccgtcgaaatgatgcacgccggtgcttctcgctacgacttcgatcgctttggtgtcatttttaggcctagccctcgccaatccgattgcatgattgttgctggcactctcaccaacaaaatggcccctgctcttcgcaaggtttacgaccaaatgccagagcctaggtgggtgatttcaatgggaagttgtgcaaatggtggtgggtactaccactactcatactcagttgtaagaggttgcgatagaatcgtccctgttgacatctatgttcctggttgtccacccactgcggaggcgttattgtacggagttcttcaattgcagaaaaagatcaacaggcgcaaggatttcctccattggtggtccaagtaagaaaatttgcaagttatttcagggctatttgcactgcattttgcagtgttgagtaacaaataaataaaatcaaactttctggtgaaatgccatgtagatggagattgttcagaaaagcttttgattataaaagttcgtgggggttctattactttgcatggtgactgtacttcctgtttcatttggaacttccgtttttgtttcggatttaaatgggtctgaaatatgaataatttcattgttttgttgtggtcaaaaaaaaaaaaaaaaaaatcat

SEQ ID NO: 192618 - DNA, 464 bp, Gossypium hirsutum
tttccttcccttcttccttctttttcatacatattaggtgtagcattgttcactgttcctttgaatcccttcttcatccaaaatcttggcttagagatttcaaagggccttaagatcatgtccatcttaagcaagagtccaagcagcaacatgggttcttctcctttcttccatgaattcaagaaacaagcttctttcttcctcaaggagaagatcaaaacagctcgtttagctttaactgatgtcacccctgctcagctgttgactgaagaagctacgaatgggaatccatgggcaccaaacacccagtctcttggttccatctcaagggctgcttttgaattagatgattattggaggatcgtggagattttacataacaaattggacaaatttgaaagaaagacatggagaacctcttacaattctctgatagtgcttgaacatttgttgactcatggacc

SEQ ID NO: 192619 - DNA, 479 bp, Gossypium hirsutum
gaaagagatgggcaggaagaagggagtagcagagttcgaagaaacggcgccgggtgacttcggcccgggccaatccctacaaagacccgggggccatgcttgaaatgagggagcatatagttcgagagaaatggattgacattgagaaagccaagatcctccgtgacaaggtcaggtggtgctaccgcatcgaaggggtcaaccatctccagaagtgccgccatctcgtacgccagtacctcgacgccacccgtggcatcggctggggcaaggatggccgtcatccctccctccacggtccaaaggttgaagagatcgattcagaatgaatggctgcatttggtcatgataggtgactgactttgggcagcaaagtaaggagtgtgggatttgaataatcgtccacctacattgtcactattgttttttgtgttgtaagactcttataacaaagatcaaacgtaatgccatcttctttt

SEQ ID NO: 192620 - DNA, 721 bp, Gossypium hirsutum
attatggtcactcttactgccttcaggctattctctctggtgctcaaggtagccctgttgctgtttcatggggatatgcacgttttgtgaatataagagatgccaagggagctactcccttgcacttagcagctcgtcaaaggcggcctgattgcgtacatatcctgttagacaatggtgctcttgtttgtgcttcaactggtggatatggttgtccaggaagcacacctcttcatttagctgctagaggtggatctcttgattgcatccgcaagttgttggcatggggtgcggaccgtcttcaaagagatgcatccgggagaataccttatgtagttgctctaaagcacatacatggggcatgtgcagctctgctaaatccttcatcagcagaacctattgtctggccggcacctttaaagtttattagtgagcttaatgaggaggcaaaaacactattagaacaagccttaatggatgcaaaccgggaaagagaaaagaacatcctgaagggaacagcttactcaattccatcaccttcacaatctgattctgggttagatgacaatatctctgaggctagtgatactgaactatgctgcatatgctttgagcaaatctgcacaattgaagttcaagactgtggtcaccagatgtgtgcacaatgcacactggcattatgctgccacaacaagccaaaccctacaactgcaagtctaac

SEQ ID NO: 192621 - DNA, 469 bp, Gossypium hirsutum
gagaaagaaaaaaaagggttgtttgagattttggttttgaaaaaaaaaaaaacagatatgagggaggtgattagtatacatattggtcaagctggaattcaggtcggaaattcctgttgggagctttattgtcttgaacatggaattcaacccgatgggatgatgcctagtgacaccacggtaggtgcttgccacgatgcttttaataccttctttagcgagactgggtcgggcaagcatgtaccaagggctatatttgttgatctagagcccactgtcattgatgcagttagaaccgggacctatagacaactgtttcatccggagcaacttattttccgaaaggaagatgctgctaataactttgctagaggacattatactgttggtagggagattgtggatctttgccttgaccgagcgagaaaattggctgataactgcacttgactacaatgatttttggtat

SEQ ID NO: 192622 - DNA, 625 bp, Gossypium hirsutum
  unsure (1)..(625): unsure at all n locations
aacaaagagaacaatggtgtgcatacgcaaggcgaccatggacgacctactggctatgcaagcttgcaacttgctttgccttcccgagaattaccagatgaaatactatttctaccacatcctctcttggcctcagcttctttacgtcgccgaggactacaacggccgcatcgtcggttacgtcctcgctaagatggaggacgaaagcaacgagtgccacggccacattacctctctcgccgtcctccgcactcaccgcaagcttggcctcgccactaagctcatgaacgccgcccaagccgccatggagcaggtgtttggagcagagtatgtgtcgctgcatgtgaggaagagtaacagggcagcgtttaatttgtatacccagacgttgggatataagattcatgatgtggaggccaagtattatgcagatggggaggatgcatatgacatgaggaagcagttgaaagaaaagacgaaccatcatcatggtcatcatcatcaccaccaccaccaccatcatcatggtggtggatgttgttcaggtgatgcaagaagtggagaagcagctcatacacgaagagactcganatcagagtcnaaagctagcacaaaatctgattct

SEQ ID NO: 192623 - DNA, 444 bp, Gossypium hirsutum
cgcatgttcaagccttatttcaaggcaattaaaaagcgggtagaggagctgattactcgagattatcttgagagggacaaggagaaccccaacgtattcaggtacttggcatgattttgcctagtcattatgctgacgaagtggtgaatattgcttggagcaaatagagctcaaaaggctgggatgcgattggtcagtggtgaaagtggcgtaagcacaatgagatgccacctgatgagtgcttgaccaggagctaagatacttgtccagtaggagccaggtatggcaaatttcattaccttatgaaatcaacccggacaaatcgtgattgatctcataatatggtccggtgtggcatgagaaaccacagggtatctggtttcttatcactgcaaagatgactttgacccttgtttgttttgccccatcaaaagaaagaaaaat

SEQ ID NO: 192624 - DNA, 889 bp, Gossypium hirsutum
  unsure (1)..(889): unsure at all n locations
cccacttttccgccaagagctaacatttcggatcctgtgtttgatggacaaaacaggggagggcctgaagtagctaagagaacatctgttggatcttcatctagcatgaggaaagcttcttcaactgcaaacattgttgatgacctcagttctatttttggagctgctgcatcttcttctggtgtgttccaagaggttgatggggaaactgaagaaaggcgaagagccaggttggaacgccaccaacgaacgcaggagcgtgcggcaaaagcactggctgagaaaaatcagcgtgaccttcaagtgcaaagggaacaagctgagagacatagaatttctgaaacactagatgttgaaatcaaaagatgggctgctgggaaagagggaaatttgcgtgctctgctgtcaactctgcaatatgttctttggcctgaatgtggctggcagcctgtttctttgacagatttaatcaccgctgccgcagttaaaaaggtttacagaaaggcaactctttgcatccatcctgataaagtccagcaaaaaggtgccaatcttcagcagaaatatgttgcagagaaggtgtttgacttgctcaaggaagcatggaataagttcaattcagaggagcttttctgagttcaaatcgttgattatatagctaaagaaattcgtcgtttgacaaactaggcattggagttgaatgaaaacacgactgtccagcagctgctgtctgctttggtttgatgaaccattaatgagcagttaaagcttgtcatcggcccggcgctgcttgaaaaacatgggagggttacttgagaaggtgcantactgttatttggatcaggttggtgtatattaagcttcatccaacttgtggctatggaaagtt

SEQ ID NO: 192625 - DNA, 774 bp, Gossypium hirsutum
cccacgcgtccgcccacgcgtccgcaccataactgaaaaagaaaaagaagggatgggagttttaggcaaagtggtggatgggattctattgctaacattcgtgtccatgtcggtggtgccagcgtgcttggacgcccaggtacttttgcctaaagcgcttttccccgatgtgctgggtcgtgtatattcatggtatacgaccacataccaagattatttgctgttggatgagcctcattttttcatggcacttatgaaattggagcttgttttagtattgccgcttgctatacttaacacttatggcttgttgacctccaagccctggttcaacaccacctgcctcatcttcggttctgctcttgttacctccacgacagctatggtgggagacatgctgggatccgacaaaccatcagcaggtaaactggcgtcgatgtactcgccttttataggatttgggttcctagccatactgcgagggctgctttcggaatcccccaacgcttccaaaaccatggccaacggaccaacgtcggctttgaaaaagaaagcctgaagttgacacatgaattataaaacatcatcttcttccttgaaatgcgatatccatgttacaacaataaggatcaaaattcaaagtacaaaaaattacaaatactactagcaatctaatagtacttgtagttggttctttgtcatgtttagaaagtttttattttaaaaggtgtgattatgagtaataatttttaaagcccttctcttttttccttt

SEQ ID NO: 192626 - DNA, 685 bp, Gossypium hirsutum
gaaggtagtcagggacaaggttctggtgtttcgatttgttgatgtcggattacttcctccaccggtactgcagtttgtgggggttactgtcggatacacgcctgagaatctgatctacaagaacttggactttggggtagacttggactcaaggatagcattagtaggacctaatggtgcagggaagagtacactgctgaaactgatgacaggtgaattgactcctattgatggaatggtccgacggcataaccatctgcgaattgcgcaattccatcagcacttggcagagaaactggatatggaaatgtcagctctccagtacatgataagagaataccctggaaatgaggaagagaagatgagaggtgcaatcgggaagtttggattgtcagggaaagcgcaagtgatgccgatgaagaacctatctgatggacagaggagtcgagtcatcttcgcgtggttagcatttcgacaaccccacttgctgctgctagatgagcccactaaccatttggatatcgagacgatcgattcactggcggaagcattgaacgagtgggacggtgggttggtactggtgagtcacgatttccggctgataaaccaggtagccgaggagatatgggtgtgtgaaaatcaagctgcaacacgatgggaaggggacatcatggacttcaagcag

SEQ ID NO: 192627 - DNA, 545 bp, Gossypium hirsutum
cccacgttcccctttggagcaacatttcctcttggttcggccagctttcctggcagctcagcaacttactctgattcatctcatggtgggaggatttgtttaccctcagtccatgcacaattgttgagtcctgctggtgctgttccctcccattacccaaggccctatgttgttagccttgtacacaataatggtaatagtattgctgagaatggtaggaaatggggaggacaaggtctagacttaaatgcagggcctggagtcctggacattgaaggaagagatgagacaacagcgcttgcatctaggcaactgtctgttgtgagttcacaggctctggcagaggagcaagcaaggatgtatcaactggcaggtgatgttttgaaaaagaaggaacttgagggttgttgggatggatacaagcaatcttcatggtagtaggaatccttaaatgtccctatctggtgacccatgaaagcttttattcaaggataggcatgggctaacccccagaaagaacctgtgtgctcttaagaagggtgggt

SEQ ID NO: 192628 - DNA, 1380 bp, Gossypium hirsutum
gcgtgcgccgccctttccacgcgttctttagatcgcgagcggtctttatttttggtctcaaatgctcgagcagtcttgcattttgttttcccttttttttccccacacctttttttaaacccatttgctaaaaatgcactgggttcttccagtgttgcttgccgttatcggagttactgcactgctcgttgtaactccggtaagtgggtaccgtccatggccgtacttaaaacccaacagctccgacttaatgttcggaggctctaagaaatttgagggctcatcggagtttatccatatgagatatcatatgggtccagtccttactgctaatatcaccatccacccaatctggtacggccggtggcagaaatcccagaagaaaatcatccgtgagttcatcaactcgatctccgccgttgattccaaacacccttcggtggctgggtggtggaagaccgtacagctttacaccgaccaaacgggagccaacatttcccgtacggtgctattaggtgaagagaaaaacgatcgtttttactcccacgggaaatccatcacgcgcttatcgatacagtccgttatcaaaagcgctgtaacatcccgtacgaaaccgttaccgatcaatcccaaaagcgggttgtacctcttgctcacctccgacgatgtgtacgtcgaagatttttgcggccaagtctgtgggttccattacttcacgttccccgtcaatcgtggggtacacgctcccgtacgcatgggtgggtaactccgccaagctttgcccaggagtatgcgcttaccctttcgccgtacctcaatacatgccggggttgaagccgttaaagtcacccaacagtgacgttggagttgacgggatgataagtgtgatcggacacgaagtcgccgaattagcaaccaacccactggttaacgcttggtacgccggtcaagatccggtggctccggtggaaattgcggatttatgtgagggtatatatggaactggaggtggtgggtcttatacaggacagttattgaatgataaagatggtgccacgtataatatgaatgggatcagacggaggtacttggttcagtgggtttggaaccatattgtgagttattgtactgggcctaatgctcttgatcagtaatttttatttttattttgtttaatttttttgaaacttgtgattttgtcttggcattttgtctttgtctctttttcttttttcaggttttttggcctttgtgggttttggtcgggtgggtgatgatgcatgattagttaaggtagttaagtttgttaaatatgtgtacttctgtagtaataagctttgattcctaatatactattttcgtataccgatagtttagtta

SEQ ID NO: 192629 - DNA, 633 bp, Gossypium hirsutum
agtactgcactgctcgttgtaactccggtaagtgggtaccgtccatggccgttcttaaaacccaacatcttccacttaatggtcggaggctcttaaaaatttgaggtcttaaccgagtttattccttttaggtattattttggttccggcccttcctgttattttaaccttccacccaatctgttccggccgttggcggaattcccagaggaaattcatccgggggtgcatcaactcgatctcccccgttgagcccaaacacccttcgggggctgggtcctggtagaccgttcagcttcacacctaccaaacatgagccaacatctactgtacggaactattacgtgaagagaaaaacgatcttttatactcccacgggaaatccttaactcactcattgatacaagtccgttatcaaaagcgctgtaacgatccgtacgaaaccgttacccatcaatcccaaaagctagttttacctcttgctcacctcccactatgtgtacgtcgaaaatattggccacacaaatctgctgattacattacttcacgtccacctaaatcatgctgttcacgctcatctacgcataggtattaaacactccaagctttgactattatttgctcttacccttt

SEQ ID NO: 192630 - DNA, 777 bp, Gossypium hirsutum
atatgcttattacacatttcattgaatctgaaagcttccatgcgttacgacataataggaagtgttggcagagttaaacagacatagcggaaactgtttaaaataaatcaagttactgaaatcaattgtctcagctgcataagtttggtatgcatacattggcatctggattttgttgttccttccatattcgtccagtaaccctcagtttcagctcctttctatccccaccggagaagaaaagtgccatgtttcgttggataattagaccatcatggctgtccctgactttccggtgactatcacggatgctacgtggggcgctttcccatataagtttccgtccgtttgctccgacttcaaggctgtagctatagttcctagcttccgtctcgtcacccatgaaacggataaatgccatgtaaactggagccattcccaactggaaggcttcaaagtgtaggcagaaatactgaccaaaacaatggaatactgttagcatccatgtagcattttcaacttcccgagggttggatttcacgtatcgatgattaaatgtgcagccggtgtgcatgtcgaccttatgatcatccctcaaatgggcaacaaggaaagggatatccccaacaacagaacactccgaaccagcatatggacaattgtatggtctgtagatgcaaatcccctcgtgtttgagtttgctgtaataggggaatatttccgggcaccccgacttgtagtattaacaaggtaactcgagggactcggcgaccccac

SEQ ID NO: 192631 - DNA, 627 bp, Gossypium hirsutum
tttttttttttttttaatccttattttgcacatttgatataagctgaaaactttcatccattacaacatgccggaaaacggttcgtaaaggttgaacacaccgcaaaaacagatcggaacaggtgaaaaggaaaaaaggttatcaaaatcaatccactcaacaacattactttggtatgcacatgttggcatccgcattttgttgttccttccatattcgtccagtaaccctcagtttcagctcctttctatccccaccggagaagaaaagtgccatgtttcgttggataattagaccatcgtggctgtccctgactttccggtgactatcacggatgctacgtggggcgccttcccacataagtttccggccgtgtgctccgacttcaaggctgtacctatagtccctagcttcatgtctcgtcagctataatcgcgatagatgccatgttggtggaagccattcccgaatgcaaggtttcgcagtgtagccagatatatgtgtcctaatcctatggaatgcgtgttacgcatcgcatgcagcatttacacggtccccaggctcgaatgtagcggatgccatgatttaatgtccagcctgagagctcgtcgcctttatgcgaaagt

SEQ ID NO: 192632 - DNA, 844 bp, Gossypium hirsutum
ctcagtgagttaggggtgacaagatggctacaagtgaggcatccgtgactcggataatggtggcggtgaatgagtcaacgatcaaaggttaccctcacgcttctataagtagtaagggagctttcgagtggactcttcagaagatcgttatgtccatcacttctggtttcaagcttctcttcctccatgttcaagttcccgatgaagatggtttcgatgacatggacagcatatatgcctctcctgaagatttcaagagcctgaagagcagggaccgggctagagggcttcatctgcttgaattctttgttacaaggtgccatgaaattggggttgcgtgtgaagcatggatcaagaaaggtgatccaaaggaagttatctgccatgaagtgaggaggatccagccagatcttcttgttcttggtagcagaggacttggtcctttccaacgggtttttgtcggaacggtgagcgagttttgcgtgaagcatgctgagtgccctgtcgtaacaatcaagcgtagatcggatgaaactcctcaagaccccgtcgatgactaaatttgtttcacagaccccttgattcattgctcttggttctgttaatagacttgaaactctacgactttaccaattccatatatcagtggggataagaaatgaattgcttctgttttggtggaaaaaatactctgttgtggattgcgtttgttgtgtgcaaagagaactgctattattagtctggcccgtatataaagttgtatttgctttaattacttccaaaaccctttctcgtgttcttttttttatttactagattttaccaaaaaaaaaaaaaaaaaaat

SEQ ID NO: 192633 - DNA, 1031 bp, Gossypium hirsutum
cccacgcgtccgtgaaacgaggagatttctacagaaggtgaaaaagaaagcgtttttttttctctgtaatttatgcaaacgggaaatctgccacaatctctctcgatgaattcgccttttggaggaccgagcgcgtcgaatccaactgctgccggagctccggcgaataaggatcggaaaatggcaacggctgagcatttagttctcgatctcagcaaccctgatctccgagaaaacgcacttctggaactatcgaagaagagagaattatttcaagatttggctccattgttgtggaattcttttggtactattgctgcacttttacaggagatagtttcaatttatcctgttctctcacctccaaatctgactccagctcaatcaaatcgagtttgtaatgctcttgctctgcttcagtgtgtagcttctcatccagacacaaggatgttattcctgaatgctcatatacccttgtatctgtatcctttccttaatacgaccagtaagtcaaggccgtttgagtatttgaggcttactagcttaggtgtcattggtgccttggtgaaggttgatgatactgaagttatcagcttcctcctgtccactgagataatcccattatgtctgcgcacaatggagatgggcagtgaactgtcgaaaacagttgctacctttatagttcagaagattctactagatgatgttggcttggactatatttgcaccactgcagagcggttttttgcagttggtcgagttctgggtaatatggttgcaccacttgctgagcagccctcttcgcgactactgaaacatattattcgatgttatcttcctttgtcagataacccaagggcttgtgatgcattaacaagttgccttccggatatgctaccagatgccccctttaccacttgtcttcctgaggatcagaccactaggagatggctgcggcacttgcttcacaatgttggagtgaatcgagtgccaacgcttcaggcccgtgcaggattcgatcacatgctggt

SEQ ID NO: 192634 - DNA, 1103 bp, Gossypium hirsutum
cccacgcgtccgcccacgcgtccgggaagaagaatgagaaaagtccagcagaaattgcattgctagttgagagtgtaatggcggagcttgaggtaactgctgaagaagatgcagagcttaatagacaagggaagccagcaattaataaactcaagaagttaccacttcttactgaagttctgtcaaagaagcaacttcaaccagaattcttagatcgcggggttttaaccttgttgaaaaattggcttgaaccccttcctgatggaagcttaccaaatataaatatccgtgcagctgttttgcagattttaactgattttccaattgatttagagcagcatgatagaagggagcagctaaagaaaagtggtcttggaaaggtcattatgttcttatcaaaatctgatgaggaaacgacatccaacaggaaacttgctaaggaattggttgataaatggagtagaccaatctttaataagagcactaggtttgaagacatgagaaatgttgaggatgatagagttcccttgcgaaggccatctgtgaaaaggcccacaaatagagctgcatcaatggaatctagagatggtgattttgatttggatatttctcgggaccacaagtctggtagatcatcgtcaggtcaaaatgcttccaggtctgaatcttcttcaaggctacatgcttcaaggccagatgcaacaccaatggattttgttgtgcgtccgcaatctaagattgatccagatgaaattagagctcgagcaaaacaagttgtacaagatcagcgtcgtttaaagatgaataagaagttgcagcagttgaaagccccgaagaagaagcagctgcaggcgtctaaacttactgttgagggtcgtggtatgcttaagcaccttgtaattgataatccacagtccacataccggaactattagctctctatttcccacaagaaacctcccttgaagcaaatgtttctcgttttccttatccaattgattccaatcattgagaagggattaacggtgggactatcatgatgtttcattaattctgtcttgggaaaataccttcactgcagttcaaataaatatggtataatg

SEQ ID NO: 192635 - DNA, 440 bp, Gossypium hirsutum
  unsure (1)..(440): unsure at all n locations
gaaaaatccccttgtaccaagtatctgagtgccattgtagtttccaaaatcaagaacctagaagcaatccccaatggcgacggtcgctatcgagaggaagcaaccggcatcggcggaagagatgtgcaccgccaagagcggcgccaagcaaggggagggcctccggcaatactatctccaacacatccacgagctccagctcaacctccgccaaaaaacccacaatctcaaccgtctcgaagcccaacgcaacgagctcaattcccgagtgagaatgcttagagaggaactgcagctgcttcaggagcctggatcctatgttggtgaggttgtgaaaggtatgggtaaaaacaagggcttagtcaagggccatccagatggaaaatatgttgtcgatattgacaagaatattgatatcacanaaatcacaccatcaacaa

SEQ ID NO: 192636 - DNA, 912 bp, Gossypium hirsutum
ctctgtttttcttaagctcggattctctcttcatctcccaattctcaaaaccctaattatatttttttatttccctttttgattcagcaatcggggcttgccaatggccaacagtaatctccctcgaagaatcatcaaggaaactcaacgtctcctcagtgaacctgctccgggaattagtgcttcaccatcagaggataatatgcgatatttcaatgtgatgatccttggtcccacacagtctccatatgaaggaggggttttcaagttggaactatttttgcctgaagaatatcccatggctgctcccaaggttcgatttcttacaaagatatatcatcctaacattgataagcttgggagaatatgcctcgatattctcaaggacaaatggagtccagctctgcagatccgaactgtacttttaagcatccaggcactcttgagtgctccaaatccagatgatccactctcggagaatattgctaagcactggaaatcaaacaaggctgaagctgttgagacagcaaaggaatggacgcgtttatatgcaagcggtgcatgaagaacggtggaaccgtttgctctcataaaataacatttttatgccatgttagctattccatgttcattccatattgaaatctggacaaatgaaagtttgaaagaatttgatattggcacccaaaaaaaaacttccaagttctaaccctttaaataataattgggtccggaaccaactcctctacttgttttgaaatataacattggtctcttcaaactccccccaagggttttaaatttgggaaattatccctcaaattagtgagattctcaaatccgggcgcgaaaaaaaaaaaaaaaaaaaaatttcctggggcgcgcaccccgcgggtgaaaccccacttccca

SEQ ID NO: 192637 - DNA, 898 bp, Gossypium hirsutum
acaaaaaaaatagagagcgagttaaagagaccgagggatctctttgtcttctcagattttctctttccatctctcaattctcaaaaccctaatttctctgcttttccttttgcttaatcaatcgatcctcgtcaatggccaacagtaatctccctcgaagaatcatcaaggaaactcaacgtctcctcagtgaacctgcacctggaattagtgcttcaccatcagaggataacatgcggtatttcaatgtgatgatccttggtccaacacagtcaccatatgaaggtggggttttcaagttggaactatttttgcctgaagaatatcccatggctgctcccaagggttcgatttcttacaaagatatatcatcctaacattgacaagcttggaagaatatgccttgatattctcaaagacaaatggagtccagctctccagattcgaactgtacttttaagcattcaagcactcttgagtgctccaaatcccgatgatccactctcggaaaatattgctaagcactggaaatcaaacgaggctgaagctgttgagacagcaaaggaatggacgcgtttatatgcaagcggtgcatgaagaccggtggaaccgtttgctctcataaaataacatttttatgcaatgtaagctattcaatgtcaattccatattgaaatctggacgaatgacagtttgaaagagtttgatatttgcaaccaaaaaaaaaaagcttccaggtgctacccttttagtagtaattcggtcggaagcaatctctaagcttgtatgataatacacatggttctctaaaactcccaaaggctttaactatgggattattctctaatatggtgatttcagaatctggctatatgtgtgtgtaatgaatctatcaact

SEQ ID NO: 192638 - DNA, 1542 bp, Gossypium hirsutum
caacaacagcattagccttccactaatatcttccatctctctttgagttctccaacacatcaaaccatggtgttatctaagacagcatctgaaactgatgtctcagttcactccacttttgcctctcgttatgtccgaacctcactgcccaggttcaaaatgccagaaaactccataccaaaagaggctgcgtatcagatcatcaatgatgaactgatgcttgatggcaacccaaggttgaaccttgcctcttttgttactacatggatggagcctgaatgtgataagcttataatggactccattaacaagaactacgttgacatggatgaataccctgtcaccactgagcttcagaatcgttgtgtgaacattatagcacatcttttcaacgcaccattgggagagtcagaggcagcagttggtgtgggaacagttgggtcatcggaggcaatcatgttggctggccttgctttcaagagaaaatggcaaaacaagcgtaaggctgaaggcaaaccatatgacaagcccaatatcgtgactggagccaatgttcaggtttgctgggagaaatttgcaaggtactttgaagtggagttgaaagaagtgaagcttagagaagggtactatgtgatggatcctgtcaaagcagtggaaatggttgatgaaaacaccatctgtgtagctgcaatcttgggttcaaccctcaatggagaatttgaagatgtcaagcttctaaacgatcttttaattaaaaagaacaaagaaactggatgggataccccaattcatgttgatgcagctagtggtggatttattgcgccatttttgtacccagaacttgagtgggactttaggctcccccttgtgaagagtattaatgttagtgggcataaatatggtcttgtttatgctggaattggttgggttatctggaggagcaaagaaaacttgcctgaagaactcattttccacattaactatcttggagctgatcaaccaactttcactctcaatttctctaaaggttctagccaagtcattgctcagtactaccaactaatccgtttgggatatgagggatacagaaatgtgatggagaactgtcatgaaaacgccatagtccttaaagaaggattggagaaaacagggcgttttaacatcgtgtcaaaggacaatggggttccactggtggccttctccctcaaagacaacaagcgccatgacgagttcgagatatcggagatgttgcgtcgcttcggttggatcgtgccagcctacaccatgccagccgatgcacagcacatcactgtgctccgtgttgtgatcagggaggacttctcccgcaccttagccgagcgtctcgtcattgacatccaaaaagtgctccatgagctcgataccccccccccggccccgcttccctttttccttttaatttttagtttttgtttctcgccatgtttgttttccccatttttttcaagcttcagcatgttgaggaaactagcttaaagactaccaatgaatgcatttgaatcg

SEQ ID NO: 192639 - DNA, 590 bp, Gossypium hirsutum
atgttttcgactattctacactctcagcaattatagatggcacttggctttgtgtacatggtggccttgctcctgacgttcgaactgtcgatcagattagggtaattgaccggaactgtgaaatccctcatgaaggcccattctgcgatctcatgtggagtgatcctgaagatattgaaacatgggcagtcagtccacgtggagcaggttggctatttgggtccagggtcacatctgagttcaaccacataaacaagcttgatcttgtttgtcgagctcaccaactcgtgcaagaaggtcttaagtatatgtttcaagataaaggcctagtaactgtgtggtctgcaccgaattattgttaccgttgtgggaatgtagcttctatattgagcttcaatgagaatatggagagagaagtgaagttcttcactgaaacagaagagaataaccagatgcgagggccgaggaccggagtcccgtacttcttgtaatccaaatgagttgacatactgcagtacttgtaatattatccaagcatttgattattgaaagaaggtgtcaaaggaggaagccttgaaatacataaaatg

SEQ ID NO: 192640 - DNA, 835 bp, Gossypium hirsutum
agagtctctctctctctctctctctcaacactacgtaagccactttgtatgaattaagcctcttaagccaaaacccagtttggatttctagcttttagttccagattttgtcacttctttgttaatccttcaagttctcaagttcctttctttattgtttacttgttttcaaattcagtgctttcttcgtttagtctttgaagctttgcgtttcagctctcttaagtccaaactcttgtaagaaaggacatggagtctgaaaatggggttacagtggaggaagagacaattgtgagtgaaaaaacagatattgaagaatctgctacagaagaaaagaaaaaggtacatgatgatgctgatgctgacattaatggtgaaggggattcaaattcgaagcagcaagaaacaaaatctgaaggcaagacaagtaaagctcctgcaaatgtttccaaaactcaattgtcaagaaccttaaaggagtctggtaatgcaaagaataataaggtgacaaacgataaacctaatctgagaaatgcagttccaatttctcgtaaccagaggcatgttctgtctcaaagtctttcatttcctgcaagaagaatccatggggatggtcttgtgaagagcactgatctcaaacatttccaagagaaaagcttaaaaactcatgccccttcttccaatggatcagctggtttgagtcatccctacaggcgcgggtccatccttgtcaatacaaagccggcaaatgcaaatggtgggggagcttcttctagaaggaccactatagcatctttgcctagcaataagccggcaaaatctggtcctggaaata

SEQ ID NO: 192641 - DNA, 769 bp, Gossypium hirsutum
  unsure (1)..(769): unsure at all n locations
ctcgatttcgctgtctggattctgaatccttcatcgatacgacatggagtttccgtacatggaagctgttgttggttttatgatattaatgtacttatttgaaacttatctggacttacggcaacatgctgctctcaaattgccaactcttccaaaaacattggaaggagtaatcagccaagagaaatttgaaaagtctcgagcctatagcctcgataagagccacttccattttgttcatgagtttgtgacgatcctgatagattctgcaattttgttctttggtatattgccttggttttggaagaaatcaggaactttcttgcctttacttggtctaaatgaagagaatgaaatattgcacaccctttcatttttggctggtgttatgatatggtcacaaatcactgacctatccttttctctgtattcaacttttgtaatcgaggcccgccatggtttcaatcaacaaacaatatggttattctttagggaccttatcaaaggaatatgtcttgctattgtacttggtccaccgattgtttctgctattattgtcatagtacagaatggaggtccatatctggctatctatctntgggcattaatgtttgtactttctcttgaaatgataacaattaaccctgttctgatagcttcaatttttaaataagtcaaccctttttcttaaagaaaacctaaacctaagaatgggaaacctggtttcttccttaaaatttcttttaaaaaactatttggtggtgaatga

SEQ ID NO: 192642 - DNA, 1377 bp, Gossypium hirsutum
ccatcttcaaatttctctctctttctatattttttctttctgctaataattacttttgtcaccagcggcgtcggaagacaggaaaacaccggtgttgtttgaaatggcagcttcgagaatggatctggacgggagaccaataaagccaattacgatatgcatgattggagcgggaggcttcattggctctcacctctgcgagaaattaatgtcggaaacgccgcacaaggtgctcgccttggacgtttacaatgacaagattaagcacctcctcgagcctgactctctcccttgggctggccgtatccagttccaccgacttaacatcaagcacgattctaggcttgaaggcctcatcaagatggcagatctcacgataaatcttgcggcgatctgtactccggcagattataatacacgcccgctcgatacgatttacagcaattttattgatgcacttcctgtggtgaaatactgttcagagaacaacaagcgtctcattcatttctcgacttgtgaagtgtatggtaaaaccatccaaagctttctgcctaaagattctcctctccgtcaggatcctgcctactatgttcttaaggaagatgtctccccctgcatttttggctctattgagaagcagaggtggtcctatgcatgtgctaagcaattgattgagaggcttatttatgctgagggggcagagaatggccttgatttcaccattgtgagaccttttaactggattggacccaggatggatttcattcctggcattgatggtcctagtgagggagttcccagagttcttgcatgctttagtaataatctcctacgtcgtgagccacttaagcttgtggatggtggcgaatctcagagaacttttgtatacataaaggatgctattgaagctgttctcttgatgattgaaaatccagacagggccaatggtcatattttcaatgtgggtaacccaaacaatgaagtcacagttaggcaacttgctgaaatgatgactaaggtctatgccaaggttagtggagaaactgcactggagtctccaacaattgatgtcagctccaaggaattttatggcgagggatatgatgatagtgacaagagaattccagacatgaccataataaataaacaacttggttggaaccccaagacatcgctttgggacttgcttgaatctaccctaacctaccaacacaggacttatgccgaggctattaagaaatctatagcaaaaccttctgcatcctaaaggaggctagatgtttaaaccacggctaagaaaggatcctgaaatgtgctttatggcaaatgtttcaattcttctttcccccgctttttttaggaagtctttaaatatat

SEQ ID NO: 192643 - DNA, 641 bp, Gossypium hirsutum
tccacgcgtccgcacatatatacagcacgcccctctttcatttctctccatctctatctctctcagctcttttcttctcttgtgacactgctaatattttttttattgtcgtctccggcgttcgaagatcataaaaaaccggagtcgtttcaaatggctacgagaacggatctagatgggaggccaataaagccgatgacgatatgcatgatcggtgccggaggcttcatcggctcccacctttgcgagaaattgatgtcggagacgccgcacaaggtgctcgccttggacgtttacaatgacaagatcaagcacctcctcgagcctgactctctcccttgggctggccgtattcagttccaccgacttaacatcaagcacgattctaggctcgaaggcctcatcaagatggcagatctcgtgataaatcttgctgccatctgtactccggcagattataatacgcgtccactagacacgatttacagcaattttattgatgcacttcctgtggtgaagtactgttcagagaacaacaagcgtctcattcacttctctacttgtgaagtgtatggaaaactattggaagcttcttcctaaagattctcctctccgtcaggatcctgcctactaattgcttc

SEQ ID NO: 192644 - DNA, 381 bp, Gossypium hirsutum
atcgcttgggacttgcttgaatctatcactgacccaccaaccccaggcctgatgctggagctattgagaagtcgatggcaaaacctacttcatcctaagtaagccaaccaacaaacaaaaattttaaagatttgcctaagcaaggactcgcataaaatgtgctttattcgcaaatgtttcaatttcttttatactttcatttaggaagtcttaaatatatacatatccagttgtttttttttgctatatgccaaatattatttgctgtctttccttgtggtgatagctcactgttagctatgttctcagtatggaattatgtggagacattattagatttctattagggaacgatatttttttattacattatattttatt

SEQ ID NO: 192645 - DNA, 2078 bp, Gossypium hirsutum
  unsure (1)..(2078): unsure at all n locations
tagacaagggaatcgaccaaaaagctttgcatgatacgtgttctgcatttggaaacattctctcttgcaagctagccacagattcttccggccagtcaaaaggttacgggtttgtacaatttgacaacgaagaatctgcccaaaaagcaattgagaagttgaattgtatgctattgaatgataagcaagtctatgtgggcccttttgttcgcaagcaagaaagagatacttctactagcaagacaaaatttaacaatgtctacgtaaagaatctctcggaatcaactaccgatgaagacttgaatcaaacttttggtgaatttggtcagatcactagtgctgtggtaatgagggatgctgatgggaaatccaagggctttgggtttatcaacttcgagaacgcagatgacgctgctagagccgttgagtccctcaatggaaagaaatttgatgataaggagtggtttgtcgggaaagctcaaaaaaaatctgaaagggaggctgaactgaaacatcgatttgagcagacaatgaaagaggcagcagataaatttcaaggagcaaacttgtatgtcaagaatttggatgatagcataagtgacgaaaagcttaaagagctattctctcaatatggtaccataacatcatgcaaggttatgcgggaccctagtggaataagtaaaggatcagggtttgttgcgttttcaaccccagaagaagcttctagagctcttgcagagatgaatggcaaaatggttgtcaacaaacctctctatgttgcacaggctcaaaggaaggaagataggagagccaggttgcaggctcagttttctcaaatgcgaccacttacaatggcaccttctgttgcaccacgaatgccaatgtacccacctggtggtccaggtcttggacagcaaatattctatggtcaagcacctccgattttcccccctcagcctggatttggatatcagcagcagcttgttccgggtatgaggcctggcagtgctccaatgccaaatttcttcgtaccaatggttcagcaaggccaacagggtcagcgtcccggtgggagaagggctggagctgttcagcaaaatcagcaaccagttccattaatgcagcagcagatgctaccccgagggcgggtctatcgctatccactggggcgtggtctacctgaagtttcaatgcctaatgttccaggaggcatgctttctgttccatatgatatgggcagcatgccaatgcgtgatgcaccactttctcaaccaattccaattggagctttggcctcagcccttgcaaatgctactccagaacagcaaagaacgatgctgggggagaatctctatccactagttgagcagctggaacccgatgcagcagccaaagtaacagggatgcttctggagatggaccagacggaggttttgcacttgctcgagtcaccagaagctctaaaagccaaagttgctgaagcaatggaggttctgaggactgtagcacagcaacagcagcaagctggtggtgctgccgctgatcagctggcttcattgtcattaagtgacaaccttgtctcctgagttttaactgcctgctagagttttctccttgaacaccatcgtagcgtggcctttgtttagattgaatcagttgcttcgtttgaagctggttatgactctatacttctacagagtgttttggaacttcaataccgtctgacacaagactttcatgctttataattaattgctatgtgattgagttatgcatttcatgcatcacacgatatctttgggattgaattgattgtttctcttttgagtgaataatcttgcagatgcatttagcttacggagatttactatgtttttcattgctttaggaagcagattctatcccctagagagctgtattttgttttggttttggttttttttttaaggaaaggagctgtgatttgnnnnnnnnnnnnnnnnnnnnnnnnnnnnnnnnnnnnnnnnnnnnnnnnnnnnnnnnnnnnnnnnnnnnnnnnnnnnnnnnnnnnnnnnnnnnnnnnnnnnnnnnnnnnnnnn

SEQ ID NO: 192646 - DNA, 910 bp, Gossypium hirsutum
  unsure (1)..(910): unsure at all n locations
ctgttcttcgtatgccaatgtacccacctggtggtccaggtcttgggcagcaaatattttatggtcaagcacctacggcaatgtttcgcagcctggatttgggtatcaacagcagccatccctggtatgaggcctggtggagctcccatgccaaatttctttgtaccaatggttcaacaaggccaacagggtcagcgtcccggtggcagaagggctggggctggtcagcaaagtcagcaaccagttccattaatgcagcagcagatgctaccgcgagggcgggtctatcgctatccaccagggcgtggtctacctgatgtttcaatgcctaacattgctggaggcatgctttctgttccatatgatatgggtggcatgccaatgcgtgatgcgtcaatttctcagccaattccgataggagccttggcctcagccctagcaaatgctactccagaacagcaaagaacgatgctgggggagaatctctatccactcgtcgagcagctggaacccgatgcagcagccaaagtaacagggatgcttctggagatggaccagacggaggttttacacttgctcgagtcaccagaagctctaaaagccaaagttgcagaagcaatggaggttctgaggactgtagcacagcaacagcagcaagctggtggagctgctgatcagctggcttcattgtctttaaatgacaaccttgtttcatgagttggtagtagtgttggcctttaatgtgctgaaaatgagttggcttggttagaaggatgatagctgggttcttttttattgattcagtactgttttggaacttggaaaatactgtcactgttatggggttatagttgtgactgaacttggtttttcactcttcatttttatcttttnnggatttggaattttt

SEQ ID NO: 192647 - DNA, 418 bp, Gossypium hirsutum
gattgatatgggatggcagggaagggatccatctactgatttcagaggtgctggattcatttcattggagaacctgttattttttgccaagacattctcgacatcatttcaatgtttattaaaaaggcaaggtgcaaatcgatctgcatgggagtatccgtttgctgctgctggggtaaatatcacattcatgatcatgcaaatgcttgaccttgatgccttcaaacctaggacatttatccgatcagttttcttacagatgtcatcagacaatgtatccgcattcgacttgctatactgcgtggcattcgcggttatgcacacgcaatggctggataaaaatgccacgtacatggagttcaatgaagtattgaaatcgacaaggactcagctggaaagagaacttctaatggatgat

SEQ ID NO: 192648 - DNA, 538 bp, Gossypium hirsutum
gatcgattctaccatcaatcccaacaagacacgtgttttcttcactactatgtcctctatacattccaagagcaaagactggggcagggaagatgggcttaaatgcttcaacgaaacgaagccagtgatgaagaagaaattctggggaagcggttccaacaaggatatgatgagcgtggtggctggtgtgatcaacaaaatgaaagtccccgtttcggttcttaacattgcgcagcttgcagagtacaggatcgatgcccactcatccatttataccgaaactgggggacggcttttgaacgacgaggaaaaagcagatccaggccgtcatgccgattgcatccattggtgcttgcctggtgttcccgatacttggaatcaaatatttttagcacatttgtagatttctattttcattttttcactccacagaaaccgagaagggaattaatctgcttgttatgcgttaattcaaagatcttttgatttgtatattgcacgctgtattcttaagcacatcttgtgcatacaagatgtt

SEQ ID NO: 192649 - DNA, 450 bp, Gossypium hirsutum
gctatctccacttgtcacgccaatgtgttcacagaaaaccgattagggacgttccgggcggaattccaactgtacgtctaaccacactaaatcaaacgacgtcttttttaacttagtgttgatctgactttatgagctgacaaaatcatactcttaatccagagaagtaataagtactgaaattttaggagttaaatgggctcaggttcgtaactcacgagttttgacgaggttaatttcggcctaaagctgaaaatgggtttagttggctaaagtttgggacatgtcggtatttgataaattaattaaggtaaatgggtgaaaaggtgggtgatgtgattgaatatgggagttggaatatatattaaagtggggttgctgactattttgaaaaaaaatttgaaaatgaatttctaattgtgatttactactgggaatttaaatttttag

SEQ ID NO: 192650 - DNA, 682 bp, Gossypium hirsutum
cttggctccatgttatcttcctttttgtgagagggtattgtaaagatgcgcgtgggtttcaatgagtttggtggggggattttatagagcttattctcttctcttgaaagaaactcaggctggagattgaggcttaattgtcatggatcctgagtttgggaagtccttggatacttcaaagaagaattcttggaggacctcattgcttttagcgtaccaaagtcttggtgtagtttatggggacctgagtacttctcctctttatgtctacaaaagtacatttgctgaagacattcaacattcagagacaaatgaagagatttttggtgttctatcctttgtcttctggacccttactttagtccccttattcaagtatgtgtttgtggttcttcgagcagatgacaacggagagggaggtacttttgcattatattctctgatatgccgacacgcaagagtcagtcttctgcccaacagacaggtcgccgatgaagcgctctctacgtataaacttgagcaccctcccgagaaaaggagcagctcaagagtaaaactgtaccttgagaagcataaggtcttgcacactgctttgttaatcctggttctccttggtacttgtatggggattggagatggcgttctcactccagcaatttcagttttctctgctgtctctggc

SEQ ID NO: 192651 - DNA, 556 bp, Gossypium hirsutum
caacatttctcatggctcttgtggtaacctttgttggcagataagtgttttacttgctgctatgttccttgtgttcttctggtttagtgaaggggtctacttatcatcagcactcatgaaagtgcctcaaggaggatgggtgcctcttgtgctgtctgtcatctctatgttgggtatgtacatatggcactatgggactcgcaagaagtacaactttgacctgcacaacaaagtatcactgaaatggttgcttggcttgggtcctagcctcggtattgtgcgtgtgcctgggataggcctcatttactccgaactggcaacaggagtccctgcaatattttcccactttgtcacatacctgccagcgttccataaggtgctgcgttttgtttgtgtgaaatcagttccagtcccatatgtttcaccagaagaacgctttcttattggtcgggtatgccccaagccatatcgtatgtataggtgcattgtcaggtatgggtacaaagatatccagcgagatgatggggattttgaggaccagcttatacaaagcata

SEQ ID NO: 192652 - DNA, 627 bp, Gossypium hirsutum
  unsure (1)..(627): unsure at all n locations
cccaacaagaaaagaagaaaaaaaaggggatttatatttcaatacaaatgaagctctatctttatatcattttgattctaatattggtgatgataaaccatggaagctgtgattcaaccattcatgttggtcatagggtaagcttancaatccctttggaatataatgatgggttcattggtaaagcttttctaatggactatggtgatgatactaagcaaatagaaccaagttttagagttgcattaagcactgaagctaacaaagggggatattcatgttctttagaggtttttcttggtgatgttaaggtatggaattctggtcattactccaagttttatacctctgatgtatgcttccttgaacttactgaagatggagatttacagttgaagggtcctaaaaaccggatgggttggcgaactggtacttctggacaaggtgtagagagattacaaatattgaggactggtaatttggtacttcttgatgttttgaaccagataaaatggcaaagtttcaatttcccaactgatgtaatgttatggggacaaagattagatgtatctacttggttaacttctttcccaaggaacacaacatcattctacacatttgaaatct

SEQ ID NO: 192653 - DNA, 410 bp, Gossypium hirsutum
tttaattgaagagtgaaggcagatggattttagctcattcttgacgtccgtgagggacgcctttcgtaatattcatagtgttgatgctgctctttgcatggctttccacgaggcaagggaacgcggtgctgtattatccgaaccggatcgtcaaaggtatggaaccgtgggaaggcggttcaaggacaccaaaccctttcgcttggataaaggaagccttgtcttccagtgaacacgacgtcatcaacatgtctggcattgacactgccgtctacttcgtcttcctcagcactgtattgggaatcttggttttgtctggcattgtactgcttccagttcttctacccattgctgcaactgatgatggtgtgaagaaaaacgaacatactagtaataatacgagcaatgga

SEQ ID NO: 192654 - DNA, 727 bp, Gossypium hirsutum
gaaatatatgcagcttttggtccgagttcagtctcgtattcagtcacgccggatccaaatgttagaaaatcaagcacgacgtcaagctcagtttaagaaagacaaggaggccgagagcggcttcggcaaatggacctttggccagtccgagacagggaatgaaaactgggatgatagcttgctgacaaaggaagaaatggaggcaagaatgcagagaaaggtggaggcagtcatcaaaagagaaagggccatggcgtatgcatattctcaccagctatggaaagatgcaatgaaatcacctcacacaggtgtacccaacattcggtccggtgtattcccatggtggtggaactggttagaacgtcgattaccaccaaccgatttacccgaaaaccaagccacaaagaccttccaatttacaccaacaatgccaaactccgaattaaagcctagtccgaggccacaatccagtcagttcacattcgacaacatcattgacatccctacaccgaaatcgacaaggtccaccattctccccaccacaaggccaatgcaaacaccaacaccaccgagtaaacttgtgccgcatgcaaccaactcagggttattaaactcaaagcattcacgaccccgacctaccataatcgattcaccatcgaacttaccactcaaagatgacgacagcctcacatgttgcccaccgttttcggtcccgaactacatgaca

SEQ ID NO: 192655 - DNA, 688 bp, Gossypium hirsutum
agaacgcctagtgtttgaatttatataaattcaatcaaatacaaaaactgggtcgttttagaagaagggtctcgtctctgattttggcgggttaaattgaaaaacataaatggcgaatctatatgtgaaggcggtaccaccggcggatctgaaccggaacaccgagtggttcatgtacccaggtgtatggactacttatattctattcctcttcttctcctggctccttgttctttccatctttggttgttctcctggcatggcttggaccatcgttaatctcgctcacttccttgttacttaccacttctttcactggaagaagggaaccccgtttgctgatgatcaaggaatttacaatggcttgacttggtgggagcagatagacaatggaaagcagctaacacgcaacagaaagtttttaaccgttgtacctgttgtgctatacctgatagcttcgcatacaacagactaccaacatcctatgctctttctgaacacgcttgcagtgatcatcctcgtcgttgccaagttcccaaacatgcacaaggtccggatcttcggaatcaatgcagacaagtgagtttatctccccgttcagaacagttgatttcaccagctagaaaagccatacatacagctccttcacctctgttgaaaatgggtatatctctttgtatagaacatt

SEQ ID NO: 192656 - DNA, 580 bp, Gossypium hirsutum
cccacgcgtccgcccacgcgtccgtttaataatggtcggcttagagaactaatcaccccttttcctaaccatcaaaatacccccatccttttttatattctaatcttcatcctttttgcagatcaacgatcctctgggatttttcttttcagattcctaaatccaacaaatacctaaagcctttgagatatttatatagatcgatcgaaatcgaagacagcagggtggcttgagaaaagggtaagtctggggttcggtggttattggaagtaaatggcgaatctgtatgtgaaagcggtgccaccggcggatctgaaccggaacaccgagtggttcttgtacccaggagtatggactacttatattccaatcctattcttctcctggctccttgttctctccatcttcggctgctctcctggcatggcttggaccgtcgtcaatctcgctcacttcctcgttacataccacttctttcactggaagaaaggaaccccatttgctgaagatcaagggatttacaatggcttgacttggtgggagcagatagacaatggaaagcagcttacacgcaatagga

SEQ ID NO: 192657 - DNA, 499 bp, Gossypium hirsutum
tttttgcgtccggatcattgaagcttttcaaacttcaatagtccatggcgttgtcaaattccctttcctttccttcttctaacgccgtcgacctccgacgttccacggttcccgattccggcatcgccccttttttcacttcttttgactgttctagattccgctgcaacttttctcagtgcggcattaggcccaatttctctgcaagaaaacgcattgtttctgctgctaacaatggtttcaacacggttaattcaacttcattggggactggccaagataaagatgattatattccaatgccaattgttttgattgatcaagattcagattcagaagcaacagttgtgcagctgagttttggagatcgtttgggtgctctcattgacacgatgagagcattgaaagatttgggattggatgttgcaaagggaactgttgccactgaaggaccagtcaaacaaacaaaattttttatcacacgattagacaatgggcg

SEQ ID NO: 192658 - DNA, 418 bp, Gossypium hirsutum
ttttgatctctctgaaaaatttctaaaattttgaagcttcgttgaacgaatggtcgtctttttttttttcccttttcttctttgattctttttttggggttttttgaggtgcaaattgcaaaggcagcaaaattaatggctactgaagaggtcaataagcctccttcacttccttcatacccacagctgattatgaacgccattgaagcattgaacgacaagaatggttctaacaagacatcaatatccaaatacattgaatccaagtatggagatttgcctgctggtcacactactctcctttcacaccaccttaatcgtatgaaacaaacaggggaacttgtcttcttgaaaaacaattacatgaaagctgaccctaatgcaccacctaaacgtggtcgtggtaggccacctaaac

SEQ ID NO: 192659 - DNA, 443 bp, Gossypium hirsutum
atcccgtaacaggctcttgatatttgcacgtctcagtcagtaataagaagcttataattcatctatggcagccgacggtaacaagagaaagaggcccaacatattggtgacgggcacgcctggaactggcaagacgacgacctcttctgctttggcggaggccaccaatctgcgccacatcaatattggtgatttggtcaaagagaagaacttgcacgacggctgggacgatgatctccagtgccacattatcaatgaagacctcgtgtgtgatgagcttgaggatgtgatggaagaaggtggaaacattgtagattatcatggttgggatttctttcccgaaagatgggttgatcttggtgtagtacttcaaactgacaacaccgtgttgtatgatcggttgagtaaaagaggttatgaaggtgctaaggctttcaacaaca

SEQ ID NO: 192660 - DNA, 538 bp, Gossypium hirsutum
ctacgtgcaccccccggaccctccgggaggcgggtcaagccttcaaggccctctttccagccctcttagctcttcaacttttcggactacttataatcttatttttcattccattcccgagtatgtctctgattccaagcttctttggcagccgtcgcagcagcatctttgatcgcagtctctcttgacgtttgggatcctttcaaggacttccctttctcttctccttcttcatcactctccacgcgctcttctgaaacctcggcttttgtcaacacccgaatcgactggaaggaaaccccagaagctcacgtgttcaaggctgatgttccagggcttaagaaagaagaagtgaaagtggacgttgaagatgacagggtgcttcagataatctgggagaggaatgcatagaatgaagacaagaacgactcatggcatcgggtggaacgcagtagtggcaagttcatgaggagattcagactgcccgagaatgctaagattgatcacattaaggctttcatggaaaacggagtgctta

SEQ ID NO: 192661 - DNA, 560 bp, Gossypium hirsutum
ccgaaatcgcggttttgcttttgtcttgtactacaacgaggcctgcgctgattattcaaggcagaaaatggcaagtgcaaattttaagctggatggcaacaaccctactgtcacatgggctgatccaaagagttcacctgatcattctgctgcttcgcaggtgaaggctctatatgtcaaaaacattcccgataacacttctacagagaagctaaaggaagtatttcagcgccatggggaagtaacaaaagtggttatgccacctggcaaagctggtaagcgggattttgggtttatacattatgccgaaagatcaagtgctttgaaagctgtcaaagatacagagaagtatgaaatagatggccaagtcttggaagttgtccttgccaaacctcaggctgataagaaaactgatgcagcatacccttacattgctgggcttaatccaaaccaccttcaacatcctgggtatggtggttatactggaactacatatggctctccaagtgctggatttggtgttgccactagttttcagcagccagcaatatatggaagag

SEQ ID NO: 192662 - DNA, 909 bp, Gossypium hirsutum
cggacgcgtgggggcttgcccggttatcattttctgttcccacattttgtttagtttccttatatcactccactttatcatcaccctctttttatccccctcttttatcttgactttaatctccacgccttcttcccattacttcattacattctcaagagaaaaacccagagccaaaaaaatggccaaattattgctgttcattgcactatttgtggttccatgtcttgttagtgctacacgcatggtgaagaacccgttggtggttcaaggtcaagtttactgtgaccattgccgtgctgggtttgaaacaccaaagactagaaacatggctggtgccaaggttaaggtggtatgttccaaccggaagaccggtgatgtcgtgtacgagaaggaaggacacacggattcaaccggacaatacaagatcgctgtctccgaggatcatttggatgagatctgcgacgctgttctcgttaagagctcgcagccggagtgcgctgaaatgtcaccgggacgtgaacgtgcacgcgtggtcttgaccaacttcaacggcatttcatccaacacccgttttgccaacgcaatggggttcatggccaacaaggttgaagctggctgtgctgaggtaatgaaggtgtacctggaggaggatgattagagtggcggtctgtgaagtctaatttacttactagtttggcatatatgaatatgaacatgaatacgacatgcgtgctgttttctctgaattctattgaatttctaatataaaatatgcgatttcttctgtcaggatctttgtatttttttaattatttatttggaagacctgtgttcaatatttgtatttgaatacaaatatatgatattatttttattcaaattaatggaaaatgtgaagacaattga

SEQ ID NO: 192663 - DNA, 941 bp, Gossypium hirsutum
aaccgggccggacccacgcgtccgccgccttttttagttggccagtcgccggtcaccatcagctgatcgcctcctcttccagcaatggcggaagctcaaacagaaactccgccttccctatctgagcaatattcactgaaggagaaagcggagaaatcagatgtggctacaaaagtagctgacgcagaagaggtcgaaaattcagcgagtacttcttccaaggaagtggtgaccgaggaagttgagactcctgctcctcttgtggaaagtactgaggttcctcctgctgttgctgaagaaaacaccgaagccaatcctgttgctgagaacagtgttgaagatgctcaagttgctgcggaagaaagtaatgaacgtaccaaagagagctcatgtgatgctgaagaaacaccggagataaagcttgagactgctcctgcagattttcgcttcccaactacaaaccaaacaaggcattgcttcacccgatatatcgagtaccatcgttgtgtagctgcaaaaggagaagatgcttcagagtgtgacaagtttgccaagtactatcgtgccctatgtccgggagaatggatagatcgatggaacgagcaaagggagaacggtacttttccaggtcctctgtaagacggtacttttcgggaaatccagtgaagttgtcaaatgagaaacggcattttcaggaaataagaaattttggcatgtacccgttttgactggatcatgattgataaaatggagttatatatagcctacgttacatgggttcaagtgttggatattgatatctgtccgacaccaataaatttaatttctttttgagagctatgccctatgtttttgttcatgttcagatgtgtctaacatgaatatacaagttcttccagcaattttaagaaattaagaaaatcaggaatctttacaatatt

SEQ ID NO: 192664 - DNA, 910 bp, Gossypium hirsutum
cccacgcgtccgattcttcttccttttcttgtgtctctctttcttcccctgtcagctattgagatcgcgtttcactcagttctggaaaaaagatggggattattgagaggattaaagaaatcgaagccgagatggctcgaacccagaaaaataaggccacagagtaccatctcggtcagctcaaagcaaagattgctaagctaaggacacaattactcgagccaccgaaaggttctagtggaggtggagacggttttgaagttacaaaatttggtcatggacgtgttgcactaataggatttccgagtgtggggaaatctacccttttgactatgttaactggaactcattcagaagctgcatcttatgagtttacaacacttacatgcattcctggtatcatacattacaatgatactaagattcaactgctcgatcttcctggaattattgaaggtgcttctgaaggcaaaggacgtgggaggcaggttattgctgttgccaagtcatcggatcttgtgcttatggttctggatgcctctaaaagtgagggtcatcgccaaatattaacaaaggaactggaagctgtgggattgcgtttaaacaagagaccccctcaaatatatttcaaaaagaagaaaactggaggcatctctttcaacagtacattacctttaactcatgtggatgaaaaactctgttatcaaatcctacatgaatacaaaattcacaatgcagaggttctatttcgtgaggatgcaacagtggatgatcttatagatgtcatcgaaggaaaccgcaaatacatcaaatgtgtatatgtttacaacaagatagatgtcattggtattgatgatgtggataagttagcccggcagcctaattctgttgtaatcagctgcaacctgac

SEQ ID NO: 192665 - DNA, 404 bp, Gossypium hirsutum
cggacgcgtgggtttttcttcttcagcagtgatcgtggcaatgtcttatcataaagagctggctgctgcaaagaaagcagcttctcttgctgctcgtctctgtcagaatgtacaaaaggctttgctgcaatcagatgttcaatccaaaactgataaaactcctgtaacagtagctgattatggctcacaggcactggttagttttgtgctgcagcaggaacttcatgctgaattctcattagttgccgaggaggattctaaagatcttcgcaaagatggtgcccaggaaatagtagagcgcattacaaaacttgtgaacgattctttaactagtgatggatcatacaatgttactttatccacagaagacgttctcacggccattgacagtggcatatctgaag

SEQ ID NO: 192666 - DNA, 650 bp, Gossypium hirsutum
cccacgcgtccgcttttacgtagggtttttgtttagggtttttgattccttcatctttatcttcgatcaatcaaccatgactggcaaagccaagccaaagaagcacacagccaaggaaatagcggcgaagatcgacgccgccacaaccaatagaggcggcggcaaggccggatttgctgaccgttcgggtgtggagaaaggtggacatgctaagtacgagtgtcctcattgcaaaataacagctccagatttgaagtcgatgcagattcatcatgatgccaagcaccccaaggttccctttgaagagtcaaagcttgtgaatctacatgctgttcatgtggttgagacttccaagcctcgtcctggtgttaggggcagccttaaaaagtgataataaaaaaccccaaaaaatgtgtttttcgtcaagctttggtgttttgtgatgtttcgaaatatgggtttggttcctttttcatcttttaattgtttgtcacgcttgcagtagagatgggaatgagaaaggggttggggtgaaaaaagttggattattcttgtaagggtcccccttgatttgatgtcgatgatgaatggtgttgttatagcttcctcatttaatgctaatgaagtgtttgtgccccaaaaaaaaataa

SEQ ID NO: 192667 - DNA, 504 bp, Gossypium hirsutum
agcaagagcagtaaaaatccttgatcagcaacccataaggtttcttttctgtttttgtttttttgtcaatcaatcaatcatgacaggcaaagccaagcccaagaagcacactgccaaggaaatcgcggccaagatcgacgccgccactaccaaccgaggcggcggcaaggccggatttgctgaccgttcgggggtggagaaaggtggacatgctaagtacgagtgtcctcattgcaaaattctaaatatattttaaaggatgaaaatgcacagcatggtggagataatagctcaagatatgagatggtatttgatggggatgctcccgagactcctcagcaaggaaaaatggatctgtcccatgagtctgatggcaatgagcgcagatacaaaataaacaggaaaagttctcatactatggaggggaaagacttcaatgataaggataaacagagaaacagaagtagagattacagagcggatatgagtcgatctggtgggtgg

SEQ ID NO: 192668 - DNA, 467 bp, Gossypium hirsutum
atcttttctcttttccccattcagaaaaatccaatatacccaccaatgaatatgcaagagcagtataaatccttgatcagcaacccataaggtttcttttctgtttttgtttctctgtcaatcaatcaaccatgacaggcaatgccaagcccaagatgcacactgccaaggaaatcgcagccaagatcgatgccgccactaccaaccgaggcggtggcaaggctggattagctgaccgttctggggtggagaagggtggacatgccatgttcgagtgtcctcactgcataacatctgctccagatttgaagacgatgcagattcatcatgatgccaagcatcccatgcttccttttgaagaatcaaagcttgtgaatcttcattctactcatggtgctgattcttccaagcctcgtcccggtgttaggggtagtttaaaaaagtgatattaataaataaatttagcc

SEQ ID NO: 192669 - DNA, 942 bp, Gossypium hirsutum
  unsure (1)..(942): unsure at all n locations
ggcaacggtctctgattcaccagaagatagtccaaaccctaatccaccaccatcgccgcccagcgatttcccttctaaaagcgaatcgaatgctcccgaacaagtcactccatggatcgattccgctgtggagcaagctcttctataccagaagatcatcgaacagaacgttaacgacgctatcaaagcttctagatctcgactttcagaaattcgctccacctcctcagctcattttaatctaaccattgagtcacttaaagatgtcaaatcacaacttgatgtttacgaggatttggcattcggcaaagttaaagaggggattaatattgcagcttcgaatccattgatcaccggcggtgctgctgttggcttgggattcctggtacttaaaaggccaagacatttactgtattacaagactttgcgtctttttcagagcgaagagtccttgatttccaaagctgatattagagtaaaggaactgagacaatcaattgaccgtctcaaggctgaaagtgagaagttagagcgaagtgcatcagtagccgaagacgagctgatccgtggccagacaaaactcaggcaagcgggcagcaatnncgaagtgtaattcagtcagcttataagattgaaagacaagcagcaggactaaaagatacccttggagnaacttcaagcagaaaaatcttcgttttcatcngcaggtttccaattttgcgtctcaggcaaagcgagaccggaatgttttgaccagagagtttcaaaattagtaatttggattgcagtntgatgcatctctgtcctgctattggttagttcacattcactgtttcatcactaccaagatgtntgaatgatacattttgtgggagtctatattgattaaatttaatggagcctgagttacactcgggaacatgttaaataccaactcctctn

SEQ ID NO: 192670 - DNA, 467 bp, Gossypium hirsutum
ggaaactgcgggtggtgtcatgactgtcttgattccaagaaataccacattcccaaccaaaaaggaacaagttttctccacctactctgataaccaacctggagttttgattcaggtttatgagggtgagagaacaagaaccaaggacaacaatttgcttgggaagtttgagctttctggtattcctccagctcctcgtggtgttcctcaaatcaatgtctgctttgacattgatgccaatggtattttgaatgtctctgccgaggataagaccactggacagaagaataagatcaccattactaatgataagggtagattatccaaggaagagattgagaagatggtgcaagaagcggagaaatacaagtcagaggatgaggaacacaagaagaaagttgaggccaagaatgctcttgaaaattacgcttataacatgagggacacgattaaggatgagaagatca

SEQ ID NO: 192671 - DNA, 1210 bp, Gossypium hirsutum
tgtccccttattcttttttctgtcaaaatttgagatccgaatctaattccacgattttctttagagttttaaatttgatctttctcttccaaaatcaaatccaaaaagagagaaaatcccaccaaaaaaatggcgatttctaatgacaacaacaacgacgagcaccatgaatcgagtcctcttttgagcaaacaagtggcagaccaagatttgaaggagaaaccaagtggtaaaaaggcaaaagaagctgccgccgaggtgccagctcatccggtagttgctaccggagatgggtttgggtggacagctgatgggttgccgttggtccaccggagtgtcgtcggagaacccttgggtcgatctcaatggaactcatctctccttgcttgtcttggccgtaacgatgaattttgcagcagcgacattgaagtctgtctccttggaagcttggtcccttgtgtgctatatggaaccaatgtcgaaagacttggatctgatcctgggacatttgcgaatcactgcttgccatactcggttctttacttaattggtaattcattttttggctggaattgccttgcaccatggttttcgtaccctactcgtactgccattcggcgaaagtttaatctcgagggaagctgcgaggcactccataggtcatgtggatgttgtggaagctgcgtagaagatgagttgcaacgtgaacaatgtgaattaacctgtgacttagcaacccatgtcttgtgccatccttgtgccgtttgtcaggaaggtcgtgagattcgtcgaaggttgcaccatccagggttcaatgctcaacctgtcttcaccatggtccctcctggcgagcaaaccatggcccgtggagcctaatttcatgttctgcccattccctaccttataactaaaggtaatctagtagctagctcaacaacattttgttgcgtgatgtctatgttgtgaaaaatatattgcgtgtaatgtagttgtggaaataaagttaaaaagcagctttatgttacattttctagtatgaaagttgattgctctgttatgggcagatcatatacattttgtgtataaatatattatgttttaaatattttatttgggtcaatttgtaaggatggtttctgttttgtgtgaattcagtctgtataatttggttaataaatggtcctcgtaaattttgaaatgttaattttca

SEQ ID NO: 192672 - DNA, 662 bp, Gossypium hirsutum
  unsure (1)..(662): unsure at all n locations
tgcacgtaccgcgccggaatgtaccggtccgggttcccgggggggcgacgcgttcgatttttcaaccatgtcggagatggcgaacacggatcccgaaggggtggacgccatgcggaggacgtggaacgtgtggccacncaccaaagtcgaagctaggaagggcgtgatcccggtggcggctaccatcgctccgatccgtcctcacccggacatcccgacgctcccttacgcgcctctacggggcaggatgtggtcagctgcgctcaacggctttgcgcgtgttgacttcgttgccaagatctggatctgccctttctgttaccagcggaaccacttggcgcctcactatgctatgatctccgaaacgaacctcccgtgcgaactctacccgcaatacaccaccgtgcaatacacgctccagccggacccgaacaacccttccagtgctcctcaattgccgccggtgtttgtatttgtgttggacgcttgcatgatcgaggaagaacttgagtttgtgaaatcggcgatgaagcaggcaattgggttattgccggaaaatgcgcttgttggggtcgtttcgtttgcgactcaagctcatgtccatgaattggggttttccgatatgtcgaacgtctatgttttcaggggtaataagaaattac

SEQ ID NO: 192673 - DNA, 626 bp, Gossypium hirsutum
agttccaagttccaacaagtattcccaaccactcaataccttccaaggtttaacaaagtatcgaactttaaaacaataaaaaaaaactccctacatgatccaagttctcaaaattcaagcaaccatatctcaaagcaaaacacgaaatacaaattcatcttaaaactttcaaaagccttatgcacgagcaggagccgcaacaccaggacgaggagcctgaccaggctgaccaggctttggcatatcatccctgcgtctgatgaagcgggcgggtgggtcacgtttcctcctatcggtgcgggatcggactctcacaacgtgggagtggatcgcacacgagacacagtattgcatcttcacatacagcttaggcaaagtataagtgtcataaacgcaggcttcttggacatctctaacagcagcttgttccacaatgttcctcacaagaaacctcttaattgacttatccttggggcagcatttgccacagttagaacagcggatgaatttgacatggccacggccatgcttgttgcggccaccattcctacgcttgaaagtcatggctagaggctatctgcttccgccgattaataactagggtttctggcgacgcgtgggcggac

SEQ ID NO: 192674 - DNA, 650 bp, Gossypium hirsutum
  unsure (1)..(650): unsure at all n locations
tnngggggataaaataagcaactaaatagaaattatgagattccaaccagtattctcaaccattcatagcttgtcaaatgcgatcaaacttttaactaatcaaaaaccttctacacaaatccaaattttctcaaaattaaagcagcccatttcaaagcaaatacaaaaatagaaatttatctttaactttccgggccttaaggacgggcaggaacagcaacacctggacgaggagcttgaccaggctgaccgggctttggcatatcatccctgcgtctaatgaagcgctgaggtgggtcacgtttcctcctgtcagtgcgggaccggaccctcacaacgtgggaatggatcgcacatgaaacacagtattgcatcttcacatacagcttgggcagagtgtacgtgtcatagacgcaggcttcctggacatccctgacagcagcttgctccacgatgttcctcacaagaaacctcttgattgacttatccttagggcaacatttgccgcagttagagcagcggatgaacttgacatggccacggccatgtttgtttcggccaccattcctacgcttgaatgtcatggctagagggttgaagtgttttttggaggctctttgcttctgctcgctaacaaccggactcatgaa

SEQ ID NO: 192675 - DNA, 385 bp, Gossypium hirsutum
aacaagggaatccccgggcctgcaggttttttttttttggaaataaaattaatgaaaaaatatattaaataaattttggtaaatgttatgcaaaataaggagaaataagtacaagcaaaagcaacagttttatgaacaagtattctcaaatctcaaccattcaaggcttccaaaatagcaataaaaaggtatcaaatggtattaaactttgaagcaatcaaaaccttcctacatgtctccatgttcttaaatttaatgcaaccatttaaaacccaaataagaatatagcacgactcctcttaaaagctttcacaggccttaagcacgagcaggaactgcaacacctggacgtggtgcttgaccaggctgaccaggctttggcata

SEQ ID NO: 192676 - DNA, 407 bp, Gossypium hirsutum
atccctgcgcctgatgaagcgttgaggtggatcacggttcctcctgtcagtgcgagaccggaccctcacaacgtgggagtggatagcacatgaaacgcagtattgcatcttcacataaagcttaggcagagtgtaggtgtcatagacgcaagcttcctggacatccctcacagcagcttgctccacaatgttcctcacaagaaaccttttgatcgacttatccttagggcagcatttgccacagttagagcagcggatgaacttcacgtggccacggccatgtttgttgcggccaccattcctacgcttgaaagtcatggtttgaggatacagtgtagatgttgaggctctctgcttctgccgccgagtgacgagggttccggacgcgtgggcggacgaatgggcga

SEQ ID NO: 192677 - DNA, 443 bp, Gossypium hirsutum
gggggccgccccttccgggttattaacccctttttacttaattttttaaaaaaaaaaaaaaaaaaccctgggcgcttcacttttccctaactttttaaacttgaatcccttaatcatttaagtcaatggccgaagaaccagcaccaccatcggccccgcctcaatcatctgcgccgccgttgggatcttccgttttaccgctagtgaacaagctacaagacatattcgctaaacttggtagccagtccactatagagttgccgcaggtggcggtggttggaagccagagcagtggcaagttccagtgtgctagagtcgcttgttggccgtgatttcttgcctcgtggttccgatatatgcacgcgtctccctcttttccttcagcttctccagaccaagcgtaaacctgatggttctgatgaagagtatggcgagtgtcttca

SEQ ID NO: 192678 - DNA, 565 bp, Gossypium hirsutum
ttcagaacttatggatcgaacaagagctaccgaaagttaaccgaactgaaacaccatggttaattgttctaatgcattccccatggtatcatagctataactaccattatatggaagctgaaaccatgagagtaatgtatgagccattattagttcagtacaaagtcgatgttgtattttccggtcgtgtccacgcctatgaacgatccgagcgtatatcgaacatcgcatacgatctcgtaaacggtgaatgcagtcctgtgaaggatctatccgctcctatttacataaccatcggcgatggaggaaacattgaaggcatagcaaacaacatgaccgtccctcagccggagtattcagcttatcgagaagctagtttcggtcatgccattttcgatataaagaaccggactcatgcctattatagttggcaccgcaaccatgacgggtacgccgttcaaggcgattcgacgtgggttttcaaccgattctggcatccaagtgacgagtctcaatgagaacaacatgtaagttcccttttgaacctcttatttttagaataaaa

SEQ ID NO: 192679 - DNA, 600 bp, Gossypium hirsutum
aatatttgagttttttatttattttgtttcctttaccacaacaattatggcctgctttcatagaagattatggcaaaaacattaacatcaattatttggtacaatgcaaatttagtcatctcataacttgtaccaagttgaaattgcatggaaaattcaaaatatatgattggttgagcttcacaaattcaacaagaacatacatccaaaaaagccttggcaaactccaagcttcacattatttgagactgcggtggcatgttaacattagcaggcatcaagatcacggcatggaggaggtttgggatcggttagcaaagtggtatttccaccttctggtccgctcttgattcgttttggattttgagtgccaggcggtagcttctctccccttcttagcatctcaactatctcaataactctttttggggtaatatcttcatagtaattatatgtgtatccttcagatccattggagtaatcagcaactgtgatcataggagcatttacacaacatcccatacatcccatttctccgtctgagaacacaccatcgcttgttacctcattccgcttaacccccaagtggttcaatagggc

SEQ ID NO: 192680 - DNA, 556 bp, Gossypium hirsutum
aatgggagttggtttaggttattgcattgccgctgctgtggctaatccagaacggcttgtggttgcagtcgaaggggactcgggattcgggttcagtgctatggaggttgagacattggttcgatacaagttgcctgttgttgtgatagtctttaacaacggtggtgtttacggtggtgaccgaaggagccctgaagaagtaagtggccctttcaaagatgaccctgcgcccacttcctttgttcctggtgctgcttaccatactttaatcgaagcttttgggggaaagggttaccttgtcgggacacctgacgaattaaaatctgccctttctgaatccttctctgcaaggaagccggttgtgataaatgtgataatcgatccctttgccggtgcagaaagtgggagaatgcagcacaagaattgagggagtttcggttttgtttcgttaaatttctttttccaccacttaccgagctggtctttctatgtcaatgaataatcggatttgtgctcacttgtgatagaacagatagagatcatgtgttttgacttt

SEQ ID NO: 192681 - DNA, 959 bp, Gossypium hirsutum
  unsure (1)..(959): unsure at all n locations
ctttgtttctatcttgcattaaagccctggattgtgcagaaacaagaaaacaattttctatgaaaggcaagtggttgtgaactgtctctttgtgtggagatactgttgcttcttttcaatggtttagcaacttgcaatggggagattggctttttggaagactaaggttatgcatcgaagaaataagatattgctttgattgaagcgatcttatttaattctatttgattcatgatgggtaaggaaaacttgcctcaaccagttaatggaggtgtcagcaatgatagttgctcaaatgctgacattgatgattctggaacttattcgcggtatagtctagacaaagaggcaggtttgcctacttgtcgtgtgtgccagtgttcaaaatctgacaaaggggggatgctgctttaggatttttgggcatcactcctcccttagcggaagcagttaaaagcaaaggagaagctaagcctgataccgaaggagttccaccagatgttgaaagtgatgagtctcattctaagagtcttccgagagaatctgggtttgttgagttcataagccctgaaggagaggttttcatctgtagtactgagttagaaatgggctcctgtcaacatcaggatgcattaattgaacttggttgttcttgcaaaagtgatcttgctctagtgcattatgcttgtgctctcaaatggtttgttagtcatggatctactgtttgtgagatctgtggaaatcctgcaaaaactatcaggacttctgattttaagaaagttgtagtttctttgaaagactatgaagcattgagagaaaggactgccagtggtgatcctaatcctgcccaaattcattcaagttcaggtgtaaaccctgatgctgttgctgctatttggaggcaacgactaagtgaagattcattngtggtcagtccacatggttataacaacaacaat

SEQ ID NO: 192682 - DNA, 570 bp, Gossypium hirsutum
  unsure (1)..(570): unsure at all n locations
ctgactctgaaatgaggacttcagcaagaggatattctgctgttgctgctgctgaggaactctctgtcatagaaaaggctgctgaccaagaagcactagatgatgatatgcttcttgaagatcttagggtgtcaaaggccatgtctaagaagtacttaaaggtgtcaatggctgctactgtaaaagaggcaatgaaatgcatgcatgacaaccatcagaaatttgcgcttgtggtcgatgaagatgattttctggaggggattatcacacttggtgatattagacggtgtctgtctaagaagcagcctagtgatatctccatgggtgattcaacagctgatgtgaatccatgtctggtttcgtctgtttgcacgaaaggaataagctaccgtgggcagaagcgcggacttctaacctgctttgctgatactgacttggcaattgctagggagttgatggaggctagtggagtaaaacaattgccagtggtgaaatcgtgggggagacccccacanaggaatggatacgggagagtcattgctgttcttcattacgaatcaatctggaact

SEQ ID NO: 192683 - DNA, 705 bp, Gossypium hirsutum
caaaaagcacccagaaatctcctgggtggggaaatgcaatctctaatctcagcacagcaaaactgatctccgcagcgattcaaacaacgcctcaaccgagacctgttatctctttcccctgattttatcaactcaaaaggtattattatttactaaaggcagaaacttcttctgcttgaggaaacaaagcagagggcaacaatgaagtgggtcaaagtcatagtatctttcatcctcacactctcgtttttgtcgtttccttcatgcgcgttccaatccgatgagcttcttgttgacgacgaagagttcggactcgagggggctccgcaacatcgttcccctgaacccatccccactcgatccccaccagtcacatccccgacccgaaagaggcattcggatctagattccgattctaagatccagttctctcttgaccacgcttttggcgactccgatttctctcccgctggcactttctccgcccgcctcctaacatggagcccacggcggccagactcttacaaacctacgggttttcgagggacagttttctctgatgtggaagaaggagagctccaaaaatctgctcgacagtgatgacttctataggataagactcccatctaatgttttgaatccccctgggagggattttattatttcatgagggaaagcaagatgttttcctagagaaagtttgta

SEQ ID NO: 192684 - DNA, 738 bp, Gossypium hirsutum
ataaaattaaacttcaatggtgctcttcgggcttctcctcctaccagtcctccttctcctcctcctctacttcatcggtcggccccggcccattaacatacctattaaaaaccgacacgttttcataacaggcggttcaatgggcatcgggctagccatagccaaacaaggctgcatcgggagggggcgcgtatttccctcttggctcggtccgttgaccagctccaaaaagcaaaggaatcaatctgtcaagcctatgaagtcgaggtctcgatctttagtgctgatgttcgtgactacgatgccgttgagcgtgcgataaacgaggctggcagtatcgatgttctagtagttaaccatggggtgtattacgttgaggagtttgagacccaaggactaaatgtgatgaagacgatgatagatgtgaatctgatgggaagcttcaatgtcatcaaagcagctttgccgttgatgaaggatagaaaagacaagggaccagcctccattgctcttatgtcttcaatggccggccaggtgggtacatatggttttgcggcttattcagccactaaatttgggctaagaggattagcagaagcattgcaacaagaagttttggagaataacatccatctttctttaattttccctcccgtgactgaaactccgggatttgaaccagcaaggaaaacaatgccggaaatcaccaaaattatatcgagcacatctgcgggaatg

SEQ ID NO: 192685 - DNA, 1339 bp, Gossypium hirsutum
cttttttttccttcattttcttagcaaattcaacatcgaaaaataaactaccacttttgttcacctctttataccaaagttttgtttccttgattttcaacaccgttttcgatttgggtttttctttaagcttcaaattgagttggatttgtagctaaaaaaaagataagaaaatggcagaagagagtaagcaaagaaggaatgttaagcccgtaaaggttcaaacagcttcatcatcagaagaaagaagatcaaacaacaatctcccaaactttcttctttcagtaaggctaaaatatgtgaagcttggctactattacgttatctctaacgctatgtatttgatgttggtgcctctcctaggcattgcttcagttcatctttccacacttactatccaagattttgttcgactatgggaccaactcaagttcaatctcgtttcagtaaccctatgttccggtcttttagttttcttggccacactttacttcatgagccggccaaggaaagtttacttagtgaatttcgcttgttacaagcctgaagctgatcgtatttgcaccagggaaatcttcatggagagatctggtctcactggtagcttcaccgaagagaacttagcctttcagaagaaaatcctggagaggtctgggttgggacaaaagacatacttgcctgaggcagtgatgcgtgtcccacccaacccttgcatggcggaagccaggaaggaggccgagacagtgatgtttggagctattgatgaactcttggacaaaactggtgttaaggcaaaggatatagggatccttgtggtgaattgtagcttgttcaatcctacaccatctctttctgccatggttgtcaacagatacaagcttagaggcaacattttgagttataatcttggtggaatggggtgcagtgctgggctcatttctatagaccatgctaaacagctgctgcaggtgcaccccagctcttatgccttagtggtaagcatggagaacattacgctcaactggtacttcggcaacgaccgatctatgctcgtctcaaattgcctcttccgcatggggggtgccgcaatccttctctccaaccgctcatccgatcgccaccgctccaaataccaactcattcacaccgtacgcacgcacaaaggtgccgatgacaaatgctacaactgcgtcttccaacgtgaggacgacaccaaaagaatcggcatttccctctcgaaagaactcatggctgtcgccggagaaacccttaaaaccaacatcaccactctggggccactatttcttcccatgtcggagcaactcctgtttttcgtcaa

SEQ ID NO: 192686 - DNA, 1380 bp, Gossypium hirsutum
tcgttacgcgtacgcccacgcgtccgcccacgcgttcgcccacgcgtccgttctttctcccctttatcttctccaaatccgtcttttagtttcctttaactatcattgtcaccaagccttttttattctcagtgtctcaaattcagatctatatcgcattgccttagtgttggcagtttcatttttgagattcgatgagtcgcttcgatgctaaccctttcgcagaggaagaggtcaatcctttttcggatccagcagttaggaaaggatcggggcaatcaaattatggtggaggtgccttttatactactaaccccggtagtgttcctcctgcaacatcaaggctttcaccccttcctcctgaaccatatgaccgtggtgcaactgtagatattcctcttgattctgccaaggatctaaaagcaagagaaaaggaacttaaagcaaaagaggctgaactgaataagcgtgaacaggaattgagaaggaaagaggatgcaatagcacgagctggaattgtaatagaggacaaaaattggccaccgtattttcctattatccatcatgatattgcaaatgaaataccagtccacctacaaaagattcagtatgttgctttcacaacattgttaggtttggttctttgtctcacttggaatgtggtagctgttactacagcctggatcaaaggagaaggtgggttttcaaagtccaacattttggtttcttgccattatatatttcatatctggggtccctggtggctacgtaatgtggtatcgccctctctatcgtgctatgaggactgatagtgcgttgaaatttggatggttttttttgttttacttgttgcatattggcttttgcatctttgcttcagttgctcccccaattattttcaagggcaaatcccttgcaggtattttgcctgcgattgatctcattggccacaatgctttggtggggatattctacttcattggttttggatttttctgcattgaatcattgctcagtgtctgggttattcagcaagtttacatgtatttcagaggtagcggtaaagctgacgagatgaagcgtgaggcggcaagaagaaccgtggctgcagcactctgataatgataaggaggccgtagcagaagatggtatttgcttgtattggacttagatcatgtcggataagataccatgtactcaaattgcatcttcttcccatacccttcctggctggcttacttgcctattcattttattgatatgttgtttaaatatatacacatactgctgaacgaagaaggttgagaaatcagataaaacttggatacaatgacaatcaaaatttgtggttagtaagatttagcagtcttaacttttaat

SEQ ID NO: 192687 - DNA, 374 bp, Gossypium hirsutum
aggaagggtaccctttcacccccggggggatccgtgaatggaaagatttagaagaaaaggccaagaaggaacagtccatcaaaacaatcttggtttcccgatctcgtgactgtgtaggtacttctgatggaagtaaggtgccggtgtccgaacttgaggggaagactgtaggtatatatttctcagcgtcttcaatcaagccatctgctgattttactcagagacttgctgaagtttatagtaagttgaaagaaaatggggagaaattcgaggtggttatgatatcgcttgatgatgatgaggaatccttcaggcaaagctttggggcaccatggttggcattggctttgaaagacaagagctgtgagaaattg

SEQ ID NO: 192688 - DNA, 472 bp, Gossypium hirsutum
gagagtgggaaaaacccttgcaagtatattaaatacaagcccgaggaccttgaacgaatgctaagcgagttctttgaaggtaagacatgcgtcgaacaaaagcgataaaaaacaaaaaaccaaatgctggtgagaatctgttaagaaatttagatactgatgaaatggagctttcaactaatcattgtagaatgacgaggttgtgtgtgcttttttctgccaggcttgccttgttcttcttgtgtctttttcatctgagtgagttttgtacagttctgtgaaggggatagggaaaaaatgaaactgagagtttgattttaaatttcaatattgagttaataaatgtccagataaattaaaaaggttgtgcatcttagtcacagatattctgttttttttttttgttcacattccaagtgttttttggtgtagcgtcattaatgaaaaatgtagtgatatattatccctaacc

SEQ ID NO: 192689 - DNA, 671 bp, Gossypium hirsutum
gctgcttcacacactttcccaactcccaaacagatctctctctccttattttctcttccttttctctctggaaaatcactgaagaaaaaaacccttggaaccctaaaaatagacctatagtgaatgtttagtattaaaattaatcacatttttgtttagtgttttttttagatctcttgataatttgctttctttaggtttcttttttcttttcagtttttggtttcttatctttgaagcttcgtctagccttaattcacatttccacaatgaacgaccttctatcggactcatttgagatccctagaggtcaaggtcaaggatctcatggtggggatatcgaattaggagctcaagcaaatgcagatgaactaggccttcaaaatttctttaaaaaggttcaagagatagataaacaatatgagaagctggacaagctactcaaaaagcttcaggatgcacatgaggaatcaaaagcagtgactaaggctcctgccatgaaatctattaagcagcgaacggaaaaagatgttgatgaagttggaaaaatatctcgttttgtaaaggggaaaattgacgaattggaccgagagaatttagcgaatatgcagaagcctggatgcggataaggaacaggtgtagaccggtcaaggacgtcaacaactcttgcc

SEQ ID NO: 192690 - DNA, 769 bp, Gossypium hirsutum
  unsure (1)..(769): unsure at all n locations
tttatttattacctctaaaagaaaaccctagccgtctctcacataccaaaaatgactggagaaccagtgaaccccaaagcataccctttagcacatgctcaattaacgaccacgattttggatctcgttcaacaagctgctaactacaagcagctcaaaaagggagctaatgaagctactaagacacttaacagaggtatatcggagtttgttgtcatggctgccgatactgagcctcttgagattcttttgcatcttcctttgcttgctgaagataagaatgtcccatatgtatttgttccctcaaagcaagcacttggccgagcatgcggtgtcacaagacctgtaatcgcatgctccgtcacatcaaatgaaggaagccagttgaaatcgcaaatacaacagctcaaggatgccattgagaagctcctaatctaaagatattacgtaactcgtatttcggtgtgatgggcctcttggaatgtggtggtcgctcctttagagactttgactgattaagtcgtgccactatcgagccgctgttttagtattcgaccttaaaaaaatgtcgttgttgtgtcctattaggttttcttatgaactgaggaaaaaaggataatcttgaattgttcttttagcacatcttagtatcaatgaagttttaatcgatgttttaacatanaaaaaacaaaaaaaaaaaaaaaaaaaaaaacaaataaaaataaagaagacgaagaataataaggaagaaaagactcgtacaagtgaa

SEQ ID NO: 192691 - DNA, 706 bp, Gossypium hirsutum
gatgaatttggtactgaggctgcccagtttttgagtgaggagacactaggaagttcactgcaattcaaggcagtgatagaggaaagggatacttccggggggtccggcaaggggcagggaactggtacttgtctcgttgtaaccctctttaccgaggacccggaggatagcatcaatgcagcaatgctgaaggacggtcttgctaggttggagaagaggaagaaatgggaatcgaaggagagaaaagtgatgcttaataaattggaagagtgtcaggaggaagcgaaaactggtcggcgtggaatgtggcagtatggagatgtggagtcggatgatgaggatttacttccgccagttgcggctaagaaaaccggaggtcggcgttaggtattgtaatttttttatcaatcactttttggggttaaacatctaaagagttctaagttataggtgtggatcattctcgtttgaagagttacaagagctccccgaaagaaaaatctcaaccataacatgcttaaattttgactctttttttaaaatttttttttttttttacattacgagagacaatttttttaatacatgtttaaataaggtgaacagtagcatttctgttatgtttccatgtgggagaccgataggaacattttttttttcaaattcccgttgagatagagtcttttaatctatgtttattttggat

SEQ ID NO: 192692 - DNA, 350 bp, Gossypium hirsutum
gagatctgagtatgggtgagagtagggtgactgggaaggtaaagtggttcactgaccaaaggggatttggtttcataacgccggatgacggcggcgaggagttgttcgttcaccaatcgtcaattcgttccgacggttttcgtatcctcgccgacggcgaagaagtcgagttcgttatcgattcttctgaaggaggtcgtaccaaggctgttgatgtcactggccctaatgggaaccctgttcgtggcaccacgagatctggacgcagtggtggcggaggtggattcggcggtagaagaagaaaaggaggttatggaggcggcggaggaggatgcttaagtgtggggaga

SEQ ID NO: 192693 - DNA, 662 bp, Gossypium hirsutum
gcaacctggatatgacattatagcccagttcataattggttatatcttgcccggaaagcccattgcgaacctgcttttcaagatatatgggcggatcagcaccatccatgctctttctttcttgtctgatctcaaacttgggcactacatgaaaatcccaccacgttgcatgtacactgctcagcttgtgggaactgtagttgcaggtatcgtcaaccttggagttgcatggtggatgttagatgacattgacaacatctgtgatgttgaaggaaatcatcctgatagcccatggacttgccctaaatacagggtcaccttcgacgcatctgttatctggggcctaatcggaccaaggagacttttcggaccaggagggatgtaccgtaacttagtgtggttgttcctcattggagcgttcttgcctgttcctgtttgggttttgagcaaaattttcccagaaaagaaatggattcccttgattaacataccggtcttatcttatggttttgccggaatgccacccgcaactcccaccaacattgcaagttggctcatcactggaaccatcttcaactattttgtgttcaagtaccacaagcggtggtggcagaaatataactatgttctatctgcaacattagatgcttgaactgcattca

SEQ ID NO: 192694 - DNA, 470 bp, Gossypium hirsutum
ccaaaaaccaaattactaaaaattatggcgaaatcggcggtttatttgcttctttttctgatgacggcggcgacgccatcactattggtggagtcaagcgacgacacgaaccacgcgtacttaccgtgttcggacacgaaagtccagatttcggatgggttcacttttggaatcgcgttcgcatcgagacaatcattcttcttcaacagctcacttcagttgtccccttgcgatcgccgactctctctgtcgaacgccaactctcgcctcgctctgtttagacctaaagttgatgagatctctctcctcaccattaacacctcctcttttactccggacgtagttggtgggtatatggttgcgtttgctggtcgaaaatatgctgcaaggtctctgcctgcgtttgttgcaaacggtacctacactgtaacaggcttcactctggtgcttgagtttaagaaaggcaggct

SEQ ID NO: 192695 - DNA, 470 bp, Gossypium hirsutum
atcttaagcccaacaaaagaaatcactcctctcacaaacctcaaacaatggaagtggtgaagaacttggacatccaaagatacatgggaaagtggtacgagatagcttccttcccatctttctttcaacctaagaagggggagaacaccagcgctttttacactctgaaggaagatgggacggtgcatgtgcttaatgagacttttgttaatggcaagaaagattccatagaaggcaccgcctacaaggctgatcccaagagtgacgaagccaagctcaaagtcaaattctacgttcctcctttcttgcctatcattcctgttactggggattactgggttttatacattgatgaggattatcaatatgttcttggtggtggtcctaccaagaagtacctttggatattatgcaggcagaaacatatggatgaagaaatctacaacatgttggagcagaaagctaaagac

SEQ ID NO: 192696 - DNA, 399 bp, Gossypium hirsutum
cttatggcttatgaaattctctttcccggtcttgttcgacaaggcatcggcctgtccagtttctaagacgggggagtgggggcttttgccttttgccttttgccttttcattaaaggcttcatctttttattcttcttcgttcgtctggtgttttctccgttcgccccaatacaggatcacgaagcctttttcccttcaatgccaactgagcttctgttctggagtggtggcttgctttacgtttcacgctgaatggccttcttctgtccacctgtttgtataggcattgatcaaggtctgttcttatcatttaagacaaaatggaatttgtatccaagaagaaatggaaatcagtgctgccacgtttttttaaaaacaaaaaaacttcttcgtgtttt

SEQ ID NO: 192697 - DNA, 329 bp, Gossypium hirsutum
gaacttgattggtgctttctaccaacctcaatgtgtgcgcatagacactgacacattgaacacattgccagatagggaactggcttcaggtctggcagaggttataaagtatgggctcatcagagatgctgagttttttgagtggcaggagaagaatatggagaaattgatggcaagggatcctgatgcgtttgcttatgctataaagcgatcatgtgaaaacaaggctgaggttgtgtcactagatgagaaggaaagtggattgggggcctcccctgaacttggggtcatccattgggccatgcaatagaaactgggttttggatatg

SEQ ID NO: 192698 - DNA, 538 bp, Gossypium hirsutum
ttacttctttaatttgggtttcaagcaaagttaaaccccattcaacattcacatgtaagcttctttttttttctttctctaattcatttacagtcatcaagatctatttagtttctactactgggttttcaaaaacaagcaaaaccccattatttagtgatcaaattctgtttgtttggttgacttattttgagatctgattagtttttgaaattgggttttgaaaaatgaggaaacccacaaaagaatcagagttaaacactgagccaatcggtcaaaatctgatcaaattgattagtaatctctgtttctctgtttttgtgttgtcggttcttatatttacagccattgctatcacttatcaaccaccagatccatggctggaatcagctccttctttaaccaagctcttcactcaaactgaaaatgccactgtcggctgccattttttctctcattttctctcttgccaaacaccatttttcttcttcaaaagacagcaactggttacttctttaatttggggtttcaagcaaag

SEQ ID NO: 192699 - DNA, 611 bp, Gossypium hirsutum
ccttttcctcttacctttctgtgctttacttttgtgtttctatcgttctttcgttcagacagggggttcagtttgcagaacttcattatgcaatcagatcagacacttctaccatatagttaggtcgagtgggacagttgcttacactagtgtttcttcgtcttctaccattaacgcaagcagtcagtttcctaacagtgcacagagcaaggtgcctgcctacctgggtgccatttctgttggcgtatgctttatggctgctgtggtgtcccttggaatttctatctcaattgtgcctcgacaagtgatgccatggactggtttgctcttgatgtatgagtggacgttttcaatcttctttcttttgtttggagcttttcttcatttgatttatcagcagggaaggagaatagtgacgcaactgaccccagtttctgctgatacagatttgtttaactctgattctaaaaaaagtttacaaatacataaaatattgtacatagtcatgataaaatacaatgtgagttctcttttcatattcgtctaacactgttggtttacaaaacttgtatgttcattttcagatcatcgacaggcattctcttgtgata

SEQ ID NO: 192700 - DNA, 665 bp, Gossypium hirsutum
  unsure (1)..(665): unsure at all n locations
acatagactaacttgaactgccgaggaaaaaaaggagggtaaatggcggcggcggcgtcaagggcagtgttggtctcacggccggtaacgttcgtaactggaaatgccaaaaagctggaagaagtgaaatccatcttgggtcaatccatccccttccaatccctcaagcttgacctgcctgaactgcaaggagaaccggaagaaatatccaaagaaaaggcttgtttggctgctgtccangtgaatggaccantgttggttgaagatacatgtctttgtttcaatgcactaaagggtcttccagggccatacgtcaagtggtttttgcaaaagattggccatgaaggtttgaataacttgttgatggcatacgaagataattcagcttatgctttatgtgcgttttcttttgcccttggccctgatgttgaacctgttacctttctggggaaaaccccgggtaaaatagttccggccaggggacccaatgactttggatgggatcctatctttcagcctgacggctatgaccaaacttatgcggagatgccgaaggaagagaagaacaagatttctcaccggtcaagggctcttgatatggtgaaatcccactttgccgaagcaggatacaatttcagcacctccaactaaagagtgagccatat

SEQ ID NO: 192701 - DNA, 1184 bp, Gossypium hirsutum
ttttgtgtggtagccgtccattttgggctcgaacagagtctgggatttttggagctgttctaaaagctgatccaagttttgatgaagcaccttggccatctctatcttctgaggctagggattttgtgaagcgtttactgaataaggacccaaggaaaagattgactgcagcccaagctttgagtcatccctggataaaaaagtataacgatgtgaaagtgcccttggatatactgatattcaaactcgtgaaggcttatctgcgctcttcgtctcttcggaaggctgctttaagggccctgtctaaaactttgactgtggatgagctgttttacttgaaggagcagtttgcattattggaaccaaataaaaatggcactataagcttagaaaatatcaaagcggttctgatgaaaaatgcaacagatgctatgaaggatgctcgcatccctgagtttcttgcatcgctaaatgcacttcaatacagacggatggactttgatgagttctgtgcggctgcattaactgttcatcagctggaggctcttgatcggtgggaacagcatgcacgttgtgcttacgaaatctttgagaaggaaggaaacagacctattgtcattgaagagctagcttcggagctcggactgagcccatccgtgcctgttcatgctgttcttcatgactggattaggcacactgatgggaagctaagttttctcggatttgtcaaattattgcacggtgtatctagctgaaccatcgcaaaagctcaatagaagccgtaaaacttcgtaagagctctactgagctggtatggctaataaaaggttcaggtgaggtgtttgctaggctataacctgaatatgataaagaggtagagtgaatttcgccgtcgcaatcaatgcccctacctcaacatcttcgattatggcttatttcatttgtctagcacaagcttattgacaccccccccccacacacacaattgaaggcaatgaacctcctgcaagtgcaacttaacattgaccaagctttagtcattttatgttttctttttccccactgtaaagttaaagaatgtgttaaatataaatataaatatatatatatctaaacagacttgataaatctgccctatttcgtcaagcccccgtgagatcattgattgctgatgtatcatcatc

SEQ ID NO: 192702 - DNA, 626 bp, Gossypium hirsutum
ggtgattgggggttcttatgctttcatcatcccgaccatttccattgctttatccaggagatatagcatcttcgttgatccccaccggaggtttaaagcatccatgagagatgtacaaggatctctcattgttgcatcattcttcactatggttattgggttctttggtttctggagaattatttcgaggtttttcagccctcttgcagctattcctttggtgattctcaccggactcgggctctatgcacaaggttttccacaattggccagatgcatcgaaatcggactcccggcactggtagcagttgttttcttatctcagtatgttccacatttcctgaaatccaggagaggaatatttgaacgttttgcaatccttttttccggtgcgattgtatgggcttttgcagaaattttgacagcagctggtgcttatgataacagagctcctcaaactcagttcagctgccgtactgatcgttctgggctcatcagtgctgctccttggataaggtttccgtatccatttcaatggggaagaccacgttttaatgctggagatgctgttgcagtcatagctgcgtcctttgttgccatcattgagtctacaggtacgtttatta

SEQ ID NO: 192703 - DNA, 628 bp, Gossypium hirsutum
ccgggccgacccaagccgtccgatttatcaatgaacatacacaagaaaggtttaataatttccagagattgggatggggaccactggattgatattgatgcaagaccggatgttcgctccttgatatctgatgtcattagcccagatatggacacgaaagtttccatgtccactactattgtcatggatgccaagcatgatgggggtacaatgccagttgaagctggtgctgccaaaattattgctgaaggggagaaacctgagttagcttttcaggactgttttgataaccttgtagaagacgctgattgtaaggagcctgcatcatcaaaagatgaaaaggatggggatgcaagtgattgtaagaagcctcccccatcagaaaatggaaaaaatgctgatgctgatgatgccagtaccattcatgataaactaaatggtatggatggtaatgatgaaatcaacaataatgatgatgacgaggaaggcaaaatagaggcggaagatggcaaggagcagaactctaaaagtacggaactcatggaagcagcaacctagaatgcttctggcgcaacagattcttttgtaatggggatgttggtactaatgttaactaacatgatttccg

SEQ ID NO: 192704 - DNA, 618 bp, Gossypium hirsutum
gaatagagaagaaaaggggctgaagatctagtcaagatcaagctagaaaataccaaaaaaagagaagcttgtgatggggagggaactcacagaggtgcacatggatgttaagccaaacggtttagtgaaatcgattgttaatcgtgttaacttgcagggcaccgagccaaataacttaactgtcaaaaaaggagcaaccgaaaactcggtcattgaggatggtcaggaaaagcaagatgtgctatgtgttaaaaccacaaattttagtaccgacatccctgaagagaaaaatgaaaaggctgaagatcagaagtctgctgacaataagttgagcactgctgaatcccgatctactagtgttgaaaatactcatgcgaatgacactacttccgcaactgccgcaaatggcatggaaactgttaactctacaccttcccctacttctgcacaggattcggagccaaaccgtccgatgactcctttgatgtcgaagaagtcatcacaaccttatgagaggaagcatactgatgaagatgatacttggtctgtcgcttcctctactgctatatatgctcgacgatcaagattgagggtaactgatggatcttcaccaacttt

SEQ ID NO: 192705 - DNA, 953 bp, Gossypium hirsutum
  unsure (1)..(953): unsure at all n locations
accactcgtccgcccacgcgtccggcgaaaccctagccactctctgctcaactcgccaatgggggcttataagtacgtgtcggagctatggaggaagaagcagtcggatgtgatgaggtttttacagagggtgaggtgctgggaataccgccagcatccatcaattgttagggtcaaccatcctactcgccctgacaaggcacgccgcttgggttataaggccaaacagggttatgtggtttaccgtgtccgtgttaggaggggtggtcgcaagaggcctgttcctaagggtatcgtgtatggtaagcccacaaaccagggtgtcacccaattgaagttccagcgcagcaagcggtctgttgcagaggagcgagctggccgaaagttgggaggtctcagagttgttaactcgtactggatcaatgaggattctacttacaagtactttgaggttatcctggtggatgttgcacacaatgctatccgcaatgacccaagaattaactggatctgcaatccggttcacaagcacagggaacttcgaggacttacatctgctggtaagaaaaacaggggtctccatggaaagggtcatttgcaccacaagaaccgtccttctcgcagggcaacctggaagagaaacaacactctctcccttcgccgctaccgctgagttactgtgttccttagactttttatcctagttgattttagaagtcattgttttgagtttgaaatttttggaagttttaaaaaacctgactctttgattttacatgcaatttattttcgttttggatgctatgaatttctgaagttattgctacttgcttttcagaataactacttgcccatcaaaaaaaagctataaaaagaatgataacaaaaccaaccnggagatncaaccggacaaanganaaaaaaaaaaaaataaaaaaaaatgtttaacaggg

SEQ ID NO: 192706 - DNA, 560 bp, Gossypium hirsutum
taacgatcagttgcagaggaacgagctggccggaagcttggtggtcttagggtcgtgaactcttattggatcaatgaggattcaacttacaaatactttgaagtcatcttagtcgatcctgcccacaacgctatccgcaatgacccaagaatcaactggatctgcaatccggttcacaagcacagggaactccgaggactgacctctgctggcaagaaatacaggggtcttcgtggcaaggggcacttgcaccacaaggctcgaccttcaaggagggcaacctggaagagaaacaacacactctcccttcgccgctaccgttgatcccctggaccgtacttggtgtttttgttactgctatcttggcttcattactattgtagggtttataagaattttgagacagttatattgtgtgtgggacatcttgaaaatcttctatgttagaggctattgagatttatgtgctcactgaaaatgtccaatgctattgtcatattgagattgtgttgtttgatttttttttattaaatactagaaatgggattttagtttttacc

SEQ ID NO: 192707 - DNA, 397 bp, Gossypium hirsutum
gttcacaagacgatagagttaaagttttgtctaaagaaaaacacgaagtaggtaagggtgagcgtagacggggcaactgcaaggaggataatgtctcaaaaagggatgagatcatctttccacctaaacaggaatttgctgttgaggggtaccagccacatcatggcagggagcaagcttctgcaaggaagaatgatctcaacattccatcatggcaaaaacaggaagtctctgctggtaaggttgaattttggaatgggaaggatgatgttgccttcaaaacagcaagattgagcagttcttctcatggaaaaataatggaatgagctgatggtggagccaaactacaagatggtaggcagaatggtacgcctagaatatataaccaagatgttct

SEQ ID NO: 192708 - DNA, 664 bp, Gossypium hirsutum
  unsure (1)..(664): unsure at all n locations
atctttgccttcaatcgataacgcgctctctttttctctcatcgaaggttttgatggcgtcaaaattgcagcagttgcaatctaaggcgtgtcaagcgtcgaagtttgtggcaaagaacggaactgcttactacaagcaattgttggaacagaataagcaatatattcaggagccaccaacagtggagaagtgcaatgagctgtctaagcagctgttttatactcgacttgccagtatccctggccgtaacgaggcattctggaaggagcttgattatgtcaagaatctgtggaagaataggcaagaactgaaggttgaagacgctggtattgctgcattgtttggactggaatgctttgcatggttttgtgctggtgagatagtgggaaagggttttacttttactggttactatccctaaggaaaatcaactagtagaaggcagggagtctgatggatgtgtatgccttttatcatcgntagcatgattgaattgcggccactttagatgcacatttttctcgattcggtgaaactactgaagctgagaaatcagtggttaacttgctagcctgaataatatgtatagtcaaaatggcttaatctatagtagcctaactggtgcgtatctagatatgtcagcataatgtaatgtaccccatt

SEQ ID NO: 192709 - DNA, 554 bp, Gossypium hirsutum
ggaacccacatcaagattagggtgccaacagctgataaacctagatatcgaacccgaaaaggtgacatagcaacaaatatgctaggtgtttgtacacctgagatgcaatttgtttatgttcttcctggttgggaaggttctgttgccgatggacgggtgctccgagatgccatcggtaggagacatggactaaaagttcctcatggttgttattatctagttgatgctggatacacaaattgtgagggatttcttgcaccttttagaggacagcgatatcatctgaacgagtggcgtcagggttaccagccaagttctccgcaagagtttttcaatatgaaacatgcttcagcatgtaatgttattgaaagatgctttgggttattaaaacctagatggggaatacttagaagtctatcattttatcctgtaagggtgcataatagaatcattattgcatgttgtttgctctataattttattcgaacctatatgagtattgatcttattgaagctgtgttgggagatggactacctagtaatgagatatgatg

SEQ ID NO: 192710 - DNA, 559 bp, Gossypium hirsutum
cccacccgtccgtttagatttaaattagtattctaactcaaggttttatatcaggggatgtagaattgcttaggtgctcttgatagaacccacatcaagattagggttccaacagttgataaacctagatgtcgaacgcgaaaaggtgacatagcaacaaatatgctaggtgtttgtacacctgagatgcaatttgttgtatgttcttcctggttgggaaggggcgggtgccgttggacgggtgcttcgagatgccattagtagaagacatgggctaaaagttcctcatggtaaagcgtatagttagaggactttgaattattcattaagatcaaactttgtgggctgaatcaatcattcttttaaaaaaaattattttataggttattatctagttgatgctggatacacaaattgtgagggatttctcgcaccatttagaggacagcgatttcatctgaacgagtggcgtcagggttaccagccaagttctccgcaagagttttttaatatgaaacatgcctcagcacgtaatattattgaaagatgctttggcttt

SEQ ID NO: 192711 - DNA, 338 bp, Gossypium hirsutum
agcaagcaaacctcatcgaagattatgtcattcatgcaaaagtacataaccagcattgcatgaggagctggaaaacaaatgccaatctttttggtatttgattgtatacaagaaacttcacaaaattttacagaatcttggactggggacgaaaatgaaatttaaaaatttatgaatataatatgaaatacgatctatctcctatatcgaaaccttaaagaacacgaaagggaactcaaaaaagaacagaaaaacagtacaacggagtaagcaaaatgatgtcaatggcatagagttcatgaggtcatagcttatttgtaggctcccatgccgacacc

SEQ ID NO: 192712 - DNA, 910 bp, Gossypium hirsutum
  unsure (1)..(910): unsure at all n locations
tcgcccacgcgttcgaaacgccctcactctttcacttcgtcttctccaatttcctccgaaagtaagatggctgtggatccctcagagcttcggtattatgaggatgatgacactccaacaatgaaaacaatcaagggtgcaactactggttttgttgctggaactatctggggaaccgttgttgctacatggtatgatgtgcctcgtgttgagagaagtgttgccatacctgggcttgtaagaacgctaaagatgatgggaaattatggaatgacatttgctgcaattgggggagtctatattggtgttgagcaactgttgcagaattataggatgaagagagactttgtcaatggtgctgttggtggtttcgtggctggggcttccattctcggtttcaaagggaggagcatctcaacagctatttctgccggatcagcactggcattcacctctgcggtgattgatgctggaggtcagactacaaggctggacacagggaaggagtattacccatacaccaccaagaaaaggcctgttgagtcataaatcttgcatgtctctgttgagaaggcacttccagtgaaacgtgagataatcgatcctgttcgatgatctgtctttgttttttgaagatataatcatacttgcggactccattttgctttttgctattcacttttaaagtgaggatgttggtttgaataaaaatgcatccgaatttatggaattcttgacgacgaattgttgcatttgttaaatattggtgcctgttataatgagtatcgttgttaatgaaatgaaagagaagatttttgccatttnnnnnnnnnnnnnnnnnnnnnnnnnnnnnnnnnnnnnnnnnnnnnnnnnnnnnnnnnnnnnnnnnnnnnnnnnnnnnnnnnnnnnn

SEQ ID NO: 192713 - DNA, 461 bp, Gossypium hirsutum
gtgaaagaaaatcgagagataaaaaaatggggcttgaagaaaatctcaaatcaatgaacatcaacgaagaagagaacaagaaccctaaccctaacactaaagatgaagaagatggtgaacttgaagaaggggagatcgcaggtgaagaagatgatacgacgtcgtcttcgttaaagaaaggtgtcgtcgaacagcctcaccagttggagcattcatggaccttttggtttgataacgcttctgctaaatcaaaacaagctccttggggtagttctatgcgcgctatttacactttctccaccatcgaacaattctggagtctatacaataacatacatcatccaagcaaattggctgtgggagcggacttccattgtttcaaagataaaatcgagcccaagtgggaagaccctgtctgtgctaacggaagcaagtggactgtagttttccagaaggggaaa

SEQ ID NO: 192714 - DNA, 574 bp, Gossypium hirsutum
gatattaaggacaaaaagtcattggaagaaagcttacttttatctgtgggatgagccactgaacatggaacaatacgagtctctttgtaacatggcaagtgaggttcatgcttatgctcctgatgctcgtgttttaaccacttactattgtggaccaagcgatgctcctcttgcaccaactccttttgaggcttttctaaaagtgccaaagtttctacgccctcatactcaaatctattggacaagtgagtgggtatttggtaaccgagaggatcttgttaaggatgttatttctgaattgcatccagaaaatggagaggaatggtggacatatgtctgcatgggtccatccgatccccatcctaactggcatctgggaatgcgaggaacacagcatcgtgctgttatgtggcgtgtatggaaggaaggtggaactggttttctgtattggggtgccaactgctacgagaaggcaacagttcccagtgccgagataagatttaagcgaggcctccccccaggtgatggtgttttgtactacccaagtgaggtgttctcgtcttcaaagcaacct

SEQ ID NO: 192715 - DNA, 501 bp, Gossypium hirsutum
cggacgcgtgggcggacgcgtgggcggcgatgtagataaagatggatatctggactacggagagtttgttgccatttcagttcacttgagaaagatgggcaatgacgagcaccttaaaaaggcctttgagtttttcgatagaaaccaaagtggttatattgagagtgaggagctaagagatgccttatccgacgaagttgaaacaaacagtgaagaagtcattagcgccatcatgcatgatgtggacacagacaaggatgggagaataagttatgacgagtttgcagtgatgatgaaggctggtacggattggagaaaagcttcaaggcaatattctcgagagaggttcaacaatctgagtctgaaattgatgatggatggatcattgcaaatgaacagtgagcccagatgaccaaacaccattgacaaagttctactaatgaaaaatggctgttgatttcagtgttacttttagctgttatttgtttcttcttttgggtc

SEQ ID NO: 192716 - DNA, 1279 bp, Gossypium hirsutum
ggagcttcatcttactctcacgacagtttggcgatagcaacttttggagcaatggagatgggtgtttttgtctcttgctcagctggcaatggaggaccagatcctgtcagcctcactaatgtatcaccatggatcactacagtcggtgctagcaccatggatagagattttccaggtagtgttaagctagggagtgggagaaccatatctggagtttcactctacaaagggcggaggttactgcaggcaaacaagcaataccctcttgtttatatgggtagtaactcaagcagccctaatccaagttcattatgcttagagggaactttggatccacatgttgtttctgggaaaatcgtgatatgtgatcgaggaataaatcctagagtgcaaaagggtcaagtagtgaaagatgctggaggagtagggatgattttgacaaacactgcagcaaatggggaggagcttgttgcagattgtcacctacttccagcagttgcagtgggagagatggaagggaaagcaatcaaacattatgctttaacaaatgggaaaccaaccgcaactctagcctttttaggtaccagattgggtgttaggccatcaccagtggtggcagcattttcatctagaggaccaaatttcctcacacttgagattctcaaacctgatgtggttgcgccaggggtgaacatccttgcagcctggactggagaattgggtccgtcaagtcttccaacagatcataggagagtgagattcaacatattatcagggacttcaatgtcatgccctcatgttagtggaattgctgccttgatcaaggccagacacccagattggagtgccgcagcagttaaatctgctctaatgacaaccgcttatgttcatgataacatccataatccactccaagactcttccactgcagcagcttccactccctatgatcatggagctggtcatatcaaccctttgaaagctctagacccaggtttgatctatgacatttcagcccaggattactttgtattcctctgcacacagaaattgactgcaatgcagctaaaagcttttagcaagcattccaatatgtcttgccatcacaacacccttgccactccaggagatttgaactacccagcaatctcagttgtcttcccagaagatacagccatttcaactttgactctccatagaacagccgcaaatgttggtcctcctgcttcacattaccatgttgtagtttcaccatttaaaggcgtcaccattaaagttt

SEQ ID NO: 192717 - DNA, 470 bp, Gossypium hirsutum
aggaatttgttggcaacaaacaacaatgaggtccaactccaaacctcattctcctttcaacaccaagctcatccgcatctgtgcttctgttgttctcttcgtcttccttctcattaccaccacctcttccttttccaaaccccccatttcacaatcccatctctccaactccacacaccctgtcgacgacagtgaaccatccccactagattgcccatcccttcccttgaccccaacatgcaccaaaactccaccttctctagccaatgccctcatccactatgccaccaccaacatcaccccacaacaaaccctcaaggaaatctcggtttccgctagagttttagagaagaaagccccttgcaacttcttggtattcgggttaggacatgacagtctgatgtgggcaggtcttaaccatggtggtcgtaccgttttcctagaagaagacaaggcatggatcgaacaga

SEQ ID NO: 192718 - DNA, 564 bp, Gossypium hirsutum
aaacataaattgcatactctttcggcatgcagcagctatgtagcttatcatgagagattaagacaaataagttaatcaaacatcaaaccaacacattaacacccaaacaatctccatctcacttctctcttactacgctttttcttatcatcatcatcacagcttttagctgtcgccagggaaggtgcccctcacaaaagaacctcgacggtggccaccaacgatgacttctttaagacgatttatggaatcgagcaccctaccagtcttctcgttgttgatgctgagctgccacttaagctgcaatgcctgccacctctcttgttgccaacgctgcccaagaatcacaaggcccatcacagctgcagcaatgaaaacggaccaaaatgcatttgtctcttttgcatgaacatacaatgaaactgctcttctcttccaccaagcttcgcatgggagatcagaggcatcacatttatcatcttgaggctttggggactgagggatatctgaaggaaaacctaagccttgctcagaagcttcaataagttcagaaacagtaacaga

SEQ ID NO: 192719 - DNA, 728 bp, Gossypium hirsutum
cccacccaaaaaacagagagctaacttgctctgttttttctcatcatctttctttctccccctaaattctcacttcatatatactttatatcaacgatgtcggtaaaagagtgcggcaatcacgggaaataccgccggaaaatcttccggcgaatcatcgccggcatcctaatcttcattataatcgttctgataacaattcttctcatatgggccatcctccgtcccagcaaacccaggttcatcctccaagacaccaccgtctacgctttcaacgcctccacccctaacctcctcacctccaatttccaagtcactctatcttctcgaaaccccaacgacagaatcggcatttactacgaccggctcgacgtttacgccacctaccagaaccaacaaatcaccctccgaacatccatccctccaacgtaccagggtcacaaagagatcaacgtttggtcacccttcgtcaatgggaattcagtgcctatcgcaccggaatattccgccagtttaggatccgatcagagtgccgggtcggttttcttgatgatcaagattgatggacgggtgagatggaaagttgggacttttatttccgggaggtatcatctttacgttaggtgcccggcttttattaccttcggcagcaaaagtaacggcgtttcggtcggagataacgccattaagttacagttggtgactaaatgcagtgttagcgtgtaagg

SEQ ID NO: 192720 - DNA, 622 bp, Gossypium hirsutum
acgcatttttctcgagctctatgtacctgggctttattgggttgcttcaaaggggacccaagactatataatataggtcctaacagatttgcatatgaagagaaaatatctctcgttatactaatactaacattattactccataatactactgaatataatttaaatccaaaacatcaaccatatcgataatctttgatgtgcaaatagcataactacctcacttcatatatatagatccgctactagaactaaaattcaaagccgatttaaaatgaattatatacaaaaatgaaaatccgaaacactttctagagcatccatagccgtaaactcatggaaacgccgtaacaagatgcatcatactcagagcacgagagtggagccgaagagcagagccacggcggcggcgaaaacagagacgaatgagggagtgatagagccggttcctgaggtaggacttggagctggagcttcagcagccatggcagaagccattagagcaaaatcagagacgaaaacaagcaaaaaaaattccatggaggaagccattttttgatgaaaaattgaaattctctctttaagcgataaatcgaaaggaagaaaaatatttgaaattttt

SEQ ID NO: 192721 - DNA, 468 bp, Gossypium hirsutum
cggaccggaaggcccgcccagccgcacccgtacgaccacgctctttatgggccatggaagcggtagattctttctgagtatggcgtcgtggctcagggtatggcaccagctagggtgaacgatcaataccttacaaatcttcttctgaagatcaatgctaagcttggaggtcttaattcaatgctaactattgagcaaacaccttcaatccctatgatttcaaaggttccaactatcatccttggaatggatgcatctcatggttctcctgggcagtctgatgtgccttcaatagctgcggtggttagctccaggcaatggccattgatttcccgctatagggcatcagtccgtacacagtctccgaagcttgaaatgatagattctcttttcaaaccagtttctgacaaaggggatgagggtatcatgagggaggctctcttagacttttatacaagttcaaggaaa

SEQ ID NO: 192722 - DNA, 794 bp, Gossypium hirsutum
gcagaagcctcaagaaaggatgaatgttttgtttattgttttacgtaccagtaattatggggctgaaccaatgctgaaatcttgtggtgttaatataaactctaatttcacccaagtggatggacgtattctgccagcaccaaggttaagagtcggcaacggtgaagatttctttccaaggaatgggcgttggaattttaacaacaagaaattggtggagccatctaggattgaaagatgggctgttgtgaacttctcggctcctcgttgtgatccaaacaacattgcaagggatttgattcgttgtggagaaatgaaaggaattcgtattgatcccccatttgatatattcaatgagatgaaccagaatagacgcctttcacccgtcgttagagttgaaaaaatgtttgaacagatacagtctaaacttcctggagctccgcagttccttctttgtctgcttcctgataggaaaaactctgatctttatgggccatggaagcggaagaatctttctgagtatggcatcgtgactcagtgtatggcaccagctagggtgaacgatcaataccttacaaatcttcttctgaagatcaatgctaagcttggaggtcttaattcattgctcactattgagcaaacaccttcaatccctatgatttcaaaggttccaactatcatccttggaatggatgtatctcatggttctcctgggcagtctgatgtgccttcaatagctgcggtggttagctccaggcaatggccattgatttcccgctatagggcatcagtcc

SEQ ID NO: 192723 - DNA, 624 bp, Gossypium hirsutum
gaactgttttctaggtttggcgaatttgaagatattgtagtgaacagttcaaagaaaaaggggtctgcgcttgttgtcatggctacaaaacatgcagttgattctgctacaggcagtgttaatgggaatctagataatccattgttagttgtgcctcttaaaccctctgttgcggagtttccattcgccaagaaggaagagcaaagtgatcgattgagtaatttggctggagctggttaccaagcttttgaagatgctattttaaataaactgacaaagactgccgaaaaacaacaaaaatgatgacaaaaaggtcttaggagcagattgcaaatgcatcagtggcattttatccacagatgttttgccaacatgtcctaaatttactagttcgggattgaattttagctttctgaagtataccttttaagaagagagatgaaccattcgggttaaagacataagttcttatgtatgtaaattctatattcgtttattaatgctcaatacttcaaactattttatctgtactttttgtaagtagaaaattcttcttacaatctatgcaataacatttgttttcttattgtaagaatatttttaacattgtaacttttaacatta

SEQ ID NO: 192724 - DNA, 377 bp, Gossypium hirsutum
ttgattaaaactaaaagaaatcctctgaaagggccgcagccctctgagctccggcccttggccggtttgctccggtcatcgggcctccgtgcccaccctcacacgccgtcaccgactccgccatacatgacggtgactcgcgaagatttcggtggctgggcttgctgtcatggattcgaatctctgcagatacccatatgaccatgaaagagtctcttttgcggagatctcggcgtcaacggaggtaccaaggtcggagatgaggcctgagatcaccgtgctggacggtcgtgagagggataagctactagacaacgcattgatggtgcgtcagtgtgcattgatggcctcgatttggggagttgaacagatgctcc

SEQ ID NO: 192725 - DNA, 427 bp, Gossypium hirsutum
gacttttcgtcttctaaaactcgcacccaaaaatatttgcagctttggtcaacctaacgatgtcgtacgacgacgtggagatagaggacatgcagtggaacgaggagttacaggcatacacatatccatgcccttgcggcgatctttttcagataacaaaagaagagctcaagatcggcgaggaaatcgctcgttgccccagctgttctctctacatcaccgtcatctacaacgccgaggatttcgccgacagaaaatcaaacaacaatcttgagcctccaaaacgacaagccgtcgccgttgcttgagacctttaagatggcaaatggcaaacattacacttgagtataactggttttatagcagattgcaagaatgttttgttggagattagctccttatgtgtgctgtggtgctagcattggtg

SEQ ID NO: 192726 - DNA, 532 bp, Gossypium hirsutum
gtcgacttcttttaagctggagagacccaagagccaccgctttatttgtaattgtctgtctggctgctgctatagtttggtatgtcacacctttccaggttgtggctcttctagcaggattttacattttgaggcatccaaggttccgccataagcttccttcagtgcctctcaatttcttcaggaggttgcctgcaagaactgattccatgctatgaacaagaatgatatcatgtgcagtttcccggaggtggtatggagttgggattttccccatgttgattcagaaaagaagattgagaaacaaaaggagcttgtttctcctctaatgttcagcaacaggtgttgtgttctggaatgatgtgtaatcttcccctgaaggtagtagattttgtggatttgtgttcatttatgttatctatatgatttctgttttaaaactgagtttatcgcgattaatcaatgttcattgtaattttttaggttgtgattggaatttaaagcatgctcaaatgaatcttcactaataaat

SEQ ID NO: 192727 - DNA, 447 bp, Gossypium hirsutum
cgagaatccctcccgcctgcccactctatttgtcttgacgtcttgcggtcctggggttaaatcatgctgttcctccggtgactcgatcattcgccggttagtgttgcggctgcacatccaatgtggagacgacgtatgttgcagtccgttctctggatgaaaaccaccttggtacatatcacacttgttttcgggatactcttttgcctacacatctatggtaccctcttccccgtttcttgcagacatggctactaaactaccttgctgggactttgctttacctcatctctggtttcctttggtgcttctatatttactacttgaaacgcaatgtctatgttcccatagatgctatccccacaaataaagccatgctcctgcaaatctatgttgctatgaatgccatgccatggtactgtgctcttccatctcttccgaatacat

SEQ ID NO: 192728 - DNA, 830 bp, Gossypium hirsutum
cacgagtatcataggacaagaaaggaaattgacttggctcgtgagagagttgataattacataagatcatcattgcgcgtggcttttgttcagataatggagaagctgaagtccagcaaacgttcttctaagaaccaacaaaatcagtttcctttcctttccatcctcgcacagggtgtcagtacactggcttttagtgagaaggcaatttttagtcctctattaaagaggtggcatcctctggcggccggtgtggctgtggccactcttcattcctgctatgggaatgagctgaagcagtttgtttccggcattggtgatttgacaccggatatactacaagtgctgagagctgctgacaaattggagaaagatctggtgcagatcgcggttgaaaactcagtggacagtgaggatggcggaaagtcgatcataagggagatgcctccttacgaggctgaatctgtggtctccaatctggtgaaatcatggataaagactagattagacagactgaaggaatgggttgacaggaatctacaacaagaggtatgggatccgcaagcgaataaagaacgatttgctccctcttctgttgaagttttgcgaattgtagatgaagctttagaagcattctttttgttaccaatatctatacatgcagcattgcttcctgatttaaccaatggtatcgatagatgtcttcagcattatatatcaaaggcaaagtctgactgtgggacccggagtacttttgttccctcaatgcctgctttgactcgatgttcatcacggtcaaaaaggttcgggttgaatttaaaaaaaaggag

SEQ ID NO: 192729 - DNA, 585 bp, Gossypium hirsutum
aggaaaaagaaaataaaagagagccgcctcaaagatcttgaattcttcaaagagaaagcaaaaaaagaaaaattgtcacagattcaaagagagaaaaaagaaaacccaaaaaagaattaaaagcctttcaagcttcaactttttactacaacaactaacaaaaatagatgggatttttcaattacggcgttgccggcgttggtttcatcgggatcgggttctgggaattcatcaactccttaaacccaaccctaaacccgtttccaactccatcttcttcttcactttcaacccagatcaaatctgcctctatttctaaaactaaagaggaccctttttcttcttcaccatctttcatctttgtatcaatcttttccctttcgattttcttgaattctggggtttcaatctttgatgctttcagttcaaaggatcgggtggtggacggtgctccagttacaagtggctctcacttgctctgctcttcttgctttactctgctttgggtcttttaaattataggaaaggttcatacttttggcctgattctgttcttgaattagttctgcttttagcttttgttga

SEQ ID NO: 192730 - DNA, 1348 bp, Gossypium hirsutum
  unsure (1)..(1348): unsure at all n locations
aactagtctcaagtttttttttttttaatcagttcatatggaagcagggagacaaagggagcagtgaaaatgtcgaaaaaaggtttgatggagcaagacttaagtaaactggatgtaactaagttgcatccactgtctcctgaagtcatatctcgccaggctactataaatattggcaccatagggcatgtcgcacatgggaagtcaacagttgtgaaagcaatatctggggttcagactgttcgtttcaagaatgagttggagagaaatattactatcaagcttggatatgcaaatgcaaagatatacaaatgtgaagatgagcgatgccctcgtcctatgcgctacaaggcatatggaagtggaaaggaggatagtcctctttgtgatgtgcccggctttgaaaactgtaggatgaagttgctgagacatgtatcttttgtagattgcccaggtcatgatattctcatggctactatgcttaatggagcagcaatcatggatggtgcattacttcttatagctgccaatgaaagctgtccgcaacctcaaacttctgagcatctggctgctgttgaaattatgcgactccagcatattataattcttcaaaacaaggttgatcttattcaagagaatgtagccatcaatcagcatgaagcaattcagaaatttattcagggcactgtagctgatggcgcaccagtggtaccgatttctgcacagctaaaatataacattgatgttgtgtgcgagtacattgttaagaagatccccattcccgagagaaacttcatctcaccccctaacatgattgtcatcagatcatttgatgtcaataagccagggtttgaggtggatgagattaaaggtggtgttgctggtggaagtatactccagggtgttttgaaggtgaaccaatttattgaagttcgtcctgggattgttgttaaggatgaaaatgggaacatcaaatgcacacctatctattccagaatagtctcactatatgcagaacaaaatgagctacaatttgctgttcccggaggcctgatcggtgttggaacaactatggacccaactttaacacgtgctgatcggttggtgggtcaagtcctaggagaagttgggtcactcccaaacttttttgttgagcttgaagtaaacttcttccttcttccaaggcttcttggtgttangacaaagggatcanaaaggcagggaaaaatgtcaaanctggccaagggagaaatcctaatgttgaacatcgggtccatgtcgactggggctcgggtcatanctgtaaaaaacgatttggcaaagctgcaactcacatctcctgtgtggg

SEQ ID NO: 192731 - DNA, 1450 bp, Gossypium hirsutum
ttctttagcaaaattatataaaaaaaccagaacctggaaattatatttcatgagttcaaatataaattttctcattcaaatacagctcattcttattcatactcttcttcatcatcagctgttgcatcttggtactgctgatactcggagaccagatcattcatgttgctctcagcttcagtgaactccatctcatccatgccttcccctgtgtaccaatgcaagaaggccttcctcctaaacatagctgtgaactgctcactcacacgcctgaacatctcctgtatggatgttgaattgccaataaatgttgatgccatcttcagcccagtgggtgggatgtcacaaacggtcgatttcacattgttcgggatccactcaacaaagtatgaggagttcttgttctggacattcaacatctgctcatccacttccttggtgctcattttaccacggaacatagcagatgcagtcaagtatcgaccgtgacgaggatcagcagcacacatcatgttctttgcgtcccacatttgctgggtgagctcaggtactgttagagctcggtactgttgagaccccctagaagtgagtggagcaaaacccaccatgaaaaagtgaagacgaggaaaggggatgagattcacggcaagtttcctgagatcggagttgagctgaccagggaatcgcaagcagcatgtaactccagacattgttgcagatatcaaatggttcaaatcaccaaagctgggagtggttagcttaagtgtgcggaaacagatgtcatacaaggcctcattgtccagaaccatacactcatcagcattttcaaccaattggtgaacagacaaagtggcattgtaaggctccacaactgtatcagagaccttaggagatgggaagactgagaaagtcagcatcatcctatctgggtattcctcccttatcttcgatatcaacagtgttcccattccagatccagttcctcctcccagggaatgacaaacctgaaacccttgaaggcaatcgcagttttcagcctctttacgaacaacatcaagtacggaatcgattaactcagcaccttcagtgtaatggcccttagcccagttgttaccagcaccagactgaccaaaaacgaagttatctggtctaaaaatctgaccgacggggccagatctgatgctgtccatggttccaggttcaagatccatgagaacagcacgaggaacgaatctaccacaactggcttcattgtagtagacattgattcgctcaagttgaagatccaagtctccttggtaacgcccagttgcatctatgccatgctcagcacaaacaacttcccagaacttggctccgatttggttgccgcattggccgccttgaatatgaaggatttcacgcattttgctttggtgactgagagggattgtttgagcggacgcgtgaa

SEQ ID NO: 192732 - DNA, 1078 bp, Gossypium hirsutum
gaacaaagaaaatcatatatattagcatgcacatgcattaattacatatggctacaaaacaagattcaaggaactttaggatattgcaaatcgaatattgttttgagctatttattcttcataattactctttttgtccaagaggattttatagcaaccccttctgcaacatcattacttcttattttgtataattaataagacgacaaccaactcttcctcgttatttcatcttaatatggtatcatctctctactttggtggactgggttcactgtccataacctcttctatccctttgctctttacagtttcagcctggcaacatcctgatgcgcacctgggctgaccacactcagcacaagtcccaccacaaccctgacggcaacactctccactctcacatcccgactgtcctggcattagtgggatttttgggacttgtgggatctgtgggacttgtgggatctgtgggattagtggaatttgtgggatttgtgggatctgtgggatttgtgggatttctggaattcttgggatttctggaatttgaggaaatggtagaacgaaaccaccaggattacaattaccggaacatccagaagaacaacatttatcaggaccaccttcaaaaccaaaaccaagagtaccaatttcagcaccttttgggacaacatgatcttcgtgaatgccaacaccgggtccattcaactcggtagggttgagtgcatcaatgggaggaatagcgtccatgtttttggggtcatcattgggctgttcctggagcaacctaacacccgaactgaagcgtacagataaaaacaccgacagaattaagattgcagattttattacagacgccatctctctttttttctttttaaacggacgtctgggcgtcctttgactgtattgtattctaaacgtataccaacagatactgttccaaccctgaagaaataaactttggtatggcaaaagaggctatggtggctttctacgcaagtcaggatccataccttatttgtagtacggccagacatcacagatccgaccactattttatcggacgcgtggg

SEQ ID NO: 192733 - DNA, 475 bp, Gossypium hirsutum
ctttacgaacaacatcaagtacggagtcgattaactcagcaccttctgtgtaatggcccttagcccagttgttaccagcaccagattgaccaaaaacgaagttatctggtctaaaaatctgaccgacagggccagatctgatgctgtccatggttccaggttcaagatccatgagaacagcacgaggaacgaatctaccacaactggcttcattgtagtagacattgattcgctcaagttgaagatccaagtctccttggtaacgcccagttgcatctatgccatgctcagcacaaacaacttcccagaacttggctccgatttggttgccgcattggccaccttgaatatgaaggatctcacgcattttttcttcgaagagggaaaggagaaactggagtgaagcacggagagagtgagacactgaagatatggcggaaaagggtgaaatgaaaggattcttagggatgttttt

SEQ ID NO: 192734 - DNA, 1106 bp, Gossypium hirsutum
attgcattatgtcagctcaaaagcatacagttttcaagcagaaggcaatgacgagggtagtaaatttattttagcagagatacatatacggcccgtttgccattttatttcacttggtgatgttataatataacagtaaagcctaaacccccgaaccagccagtcgccgtctcgaggcatttgatatggatacttgagtaagcttgtctgcatcattcaacgccatgcgctccttgagtggcatataatgccgtagccatacaccggtataaacctgctggggtcttattatctttgtatcgggatcatctagagactcgcgccagtgtgccaagtacccagccattcgagggattgcaaataacacagtgaagaactctggtggaaatcccatggcccggtatattaacccagaatagaaatcaacatttggataaagcttcctcttaataaaatattcgtcagataatgcggccttctccaaactaatagctacctcaataagtggatcccggccaacacatagaaaaaacttcctctgccaatttctttatcacctttgctctttacagtttcagcctggcaacatcctgatgcgcacctgggctgaccacactcagcacaagtcccaccgcaaccctgacggcaacactccccactctcacatcccgactgtcctggcattagtgggatttgtgggacttgtgggatctgtgggattagtggaatttgtgggatttgtgggatctgtggtgtgggatctctggaattcttgggatttctggaatttgaggaaatggtagaaccgaacccaccaggattacaattaccggaacatccagaagaacaacatttttcaggaccaccttcaaaaccaaaaccaagagtaccaatttcggccccttttgggacagcatgatcttcgtgagtgcacagcaccggggccatttatgccgtgttgtgagcagtccacttcccagaacttcgctccgatctggttgccgcactggccaccttgaatatgaaggatctcacgcattttgatttgtgaagagaaggagaaactgaaattttctaaagaaaaaaatgtaggaaatttagagaaa

SEQ ID NO: 192735 - DNA, 502 bp, Gossypium hirsutum
  unsure (1)..(502): unsure at all n locations
nnnnnnnnnnnnnnnnnnnnnnnnnnnnnnnnnnnnnnnnnnnnnnnnnnnnnnnnnnnnnnnnnnnnnnnnnnnnnnnnnnnnnnnnnnnnnnnnnnnnnnnnnnnnnnnnnnnnnnnnnnnnnnnngaaacaaaaaaagttacttagaaacttgaaaggagtaaagtacataaactgcgcatgctttgctaagtattgagcatgaaaagctcaagaaaaaagttcacttagaaacataaatgcaacaacagtcacagcataatgactatttctttcagcaactggaagttgagattagaatttgcccaactggcataaagtttttccttcctaatcctcgtactccgcttcctcttccccgtcctcatcttcatcagctgttgcatcttggtattgctgatactccgagaccagatcattcatgttgctctctgcctcagtaaactccatctcatccatgccttctcctgtgtaccaatgcaagaaagcggacgcgtaaa

SEQ ID NO: 192736 - DNA, 606 bp, Gossypium hirsutum
aaagctatcaaaaagcgaactccagatttcataaacatttagtgctttaccagaattgcacactagatttgcctataatatttcatcattcagttcatttgctttcataaaactcaagacaatatttagaaagaaacttcaaagaaagaaaaatacaagtctgcaaatatccagaaatgcaacagcagttacagcaaaagtaaatgactaattctttcacatccaaaacaggaaaaaaaaaagcaccagcaactgggagttgagattttgaattgccaaaatggcaatatctttccttctccttagtcctcatattcgcgttcctcttcttcttcttcgtactcttcatcatcagctgttgcatcttggtactgctgatactcggagaccagatcattcatgttgctctcagcttcagtgaactccatctcatccatgccttcccctgtgtaccaatgcaagaaggccttcctcctaaacatagctgtgaactgctcactcacacgcctgaacatctcctgtatggatgttgaattgccaataaatgttgatgccatcttcagcccagtgggtgggatgtcacaaacggtcgatttcacattgaaa

SEQ ID NO: 192737 - DNA, 419 bp, Gossypium hirsutum
cagtgtaatggcctttagcccagttgttaccagcaccggactgaccgaaaacaaagttatcgggtcggaagatctggccgacgggaccagatctgatgctgtccatggtaccgggttcaagatccatgaggacggcacgaggaacgaatctaccacaactggcttcattgtagtagacattgattctctcgagttgaagatccaagtctccttggtaacgaccggtgggatctatgccgtgttctgagcaaaccacttcccagaacttcgctccgatctggttgccgcactggccaccttgaatatgaaggatctcacgcattttgatttgtgaagagaaggagaaaccgcaattttctaaagaaaaaaatgtaggaaatttagagaaatgggtggatgagagttgccccacgcgtccg

SEQ ID NO: 192738 - DNA, 669 bp, Gossypium hirsutum
ggaggctcgtaaacgtgaagaggctgagaggcggaggaaggaagaagctgagcacaaagcaaaaatggatgagattgctgaaaagcaaagacaaagagagcgtgaattggaagagaaagagaggctgaggcgagaagctctcttgggaagggcactggaggggatctctaggccttctgaaattcctgctgggtcccactcaaccgagcctgtcgttgcggctccagctgctgctgctgctgctccagctcccgggaaatatgttcctaagttccggctactaaggcctgaaagctctggtccagctccaccttctgaacctgatcgatggggcaagccagcaccgttggagcccgaccgatgggctgctggcagcagggctcctccatcgcaatctgatcgctggactagtggcagtagggctccacctcaggattctgatcgtttggcaggtggtggtagcagagctacacctccagattcgaatcgttttggtggtggcagtgggagcagcaaggcagaaccctggcgaccttcaagggccaggaacccacaacgcggttgaaccggctgctgggttggaatgaatgcagaaatttttgtacttgggaactatttatggttgtcaatgacaaatgacaaacagctttgaggcatattggtttttgg

SEQ ID NO: 192739 - DNA, 923 bp, Gossypium hirsutum
  unsure (1)..(923): unsure at all n locations
agccttttggtaaaatgtttcatgggccttcacagcgatgtttttcagaaatacgtgaagaattggattgcaattgctgcaccattccggggtgcacctggatatattgcttctacctttttaaacggaatgtcatttgttgatgggtgggaacagaactttttcatttcgaaatggagcatgcatcaattgcttattgagtgcccatcgatatacgagttaatggcttgtccacatttccattggcaacatattccacttcttgagatatggagggagaaagaaagttgtgatggatatcctccaactattctaaaatcttatcgtccgggaaattgcattgatattttcaaggaagctctttctggcaacacggtcgattataacggagagatgattccattaccttttaatttggaaatcttgaaatgggttaaagagactcaaaaggtgttgtctcacgctaaggttccttccggagttaaattctacaatatatacgggatcaatcttgagacaccacacagcgtttgctacggaagtgaggaggcaccggtcacgaatatacaggacttacggttttttcagcccgaatatatattccttgatggttaatgaacaattcccgctgaaatcacctaaaggcagattgaactccatgccaaaaaccaagggtgaggcattccccggtgaagcacccggggaattcctttgttaaccttcacgttcttccgaaattcttcaaggaatggttttaaggctgggttaaaccgaacccttttctccctcccaattaaacaattgttgtttattttacccgacagcctttccaaaatggaaagtccccattaaaaaaggcttaacaagtaccttcacttccaagaaggaatgggaaaattttccccccnnaatcaggaacaatc

SEQ ID NO: 192740 - DNA, 410 bp, Gossypium hirsutum
catcactaacattttcttctccaaaaatgtctacgaattggctaccattactcttctcttttgtttttccttgtattaaaactccaaagcttcttcacctatctcctgctgcttttcattaacaacatgtctgctaaaacaaaatctgggttatttgaaactcctaccaaggtttcacctgcaacgcctaaagtggcgagcaaagtaagcaggggactggctaaaccagaacccgattcaccctctcccttgccaagtactcgccattcagttgagcgttcaccacgaacatccctcaactcgaagcctacaattgatcgtagatcaccaaaggttgccaccacccctgattaaccacatacacggtgtggctaaaggatcagagatgcagactcaattgaacttggtgc

SEQ ID NO: 192741 - DNA, 674 bp, Gossypium hirsutum
aggtgaaggagaggaagcaaggaataaggcaccgaatcaagggtaggaggagggcgcagaagggatagtaggtacaaggatgttgcaagtgggtagatcaagggagaatagaggtggattgaagccaaagagaggaaggatgagacaatcggaggagatgagaggcaatagaagctgtgaggaggtatcgtaatgatgagattagacaagcggtggatacgggaagacagaagtatccccatgacaggattgtgtacggtgattaatgagaagccgccatgcgttacgttcatgccccagtacatcacgggttgtatggtgggactcgaaaagcatgctgtggagggggtgggccatgtaatttcaatatctcagcaaggtgtggtcatcctggatctgaagcatgtaaagatccttccgtttattcaaattgggatggaattcatctaactgaagcagcctatcgccatatagccttggctttgatcaatggctcctcttcccttccacccctcatatcctctcctctttcagattgaataacccccctaacatgaacagtcaatcaagggtctcatttagatgttcattagagatccaggaccaatgatacatgtatgcattgactgtacttgaagattttatttgctttataatttagcctcatgattttg

SEQ ID NO: 192742 - DNA, 690 bp, Gossypium hirsutum
  unsure (1)..(690): unsure at all n locations
cccacgcgtccggaagaaccctgagcagccgaaccccccaaaagaccaactaaactcaccaaaaataatggtggccagcaagaaaacgaagaagacccatgagagcatcaacaacaggttggctctcgttatgaagagtgggaaatacactcttggttataaaacagtgcttaagtccctcaggagctccaaagggaaactgattatcatttcgaacaattgtccaccgctgaggaaatctgagattgagtactatgcaatgctctgtaaagttggagttcaccattacaatggaaacaataatgatctaggaactgcttgtgggaaatacttccgtgcatcctgcttgagtattgtcgaccccggtgattctgacatcatcaagtctcttccaggtgaccactaagtcaatgaaggtctggttctctatcacaccagaatgatgatgtttctttacttcctcacgatattatttccctttgccctcaaccccatttgtttaagaatatttggtatttttcttaatgttaagttgtggatgttcttgctaaaatttgtagcttgagtcaagattttgttttggttaatgaatattctgagttgcttgtttacctaanaaacataaaagaatgctaaaagataaagcataaaccaataaaaatcccgagaaaacacactaaaaatgcaatt

SEQ ID NO: 192743 - DNA, 544 bp, Gossypium hirsutum
tctacatgtgccgaactccgaatccagaaacaccaactgaaacataacaacaaaaatggcggccggcaagaagacaaagaagacccatgaaagcatcaacaacaggttggctctcgttatgaagagtggaaaatacactcttggttataaaacagtgcttaagtctctaaggtcctccaaagggaaactgattattatttccaacaactgtccacctctgaggaaatctgagattgagtactatgccatgctttgtaaagttggggtgcatcattataatggaaacaataatgatctgggaactgcttgtgggaagtacttccgcgtatcctgcttgagtatagttgatccaggtgattccgacatcatcaagtctctacctggtgacagctgagtcgtttgacagcagaacaatgttcgtttcttattatattgttcctcgtagccttcttatccttagttaaagaacaattactgtggatgctcttagcaaaatttgtagctttaaaatacaaaattttgtctggtaaatgaagacactgct

SEQ ID NO: 192744 - DNA, 458 bp, Gossypium hirsutum
cccacgcgtccgcaacatcgttgtttgaagaaccctgagcagccgaccccccccccccccaaaaaaaaataagaccaacttttctcaccaataaaaatggtggccagcaagaaaacgaagaagacccatgagagcatcaacaacaggttggctctcgttatgaagagtgggaaatacactcttggttataaaacagtgcttaagtccctcaggagctccaaagggaaactgattatcatttcgaacaattgtccaccgctgaggaaatctgagattgagtactatgcaatgctctgtaaagtcggagttcaccattacaatggaaacaataatgatctaggaactgcttgtgggaaatacttccgtgtatcctgcttgagtattgtcgaccctggtgattctgacatcatcaagtctctaccaggtgaccactaagtcaatgaaggtctggttctcta

SEQ ID NO: 192745 - DNA, 419 bp, Gossypium hirsutum
tttgttataggtggctattggcgtcctgggtcaagcagcgtggggaactatggctgaagaaccggcggcggctggagctggaagtgggtatcgggaattccgaggaaaagatgaatttccgtccaacatgttgcacggcatatttgctattgcgatgtggattggatctgtgcatttcgacttctttttgctccttttctcctttctattccttcctttttccaaattcctcatggcgctggggtttctattgattttcatggttcttcctatcgacccgtacagtaaatttggccggaagctgtctaggtatatatgtaagcatctttgcagttactttcccatcactctctatgttgaggattttaacgccttcaatcctgatcgtgcttatgtttttggttatgagccacattccg

SEQ ID NO: 192746 - DNA, 792 bp, Gossypium hirsutum
cggtacttgtatgggctctgcattgggccctttcagattcatgctggaaaatcagctcctagtgtgaaaggaggggagcaaacaaaaatggaagagggtgaattttatgccattgaaacctttgcttctactgggaaagggtatgtcagagaagatctagagtgcagccattatatgaaaaactttgatgcaggacacattccactgaggttgcctagagctaagcaactactagctacaataaacaagaatttttcaacattggccttctgtagacggtatttagatcgtttgggagagactaaatatctaatggcattgaagaatttatgtgatgtcggcattgttcagccgtatcctcctctctgcgacatcaagggcagctatgtttctcagtttgaacacaccatcctactgcggccaacctgcaaagaagttatatcgagaggtgatgactattaaggtggaagaccaaaaagtttagttggtaatcatctcctcaaatattttgcgaataattttagttgtgtactttttgtgttttttaacataaggaaggtccctaaatagtggatgatacccatgtttgtcacttgtctgtactcttgctttgccgtgtttgatgatagatggtgtgattgagacttgaatcaggcaatatatggtgatgggaagactagaattttccattgcagtcaaagttatgtcttactactacaaaacatgaatgatgtttttcttatttgggtaaactttttaaatgttaaaggaggataaagttttttcttttta

SEQ ID NO: 192747 - DNA, 959 bp, Gossypium hirsutum
agattgggggtggtttttttttttaagacaaagaaaattttcatatttggatatttttattaaaaaaatggtttttttattatacaacaacaaatttttgccaactccaattttgtccccctgcttccttggctgtttgcttccataaactaccctccgttatctatttatttggtttttcgggcggcaaacacttcttttcagtccttaataaattgcttcaaatgacatctgcttggtttatttgcttcagttgattcactcatttcgagctctgtaaatattggtttattataagcatcttggtgatcatccatgggttcaggaaactggcttagatcattcatttgtttaaagaaatataaaccaaacagatccaaacaagcaaagaccccatcaatacaggtacactcgagtaatgaaaaatcaaatggtgatgaaagggtagaagaacatgagggtcctgaagtggcagcggctgggagttcacaaagcagtcctggaattgccgttgaacaaagagcggctgctaaaattcagaaggcatttcggtcttacagggcaagaaaagcagtccgccggctgagagatgcggggagattcaagaacatattgatacagggacatacagtgaagaaacaaacaagaagcacgctaagctatttacattcatggtgcaatgtccagtctcaaatccgagctcggagaatatgtatggttacagaaggcaggcttaagcaaaagaaaatggaaaaccagatgaagcttgaggctaaactccatgaactggaggtagaatggtgtggtgggtctgaaactatggaggaaattctttccagaattcaacagagagaagaggcagcggttaaacgtgaacgagccatggcatatgccttctcccatcagtggagggcaaatgcgagccaatatcttggacaagcatcctatggtgcaggcaa

SEQ ID NO: 192748 - DNA, 528 bp, Gossypium hirsutum
gttgagaacaaagcaaactatgatgataacaacgctgccggtgctgccaacaagaagaagaggaaaagggtgaagaaacttgagttgttcaaagggttttgtgaagatattgtgaacaagttgatgatccaacaggaagagatgcataataagctgattgaagatatggtgaagagagatgaagaaaaagttgcaggagaagaagctgggaagaaccatgagctggataggattaaccaggagcttgaacttagagccaaggaacaagctattgctggtgatagacaggccaccattatcaaaattcttgagcaaattttcacaaacttggatcctcttagaagcaatgttttggaagggttaatgaagatgttgtcaaggtaccaagtgaatgttcaaatcctcctattgcttcttcatctcctttagtggcagtagcagaaaaccctaatcccattgtcactgaccaaaacaaagttgatcaagtgtctaccacttctccatcttccatgatcctcgcccatcaaa

SEQ ID NO: 192749 - DNA, 556 bp, Gossypium hirsutum
ggaaaatgccgatgtttttggtggataggaacgatcccaacaaattgattttcttttaccaaggatcggggatgcagcttggggcggaaggattcgcggtgggttttctttatacaatagtgggattattgctagctttcgttacccatttgcttgtttatgttaagaacgcgaaagccaagcgtgtggccatggtttttgcgatttgcgtttctttttgggcggtgcagaaagtgattttcttggacaattggaagactggatatgggattcatggattctggccttccagttggaactgaaggcatcatcttttgtgcttgtttttttaggctgctataattcgaactatggtttcgattcagttgggaatttgatatcaattttagatgttttaatgtactttgggcaaaatactgagcttatagaacgttaatctgctataagttgacatccatgaaagatccatttgctaaagactaactgaccgactaaactgcttatgaggcaatccaagcattccatgaataaatctgcggggggggcccgggaccga

SEQ ID NO: 192750 - DNA, 459 bp, Gossypium hirsutum
atattgccgaagctcttgcaaaattgggtgctacagaaagtgaaggtttacatttttcacccgatagacaaagggagctggggtttacgttctcatttcctgttcggcaaacatcgatatcgtctgggactcttataaaatggacaaagggcttctcgattgaagatgcagttggtcaagatgttgttggagaattgactaaagccatggaaaggattggcctcgacatgcgtgtgacagctttggtcaatgacacaattggcacattggctggtggaagatataacaaccccgatgttgttgctgctgtgatattgggtacaggcaccaatgcagcttatgtagagcgtgctcatgcaattcccaaatggcacggtcttctacctaaggctggggacatgggtatcaacatggaatgggggaactttcgggcttctcaactttcaatattaaaatatg

SEQ ID NO: 192751 - DNA, 461 bp, Gossypium hirsutum
ttcactcgtacgcacaatcaaagggagaaaagagggggactccccttttccctccggaagggcatagatcgcccatcgtcgcggctccaccttccccaaatgcacaccgcggtggccgacgagccagatatctcggaggcgtgggagcgtggcatggagtagcgcacgattcggaagcttggcgcgcatcgtacgctgcttggactcgaagcttgcggcgccgatttccttctgctgctcgggttttgggttggctttatgttttgtgtattgggttgagagatgtgggttaggttttgggtaatctgttgggctttaagtctgttttgtattgggttttaataggtgtttttatatttgggtttagtttttttatttaattttgcatgtgtgggcctgggcataaattgggctcaacaatagttacattgctatcttagcaataaagacattaacgatac

SEQ ID NO: 192752 - DNA, 838 bp, Gossypium hirsutum
  unsure (1)..(838): unsure at all n locations
tatgggtccgaaagcggtgaaggacaaagcgagctcgatgcgattgagtgaggcagccaagccagcatccatctcccacattgctcgtccggaagtgctaaaagaagaagacaaccggacctccaccatcagacggctaagtgatttgaaaagcgacgatgatgatgcaggctctcctaatagtcaagaaagcacccaacaacaatcctaccaaaataatgctgcaattgagttgatcaatagtgtcacaggtgctgatgaggagggcaggtctcgccaacgggttctcgtatatgctgccaggaggtatgctagtgctctggagagaaacccagaagattatgatgctctttacaactgggcattggttcttcaggaaagtgcagataatgttagtccagattctacttcaccttctaaagattccttactagaggaggcttgtaacaagtatgatgaggcaactcgtctttgccctacatttcatgatgctttctacaactgggcaatagcaatatctgatcgagcaaaaatgcgtggtcggaccaaggaggctgaaaaactatgggagcangcaacgaaaaactatgaaaaagctgtcaaactcaactggaacagtcctcaggcgctaaacaattggggactagctcttcaggaactcagtgcgattgttccagcacgagagaaacaaaaaattgtgagggctgcaattagtaagtttcgtgccgcaatacaattgcaatttgatttccatcgagcaatatacaacctaggaacagtnttgtatggggctactgaagatacacangaactggaggctcgacnaatccaaaagaac

SEQ ID NO: 192753 - DNA, 704 bp, Gossypium hirsutum
gggagacgaaaggtttggggtgatatatttcatattgttgcttccaagactgaatgagcatgattttgaggttctatcaagccctgaggttattgaaactagagacgcgcttttgcagaagctgcaaaagaataagaatgtacaggttgaaaacagtagtcctgatgcatctcaacagagtggcaattttagtgagacaaaacgagaaacttttgtatctgaggaaaaggtcagtgaaatcgtaaatgcggcagaaggattagagattacctccagcgaggactacactgagcaatggttagaagaagcagaaggttccagtggaagttccctgagcatcaagaaaaacctggaacatgaagaagatgtttcattcagtgatctggaagacgatgataccgatacttctaatagagcatcagtgcgtaagtcaacacagcatgacaaagctctttcatccagtggatccaatgactgggttcagctgaacaagagactagaaactcgtggtgctttgcagaaagcaggccaaacaagttgtcgagataaagattctgaagttgaggagtcaaatgactggctcactgatgatgatttcgtcgacgtggtaagagggaaatgaatttctgattcactgtaaagtttcataaacccttttctacctgtagaacttctgtacttgtgggaatcagaccatcacataa

SEQ ID NO: 192754 - DNA, 1400 bp, Gossypium hirsutum
  unsure (1)..(1400): unsure at all n locations
ctaagtgttatttttcggttgcatgctacttccattccaagtacaaggcaagtgagtcaaaaacatataaaaagaatgggaaatctgcttctattcaatacggtactggagctatttctggtttctttagttatgacaatgtccaagtcggcaacttggttgtggaagatcaggaatttattgagactactaaggagccaggtcttatatttttggcggccaagtttgatgggattttaggacttgggtttaaggagatttcagttgggaaagctgtcccagtgtggtacaacatgctcaaacagggtcttatcaaggacccggtattttcattttggcttaatcgcaatgtaggagaagaaatgggtggtgaaattgtgtttggtggggttgatccaaaccactacaagggcaagcacacatacgttcctataacacaaaaaggctattggcagtttgacatgggtgatgttcttattggtgacaaaccaactggattttgtgctggcggctgtgcggcaattgcagattctggaacttccctgctggcaggtcctacgactgtgattaccatgataaaccaagcaattggagcctctggagtggctagccacgagtgcaaggcagtggttcaacagtacgggcaaaccatcatcgatctacttttagctgagacacaaccacagaaaatctgctcccaaattggattgtgcacttttgatggagctcatggcgttagcacgggcattgagagtgtggtagatgagagcaacggcaaatcgtctggaattcttcatagtgctatgtgccctgcttgcgagatggcagttgtgtggatgcagaaccaactgatggagaatcagactcaagaccgcatattggactacgccaatcagctatgtgaccgggtgccgagcccgatgggagaatctgctgtcgactgtggaagtctatcgtccatgccaaccgtttccttcactattggtggcaaagcttttgaccttacaccagacgagtacattctgaaggtgggtgaaggtgctgaagctcaatgcatcagtggctttactgctttggatgtccctcctcctcgtggacccctctggattttgggagatgtcttcatgggtcgctaccacactgcgttcgatttcggtaaagagagagttggctttgccgaggcggcataaaaataccttaccatggaatggggcaactgagttttcttcaaatgtccacccattactgtgttaggtataactttatataaagatggttggagacatggagtcactanctctctcagcctccattacgtaaagatagtgttgtgttgcttgtaaatatttccgtcgctgctctgtgatgtttaaccatggctgaaatttggatttgctgct

SEQ ID NO: 192755 - DNA, 486 bp, Gossypium hirsutum
gcgtccgcccacgcgtccgcccacgcgtccgccgattgacaacacgttgtgctgacattaatttgctgggtgtgatgtaatgcaggacattctgaaagtgggtgaatgtgctgaagctcaatgcatcagtggctttactgctttggatgtccctcctcctcgtggacctctctggattttgggagatgccttcatgggtcgctaccacactgtgttcgattttggtaagcttagagttgggtttgcagaatcagcataaaggggacctgaggttttcaatggccataaactatatatgtgtatgatttaaatttataaagatccaacgaaagcccaaaaccttgaaaagaaatgatgctgtgttgcctgtaaatatttgcgttcctgcactgtaagattttggttttagaagaagtgaaaaatattgtgtttgcatttaatgaatggttactatattatttgattttcaactttccaaaaattata

SEQ ID NO: 192756 - DNA, 471 bp, Gossypium hirsutum
cttccctttgtcattctctgtagcatcaacaggtgagggaaaaaagagaaggatctgatgtacctgccggttgatcttaattatacacaagatcatgatggcccttgaaaataaagaaactatgcagaactgcgaggcaaccttaaaatgcctccagacgaaggggttcccgtacaacctgcgatgtactgggaactcaattgaaggccgtccagagcttaaagatgaaatttgtactcacccaggtggggatgttgtagaacctgtttgctctttaaatgggcagtttatggaataccacaaacctacccttcggcatgagtctggctcttggtcgaccttctatcctgacacccacaagttgcagccatacccaccaaatgcttttggggggcagttttaccactttcccatggataaccgatttcattatgcccccattcatatggtcacacatggatacccgtatga

SEQ ID NO: 192757 - DNA, 995 bp, Gossypium hirsutum
cctcaatctgctgtctctgctttccaaattagggttggaggagccggtacttcaaacaagactgtcaaacttcccaagaacttcactttacttggtccgggaccaggttacacttgtggtcctgcaaaggtcgtgccatcgaccacttttctcaccccagatcgccgacgaaaaactcaggccctaatgacatggaatgtgacctgcacttattcgcaatttctagctcggaaaaacccgaattgttgtgtctctttctcgtctttctacaatgaaaccatcactccttgcccaacttgtgcatgtggatgccagaacaagaacaactgtgtcaagagggatgccatgtttcttaaaatggttggattgaacacaccaaggaaagataatgctccactgcttcaatgcacgcaccacatgtgcccagtgcgagtacactggcatgtcaagctcaactacaaagagtactggcgagttaaggtatcgatcaccaacttcaactaccggatgaactacacgctatggagccttgttgtccagcacccaaatcttaacaacgtaacacaagttttcagcttcgattacaagccgctggttccctatgaatcaatcaatgacacagggatgttctatggcatgaagtactacaatgacctgttgatggaagcagggccattaggaaatgttcaatcagaggtgcttctgaggaaggacaaggataccttcactttcaaacaaggatgggcatttcccaggaaagtgtatttcaatggtgatgaatgcatgctccctccacctgatacatacccatttctaccaaactctgcccatcaacacctatccttcaccagctttacattcattgctgcaatgtttttcttatttgtaaccttttggtgatcgtttctcatgttgtatgagcacaaatgacagcgagaaagtacacaattttacaattttcgaaattgtttcaatgaatcggaaaagggattttg

SEQ ID NO: 192758 - DNA, 545 bp, Gossypium hirsutum
gttgcagaccaaggaatcacggacgataagggtgggaatccatcaggttcccctgaattgtcttctaacctaaatgttgaagattcattggaagcagcaaatgttcctcccgatgagaccagagatgctggtgaagttgaagacaagcctgtcatgcgtgaaagcgtagaaaatcagactattctatctgtgggtaatcgttcggtgcagccaacttcttggaagagttgctgtggactttttgaagttctaaggcgctctgacagataaattcaagtttggggaaaaaaacttaagcagaatctcaagttcttggtggagtgctttattttaattttttttccagcattttctgcaaaaataatgggtgagaagataagtggagttggttggggaatgaaattagggttttctttcgttgggatgtgcgattgccatacgtggagtgtttgaatttgtatacagtaatatatgtgatgatactgtgatttcaatgtcatttcttgggttttgccttttagaatggtttaagattaacaacacac

SEQ ID NO: 192759 - DNA, 1145 bp, Gossypium hirsutum
tttccgttttgttcctttggatctgtgaggcagccgccggttcctttgaccaccaccaccaccaccaccacctctctgtgatcaaccttcactctctttttcaaggaaattagctgaaatggctggaggattaatccaccaggttttaaggaggaaatttcaatcacagtctgctgttcaagctttatcatggttttcatcaaggaaagttaatgacgatgcgggttctgctggtatgaggaccgttgcactccttggagctggtgtttcaggtttactaggttttgcaacagtagcatctgctgatgaggcagaacacggtttaggagttccaaattatccttggcctcacgcaggcatcctcagttcatatgaccatgcttcgattcgtcgcggtcaccaggtttaccagcaagtgtgtgcatcctgccactctatgtccctaatatcataccgtgatttggttggtgttgcgtatacggaagaggagacgaaggctatggcagctgagattgaggtggttgacggtcctaatgatgagggtgagatgtttactcgtccgggtaaacttagtgaccgctttcctcagccatatgcaaacgaacaagcagctaggtttgcaaatggaggagcttatcctccagatctaagtctcatcaccaaagctcgtcataatggccagaactatgtgtttgcgcttctaactggttaccgtgaccctcctgctggtgttatgattcgtgaggggctacactatgacccatactttccaggaggagcaattgccatgcctaaaatgcttattgatggtgctgtagagtatgaagatggcacccctgcaactgaagctcagatggggaaagatgtggtgacatttttgtcatgggcggcagaaccagaaatggaagaaaggaagctgatgggttttaaatggatatttgtattgtcattggctttgcttcaagctgcttactaccgacgcttgaggtggtcggttctcaaatctcgcaggctggtacttgatgttgtgaactagcctcctccccctcaagtttctcgctttttgtggatttgattcggcaataattgcttatcaagatgttctaggttctgccatgaccaaagtggtgaagtagtcttttttt

SEQ ID NO: 192760 - DNA, 911 bp, Gossypium hirsutum
ccttctcgtccgcccacgcgtccggttttgcttattgcttctgcctttgctttttgcttcttactctcaaccaaaaatgactgctcaggccgacaaagagatcgaagagattctggcagcccatctcgaccaacaaaaaatcgattccgagaaaccagagcaacctgttgttgaagatgacgacgaggaagatgacgatgacgatgatgatgaagatgatgccgaaggtcatcatgagggagaaggagatggaactgttaggtcaaagcaaagccgaagtgaaaagaagagtcgcaaagctatgttgaagcttgggatgaaaccgatctctggtgtcagccgggtcactgtgaagaagagcaagaatatcttatttgtcatctcaaaaccagacgtgttcaagagcccagcatcagatacttatgtaatatttggagaggctaagattgaggacttaagctcacaactgcagactcaagctgcagagcaattcaaggctcctgatctaagccatgtgatatcgaaaccggagtcatcaacagcagtccaggacgatgaagaagtggatgacacaggggtggagcccaaggacattgaattagttatgacacaagcaggagtgtccaggtcaaaggctgtcaaggcactcaaggctgctgatggtgacattgttagtgctataatggagcttactgcctaataacggtgttgatttagcaacagttttggttgctgaaagttgtgtgcttcatttcagatatccctactgtttttttgagaatgttattgtgtcctttttcttcttgtcggttgttgtattagtaaaaaaaaccatctgtgaggacgttttctgttataaaaatggtctcggttaagaattcttcgctgagggagagaatcccgttaccaag

SEQ ID NO: 192761 - DNA, 648 bp, Gossypium hirsutum
  unsure (1)..(648): unsure at all n locations
gttcgtaaattgattcacctgcaaatggggcgaccatggtttaaggttgtaacaaaaataaaatatctgaaactgttaacggtgatgcttcagtaaaaatttctggcagggaactccagtctgaaaagcagcatgatctatcaccaccagtagatcatgtatcagatgcagacanattgcctgttatgaagcttcgagcacagctctctttggtgcttcaatcaatgtctaaggatgctgatatgcaaaaaattctggaggacatcaagcatgctgcacaggatgcacgtgacaccctggacgagcgctctgtcaatggtgtctctgaagtgaatggctttgatggcacaagcaacgagcatgccttttctggagatggtaacttaactggagagaaaacaattgctatgcccccaggtgataaggtgaaatctgcaaccgcgcaaattataagtccagaattagctgctgcaatttctcatattcataacttcgtactgtccctcagaaaagaagcaagggctgttgatgacatatcttttgatggcaatggattaagccacaaaattgatgagttctttgtcacccgcaataaggtcttaagcagcaatgcaagtttggatgatttaatttttgatctttctactg

SEQ ID NO: 192762 - DNA, 597 bp, Gossypium hirsutum
agaagtttcagtctcttctctcctaacctttcctttcgcttggagagtcggatgggagggtttgcaaattgatgttaaatcggaatcgctttcagggggaaagggaaaatgtcatcatacgaaaacgttgtaggtgggaagctgaagctcaagggaaaagccttggatgttaaggctggtggaatcaagaagaaaaagaaacataagaagcagattcaacatgatgaccaaattacccagaacgatccctctgatgccgcttccgctggtgaaaccacagaagtttctgttgatcccaatgaagaagatatcaacaatgcggagatgtcaagtggggagaaggcggctcctcattatgatgatcatcttaccccagcagaaagacgatacattgagcagagggagcaactcgacgttcataggttggctaagcaagctaataaatctcatcgtgatagaatccaggatttcaaccaatatctggcaaacatgagtgagcattatgacattccgaaagttggtcccggttaattcaggcaacaccaaagttatctttttattggttttggaaggaacttctttgtgttatgtaccaaa

SEQ ID NO: 192763 - DNA, 427 bp, Gossypium hirsutum
cttccgtttttttttctaacctttcctttcgcttggagaggccgatgggaggtatttcgcttgttttcaagatcttcaaattcaatttcaaatttgaccatccaaatatttatttcttgtcaaatcgaaatttctaacccattaaagggggaaagggaaaatgtcatcatacgaaaacgttgttggtgggaagctgaagctcaagggaaaagccttggatgttaaggctggtggaatcaagaagaaaaagagacatatgaagccgattcaacatgatgaccaaattacccagaacgatccctctgatgccccttccgctggtgaaaccacagaagtttctgttgatccccatgaagaagatatcaacaatgcggagatgtcaagtggagagaaggcggctcctcattatgatgattatcttacccca

SEQ ID NO: 192764 - DNA, 777 bp, Gossypium hirsutum
ctggcttccctcttcgcttcccgttcttattctatcgtggctgttcgcagattcctcagagctccgattacgatggctgctgttaccggatccaatgtcgtcgctctaaaacccgccgcgaggcttgctgatcctactgaccgaaaatgtgttcagattcggcaatggtctccgatttccgccggattcggatcggttcaggcgcggccctccatcggtctccagtgccaatcgaaacgatcgtttgcctcccccggtgtaaaagctcaggttgccactgttgaacaagccagcattgaagcagctcaaaacgtagaagctcccgtagccatagttactggagcttctagaggcatcggtaaagcagttgcgttggctttaggtaaagcaggttgcaaggtcctagtgaattatgccagatcatcaaaggaggctgaagaagtctcaaaagagattgagtcgtatggtggtcaggctgttacttttggtggagatgtctcacaagaagctgatgtagaaggaatgataaagactgctgttgatacatggggaactgttgatatattgataaacaatgcaggaatcactcgggatactctgttgatgagaatgaagaaatcacaatggcaggaggttattgatctgaatcttacaggagtgtttctttgtacacaggcagcagccaaaatcatgatgaagaagaaaaagggagagataattaatataccatcacttgttggtctggttggcaacatcgggcaagctaactacattgca

SEQ ID NO: 192765 - DNA, 1787 bp, Gossypium hirsutum
cggacgcgtgggcggacgcgtgggccccgttgaaaaaatatgggtttccaaagaaacatattgggtttccttttcttgatattggcttcactaacaagcctctcttctagccttcctagtgaatactccatagtggaacatgagattgacgcatttctttcggaggaaagggtgttggagatcttccaacagtggaaagaaaagaatcggaaagtgtaccggcacgccgaggaggctgagaaaaggtttgaaaatttcaaggggaatttgaagtatatcctagagaggaatgcaatgagaaaagcaaacaaatgggaacaccatgtgggattgaacaagtttgctgatatgagcaatgaggagttcagaaaagcttacttgtcaaaggtgaaaaagcccatcaacaaagggataaccctgtcaaggaacatgaggagaaaggtgcagtcttgtgatgcaccctcctccttggattggaggaactatggagttgtgactgctgtcaaggaccaaggttcttgtggaagttgttgggcattctcatcaaccggagccatggaaggaatcaatgccttagttactggagacctaattagcctttcagaacaagaacttgtagattgtgataccagcaactatgggtgtgaaggaggatacatggactatgctttcgagtgggttataaacaatggcgggatcgatagcgaaaccgactacccctacactggtgtggatggcacatgtaacaccaccaaggaggaaaccaaggttgtatctattgatggctatcaagatgtagagcaatcagatagtgctcttttatgtgccgttgctcagcaacctgttagtgtgggaattgatggttccgccattgattttcaactttacactggtggaatttatgatgggagctgctcggatgatccagatgacattgatcatgctgttttaatagttggttatggttcagaaggcagtgaagagtattggatagtgaagaattcatggggaacaagttgggggatagatggatatttctatctaaaaagagacactgatttaccatatggtgtttgtgctgtcaatgccatggcttcttatccaactaaacaatcctcttcaccatccccttatccatcgccaagtgttcctccaccgccacctccttcaactccaccaccaccaccacctccatctccttcaccaagtgattgtggagacttttcctattgttcaagtgatgagacatgctgttgcctttttgaattctatgattattgcctaatatacggctgctgtgaatatgaaaatgctgtttgctgtactggaactgaatactgctgccctagtgattaccccatttgtgatgtccaagaaggactctgcctcaagaacgctggagactatctgggagtagcagctaggaagcgaaaggtggctaaacacaaattaccatggactaaaatagaggaaacagagataacatatcagcctctgcaatggagaaggaaccctcttgctgcaatgcgttgaaaaaagtgaaaaattacatatcatttcttaaaccttgaaggttgttttcaccttttttctttttctttcatttttgctttttcatttccagcaagcaaatccatgcagataagactaagaaaggggcatatttgtttagatgatgcatttgaatttggaaactgtgtttgtcattcttcaccagtggggtattaaaactactatgcttttgtttaaaaaaaaaaaaaaaaaaaaaaaaaaagtcgacgcggccg

SEQ ID NO: 192766 - DNA, 792 bp, Gossypium hirsutum
cagctactcaataggaccgaaagcacccaaaatcaaacgcgtggaccatcatcattttggcccaagtatgagttcacacgacaaacagattattgcaaagtctggactctaattcttcacctatccttcttctctgttgcctctcctttcgctgtccactagtccttccatcgcctacgggacctcttctatccagtattcgaggttttcatgtcgacgtccttccatcgccatcccatgagctgccttattagcttcccttggcatatacctaaaactcacacttctgaagataagggctcttcctttaatttctttaaccaaactacgtatttcagatttatcttcttctacagtgtttaacttgtgtataactgttaacgaatctccttcgatacaaatatcttggaagcccatttcctctgccatacaaacggcttgcaagcatgcccttgcctcggccatgaccgaatctgagatatacgcccatgaaaagtagtaactgccggctagctgtacatcccgcattgtaacctccatggctacaatctctgtacaataagctttgacaaagctcactacttcattgacttgttcgcggactccttaatgtgtgatgagactgtccccctcaaccctctcaagacctgctgtgaaaagagacaatctctgaataggtggctaacagtttcctcttctgcttgacaaaccggacataaagtgtctgctgccaactttcgaagttttagattatataaagtaaggatgtagttattagctatttttcacatg

SEQ ID NO: 192767 - DNA, 557 bp, Gossypium hirsutum
gcgttcgccagtcgagagtgacacacatggcattgggatggagcctgtgcatgccgatgaaagaagagttagatctgccatcgatgatgacttcgaatctgatgtgaggaccaacatggagttgcagttgccagaggagctacacgatctgtcagcagcccaagaagccgggactgcattcatactagggcactcacatgttccagcaaagcatggatcatctgtttttaagagattggccattaactttgggtactatctcttgagagggaattgccgaggaccagatgtggcacttaacgctccccccagtatctttgctagaggctggcatgggttatgtggtgtaagcctctgatgtaagtaggtttggtcgttttgcgtgttgcatatggccgacctgtaaagaaatatatataactggtccaagagaggttcacctgctttcgtcacggtccgcacacggctaaagttcctacatccgatgtaatagagaaatgaaattagttttatcacgaaattctcaaattgcacgtcggactcttttaacaagatgc

SEQ ID NO: 192768 - DNA, 634 bp, Gossypium hirsutum
ccgggccaggagattgattcttttgaaacggacctagttgccagactggcttatttcatccgctatgattggcaggggagcggtcacactaatacttatgctggagatgatgcttcccactctgatgcatcatcacgtgaacgtagattcgcagccatagggacagtaacattttctggcacaccaggttatggaattgaggaaagtgtggaaccagcaagtgtatctattggattctcaacagtagagagtgtgacggatgtgattgagatgcaggctgtgggtgcgggagctgttgaaagaagagttagatttgcgattgatgatgatgactctgaatctgatgggcaaaccaaaatgtatgttcagttggaagaagagctgagggacctgatgacagcccaagaagcagggactgcattcatactaggacacacacatgtggaagcaaagcaaggatcttcaattttaaagagattggccattaattttgggtacaatttcttgagaaggaattgccgcggaccagatgttgcactcaaggtgcccccagtatctttattagaggttggcatggtttatgtggtgtaagcttcccatctcatgtaactagtttttgtagcttatatattta

SEQ ID NO: 192769 - DNA, 682 bp, Gossypium hirsutum
tttgtgctctggccgatgttgttagcatgcgctttatagatgggaatgaagggtcaactggtctaatgggaattgactactctacagctttctggctttacaaagagacgggctatagggcttatcgagttgattacatagaagatctcacaaatccatttgtgtccatgtattttggagcggcgtatttagcttggttatcagagtatgaagggagggaaaggagtctgcaattcatctttcatgcttatatttctggaccaaaaaatgtacatctcgaagaaacgtgtccggagtggctaaagtttgagcaaattttggcccgttatgaacgcacaaaaagccgtgaagggagctgcaacatcatttaacctgatagatatcagtggttcaccatcttttagatggttctcccatgaagttgtgctgaatgcatacaatggaaaccattttttaatgctaatttcactgtaagatttgaagaaaaaggggcgtctttttctgtctttttttaggttctttttaagatatctgtgtaaattgaacaagtgtacggctgtctctgtcatgtactaatagaacaaataactagaaagcgtctggtggcttttcacaataccggatgcaatcaaataaataataataatttgaaaaggtttagattatgctattaatccctgca

SEQ ID NO: 192770 - DNA, 518 bp, Gossypium hirsutum
cccacgcgtccgaaaaatatagagttggcttgtggactgagatttgagggtatttttttcaacttttcaccgcttatagtctttcttggcctccatacctttctttctgtttgattttttgtttgtagttttgaatttttttcctcaaaggattatcctgatcctgattcaccaaataccagaaacatgagttttagtctaaagcaatccgctttagctgcatgcaatgatgtttcaaattcagttcttcagcgaagatcactttcttgcagatcttcaattttacctcctttggttttccaaaacaattcgaaaagaacaaatctttcactgtcaaagcctttgcatgtttccgctgttgagattattgggaaggataaagaacccgtgatcaagtgcagggcttatgaagctgataagtcccagcctattcaggctgcagctggggaagtgaaatcagaagctgcaaaaaggggtgaaaattgggatttattttgcaacttggtgggctttaaatg

SEQ ID NO: 192771 - DNA, 487 bp, Gossypium hirsutum
ccaaattcataatccccaaagtccaaattttaaaccttgggttttttctttttcttttaataaaattaacagccaaccaagcttggccaaagattagattttttttctttttacccactacgaaaaaaatagcacacagctaccaccttccctgcctttctcccaaaatttatattaattttcttttaatttttactttttttctggatatcaattttcccattttctcctgcttcatcttcttgttattgtgaattttctgttcttttttttctctcttttttaattttataaatgaaattcaaaatgggtttttcttcatcatcatcatcatcatcttcctctcttcttctggtctttctggataacagtcttttgttcaatacgctgtgttttgggttcttctatttgctcccatgaagctgatgtgttcattaaaaatattcactttcaatgctctccttcgatctctccaattccccctctc

SEQ ID NO: 192772 - DNA, 901 bp, Gossypium hirsutum
tcctcccattacttggtttggccactttgatgggaaaaaggaaaaaagaggcagaaatttagagaagttgattcaaacagaaagggtgatggaactgagcattcagaaaatagaagccttgattaggctaagtacgatagtgatgttggttttaacagcttgtttaattgggttggattctcaaacaaaggtcatcttctacgttcaaaagaaagcttctttcaaggatttgcgtgctcttgttggattgctgtatatcacttcattggctgctgcttataatctacttcaactatgctgttcttcattctcagcttcttacaaaggaacctcgctgcaatcttacgcatatctggcttggcttcgttatattttggatcaggcagtagtgtacgcagtgtttgcgggaaacctagcggctttggagcattcatttttggtattaaccggagaagagaacttccaatggctcaagtggtgcaataaatatactcgattctgcacccaaatcggaggatccttgctctgcggcttcgttgcaagcttactaatgttttccatcgcttccatctccgcattcaacttgttcaggctgtattcccccaccaagttcatgcacttgaaactctaatcataaattacggttaatgtggtattaaaaatttttaactttataaattgattgatattttgccatataatttaaaatttttaaaaataaaatgtttgtgaagttaaaaattgtcatgccaaacaattacttatgctaatattatcatttataaaagaaatgaaaaagttacaaaaaaaatgtagcattggatttttattattaataagattgctacggtataacttttgttcataaacacttaagttaggcgtatttttttttttgaat

SEQ ID NO: 192773 - DNA, 766 bp, Gossypium hirsutum
gaagagaggagaggaaaataatggtgggaaagaagagttatttggcaatgaggagtgagcgagaagcaactgatctcatcgcatctgacttccaagatctaatctttgctactaagaagcttgctaaccatgctatcaaattgggttcttggggatttgggaccacccttcttgaatggatcgcttccttcgctgcaatttatctattgatattggaccgtacaaactggaaaaccaatattcttacagcactgttaatcccatacatcttcttgagcctgccttccttcctgttcaacatcttgaggggagaagttgggaaatggattgcttttattgcagtcgttttgcgcttgttcttccctacacgtttcccagattggctggaacttcctggagcattgatacttctaatagtggtggcaccgagcttattttcaagcacaataaggaacgactggattggtgtggtgatatgcctaggcatagcttgttatctacttcaggagcacatcagagcatcgggtgggtttcgaaattcattcacccaagccaatggaatatccaacacaattggcataattattctgttggtttaccctgcttgggctttggtcactgacatcctctagattcagctgagctcagcttctggattgtgtgtgttttagtttcgtcaagttcatgatttgttttttctgcaccattaatttgttgagacttaccaaaattcattgttattgttgttccataacacttgtttact

SEQ ID NO: 192774 - DNA, 730 bp, Gossypium hirsutum
  unsure (1)..(730): unsure at all n locations
aaaaacagtagttttttttttctttactttgcttgctgtacatatacatatagtattaagtattgaaccctgagggaaagcgttgtcggcgcagggtcactttctgtcggcattgtctgtatccaacgaggggtattcgtttctaagttattcattcaatttttaaattcagaactgaatttgcattccaaagctgtctctgtgttgtgtttttttttttctttctcatttggtttcgatgatttggaccttccacctcgtttattaaagaaaaaaaaccaactacaaccattccaccaacttcatcaactattgctcacctcgattcctcatcactgctgtctctttttgtctgccctccccatcccttctttttttttcaccttgatttcacccattcgcactttatcttattctggatatctctcggtttcttcccccaaatcgagtttcttgtttctcgcttctttcgatgtgggaatgccggtgattctgctcctaaagagatcaatttgatttctcattgccaaatgaatgggaatacaggttaaatgtataataatttcaatcatagctgaagtagttccaataccagatgtcaaggaatcttgcagcaatattaggaggtgctgcangagccgtggcattggtggggatagttggcttgcttatatggttctgcctatttcacaaacggggtgtgtcaagaacatccgagaacggatcttct

SEQ ID NO: 192775 - DNA, 629 bp, Gossypium hirsutum
tccactattctccaccaatagaagaaaaaatttaaaaaaaagagcagcaggctatcacatgggtccaacaatggcggcaccagaagaaaagctgatgaagaggaaccaggagttagagggggaattgaaggagagtacggaaagagaggagcagatgagaaaggaattacgaaagatgtgggaaaggctgacggtggcggaagaggcggaggaaaggctctgttctcagctgggtgacctggaagcagagtccgtcaatcaggcccgtgcttacaacgcccacatactttccctcatggaccagctctccaagggtagcaaccttctcatcaacagccacccatcccctgcatccatctccatcctctgatttttcttttggctggtgttttttttatctatctaagcaaaggcatggggcttctaaatccgttaactttgggtatggtatggatccgtacatagtagttgttctagtttttggttttaattggagaaagttatgccgaaaggcagtggcggatatgcctcagttttctagctgtttcgaattgtgaaactcaaacaagcaaacgttgggccttttggttttaattggagaaagttatgccgaaaggcagtggcggata

SEQ ID NO: 192776 - DNA, 616 bp, Gossypium hirsutum
tcgagttttttttttttttttttttttttggcataattccttttctgggggggaaattgtttgaaccaacctttagtcacttgtccaaaattcatatccaaacatgcagcaacctcacaaaatcatctgtcttttgatttgataggaactcctttgtacatttctacacgatccttcaatgcgtctcgccttgggcgtgctatcttattattaggatcgaaaagcaatactttcttcaaatgcttttcagtgcagacttgtagtcttttttcttcttcgtatgcatcgccaagattgttccaagctgtgacatatcctggttgaatcttcacagcagtttcaaattgattgattcctttctcaagcttcccatcccgaacgtaactgacaccaagggcattgtaaacctgggcaagatcttgatcatctccatcccatttttcgattgcctgaagcaaaaacttatttgcagctgggtaaaatttccttctcaacataacggcacctagctcaaaaagctctgttgcactggcatctccacttctgacttgctcctcgtaaacagcatctccggtagtaatttcacttgcgtttgctagttgtgcagaaatcaacc

SEQ ID NO: 192777 - DNA, 557 bp, Gossypium hirsutum
cttaatgctaccgtggaagagaataaatcccttaacgggaaactttctgaggtttcaaatgagtttcagcaggcacagggcagaatacaacagctcatggctgaattgagtcagtcaaaggaggaactagttgagaaagaaagggaacttttgacactcaaagagttgcatgatatgcatgggagtcaatcatctgctcagataaaagaattagaggcacatgtaacaagcttggaacttgagttggaatcattgcaagcaactaacagagatatggcggagcagctagagaacaaagcaagtgaagcagaacagctgggagaacaaaatataggactccaatcccgcatttcagaactcgagatgatgttagaaaagagagaagaagaagtttttattctcacgaagaaacttgaggatgataacagagaatcattgtctggaatggagaacttgactgctcaggtaaataatctgctatcggagatggaagtcgttgcaagctgagaaggctctggtggaagaaaatttagcgtttaaaggtgatgaaacatcaa

SEQ ID NO: 192778 - DNA, 443 bp, Gossypium hirsutum
cccacgcgtccggtccactgcaagctcggctctcgattcccccaaaatccagctcttcctttcgtgaatcaaagattctcaaagatgactcaagatgtggagatgaaagagcaaccagctccgtccaattccgttccttcctcttctccatccactttgcaccatttgaaggaaattgcgtctctgattgagaccggtgcttatgaccgtgaagctcgccgtattttgagggctatacgacttacaatggctttaagacggaagttgaaggcatccgtgctttcctctttcctcagtttcgctcttacccctggatccgaggccttcactcgtctttcttcttatcttcctaaggtaatcttttgatggaacatcgtaatattcaattattaatgtggaagtgttttcccccttgggtgaagtgattgccattccatcctctt

SEQ ID NO: 192779 - DNA, 712 bp, Gossypium hirsutum
cccacgcgtccgcgagattccgtacatttcggatgaaaatgctgaagaggatccggaagttaaggtgacggttaaagacgaaggacccattggtaaagccttgaaggaagcgatgctggccaaaggcaaggctttggttttggagaaagtgagggattttgttcaagctatggcgaaaggtggccccgttaaagatgaattggaagccaagaaatcggctcccaaaactaatactactactggtaatagtaactcagctgcagtgtctaaggaggaagttgggatggagaaggaagccaaaaaggaagtgaagaaggaagggaagaaagggttcaagacgattacaatgacggagaagtttaattgtagagctaaggatatatatgagattttgatggatgagaatagatggaaagggtttactcagagtaatgctaggataagtaaagaagtcggtggtcaatttagtattttcgatggatcggttactggtattaacttggagttgcaagaagggaagtttattgctcagagatggagatttgggagctggcccgacgggattgattctactgtaagacttgttttcaatgagcctgagcctggggttactataatcaaactcacgcattcagatgttcccgaggaggacagatatgggaatgcgactgtggtggagaacactgagaggggttggaaagaccttattttc

SEQ ID NO: 192780 - DNA, 465 bp, Gossypium hirsutum
cttttccacttcaatttttttccctctctctaacagcgacgatcgatttttattaattttctttgccgtcggatctttggttttccattttgattcaatcaggattgcttcgttttgaacccaggcgacgatgaagaaggctatcggtcaaactgttagagagcttaagagagaggttaataagaaagttctcaaagttcctggaatagagcagaaggttcttgatgctaccagtaatgagccatggggtcctcatggatcacttcttgcagatattgcaatggctacaagaaactatcatgagtatcagatgatcatgacagtgatctggaaacgtctaagtgacactggaaagaattggcgtcatgtctacaaaggctctgactggtctggagtaccttgttggtcatggatcggagcgtgtcatagatgacataagagaacatgcttattaaatatcggctt

SEQ ID NO: 192781 - DNA, 614 bp, Gossypium hirsutum
  unsure (1)..(614): unsure at all n locations
gaaacaatggcgaccaatttgatccgtcgagcgatgaacatgacgccacgtttgccgtcatcgaaagtggctccagcgtcgcggctggtgttggaccgtccttacgccaccgaaacggaagctcaaaaggtggaaccgaaagcctcctccggcagcggcggcgccaacatgaaaaccttccaaatctatcgatggaacccagataatcctacgaaaccccaacttcaagacttcaaaatcaacttaaaagaatgcggacccatggtgcttgatgccttgatcaagatcaagaacgagatggatccatcgctcaccttccgtcgttcctgccgtgaagggatttgtggctcttgtgcaatgaacatcaacggttgtaacgggttagcatgtcttaccaagatcgaatctggaccatcggaaacgacgatcacgccgttgccgcatatgtttgtgataaaagatttggtggttgatatgactaatttttataatcagtataagagcattgagccttggttgaagcggaagaatccgccaccggcggcggggaaagagattccgcagtctanaaaggacagagccaagttagatgggatgtatgagtgtatcttgtc

SEQ ID NO: 192782 - DNA, 468 bp, Gossypium hirsutum
  unsure (1)..(468): unsure at all n locations
ccggaanggacgggccgagccacgcgtccgaccaccgcctttctctttctccttataaaccaatctcaaaaaatctcaatcatggaaggaaaaacgagacagaccctctttaaatccaaatccacatccttgtctcttcacatatatattatcgcgagcaatcgaatacctataaaagacactcctttcaaaatttctccctcttttctcctctcaattttgcctcctgttttgctgatttacatcttaaatcttgtaatttatgtcttctggtcttttaaaacggtgttgaatttgatttgatacgagataaaccagatcttttttgttccgggttttcgaagtttgctgatttatccttgccctaattgtttttagtagaagggttggatcggtaagatttgtgaaaaaatagatctaggtttgtttgtgttttggatagttggagaaaacccatagttattttag

SEQ ID NO: 192783 - DNA, 597 bp, Gossypium hirsutum
gaacgaggtgagcttgaagttgaagaagcttatgagcaggtcaaggaattcgaggatcagatggtaatggaatacggaaagatgatggaagctgagggcccaccaaaatttgatgagacggctgtaccggacttaaaaaagaacttggatgatccacctggtgagggaccaatccttaggtggcaaactcgggcggtgtttgctcctggtggtgatgcgtggcatcccaaaaacagaaaagtaaagatgtctgttacagtgaaggagctcgggctttcaaagcatcaattccgccggttacgagagcttgttggaaagagataccatccaggcgaaggtgaacttacaattactagtgagaggtttgaacaccgtgaagagaacagaaaagattgcctcagaacactcttttctctcatcgaggaagccggaaaagctaacaaaatggtggaggaggctcgtactaaatatgtcaagaacaggcttcgagccaatccagcattcatggagagattgcgtgcaaagacgatgaaattgcaagaatctactacattcccaataatgaactctttaaaggaaattaattggttttttttt

SEQ ID NO: 192784 - DNA, 1125 bp, Gossypium hirsutum
tctaagtttgctttctccttgtaattctcaacatctatatgtgtttaaaaaagagattgtaaaataatactcttgtatcatcactctcccaccccgaccgcttgattttgatcagacggtaatcatgccgatcagaaacatagccgttggccggcctgaagaagctactcatccagatgctcttaaagcagctttagctgagttcatatcaacgttaatcttcgtttttgctggatctggttcaggcatggcttttaataagctgaccgacggcggtgcaacaactccggctggtctcgttgccgcctctctagctcacggatttgcgcttttcgtcgctgtctcagtcggtgctaacatctccggtggccatgtgaatcccgccgttacattcggtgctttcgttggcgggaacattactcttttacgtggtatcctttattggattgctcaactccttggctcaaccgtcgcttgcctgttacttaagttcgccactagtggcctgggagtaccagctttcggactatcatccggcgtgggagcattaaacgcgttcgttttcgagatcgtgatgactttcggactggtgtacaccgtttacgccacagccgtcgatcctaaacgaggcaacttgggagtgatcgcaccgttggcgatcggtttaatcgtgggagccaatattttagctggtggggcattcgacggagcctcaatgaacccagccgtttcatttggaccagccttggttagctggtcctgggaaaaccactgggtctactgggctggaccacttattggtggtgggctcgctggtctcgtctatgagttcatcttcattaaccagacccatgaacaactccccaattattagtcaataaaatttccggtgtatttaatttttgttcagctttcttttgtgcttaatttgtggccgctgatcttgtttactttttttattataatcttctatcaatgatcatcgtgcatggctgatggtattttcaatttggaaaaaaactggtatttgagtgataatatttatttatgaaaaaaaaaaaccttggccgtttaaatttcttatatttttaaatataaattatattttcttctctctctttatat

SEQ ID NO: 192785 - DNA, 355 bp, Gossypium hirsutum
catggtggtggaataggaaaaggaggtggacttggaggtggaattggaaagggtggtggacttggaggtggtattggcaaaggaggaggcctcggaggtggaattggaaagggtggtggacttggaggtggtgggggcaaaggaggaggccttggaggtggaattggaaagggtggtggacttggaggaggacatggtggtggacttggaagtggtattggcaaaggaggaggccttggaggtggaattggaaagggtggtggacttggtggaggaattggaaagggtggtggcattggaggtggcggcggctttggtaaaggtggtggcttcagtgacgctgctggaagtggtg

SEQ ID NO: 192786 - DNA, 970 bp, Gossypium hirsutum
cccacgcgtccggaaaaccttaacctctttgtcttcatctcatcctattcctaccttgtcccgctctataaattgggtgaatcaatcgtgtttggatattgagaaatcaccaagccaaagctgtttcatttcaacaagaatgtcgagcgaaagccagatatgggtgattccgttctttgggcaaggccatctcctcccatccatggaactgtgcaagcacatagcctctcgcaatttcaaagctactctcatcatttccttcaatctctcttcttctataccctcttccttccatgatcatcctctcattcaggttgcccaaataccctcttcaccgcctactccaccagagctcagttccggcccccatcatcatcactcagatttagctcagggcattgccagtctgctggagaatacctcccaacctgcctgtgccgtaatagataatatgatggattggacagcagacattttcaagaagcttaagattccaacaattgcgtttttcacctcgggtgcgtgttcagcagctctggagttcgccatgtggaaggctcgcgtactaaatatcaagcctggagagacaattttgcttcctgggttacctgaagaaatggctttgacagattccgatcttaaacaaggcccaccacctggaccacctcctccccagcttgggggcttcgggtttccacgtgggcctccaggaccaccaccaccgccggcagcgcacggctttcctcttggacatccaccaccgaaaatgggaccaccccaaccaggtggacaacccccatggatggaaactgccaagggactcagtcgcattaatgctgaataatttgccatgagcttgaatgcccatctcttgactatttaaggctcccaattggtaaaccactttggggtgtttggcccctattgccccacagttttggaaatcatcccattccttactccacgattt

SEQ ID NO: 192787 - DNA, 686 bp, Gossypium hirsutum
ggaacaatccctggcatcggagttcccatgccattatcagttccatctcttgatgcatcttctcaaggggatcaaaagcagcttcatcctggttccttgccttttggagctcctcctcttcctcctggaccacatccatctcttctagccaatcagcagcatggatatcaacaaaaccctcaacaaattcagcaacagcagcaacagggaatgcaacagcaaatgcctcctatgccaatgggacctccaaatatgcagctacaacctccatctcacatgcccctgcttccacatcctcatttacaacgccctcctccccaaatgccttctcttggtatggcttcacaaatgccaggatctttgaatccaccttcatcaatgccaacatcacatccaatgccaatgcctggtccaatgggtatgcaaggtacaatgaatcagatgcctccttcaatgccacaaggtcattttatgggcatgaatccaatgcactcaggatcattacccaccagtggtggcccttcagttggaggttttccaaatggtatgcaaaatatgcagggccctggaaatatgggtggtggccaaatgtatccacagggtagtggattcaatcgtgcacaaggtggtcagatgccaatgatgcctgggtacaatccatatcagtctggtggtcagtctggtat

SEQ ID NO: 192788 - DNA, 979 bp, Gossypium hirsutum
  unsure (1)..(979): unsure at all n locations
naatngnttttttttttttttttgaagcacatccaattgagcacttgattctctttgatatctccatgattttttcatctttattcataccatcaaacataggcaaacacaaggataactgtaacccggccccctacccgtatcaacattttattgaactataactaacataggataactagttggcctcttcaaacaaagaccagaccccaaaccaaaccaaactgctaaaccacaaagcagacatcattgcaaagatcccatccccagattgcatcattttcaattcttagaaaggaggagcatagagctggagaaccttctgccaggacggtctgctactaatatcatcccaccaagcactcacatgcttcctgctggttatcatgtattcccttcccatttgacccaccaagtactgagtaaatggtaggtggctcagatcagcaaggctgaagaaatcaccggccaagtacttgttctttgacagcctctcctcataaatatccagaactttgcctagcttttcctcgctttccttgatcaaattttcatcaggagggaaccccatcttggaagcaaacatcaaatgtagggtcaaggcgtaaattggtgggttgaaattgtgtgcctcaacctctagccaattttccacttgacccctttcctctactgtctttcccagtagatcagtcccttgtgatttgtatttttctgcatagtaccttatgattgcacgggattcatataaaacataatctccatcttgagtgacaggaactgttccaaaaggctggagcttgagaaattcagggtctttgtgctctcctttaagcaaatcaacagggacagtctcgaattcaatctccttttcaataagacatgcaatcactcgctttggagaagcaaaggctgggccatacaccttcaccaccattgttgtagtccttggctgactgtccaaattcggacgcgtggg

SEQ ID NO: 192789 - DNA, 887 bp, Gossypium hirsutum
  unsure (1)..(887): unsure at all n locations
aatcattctcaatttttagaaaggaggagcatagagntggagaactttttgccaggacggtctgttgntaatatcatcccaccaagcactcacatgttccctgntggttatcatgtattcttntcccatttgacccacaaagtactgagtaaatggcaggtggctcaggtcagcaaggctgaagaaatcaccggccaagtacttgttctttgacagcctctcctcataaatatccagaactttgcctagcttttccttcgctttccttgatcaaattttcatcaggagggaaccccatcttggaagcaaacatcagatgtagggtcaaggcataaattggtgggttgaaattgtgtgcctcaacctttagccaattttccacttgacccctttcctttactgtctttcccagtagatcagtcccttgtgatttgtatttttctgcatagtaccttatgattgcacgggattctgaaatcagcctccgatgaagcaggggttacaaaaatcgcaacaaagaaacggcagagaaataaatccactcaaaatcagtctccaatgaagcagtggatttcaaaaaccacaaaaaacagattctagcgtgtgtgtgttttggcctttggttacccaaagctaaaaaaatgacaggaaaaaaatttaaaagagaccgagagagagaaccagtaaagaaatgggaggagatttggattgaagagatatatttgaggatttgttatgaaagcagaagaaatgaggacagaaattaactctgcaatacctatggaagaagaagcagaaatcgatgagggcagaaaaaggaaacgaaaataagaatcgggtaaggatgccctaatcggtgctgaatggggggaatacggacgcgtggg

SEQ ID NO: 192790 - DNA, 946 bp, Gossypium hirsutum
ggcaccacagactgttcctccctcattaacaggagcacttgctatagttccgcaaccatcgaaggataaatttgagcccaagtcagcagtttgggctgatacattgagcagaggactggtcaatttgaatatatctggacctaaaacaaacccactgtctgatattggagttgactttgatgctattaatcggaaggaaagaggttggaaaagcctgccccaactgcaataacgtctactgtcacaatgggtaaagctatgggatctggttctggaattggccgtgctggtgctagtgttctcagagctccagcaaatcctatggtgggttccggcatgggtatgggaatgggtggtggtcctgttggaggtgttggcatgggaggctatgttggtatgaatcaacaacctatgggcatgggaatggggatgaacatgggcatgaacccaggcatggggatgaacaacatgggcatgaatccaggcatggggatgagcaatatgggcatgaatccaggcatggggatgagcaatatgggcatgaatccaggcatggggatgagcaatatgggcatgaatcaaggcatggggatgaacatgggcatgaatccaggcatggggatgaacaacatgggcatgaatccaggcatggagatgaacaatatgggcatgagcgcaggcatggggatgaacatgggaatggggcaggcaacccacatgcaatctcaaagtgggatgcctggcggttacaaccctatgatgggttccagtggctactctcaacagcaacatggtggtggtggtggttaccgatgagaaatcattgtcaagtagagtaacggaagttacatccctgcttgtgatgcaagattaaaagaggttgaaatagcaagacccaggtgtcgccatcgaattccagagtttagtggcagcggcctgatgatgc

SEQ ID NO: 192791 - DNA, 439 bp, Gossypium hirsutum
aaaacattgagaaggttctggaccgtggtgaaaaaattgagcttttggtggataaatcagaaaatcttcgctcccaggcacaagatttcaggcagcaggggacccagatgaggagaaagatgtggttacagaacatgaaaataaagctgatcgtgctcgggattctgatcgccttgattctcatcatcgtactgtctgtctgtcatggcttcaactgttgatgaatcactcagttgctatattctattcatttgcccactcattgatcggtgttgtagctgtcaccagtaatattgatgctcctcatagttagtagttacagttttctttaattccacgtccttttctgctgtagcctaatatcagaagactctctgcatatatactgagattcgaactatggaaattgaattttgaaatatataaaaatatcaaataa

SEQ ID NO: 192792 - DNA, 600 bp, Gossypium hirsutum
catttctgttcggaaataattctaaacatgtccggtggataccctcaacaccctcccggctacggttacggttccccaccagctcagccttacacagccgctccatacacagctggagcaccgccgccacctcaaccgtacggtactccatacgccgctgcaccatacggcgcaccttctgctccctactctgcccctccaggcgagaaaccaccaaaggacaagcaccaagcgcatggcgtcggtggtgctcctccagttcacagcggaagctatcctcccgcaggaggctatgcgagcccgttcgcatctctgttgccgtcggcatttccaccggggacagatcctaacgtcgttgcctgctttcaaatggctgatcaagatggaagtgggttttttgatgataaagagttgcaaagggcgctttcttcgtataaccaaagcttcagtttgagaactgctcgtttgctcatgtatctcttcactaatactaacaccagaaagatcggtccgaaggagttcacttcagtgttctatagtcttcagaattggagggccatctttgagagattcgatagggacaggagtggcaaaatagat

SEQ ID NO: 192793 - DNA, 390 bp, Gossypium hirsutum
ggctagtgaaaacagccttagccaagcagccccatggccctggttgggtattggtacgatttcatttgttttggcgttgtagcggctgccttcatcgggtcattatgggtactatggaagaaagaagccgcgtctagatgcgacgaggaaagcgtgtacgagagcctgttagaggctcgaccggacgccgacggctttatacgtgccacaccgagggctcatgttggttccaaccagttatggaccagttgttggatcacggtgcaccctggatggctagtgctcactcgtttcgtttcattcgcggtcatggcggggttcttggtgtgggatatagtcgaatgggatgcttccatctttgtgtactacaccgagtggacatttgtattg

SEQ ID NO: 192794 - DNA, 532 bp, Gossypium hirsutum
gaaccctctgttaatctcatcgtcatttcctgactgtttgatgtttttcttttgctcgatctgaatctggttaaaataacagaagaacaatggaagagctgaaatcagctgtggaggagcacatggaattaatggcggatctagttcagaagctatcctcggagcttcgttcgggcctccgacccgcctatgataactttatgggcttcttccatgcaatcgactggaaggagccatggttaatgtgcttactggcattccatgttttcttattgatagtaacaatcttctcgaggaagaatactaacttccagatgtgtttgttccttctggcattgctcggtgtttattttgcggagttactgaatggattccttggtgacaactggaagaaatttgcaaaccagaactattttgatccaagtggactttttttgtcagtactctggtctggtcctcttctcattatcgcaatcatcatcttgataaatactctcttttccatgtgttacctaatagttagatggaaaaa

SEQ ID NO: 192795 - DNA, 708 bp, Gossypium hirsutum
gcatcgcgtattgaactcgggaatcatccttaccaatgaaactccattgaaagatgacaaggaagaggaaatggccaaatccgcattggctttgtttcgagccaaagaagaagagattgagaggaagaagatggaggtgagagacaaggttcaggcttatatgggacgcgtcgaagaagctactcgccgcttgtctgacattcgagaagagcttgatgccctgatagatccaatgagaaaggacattgcatttctgcgtaagaagatagacaccgttaaccgggagctgaaaccattgggacagagctgccagaagaaggaaagagagtacaaagaagctcttgaagccttcaatgacaagaacaaggagaaaacacaactagtcagcaaattaatggagctggtgagtcaaagcgagagattgaggaggaagaagctggaggagctgagcaaaagtattgaaacacttagctaaaaatggtgctgctgactaaaacaacatacatgatgtgctttgcgtgttgtaatttgactgattgtgtcatatattttattgctttactggccatgtttttcagctggttcttcaattaggaaagtagccactgagcaggtgtcaccaaacatgtcaacttttatttgctcctcgtgtttctatctaactcaaccataataattttgtccaataaaattatatatatatatatt

SEQ ID NO: 192796 - DNA, 454 bp, Gossypium hirsutum
  unsure (1)..(454): unsure at all n locations
ctacaaaaaaacccaaatcacagacaaaagttcacaaagaacccaaaagttgattacttttttgataacccaaaacacgaaaatgggtgcttctgaatcagttcctcaaaaatcaatccatgaatttacagtcaaggattacaaaaaccaagatgttgaccttagtatgtacaacggaaaagctcttcttgttgttaatgttgcctctaaatgtggactcactgattcaaattatacccagttgactgatctttacaacaaatacaaggaccaaggactggagattttggcattcccatgcaatcagtttttgagccaagaacctggtaccagtcaagatgcacaagaatttgcttgtacaagatacaaggctgaataccctattttccaaaaggttcatgtcaatggtccaaagacagagcctgtctacaagttcttaaagacanacaaatct

SEQ ID NO: 192797 - DNA, 687 bp, Gossypium hirsutum
taccctctttacgcttcagcttctcttcgactgtgtagtggaatcgggatccatggcggccttgcagtacctggaatctcttcgaaatgagcatccagagctagccgactggtatagttctctagcagatctgtatcagaagaagctttggcatcagctcactctcaagctggaacagttcgttgctctcaccgtctttcaggctggagatgcactgatacagttgtatcataattttatcactgactttgagaccaagattaatcttctcaagcttgcacattttgctgttatagtttctcggcagtactctgacaaagaagcttctactagttatcttgaaggtgtgatcgaaaagcttcaggctactaaagagcagcgcatagaagagccaattatttatattaagatgcaaattgccaaatttaagcttgagcagggtgaccaaaaggagtgcaagaaacttcttgatgatggaaagagtactcttgacagtatgactgacatagatccttctgtatatgctacctattattgggtttcatctcaataccataaatttcgccaagaatttgctgacttctacagaagtgctctcctttatcttgcatacacatctgtggcgtccctgtcagaatcctttaagctggatttagcatttgatctgtccctttctgctcttttggg

SEQ ID NO: 192798 - DNA, 854 bp, Gossypium hirsutum
cttgctcttgctcttcatccaccgtccggaagcgcttgagttaattttaagtgtaggtcagccttaacaaaaaaatgtctcggagatatgatagccgcacaacaatcttttcccctgaaggccgtctctaccaagtagagtatgcaatggaagccattgggaatgctggctctgcgattggaatactatcgaaggatggtgttgtcttggttggtgaaaagaaagttacttccaagcttcttcaaacctccacatctacggaaaagatgtacaagattgatgatcatgttgcttgtgccgtggcgggaataatgtctgatgcaaatatcctaatcaacactgctagggtgcaagctcaacgatacacatatgcttaccaagagccaatgcccgttgaacagttggttcaatctctctgtgatacaaagcagggttatacccagtttggtggtctccgcccattcggtgtttcatttctttttgcaggatgggacaagaactatggattccaactttacatgagtgatcctagtggtaactacagtggatggaaagctgcagctattggtgcaaataatcaagcagctcagtcaatgttgaaacaagattacaaggacgatatcacgagggaagaagccgttcaacttgcgctgaaagtgctgagttaaaccatggacagcaccagccttacttcggagaaacttgaactggctgaggtttttcttacaccttctgggaatgtgaagtaccaggtttgctcacctgattctctgagcaagttgttggtgaagtttggagtgacccaacctgccactgaggcttcttgagttagctttctttattttccattcatc

SEQ ID NO: 192799 - DNA, 773 bp, Gossypium hirsutum
  unsure (1)..(773): unsure at all n locations
ccgagatacagctgaagaatgcaatggcttccaatgaaacaagtcaagaacatcttaatgaaatggaaaccgttattgattcactaaaagtaagcatttatgaagctgaaagtagagctgaaagtgcagaagccaaggtctcagagttaacagatgcgaacttggaacttaccgaagagttgaattttcttaaaggtaataacgagaaaagcacaaagaaggtgacctcactagagaagcagttgagggaatcggagattcaactacagcatgcaaaagcgtcttccgaagcaagtcaggagcagcaaaacatgctctactctgcaatttgggatatggaaactttaattgaagatctaaaatcaaaggtttcaaaagctgaaagtagaaccgaaggtgtggaggagcaatgcattgaattatctgaatctaacttcgaacttaataacgagctaggcatcctaaggcatgaaattgaatgcttggagacatctttgaatcaagctaactttgaaaaagaggcaaatgcaaaagaaatcagtcataggaccaagttaatcacagatatggttgcccaactagctacagaaagagaacgcatttaaaagcagctatcttcaatagtanaagagaaggagatattggtgaaaaaagtacaaatattgtaaaagccgactctcagcagtctgtactctggagtgatgatggcatgagatactgtctgatagtgatcacttgagctcttgtncaaaacattctaaagcggcaccttn

SEQ ID NO: 192800 - DNA, 489 bp, Gossypium hirsutum
gtcaatataaaatttagacccagaaaaactgcaaccccaattgtttgaactgaaattattgtaggataatgttgataacggtcagggaagcttcttcttggcctctcaccttcaacctctcctctttctcttctcctaagccttctccaatactcaaaaactctgtttgcagagccagtttaagtgttcatccaaaacccacctccaattcccaatcatggaaccttagtcttctttctaacagccaaaaaggatctgtttttgatcctttgggtatcaacccagacgagtcttcaggtttaaatcgtgtttgggatagttttctatccttgttaacacctacatttgagagtacctcaggtactagaaaggagaaatcttcttcggctagaggagtggcagctgcaattgacgacagttccattgaatttggggattccttcaaaggcccattaccaggaaaatttctcaagcttttagcatttttgg

SEQ ID NO: 192801 - DNA, 1052 bp, Gossypium hirsutum
cccacgcgtccggaaaaacctttcttgttattttcactatctccctattcccatacaacaacatatccttcaaattcccgcaactgttcaaccaatcaagaaatcctgtgtttcagatcataactttgacgcaattctcacataacccagaattttctttttcttttttggtttttggtgctcaaaaaggaagtcggtcttttttttgtttgtttgtcactgttgattacttgtttttcaagttgatttttattatttctgctatttttttaactttctttttgttcccttgggagattctggttgtgattatgaataataactggagaagacaaaaaggtgaaattcatcatcatcatcaaggaatgcaggggacaagatcatattcccgaaagccatctcttgctacgtggcagccgactgttccttcatgggagaagaagttttgcactctggtaggcgctgtaccgtggcgtaaacttctcgaaaccaagagatttatgtatctttatgacaacgtagtccagtggaatgactcagctggtgaagaggcgtttcataatgctaagaaccgattttgggccaagattaatggccttccttgtgacataagacttcctgatcctgatagttatatcgataaaatcgattgggactctgaaattgatcctgaactgcttctggacttggagagaaagcccaaggtgcccgacacgaaagattaaaatgaaaagttgcaaatttcggaatcccctcttttgaaaaaacattcctttgggggtttgggggatctttaaacattgttcaggggaaaaatctgcttttaattggaaaccttatattgtaaatttctggtgccctattgggacctcatatatctgtcctgtacttgaggaacactttagtaatggcctaatgatacatatttccttgggacaatcctattgtctcgtcgttataaacatggactagagaataggtttcctataaaacatagagctcgactcattgagcgataatcatagttacggatctttatccactacgggacg

SEQ ID NO: 192802 - DNA, 877 bp, Gossypium hirsutum
  unsure (1)..(877): unsure at all n locations
ttctcccgccccctttttttttgaaaatataacccacttagagattgataaccccaaaaggatcatatttattatcaaccaccggccattcaagtaattctaagctctcacagggtatctatcaatgcaatcaagccatgggttatcccttgaaggcttcctcacacgacgcatggatcgccaaaccacacttgttgcatttaaacccagaaccgaatgctatttgccagatcctatcccctcttttaaccctttctttagcttccaaataagccaattcgtaccatatgctgctgctcgatgtgttgccgaaccggtgtaaggtcatcctcgatgcttccatgttgttttcgctgagttccaagttcttttgcagctcgtctagcaccgtcttgcttgcggcgtggacgcagaagtgttcgaaggcgagcttgtagtcggggatgtatggcttcgacgacggtgatagggaggttttggatttatcgccgccaaagaaatggcgccaaattagggtggcgaagaagaagagttgttcggagaatgggaggacgagcggacccaatgttgtgatgttggttttgagggcgtcgccgccgatttccattaggtctttgctgactttaagacctttgaaaccttgttcatcttcttcctggtagattgacctgaaactccggtcatcggcacctttatgcgtccgtacaaggtgttcaagccgatacttagcacgncggtagtcacgacggcggttagacaaaagcacagcggagcatcccatcctgaaaaaacaattcgggacaagcatggacctgtcccgtccagggtaccaattataacccaccatctcagtgctcaccaccaccgcatagttatt

SEQ ID NO: 192803 - DNA, 363 bp, Gossypium hirsutum
cgtgttttttttttttttctttttttaataaaaaaaaattacgatacaatgttttcgtcatttctttcttttaaaatataaaaacattagactacataatttcaacacttttttcatacaattaattcatcgaggaaagttttccagaaaccatgaaacaaacatatgccaattttccaatcattcttcccccccccaccccccttttcttctgaaaatgtaaacacaaaaagatcataattattatcaaccagcggccattgaagtaaatttaagctctcacagggtatctatcaatgcaatcaacccatgggttatccctggaaggcttccttacacgacgcatggatcgccaaaccacac

SEQ ID NO: 192804 - DNA, 312 bp, Gossypium hirsutum
aaaaaaaagtcgtataagaagaaaaaccggatgtacggagctagcagttgaacaagtgaagtggtgatggcagttccagttatgatttaaatgtgagtttgttttacattaaaaacatgtgtggttttagttgaagatttgagtcatctataaattgggtgtttgtgagagatgtagatttgtaaattgtgtatgaaatgaagagggagttggagactcatatttttggtcttgtttcagtttgtatttgatatgctgaactcttaaaacttgcttctgcttctataatcattgtttgaatttattggataa

SEQ ID NO: 192805 - DNA, 361 bp, Gossypium hirsutum
  unsure (1)..(361): unsure at all n locations
ncnggacccacgcgnntccgattttgtatatttcaatattcccttcgccaagggggaaaacagaccgaatagctccctaggttgtgtattcattgtagcaaaacctgaaataacttgagagctaacttgtaactaaatgtttgttcaagttatagctgcaatagataaatcatttttgttcaaaatccaaaaaaaaaaaaaaaaataaaaatacaaatataaaactaaacaaaaaactctctaagatggtttttgtggaatgaactaaatggcttgcacccaattttgggctttaaataaaattgtggttattcacataatgattccccgttaaaacaattcacagaattgcctttccccc

SEQ ID NO: 192806 - DNA, 485 bp, Gossypium hirsutum
accattgtcagtttcagagttgttattctttcaagtaagactctgatttctccaatagtggcaactgtatataatggcgatctggttgcaagacaatctgatctaaaacccattacctttccttcatccaccaccaaaagggtccccatcgtcaaatgcgaagcctcgttttccaccaccactactacagagctcgagcctgtcttcacctccgtcaagtccttcgctcccgccacggtagccaatctcggcccaggttttgacttcctcggcgctgccgttgatggtctaggcgacttcgtttccctcagcatcgacccttctgtcagccccggtcatgtcaccatctctgagatctctgggtcctctaaactctcttccaatcctctctttaactgtgccggcatcgctggcattggcactatgaaaatgttgaatgttcggtcttttggccttttactcaaactcgaaaagggcttaccttt

SEQ ID NO: 192807 - DNA, 549 bp, Gossypium hirsutum
  unsure (1)..(549): unsure at all n locations
gcaacatggtggtctgattcatcccaaggttctggaaattatgggggtgctcaggcaaatggtcctcatggtggacaaggtggttatggtggtgggtatggcggtgcacagggccgacaagctcagcaacagtgattctatcacaagaaagacaacttgatctcaaactcttctgcgcatgaccttctctttgctcttgtaattgtgatggtttcttacgcgagcagcaacaggagaggttcaagttggatgataaatcaccttgggaccggttggattgcttgaaaccctgtagtttgcagtatctgttttgctagtcataataagtagttttgaggtgtaataggtgcctttcttcagttgtgctactgagtgtagttttaatttggcttgctttatatttttttcttgctgctccaactaccttcatatcnntatggtagntgtttaagctnatattagtcttatataancttaaattctgtatctatcttgcntgttttgagcccattttatatgtatatatnatatcatcctagaaaaatttcc

SEQ ID NO: 192808 - DNA, 324 bp, Gossypium hirsutum
gtgatggttcttactcccagcagcaacaggtgaggctcaagttggatgtcaaatgcccttgggatcggttggattgcttgaaaccctgtagtttgcagtatctattttgttagccataataagtagttttgaggcataatagatgcctttattcggttgtgctactgagtgtagttttatttggcgtgctttctttctttttgtcttgctgctccagtaccttatgtttggtagtgtttaagtaagccttaatagtttatatatcttaaatttgtgtataataattaatattttattaaattttaattttaaaataaattaatg

SEQ ID NO: 192809 - DNA, 483 bp, Gossypium hirsutum
ctactgtctccactttctcttgtatcaaaacctgccaattttgctttctataaaaaaggttaattttatttactttttgttttttgttttgttcgattttcaaaataaaaatggcaacagcagcagcagcgacaaagacaatttctcagatttcttgtttctcttcaatcaaccggagatttcagctctatcatcgttcaacttttcgtccggttactcgctcaaagtcatttgttgttacaagtgttgatgggcatggtgctgaaactactggcaatcaacctaaaactacgccaagctatattgctggagaatcaaaagcatttatagaagatatgcctaggacatacccaaatgcagaagagcatgttcctgaaaatacaagtgatttagaagaggaacatggtatcatccaacaaaagagggcagcaaaaatccatgatttctgttttggaattccttatggtggtcttgttctaagcg

SEQ ID NO: 192810 - DNA, 685 bp, Gossypium hirsutum
cccacgcgtccgcccacgcgtccgcgataccgcgtaaaagactaaaagcaaaagaaaaaactaaaataaaagtcggtattggcttcgaagcagagccataaaatcacctgtattaagcaatctcttccttaaatccaaccattaaaaaccctcgtttcttaaacatcagatcggatccttgaagcctccatcgattcatttttggtacggttttcgtagtatcgatcaaacatgagtttcctctttgggaagagaaaaactcccgcagagcttctgcgggagaataagaggatgctggacaaatctattagagagatagagagggagaggcaaggtcttcagaaccaagagaagaaactgattgcagagataaagaaaactgcaaagcaagggcagatgggagctgtaaaggtgatggcgaaagaccttatccgaactcgacatcaaattgaaaagttctataagctgaaatcacagctccaaggcgtatctcttcgaattcaaacattgaaatcaacacaagcaatgggagaagcaatgaaaggcgtgacaaaggcaatgggccggatgaacaggcagatgaacttgccgtcgttgcagaaaattatgcaagaattcgagatgcagaacgagaagatggagatggttagtgaggtaatgggtgacgctattgatgatgctctgg

SEQ ID NO: 192811 - DNA, 539 bp, Gossypium hirsutum
cgtaatttaacatggggcccgtgtttttagttcactgctggaaaaaacctgtaaattagtgcttctcaaggaaataaaataaaattcagggtgtccgagaaacggcagtgaagaagctttaaacaaagagccttttctcttcttcgttaatggcagatctttcgttttcttgatttgcatgttgagtttacggcctcgttagtgacttaactgagtttaattgttctgctgagttgaattaggaagtcatcggagatgctggacggaatctggggccgtggttttgcctccaaatgtaagtcattgataaaactgataaagagtcggatcgatgtaataaggaggaagaggagtgcgacgcttatgtttttgaagaaagacatagctgatctgctcgctaatggccttgatattaatgcttatggcagggtggaaggatatatagcttgaatcggtcctttcctcttgctacgattttgttgagaaatgctgcgagttcgtgtctaagcatgtttcacttatgcaaaaactgagtgact

SEQ ID NO: 192812 - DNA, 1221 bp, Gossypium hirsutum
cggacgcgtgggcggacgcgtcgcgcgcggagaagctaagctgagaaaagatgcaggcgattacgaggcgattagggcaccaatctctgaggccaactgcttcaatctcttctatcaagtctatttgcgctctctccgatcactactatggaggtgatcatccgcgatacggatctacactggcttcccacaagggcatgggccacctcgttcgcaagggcaccggtggccgatcttccgtcagtggcattattgctactgttttcggcgctactggattccttggtcgttatcttgtgcaacaactggctaaaatgggatctcaggtgttagttcccttcagaggttccgaggataaccctcgtcatctcaagttgatgggagatttaggacagatagtgccaatgaaatacgatccaagggatgaaaattcaatcaaggctgtgatggcaaaggctaatgttgttatcaatctcattggaagagagtatgagacaagaaactttagctttgaggaagtgaaccatttcatggcagaacaactggcagtgattgccaaagaacatggtggtatcatgagatttattcaagtttcttgcttagggtcttctctgacatctccatcaagatttctaagagctaaggctgctggagaagaagctgttttgaaagaacttcctgaggctactgtcatgaaacctgctgtaatgattggtaccgaggatcgtattatgaatcgatgggcacattttgcaaagaaatatagttttctcccactcattggtggtggatctaccaaaatccagccagtatatgttgttgatgttgcttctgcaattgttgcggccttgaaagatgatggaagcagcatgggaaacgtttatgaattgggtggaccagagatctataccgtgcatgaactggctgagcttatgtatgagacggtccgtgaatggccacgctatgtaaacgtacctttaccggttgcaaaggcaattgccatgcctagagaggtattactcaagaaagtgccattcccactaccaaatcccgacatcttcaatctggatcagatacatgcatttgcaaccgacactgttgtctcagaaaatgcgttaacttttatggatttgggtattgtgccccataagttgaagggttacccagtcgagtatcttattcaataccgtaagggcggtccacaatttggttctacagtca

SEQ ID NO: 192813 - DNA, 433 bp, Gossypium hirsutum
aattgtcccaaagagaagtgatcctaaggaaaaatggcagaagaattgacgttggatttggaagagcttaggcagcttcaaagcatcgcaaagagaccacgcactctatctcttatttcctctgagattcgcaacttggagaagaccttgaaagagaatgaaaatggggcttctcctgttactgctccacaaattccaactcccatttcaacctcagttaagactccagttaaccctgcactgagttatgttacacttgcctccttcagctgggatcaagataacgataaagtcaagatatatgtctctctggaaggagttgaacaggaaaaaattcagacagagttcaagccaatgtcattcgatgttaaattccatgacgttcaaggcaaaaactacagatgtgctgttccaaaattgaacaaggaaattg

SEQ ID NO: 192814 - DNA, 536 bp, Gossypium hirsutum
ttttcaggaaaagttgctgggttaatagcagaaaccattcagggagttggaggagcagttgaactagccccaggatatctgaaacaggtttatgacattgtacgcaaggctggcggtgtctgcattgccgatgaagtacaaacgggatttggtcgcacaggaagccattattggggttttgagactcaaggtgtcattcctgacatagttaccatggcaaagggtatcggcaatggattaccattaggtgcagtggtcactacaccagaaattgcacatgtgatggctcaaaaaattcagtttaacacttttggaggaaatcctgtatgttctgcaggtggacttgcagtgctcagagttatagacaaggagaagcgtcaagcacattgtgctgatgttggttctcacttgatcggacgcttgagatctttacaggacaaacatgatatcattggagatgtcagaggtagaggcttaatggtgggtgtggaacttgttaccgacaggaaggagaagacaccggccaaggcagaaac

SEQ ID NO: 192815 - DNA, 611 bp, Gossypium hirsutum
cactctgtcaaagtctttagggctccttccaaagacacggagtcttgatttggatacgctctaacatttgtccgtacagataattcatactaaagatttaaccggaaaccaaagccatggaaatgtccaacgatctcgataggttgctctttttcgagcaagctcgtaaaatttccgaggctacttacgcttccaatcctctcgatgccgataatttgaccagatgggccggagctttactggagttgtctcagtttcaaagcgttccagattctcagaaaatgattcaagatgctatttcgaaactagaggaggctttatctattaaccctagaaagcatgatgctttatggtgcttgggaaatgctcagacttcttttgcgtttctgactaacaaggaggacgaggcaaggccttatttcgaaaaggctgctcaatatttccagcaagcagtcgatgaggacccgagcaatgacatttaccttaagtctttagaaatatctgccaaggctccaaaattacaccaggaaatcattaagcatggtttaggttcacagacgcttggggctggaccttctacttctacttcctccaattcaacaaagactgca

SEQ ID NO: 192816 - DNA, 433 bp, Gossypium hirsutum
cccacgcgtccggaaatttcgaaggctttgaaaaaaaaaaaaatcgaacgaagaagaatttgttaagcgatcgatctgtggattacgatggaagtgcctgtctcatgggatgctctacgcaaacaggcaaggaaactcgaagctcagttggatgagcaaatgaattcatatcgtaagttggtctccagtaaggcttcgataaaaaatgacttggaagagaatggtattgaatctggtatcgaccgactactaaaacagctacaagaagtaaatatgaaaatgcaagactgggtctcatctggtggatctgaaatggtttctcataccttgactaggcatcaggaaattcttcaagatctcactcaggagttctatcgtcttcgctctagccttagagctaaacaagaacacgcttctctactgaggattttag

SEQ ID NO: 192817 - DNA, 725 bp, Gossypium hirsutum
ggataagcttgtgactgttgaggatatagttcgtcagcattgggctacctatggtcgacactattatactcgatatgacatatgcgaatgcggatgctggtggagcaaagagatttagacgtgcaaatatggttaaaaggatgtcatcccttgatgaagttaataccatcgtgaagggggcccgatcagatgtgtcaaaagttgccaacgctgatgagtttgaatacaaggatcccgttgatggttcagtttcaaagcatcaaggtattcggtttttgttcgaggacggatcacgattggtcttccgtctctctggaactggttcagaaggtgcaactatccgtctgtacatcgagcaatacgaaaaggatccatcaaaaataggaagagattcccaagaagctcttgcccctcttgtggaagttgctctaaaactttcgaagatgcaggagttcaccggccgatccgcaccaactgttatcacatagattcattctgctacacgttaaggtgtgtttgatttaattttgagcaaaagaaaacataaataaagtcctcataagatacgctatatatatatctatgtcagtgtgcatccttgccatgagtacttgagaatggcaaaaggcaataatgcttactcatcaaaatttttgacaatattatttgaggatttattttggtgacccaaaaaacgaacaaataagcgtgtttagatcccttgt

SEQ ID NO: 192818 - DNA, 680 bp, Gossypium hirsutum
gggctatctatggtcgacactattacactcgatatgactatgagaatgtggatgctggtgcagcaaaggatttaatggcctatctggtcaaattgcaatcatctcttgatgaaatcaatagtagtgtgaagggggctcgttcagatgtgtcaaatgttgtcaatgctgatgaatttgaatacaaggatcctgttgatggctctgtttcaaagcaccagggtattcggtttttgttcgaggatggatcgcgattggttttccgtctctctggaactggttcagaaggtgcaactatccgcctctacattgaacaatacgaaaaggactcatcaaaaactggaagagattcccaagaagcgcttgctcctcttgtggtggttgctctaaaactttctaaaatgctggagttcaccggccgatccgcacctacagttatcacataaactcatacccctataagggttgtctgataaggcacggttctactttggaagaaagtaaaaaaatgaataagctgttcaaggtctgtctagataacctacatacatctttgtcattctgcgtctgtctatgactacattggagtatcctaagtgactgataatactctagcaaaatttttgacagagttcataaaaaataatttgaacgttacagatgcctatactcgtatctttttt

SEQ ID NO: 192819 - DNA, 687 bp, Gossypium hirsutum
cacttggccaaaaaatcgaagacaaagaaacacaggacagagagagaaactaagggtgaaaatggcctggtgtagtttaaggtctattcacgttccaaccgtcgatgtcggattactacgcactcgctccccgttagccgctgtcggtggagtcgttgccggctcttcatttttgcgatcttcctccagaaatggctctccttttgcttgcttaagcctatccacttctcctgggattaaggaggctgtggcaactgacaaagctccagcagcattgggaccatattctcaggccatcaaggccaataatcttctctttgtctccggtgttctcggtcttattccagagactggaaagttcatctcagacagtgtagaggatcaaaccgagcaggtactgaaaaatatgggagaaatactgaaagctagtggtgctgactattcctctgtggttaagacgacaattatgctagctgacttgaaagacttcaagaaaggtaatgagatctatgctaaatactttccttcaccagcaccggctcggtcgacttatcaagtagctgcattgccattggatgccaagattgaaattgaatgcattgcggcactcaaggcatgatgacaggggagtttgaagttataaagtaggaaactaagctcttaaagaggttatgtctcatttgcagg

SEQ ID NO: 192820 - DNA, 598 bp, Gossypium hirsutum
aaattcttaaaactaagagtagcaccagccgggggccaccacgccagccccttcccgacgttcaccctctaccggagggcctccgacgtccaccacgtcattcatccgccacccgctccccgacgcctgttgtgttatggatccagaagctgcacgaactgcccgagaatctctagatctggcatttcacatgtcaaatattctcgatacgggtcttgatcggcatactctttcggtcctcgttgctctctgtgatttgggtttaaaccctgaggctttggctgctgttgtcaaggaacttcaaagagaacctccaccatcaaccccgttttcatcttcttcatcacaagtaccttaacttcggagttcggtattttctagtaaactttccagtaatgccttagaagtttgagttctaatttgttctggttgatgtctttcagtagaaactttcttaggttttctcatctcgaacacgattgtgcttagtgttcaccttgtgcgtagtctctgtatctaattcgatcttacctactatgtttgatcaattatatattcactctggtgaactgccttttcttctttatcttggagcttt

SEQ ID NO: 192821 - DNA, 634 bp, Gossypium hirsutum
  unsure (1)..(634): unsure at all n locations
cactactcactagtcgactcgcaactgataggactgagttaggtataaccaccaaaaaaaatttcctaagtaaaaaagagatggctccctcttttgtaactaacggcggtgtagccgccgttgaaacgactccgttcgcaggacgtctcgcctccgtttacagcgaggtccaaacgagtcgtatcgaccacgctcttcctgtaccttctgttctcagaagccccttcaaaattgtcgatggtcccgctagttccgccgccggcaaccctgatgagatcgcaaagctgtttccgaatctgttcgggcaaccctcgtctatgctggtgccgaacggagtagacagtatcggatctgatcagaagctaaagatcggcgtcgttttgtctggagggcaggcacctggaggtcacaatgtgatttgcggaattttcgattacttgcaggagcgtgctccaggtagcactttgtatggttttaggggtggtcctgctggggtcatgaagggaaaatacgtaaaattgactgcagattatatttacccttacagaaatcagggtggctttgatatgatctgtantgggagagacaagattgagactcctgagcagttcaagcaagctgaagaaacagcagc

SEQ ID NO: 192822 - DNA, 944 bp, Gossypium hirsutum
gagaaatggcggtgatggagagttcgaaaccaacggtggagatcaacggattgagcttcacgtatcctggaatcgacggtcatccaccgccgggatccaagcctcttatcgacggtttctctctcaccctaaacgctggcgatcggtgtctcctcgtcggatccaatggcgccgggaaaacaacgatattgaagattctgggagggaagcatatggtggagccgcacatggttcgagtattgggaagatccgctttccacgacaccgttttggcttcctccggtgatctttgttatcttggaggagagtggagacgtgatgttgcttttgcaggattcgaggttccaattcaaatggacatttcagctgagaaaatgattttcggagttgcaggtattgatcccaaaagaagagatgaactaattaaggtattaaatattgatctttcgtggaggatgcacaaggtatccgatggtcaaaaaaaacgtgtccaaatttgtatgggtctccttaagccattcaaggttcttctacttgatgagataacggtggaccttgatgtgctagcaagagctgaccttctgaatttccttaggaaggaatgcgaagagcgaggtgccacgatcatctacgcaacacatatattcgacggtcttgagaagtggccatcacatattgtttacgttgctcatgggaaattgcaattagcaatgccgatggataaggttaaggagattagcaattcgtcgcttatgagaacagtggagagctggttgaggaaagaacgagacgaagagagaaagaaaagaaaagagcggaaatcacaggggctcccggaattcgaaaaccaaaccgagggaagccgtgtgacaggggatcctgcccgagccgctgttcgttcactaaacaacggttgggctgccgggcggttgaactccacggtc

SEQ ID NO: 192823 - DNA, 1105 bp, Gossypium hirsutum
gccagcttttgcttggttatggtatggacttatggctaaataagtataaaatctctaacagaaactaaaaaaaaaaaaaaattataaagaaagacgaataaggaaaaaagggtgttaaagaccaaaggccaaagccattttttctttcttttggtttctggggagagaccagtttgggcaaagatggtgaagaagtggaaaaaggctttgattttggtgctgtttacagtctgcattctggggtttaagccaagatgtgtcaatggcgaaacagatcaagcagatgcttctgctctaggggttatgtataccagcttaaattcaccacagcagctaacaggttggactgctagcaatggtgatccatgtgggcagtcctggaaaggtgttacttgctcgaacaaacgcgtcactgaaattaaactgtcaaatcttggactttccgggtcggtgggttacagctttcaaagtttgacatcattgaaagaattggacttgagccacaacaattttgcaggagatataccatattttactcttccgaacttgcagcgattaaatctcgagtataatcaatttactggcagcgtcccttttgccatcagtcagatgccttctcttcagtacctaaatcttgctcataatcagttgcagaatgcgctgaacgacatgtttggaccactttcttccctctccacactggatctctctttcaattctctgaacggtggtctgcccgagagttttaagaatcttaccagtataagctctatgtacttgcaaaacaaccagttttcaggcactattgatgtcctcgcaaatcttcccctcgatactctagatgtttcgaacaaccgttttactggctgggtacctgatcaactgaaaagtatcaatttgaagaaggatggtaattcatggagctcagggcctgcaccttctcctccacctggtactcctcctgccactagaaatagaaagcacaaatctggcagcgatggttctgcatcagatagtggttctggtggtgggagtagcagctcaggaattggaggtggagccatagctggaatagtgatatcaatccttatatcggggctatagt

SEQ ID NO: 192824 - DNA, 963 bp, Gossypium hirsutum
tgcaggaaacaccactgcagctattgggaagggtttcgcaatcggatcggcagccctcgtttcacttgctttatttggtgcctatgttagcagagcaggcatcaagaccgtagatgtattgacaccaaaggctttcattggtctcatagttggagccatgctcccttactggttttccgccatgacaatgaaaagtgtcggaagcgcagctctcaaaatggtcgaagaggttcgtcggcaattcaatacaattccaggactaatggaaggcagggtaaagccagactacgcaaactgcgtcaagatatcaaccgatgcctcactccgcgaaatgatcccacccggcgcactcgttatgcttactccacttatagtaggaaccctttttggagtcgaaactctagccggtgtcctagctggtgcactagtttccggtgtccaggttgccatctcagcttcaaacacaggaggagcatgggataatgccaagaaatacattgaggcgggtgttagcgaacatgcaaagtcattgggaccaaaaggttcagaatgtcacaaggcagcagtgataggagacacaatatgggatccactgaaagacacttcaggtccatcactaaacatcctcatcaagctcatggctgtggaatctttggtctttgctcctttcttcgccgctcatggaggctttctcttccaattcatctaaatttcaagctcctcttaacaatacatacatacatgcgtgcctataattatatctatctgtatatccccagtacagtggtaagttggacgatattgcgaccctttcgtattactaataacatacgttaacgaaagtcaggccctgccttcaagttggttcttacaccaccatatcaattctatgatcgaatcaaatgatctttgtttggatgaactttaacatgtccgttatgccgttcatctcctaaaatcccc

SEQ ID NO: 192825 - DNA, 936 bp, Gossypium hirsutum
  unsure (1)..(936): unsure at all n locations
atacagaaaccaaactcccaattcccaaagctcaaaatcaaaaaacctaaatcagatctaacatttttttgtcaaaatttaccgcaaaagatatggctctagaatgggtagtgctaggctacaccgccggcgctgaagccatcatgttgctcctcctcacagttccaggcctcgacggactccgcaagggcttgatcgccgtcacacgtaacctcctcaagcccttcatgtcggtggttcctttctgcctcttcctcctcatggatatatactggaaatacgagatgcgtccaacctgtgacgccgatacctgtaccccttccgaatatctccgtcaccagaaatccatcatgaagagccagcgcaacgcgcttctcatcgctgccgctcttattttgtactggcttctttactctgttactaaccttgttgttaagatcgagcagttgaatcagcgagttgagaggcttaagaatcgcgattgagataagtgctgcgaattttagatctgttgtatttgggctacttctttttcttttctttttaataatctttttgtttgaatttcatctctgatgtgtttggatgatttgagagatttatcttgaaagaattatatgttgttattattggatctctgttattcaatttcgatttgattaaaaaaaagttggggtttgtttcaaaaaaaaaaaaaaaggtcggtctttttctttctttttccgtaccctgtgggctatacttttttcgtgctatcnnnnnnnnnnnnnnnnnnnnnnnnnnnnnnnnnnnnnnnnnnnnnnnnnnnnnnnnnnnnnnnnnnnnnnnnnnnnnnnnnnnnnnnnnnnnnnnnnnnnnnnnnnnnnnnnnnnnnnnnnnnnnnnnnnnnnnnnnnnnnnnnnnnnnnnnnnnnnnnnnnnnnnnnnnnnnnnnnnn

SEQ ID NO: 192826 - DNA, 365 bp, Gossypium hirsutum
  unsure (1)..(365): unsure at all n locations
gggggggnggntctagaactagggggatccccccggccggaaggattccggcccggggccatagggtttttccgatctataccaaaagaccacagggatggatctatggatttcctttttcagcagggtattttctttttcctttttcagtttggttcgatttttttaacttatttcctttctctctccactgtttcgaacccagcttctcttttgtcgaagccatcggagctcggtatttgttctcagcttcaagtgattcaccttcgttcgaatcgattgatcggtaatgtaacggcggatttctctcggttgtctcatttaaaagagcttgatttgggttctaacacgttaaatggtgaaat

SEQ ID NO: 192827 - DNA, 429 bp, Gossypium hirsutum
cccacgcgtccgtaaaagcaaaaatatcacttagtgtgtgagaaactgtaagggaaagaacacaagctgaagaacagagaagcgagggacaagagggtttcaagatcttatcagatcaaagctagaagataacatttgatggggagggaactcactgatgtgcatatggatgataagcccaacggtgttgtgaaatcgaacggtgtggtgaattcaaatggtgctctgagagttttggaagacactgagtcaaagaactacgaggtcaaggaatgcactgaagagaactcgattgtccataatggtactgtgaatgaagatgtgttgggtgtcaaaagctcaaattttggtaccgatatccctgatgagaaaaacgaaacgatcggagatcagaagttcaccgaccgtgtgaaattaagccctgtcgca

SEQ ID NO: 192828 - DNA, 400 bp, Gossypium hirsutum
gcacgaaaagaagttatcatcatcaagaaaggttgtcatccgtaatattaattacaggtcttcgaacaggaatggggataagggcagtgattccgaagataattctgatgaggatgagttcattgatggagattctctcaaacagcaagtagaggaggctgttggatcactagggaaacggcacaagtctacctcacgccatcataagaaacgcaatggaagcaagcatcgaaacactgtgtcctacgacgaagatgaaccgggaactaaaaatccggagggagaaaaacgaagcaatccctgggatactttccaaaacctgctcttgcaagacaaggatttggattcttctgaagtagataaacagcctgcaagattccaagacaaatattttgcagca

SEQ ID NO: 192829 - DNA, 869 bp, Gossypium hirsutum
cgccgctttgatattgctaggcagacccccaattgaagcactcttgagaagcagcttaggcaaccagttcgcagccatggtgaagtattcgaaggagtcagataatcccaccaagtcctgcaaggcaaggggctctgatctcagggttcatttcaagaacacaagggagactgcgtttgctatcaggaagttgcctttgggtaaggctaagaggtatttggaggatgttatggctcacaaacaggccgtacccttcagacgcttctgtggtggtgttggacgtacagctcaggcaaagaacaggcattctaacggacaaggtcgctggcctgtaaaatctgccaaattcattctagatttgctgaagaatgctgagagcaatgccgaggtcaagggtttggatgtggatgcactctatatttctcacatccaagttaaccaggctcagaaacaaaggcgtcgtacataccgtgcccatggaagaatcaatccttacatgtcttctccttgccacatcgagttaattttgtcggagaaggaagagcccgtcaagaaagaacctgagactcagttggcagctagcaagtcgaagaagtcccaagtatctgtgtagacggtcagcaaaagataaagattgaaattttagtcgatgaaggaagttgtatctgggaaatgatttctgtcttactctgcgagtaagtagttttgatgtttattcaaagtagaaagagtcgttagatgtcttttgaaacctggtttagtcaaatgttattgatctgagattcatgttggagatgtttgttttaatccatgattttatatgaagttattctgttgagggacagataatttaattaaatttaatataa

SEQ ID NO: 192830 - DNA, 911 bp, Gossypium hirsutum
ggctgacccccaattgaagcactcttgagcagcaacagaggcttcattcagatcacatatcagcagccatggtgaagtattcgaaggaacccgataatcccaccaaatcctgcaaggcaaggggctctgatcttagggttcatttcaagaacacaagggagacagctttcgccattagaaagttgccattggttaaggctaaaaggtatttggaggatgttatggcccacaagcaagccataccgttccgacgcttttgtggtggtgttggacgtacggcacaagcaaagaacaggcattctaacggacaaggtcgctggcctgtaaaatcggcaaagttcattctagatttgctgaagaatgctgagagtaatgccgaggttaagggtttagacgtcgatgcactccatatttctcacatccaggttaaccaggcccaaaaacaaaggcgtcgtacttaccgagctcatggaagaatcaacccttacatgtcctctccttgccacattgagttgattttgtccgagaaggaagaacctgtcaaaaaagagcctgagactcaattggcagcaagcaagtccaagaagtcccaagcttcttcttgagtgaacaaagtttgaaactttatcaagtcagttaatgtagtgatgtctggtctttggatttcatacactatttttgaagtttttgacattaagatgtgttggatggttttttatttcaaagcatgttttagtcaaatgttgtcttgagttatgtttttcttggagattttgtctcaattacagtgttctatgttatgtttcatttatatgacttttaatataaaacaaggttcgttaattggtaggttggtttggttgtaagttaatttgggttttaaagtttttgaattattttgatttaagcaa

SEQ ID NO: 192831 - DNA, 873 bp, Gossypium hirsutum
atgtattacagcgtaagacaaaagtaaagaggcgaacagagagcagatctcaaaccatttcattcatgtcttaacatcccaaataatatggatcgattgctgaaagctgcaagagcttccggttctctcaacttatccaatcgatctctcacagatgttccggaagagatctacagaagcttggatgctgttggggagggtgaaaaatggtgggaggctgtggagctacaaaagctaattttggctcataacaatatcgagtcattgaaggaagaagtgaggaacttacctttattgactgtgttgaatgttagtcacaataagcttacagatcttccggctgcaatcggacagctttctatgctgaagttgctggatgtgtcttttaactctatagcgacaataccagaggagatcggcttggcaacttctttggtcaagtttgattgttcaagcaatcgtattaaggaacttccatcctcacttggaaactgctcagatttatcagatttaaaggtatcgaataatttgataacaagcttgcctgaagatcttacaaactgtttgaaattgacaaaactagatgaggaggggaacaagttaacagcttaatctgagaatttgtttgcatcatgtacaatgcttacggaattcaatcaaagaacttgctgagtggtataccagagaacattggatgccttacacgtctcatccgtcttgatattcaccagaacaccgagtgaaatacagagttatgctagaaatcatccttttgtactgcatgataagtcattctggtactgtatgatgcaagaatttcaacaatcccaccatcagtatcgagttgctcttctcaaattttcaggaataatg

SEQ ID NO: 192832 - DNA, 546 bp, Gossypium hirsutum
  unsure (1)..(546): unsure at all n locations
agccacgtgatgatacaagttcgtggtaggcgtagaagctggtcaagccggtaaccaagctcaggtggtgatgcaaatgctcggtgagcgtagtagccccctcgggcatgctccttgtagaaccaagcgaagagctagtgagggccggaatggaatatcgtatgtagtgtagaatcggatctgaagctctttactaggattggaacaagcgaggaacgagtgaccacaagctccgcttaagcgctcgacatgcagttagctcaaaacatgttcatcatgtggccgagcgaagcgcacctgtgtgaagcagcctagcatcactttagatagaagcagaatggataacttacaactgaaagtaagttcttcggatcgatatctcgtacgacgtaatggagatcttggtctagatccggtggttcgcagaattcgggacctaacgatgtttggttcgtcccatgaacgggagcggacaattcccttttcggagaatggctgcaatcacaagcaagtgattgaatgagtggngggctccgaaagcacatg

SEQ ID NO: 192833 - DNA, 1891 bp, Gossypium hirsutum
cattaactcattcatacattttccttcattttctcagcgaattcgaaaccgaaaacgcaagaaatttttcattttttcttgattccaggcaacttttcaatctgggttttgcttgaatattcatattaactttgttttatacttaaaaaagatgacagaagcgagtaagaaaagcatgaatccggaaccagttcatgttcaaagcacagcttcgtcaaacgaaacaagatcaaacaacaatctccccaattttcttctttcagtgaggctaaaatacgtgaagctcggctaccattatttaatctccaacgccatgtatttaatgctggtgccgttgttagccattgcttcagctcatctctcaacgctcacggtccttgatttcgttcaactatgggaccaactcaagttcaatcttgtctctgttactttatgttcaggccttttggtttttttagccaccctttacttcatgagccgtccccggaaagtttatttggtggatttcgcttgttataagccggagcctgaacggacttgtaccagagagattttcatggagagatcgaatcttactggaagtttcactgaagagaacttggcttttcaaaagaagatactggagaggtctggtttagggcaaaagacgtatttgcctgaggcggtgttgcgtgtaccgccgaacccttgtatggcggaggcaaggaaagaagcggaggcagtgatgtttggtgccattgatgagctggtggagaagactggtgttaacgctaacgatatcggcatccttgtggtgaattgtagcttgtttaaccctacaccgccgctttccgccatgattgttaatagatataagcttagaggcaatattttgagctataatcttggtggaatgggttgcagtgctgggctgacttctattgaccttgctaaacaaatgctacaggtacatcctaactcttatgccttggtggtgagcatggagaacattactctcaactggtacttcggcaacgaccgatccatgctagtctctaactgcttgttccgtatgggcggtgccgcgatccttctatcaaaccggtcatccgatcgccgccgctccaagtaccaactcatccacaccgtacgaacccacaaaggagccgacgacaaatgccacaactgcgtcttccaacgtgaggacgacaccaaacggatcggcgtttccctctccaaagacctcatggcggtcgccggcgaagccctcaaaaccaacatcaccaccctcggtccgttagtcctccccatgtccgaacaactcctctttttcatcactttagtagcccgaaaagtcttcaaaatgaagatcaggccatacatcccggatttcaaactagctttcgagcatttttgcatccatgcaggtgggagagccgtgttagatgagctagaaaagaaccttgagctctcagattggcacatggaaccatcgaggatgacactttacaggttcggtaacacgtcgagcagctctttatggtacgaactagcttactcggaagccaaaggaaggatccgaaaaggtgatcggacatggcagattgcattcgggtcagggtttaaatgcaacagtgctgtatggaaagcattgaagaccattaatccagcaaaggagaagagtccatggattgatgaaattgatgaatatcctgtttatgtgcctaaggtggcccctgtttcttcttcttcttcttcccaaaaaaccatataattttcatcattcaaaggaagagaatagagagaaagagaggacttaatcagtaattattagaactatgatttattttttatttttttacatgtttaattgtgtgttgatttgaagattaatttattccaagttgaagat

SEQ ID NO: 192834 - DNA, 592 bp, Gossypium hirsutum
  unsure (1)..(592): unsure at all n locations
cctactcgtccgcccacgcgtccgcccacgcgtgcgcccactcgtccgcagctaccaagaaagaaggagaggaaggtgaaactgttgctgaggaggcaaagaagagcaaccatgtcttaaggaagttggaaaagcgtcagcagaaccgcaagcttgacccacatagtgacgatcaattcactagtggtacggcgactggcttgtatctcttcacggcctggtcagtgcggccgtgctgacgggtatatcttggaaggcaaagaactagagttctacatgaagaagatccagagaaggaagggaaagggagctgcctaaagttttgttacttgagatatcatatttcagaccaaatgtcccttttttaacctttctttcatcattttcagtagattttgagattgtgatagtggttacacttttagtatgaattttcaagtagtgaagttgtgtcttaattcaacagtattatcatataccttgagctgcatgttttttttgtacttggaatttagttgatatttaacttaatataaatggcagcctgttttgtgaatttgtattaaaaaaaaaacaaaaanaaaaaactcga

SEQ ID NO: 192835 - DNA, 704 bp, Gossypium hirsutum
tacaaatcacccccacctccagtgaaggctccagcacctacctaccattacaactcgccctccgccaccatcaccgatctcctcctcccccatactactacaaatctcccccaccaccagcccactctccctcaccaccatactactacaaatctccacctcctccatctccctcaccacctcctccatactactaccactcacctcccccacctgtgaaatcacctccacctccagtctacatctacgcttctcctccaccaccaacaccctactagatctaaaaagatcgaccacacaccgttcatgttgtagtttcgccagcaaaataaaggaaggtgccaaggaggaagggagatttggacatcaaagcagttccttttcaagtccatggaataagggtctaagcattacattggagagatacaattttgataattcaggcctacatataacttccacttctttggtagccatgttacacatgctctttatttattgtagtggcataagaaggaagtgagtgttttttctattttaattattgggttttcactttaatttattcgtgtatagaaatgtggccttccgtatgattgatgaagctttttctatttattgtgggcatgcatttgctatttggtggataatttggtgtactatgtgcactattagcaataaaagaatctatttgttccaatgtc

SEQ ID NO: 192836 - DNA, 529 bp, Gossypium hirsutum
caagagaagtccctttggaacacaacacaagctgacatgcttttatgaaatacggttcttttcttattctaatatcttaaatcagccgtggaagggaatggcgggtcatcatctccgatggagaaatcaaccaccttcctcattagaagatctatctacactttccttcaatactatcactacttcactgcaactgctgcaatccttgctttgccatactccctttcggttcttgtttcgcagttctttgtcccctcttctcctctgttaccatcaatccacaatcatctcaaagccattttcatggcggccgagtttcctccctcctcggacttcttcacggttctcagtttcaagatttcccacaccatgtcttcatcaatctgtgctcttcctttcaccctttctttcttcctcgtagccaaagcttccatcattcacctcgtcaaccaccaccataccccaacctgcccaccttcattatcttcggttttatccctttacaagcctctcttatccactttcatat

SEQ ID NO: 192837 - DNA, 427 bp, Gossypium hirsutum
tttttcccaaaaaaaccacaaattgttgcccgctggatcttcggttaaggctgggggatcgacctccactacctcgcccattcaactttaaaaaatcctaaatttgtttgaattttctggcgatactatggatgaatctttcttcgatctaatggaattcttgaagaaacctaccataaccgaaacattcgtcgacattttgttatgtgcggtgcccatatggttagccgtgatgatcgggctcttcatcggttgggcttggcgtcctaggtggaccagcttggtttttctaggtctccgatctaagttccggttcgtctggactgctcctcctgggttcggagctcgccgactctggctcgcctttactgctctttccgctttctctgtttgccgtacggttttctccaactttattaaagggaga

SEQ ID NO: 192838 - DNA, 574 bp, Gossypium hirsutum
atagtattagcttatttgaacataacatgattgtgttacatgtacagtttattaagttggtaaatttaatttcaatgccatattcttctcacacgaacaaaccataaattaagaaatggctaagggtagatgtcactaatatccacgcgggcggttcaagtttttctcaacgacggcagtttcctcagagccatggctgaggtagcttagagcggacattcggtatagacaagtaaacactaggatatgcaaaccaattgtgtagaaaaatgcaaacgttcgagcatacttgtttcccagaagaaaacgtccgctgctgagtgtgattctgtctctgaagcccagctccttgtatctttgatccctctccttttttgagaatgctgcaaagggattaatatcatcctcatatatcttcttgtacttggattcaacatctgaggtgaaaccactttcaagatcctcggcatacttctttgatcctctagaaattactttctcctggttataatcctggacataacgaatctttccataaagtttaacattatcagcttttgttttctccagttct

SEQ ID NO: 192839 - DNA, 449 bp, Gossypium hirsutum
  unsure (1)..(449): unsure at all n locations
gcgagnnnnnnnnnnnnnaacaaatcatacaacggggtgtatttatttgtgttggaagaacaaagaattgcaactcttattacaacacgaaagctgtgaagacatcctcaacaaaaaaaccaaaacaccaacttagaaaagagacactccgccaaagattaaccaaaaatatcattatgatttactgataatcacatgctatatacttgaaaaactattaagcgaattcgagtcagccatcatgtcttgcaaacaaacgtcaaacacattactcagaagaccacattcttgctgctgggaagatcttttgagtttgcccttgatcatcttggacgactttctgattaggctgccagtactatgatcactatcagaagcacaattccgaatatcaccaggagcaagcatgcctgcccacgcgtccgcccacgcgtccgcccacgcgtccg

SEQ ID NO: 192840 - DNA, 467 bp, Gossypium hirsutum
ggctgtctcactccggggatctgtgtgaaaaatccagatggatacattgaaataaaagataggtcgaacgacattatcatatcgggaggcgaaaacatcagcagcgtggaagtggaaaacagtctctatttgcaccctgcagtaatggaggcatcggtggtggcaagggcggacgagcggtggggagagtcaccttgtgctttcgtgacctgcagcctggggtggacaaatccgatgaagaacggttacctgaagacaaaatgtagttctgcaggtccaagattgcctgcatactgggttccaaattcagtgatatttggtccactgccggagtcggccacaggtaagattcagaagcatgtgctaagagcgaaggcaaaagagttgggacccgtcaggatgagtaagttataacttggaagttccaaaactaaattatcaggcatctaaatattgctgttattaac

SEQ ID NO: 192841 - DNA, 743 bp, Gossypium hirsutum
  unsure (1)..(743): unsure at all n locations
cttaaggccatttgttctttcagcagcgccgcccacccccttcccccgaagcagcagtgatcaccggcaatgggtatcgatttggtcgccggcggcaagagcaagaagacaaagcgaactgctccgaagtccgatgacatctacctcaagctcctcgtcaagctttacaggtttctagtaaggaggactgggagcaaattcaatgccgtgattttgaagcggcttttcatgagcaaagtcaacaaaccgccgttgtctctctccagattgattcaatacatgaagggcaaggaggataagatcgctgtggtagttgggaccgtcaccgatgacattcgagtgtatgaagttccggcactgaaggttactgcattaaggttcactgagaccgcgagggcaaggatcgagaaggccgatggggaatgtttaacgtttgaccagcttgctcttcgagcacctcttgggcagaacacggttctcctccgaggtccaaaaaatgctcgtgaagctgtgaagcactttggaccaactcctggtgtgccacatagccacaccaagccgtatgtgcggtcaaatggaaagaaattcgagagagctagaaggaaagaaaggggaacagcnnaggcttcagggtttgagtttcacactatcaacctatcatcaccganatgggtattttccctcttttttttattgtgattgagcatgtttttctnttntggatatcccccccctcccccccg

SEQ ID NO: 192842 - DNA, 565 bp, Gossypium hirsutum
  unsure (1)..(565): unsure at all n locations
accactctttatgtcacctaaaaaggagaacctcgattatctggttaacttattgaaagacggaaagcttaagacggtaatcgattcaaagtatcccctaagtaaggctgaggaagcatgggctaagagcattgatggtcatgccactggtaagatcattgtggagcccgaatctatgaaatattactttatacttactgcagtgatgcttggaggtcatgctgcttgtgtgtataattaggatttgtgtatcttgaaaattatgtgtatgaaatgtatggttaatatacacgttggatgatattgcaaaagttttcttaatgtgttataagctttgttttcttttcccacccnnnnnnnnnnnnnnnnnnnnnnnnnnnnnnnnnnnnnnnnnnnnnnnnnnnnnnnnnnnnnnnnnnnnnnnnnnnnnnnnnnnnnnnnnnnnnnnnnnnnnnnnnnnnnnnnnnnnnnnnnnnnnnnnnnnnnnnnnnnnnnnnnnnnnnnnnnnnnnnnnnnnnnnnnnnnnnnnnnnnnnnnnnnnnnnnnnnnnnnnnnnnnnnnnnnn

SEQ ID NO: 192843 - DNA, 674 bp, Gossypium hirsutum
atcaaatttacctcttaaagacgtcgctgattctctcagggaacttgaacaataagttatctggtttgaccgttttacaaacaatacaagatgttttttgatgggtacggttatcatgggacatcttttgagcagagttaccgatgttacccggcatctttcatcgagaagccgcaaatcgaaagtggtgataaaattataatgcctccatcagcccttgatcgcttagcatctctgcatattgattatccaatgttatttgagcttcggaacgatgctgccgagcgtgtctctcattgtggagtactggagtttattgcagaagaaggcatgatctatatgccatattggatgatggagaatttggtcctacaagagggagatatcgtgagggtgaaaaatgtaactcttccaaagggaacctatgttaaattacaaccccacacgaaggactttttggatatctcaaacccaaaagctatcttggagacaacactgaggaattattcctgtttaaccaccggggatagtattatggtggcatataataataaaaagtattacatagatatcattgagaccaaaccatccaatgcaataagcatcatcgagacagattgtgaggtggattttgctcctcccctgaattacaaggagccaaaacggcctgctgt

SEQ ID NO: 192844 - DNA, 572 bp, Gossypium hirsutum
cggacgcgtgggcacccatcctactactactctcgcccaagcgcgcttaactgcggagttctgatggggtccggtgcattagtgctggtatgatcgcacccatcaattcttgcgcattctatttatataaaggctacccctgatcgcgcttgagcctcgaatttgaatttaaatacgaccaaataacgtttcgagtgatttattccgtaaataactaattagttatacgatgagatataaaaaaaatagaaaaaaaatttaatgagatataaaattggaggggtgcaacacgaggacttcccaggaggtcacccatcctagtactactctcgcccaagcacgcttaactgcggagttctgatgggatccggtgcattagtgctggtatgatcgcacccatcaattcttgcgcattctatttatataaaggctacccctgatcgcgcttgagcctcgaatttgaatttaaatacgaccaaataacgtttcgagtgatttattccgtaaataactaattagttatacgatgagatataaaaaaaatagaaaaaaaaattaatgagatataaaat

SEQ ID NO: 192845 - DNA, 633 bp, Gossypium hirsutum
gtgcacctctctcaatttcttattcactttgaggtttgagcagatcggatggttcgttcatccaaggtggccaatgtgggaaccggatcggggctaagttctgggaagtcatatgcgacgagcatggagtcgacaacactggaaagtataacggtgactccgatctccagctggagcgtatcaatgtctactacaatgaagccagtggcggtaggtatgtccctcgcgctgttctcatggatcttgaacctggcactatggactccgtcagatccggtcttttcggccagatctttcgtcccgataactttgtcttcggtcagtctggtgctggcaacaactgggccaagggtcattataccgagggagctgagctcattgattctgttcttgatgttgtcaggaaagtggctgagaattgtgattgcttacaagcatatagttgatttcaattttccaaggttagcagattttggagctgcaatatctggtgcaaacaaattgcaatgccagcaagttattgaagagttggatgtgcataagcggttgcaacttacactggaattagtataaaaggaaatggaaatcagcaagattcaggtctgaatcatttgaagcatacttttaagactt

SEQ ID NO: 192846 - DNA, 1636 bp, Gossypium hirsutum
cccacgcgttcgcccacgcgttcgcactcccgtcctcacatttcccaacaaaaagcgaaggaaatcattttcatcaatcccccccatcacccttctttatctttcccacggaaacgaagagcaaatcagaaaaccttgtgaagaaaaaatgagggaaatcttgcatatccaaggaggccaatgtgggaaccagatcggggctaagttctgggaagtcatatgcgatgagcatggaatcgacaacactggaaagtataacggtgactccgatctccagctggagcgtatcaatgtctactacaatgaagccagtggcggtaggtatgtccctcgcgctgttctcatggatcttgaacctggcactatggactccgtcagatccggtcttttcggccagatctttcgtcccgataactttgtcttcgggcagtctggggctggcaacaactgggccaagggtcattataccgagggagctgagctcattgattctgttctagacgttgtcagaaaagaggcggagaattgtgattgtttgcagggttttcaagtttgtcattcattgggtggcggtactggatctggaatgggaacccttcttatttccaagatcagggaggagtatccagatcgcatgatgttgacattttcggtcttcccttcgcccaaggtatccgatacagttgttgagccatacaatgcgaccctttctgttcatcagcttgtggagaatgctgatgaatgcatggtgttggacaatgaagctctttatgacatctgcttccgcaccctcaagctcgccactccaacttttggtgatcttaaccacctcatatctgctaccatgagtggtgtgacatgctgtctgcggttccctggacagctaaactctgatctccgcaagctggccgttaaccttatccccttcccacgattacacttcttcatggttggatttgctcccttgacatccagaggatcacagcagtaccgggcactgactgtgcctgaactgactcagcagatgtgggatgctaaaaacatgatgtgtgctgctgacccacgccatggccgttacctaactgcctgtgcaatgttccgtggtaagatgagcactaaggaggttgatgagcaaatgattaatgtccagaataagaactcgtcgtactttgtggagtggatccctaataatgtcaagtctagtgtgtgtgacatcccacctaagggtctgaaaatggcatccactttcatcggaaattcgacctcgattcaggagatgtttaggagggttagtgagcagtttacagctatgttcaggaggaaagctttcttgcactggtacacgggcgaaggaatggatgaaatggagtttactgaagctgaaagcaacatgaatgatttagtagctgagtaccagcaataccaggatgcaactgctgatgacgagtacaaagagcaaggagaggaagaagaagaggaagctgcttgagtgaataacgatatgtatatatgtttgttgggtgatgtttatgttgtcaaatcaagattgacataacataatatgtatggttgctgtgggtttgagggttcttccttgtatctttgatggattgatttcttgtgtctctgcatttgc

SEQ ID NO: 192847 - DNA, 656 bp, Gossypium hirsutum
ccctcgtttccgcccacgcgtccgcccacgcgtccgcccacgcgttcgaccacgcgtccggttctgatgggatccggtgcattagtgctggtatgatcgcaccaatcaattcttgcgcattctatttatataaaggctacccctgatcgcgcttgagcctcgaatttgaatttaaatacgtccaaataacgtttcgagtgatttattccgtaaataactaattagttatacgatgacatataaaaaaatagaaaaaaaaattaatgagatacaaaattggaggggtgcaacacgaggacttcccaggaggtcacccatcctagtactactctcgcccaagcacgcttaactgcggagttctgatgggatccggtgcattagtgctggtatgatcgcacccgtcaactcttgcgcaatctattcatataaaggctgccccttatcgcacttgcgcctcgaactttaatgcaaattcgaccaaatatcggtccaaattatttatttcgcaaaacgcaaataacgaatgaggtacaccacgtggagaaaatgcaactaaaaaaaacattgtatcaaataaaacgggaggggtgcaacacgaggacttcccacgaggtcacccatcctagtactactctcgcccaagcaggcttaactgg

SEQ ID NO: 192848 - DNA, 668 bp, Gossypium hirsutum
cgcaaagaaggcaatccattttccccgagtaaaacgccaaagaaaacaaaaaatatgagagaaatcttgcacatccaaggtggtcaatgtgggaaccagatcggggctaagttctgggaagtcatatgcgacgagcatggagttgacaacactggaaaatataacggtgactccgaccttcagttggagcgcatcaatgtctactacaatgaagccagtggtggaaggtatgtcccacgcgctgttctcatggatctggagccgggcactatggattccgtcagatctggtccttttggacaaatctttcgccccgataacttcgtcttcggacagtctggtgctggcaacaactgggccaagggtcattacacggagggagctgagctcattgattctgttcttgatgttgtcaggaaagaggcggagaattgtgattgtttgcagagttctgatgggatccggtgcattagtgctggtatgatcggacccatcaattcttgcgaattctatttatataaaggctacccctgatcgcgcttgagcctcgaatttgaatttaaatacgaccaaataacgtttcgagtgatttattccgtaaataactaattagttaaacgatgagatataaaaaaatagaaaaaaaatttaatgagatataaaattgg

SEQ ID NO: 192849 - DNA, 514 bp, Gossypium hirsutum
  unsure (1)..(514): unsure at all n locations
cccacgcgtccgcccacgcgtccggttctagatcgcgagtctgccgcccttttttttttaaattaggtgcctatcaatggacgggcataatttggaagactcaaagcaaagcactgctgatatgtctgttttcgtgcaaactcttcttcaacaaatgcaatccaggtttcaaacaatgtcggagtccatcatcacaaagattgatgaaatgggagaccgtataaatgagctggagcagagcatcaatgacctaaaagcagagatgggaatggagggctctccatcccctttagccccaccaaagcaaaagtcagacggagcgaatcaagaggatgactctgcattaaaactcggccagagattgtatttagcggttaatggtgaatgttatatcggtctaatttggggattatcttgtttcgagactactttcgtgcaagagagagcagggacattactatgtgtccctgctttccagttnttntacatgtaccaagtttttcttctgtgaact

SEQ ID NO: 192850 - DNA, 347 bp, Gossypium hirsutum
caagttttcgaattgaagctacggtttaacgaaccagcgggaaacaacaatccaagatccactgccaatcaatggacgggcataatttggaagactcaaagcaaagcactgctgatatgtctgttttcgtgcaaactcttcttcaacatatgcaatccaggtttcaaacaatgtcggtgtccatcatctctaagagtgttgtattgggagaccgtataaatgagctggagcagagcatcaatgaccttaaagcagagatgggtttggagggctctccatcccctttagccccaccaaagcaaaagtcagacggagcgaatcaagaggatgactctgcataaaacttg

SEQ ID NO: 192851 - DNA, 411 bp, Gossypium hirsutum
gagaaactgaaaaaggcgaagtttggattgagatatagacaagtttctcttggtgcagcaacaacacaagtccgacttgctgcatcacttggggcatcattggtttggctatccggtggattaagcttggtccagttgttaatccaagaaacattaccgtcttggtttctatcagcccataatccagatcatgatggtggggaacctggaggtctagttgccatgctgagcggcgtgggcacttgcatactttgtagtgctttgtggtaccttggtgtggggtgtggattcctcctcaccgacatcaaaacggcgaccaaaggtccttggggcgcatttggaatttcttgcgagcgcaatagatggcaaaatatcacttggatgtgagcatgccacttggcatgcgtatgt

SEQ ID NO: 192852 - DNA, 524 bp, Gossypium hirsutum
gatgattttttatagtggaagttgagaaaatgggttcaaaagatcatttggatagaatgtttgataggctcggtgaaataaagaaatattgtttataatttaatagttaaaatggaatggaaaaatagaactcaagcgaagaacgattcaatactatatgaagtattgccccgggacttatattgcttaaggtgggtttaatggattgtcgaagatggaccttgacccgttacctatagagaggtaggaaccaaaggtataaaaaggtggatgaacgccacaccaggatggtgataagttcaagaagtcgggttgacgccactagcgagctagataagtcagaacgagactcgtacgaaataggataggaggaaacctcacaatcaagttttcaataatcaaattctgtaaccttttacaataaacaagtaagctatttataagcctaaaatgcctattgatattcggcatctatgttgttcacactaacttaaattctgttcacacaggtatttaacatgttc

SEQ ID NO: 192853 - DNA, 668 bp, Gossypium hirsutum
tatcaacatcttcaacaactttttttcttttcatccacaggagggagaggaatcttaatcctcctcaatttgtcggtgaacttagagttgaactcgaagtagtcactctgggagatggtttttgtgtttggctctttacttagtatcttatacttggcacatgacagcgaatgcagtaatctaaccaagtcttcatgggtcaagttcaactgagccataatctctgaatagctcagccgatcagaagcattgaagagcagtaggacagcagcctgataagtagaaacaataagttcaatagttttgtgttcaaacttgccattaatgtggcaagttcccagcgagtatatccatgtaagctttctgtgctttgtttttgtttcataaaatcctttgaaaacttccacacacttgatcatctcagcagggagattgagatcgaaagatttataactcggccaacatcctgttgttagaactgtaactgttaaatcaatccccggatgtgcagcggggtggttcctaagatagtcctcaaagctagcttggttttccctcgccaatgtcagatctgtgaccatgccttccatctttgaggtgaactgtccaccacattgctgacttatgttagtcagaatactcctttcatgatcatcattagcactacg

SEQ ID NO: 192854 - DNA, 370 bp, Gossypium hirsutum
gatcaaatgaaataacacaaatttaagactaaataggagaggaggtaaaagaattgatagagcgggcatctcatctccagtggcatcaagccaaagcttggcacagtaccagtgacacaaaagtactagagaaccactccatcaattacatagcccagaatctgcaagaagttcaatttgggacattccccgtccacattagtgagtaataatgcataatatctttcagggcctcgaagttccatccaactctatgtactgcaagttgcaagaataaacaaaagacaacaacacctagggtaaacaaccaagcgctgcagaggacatatatataatataatggcaaccatcactggaaacatttactggt

SEQ ID NO: 192855 - DNA, 981 bp, Gossypium hirsutum
  unsure (1)..(981): unsure at all n locations
gaaagcaaagttcctttcctgggcatctgccttgggatgcaaatagctgtagtagagtatgcacgttcggttcttggcctgtatgatgcaaatactgaagagtttgatcctcaaacctcaaatccttgtgtcatatttatgccagagggttctaaaactcatatgggaggaacaatgcgtctgggatcaaggaggacttacttcaaggttcctgactgcaaatctgccaagttgtatggtgatgcaacctttgttgatgaacggcatcggcatagatatgaggtcaatcctgatatgatatcacaacttgaagcagctggtctatcatttgttggcagagatgaaagtggtaggcggatggagattgttgaactaccaagccatccattttttattggtgttcagttccatcctgaattcaagtccaggccaggaaaaccgtctgcacttttctcaggacttattgcagcatcatgtggggagttggatgaacttctaaacaagtctagtcatgtcagcaaagtagtgggaagtgagataagtaatggaaaagccacttataacggtcatcaaaatgggagctatttcaatgctttgaacggatcattaaatggtgtgtgcgtcaatggcaacggtgtgcaccattaaggaaagctgcgtggaagggtttttgatagaaaagtggtttacatttatgggtttatgtgtgtccaacagtttttgataaaaaactcggttctgtttgtacagtttaagaattacggtaggattttagcanttgaagggactttattttgaaaaattanctggtttntgagtgttaaacaacacaatatatgcagcacagatagagaaagtggaccggacaagtaggttagcgtcctttgtttgccagtattttgggtaaatccatgttggattttgagaggagaatttccggttgtttgtctgtcgtatgaacaattgaaagaccccatacat

SEQ ID NO: 192856 - DNA, 787 bp, Gossypium hirsutum
cggacgcgtccgcccacgcgtccgtctcaacgaagcccaggctcattcttctgttaagaacttggattttagctgtgatggaaaatttcttgtctcactgggaagtggcctttgtaggatttgggatgtaacttcgtcaaaagttgttgcttctctggcaaagggaaatgatgaggtttttgccttctgcagatttgctcaaattaatgataagaatccacatctgtatattgctgcagtcacagactatggtggaagtattttaacatataacacaaccacatggaaaagaatccgcacaagccgagtagtccgggaagctatctctgcgttcaatgtctcgtctgatgggaagttccttgcagttggaacagtcggaggagacctttttatcatagattctgccaatatgcgggttcagatgatggttaaaaaagctcaccttggtttggttacagcattgacgttctcccctgattcaagggctttggtttctgcatcactggactcaagtgctaggttgaccccaatcaaggacaagacgagtagtggcgggatgacatggatgatcatattaatggtactacttgctattgctgtgtattttatgaaggagaaaggaattataccctaatgcaggcctgctaaaattgcgatcgaagatttgaccattgtgttaaaacttttgaaattgcttgtggcaaactttacaaagattcttatcactgttcagtcaacttaaaactgtgatatggatttctgatttaaatagtctaatcagctgact

SEQ ID NO: 192857 - DNA, 430 bp, Gossypium hirsutum
gccacacggatatacgcgggcttttacagaagcttttctctctctccggttcctttgaagggaataaaagaggagaggagggaaagtacgtgaaatttgtgaatttgttttacatcttcgttaatctgcgttgagcatttcacacagcctttgtagaggatatatggagaaacaaagaaagaaagagaaaccggcctcttccagacaaatattctgcctttcaggtccttcacacctcacttcagttgactgggataactttcatgaccgaagatcagttgctgcaagcttggttcagggagtgtacatcctagaacgtgatcgccaagagaaccgcaaagaccctctggctcatgcaccagcttggtgggagttcttcaatttccagttgttccatattcttgtagatgatgttgataactccattttt

SEQ ID NO: 192858 - DNA, 629 bp, Gossypium hirsutum
ctcactcgtccgaaagaagccaccttgtggaaacagcagctgtcgattgagggttttctttggtggaaaaagcaaagccatggcgatgaacggtggtcttagatcggcttcgaagtttctgacttcgtcctctcaatcacttctccacaagtctggcaatagagggtttcattcaactggagtgaagagaatggggggagggcatgggcatgatgaaccgtattacctccatgctaaacatatgtacaacttggataggatgaaaaatcagaagctgacaatgtctcttggagttttgacagccttcagcattggtgtgtttgttcctatctatgctgtcattttccagcagaaaaagactgcatctggttgatttttattttttatgcttgccttcatggcatggtatggctgcctgcaataatggaagcaactgcctttgtgatcttcagcttttgagccgatgtagtttgatgattatgatgatacttgcaggattttagtatttctgttggcaatcacctgttgttaattatgggaattgattatttgataataataataataaacaatatatttgattttgcatgggaagggaaggtaagggaattgcttttaggcttaatggt

SEQ ID NO: 192859 - DNA, 337 bp, Gossypium hirsutum
gagagagagagagagagagagagagagagagagagagagagagagagagagagagagtttttttttttttttttttacagtacattcatgattatcattcaatgacaaaacttggttcaatccatacataaactacacaaaaattttcactctagttttattctttcatgtgcatctccattttgcttgttcatacaacatccaaacaaaagacttcataagagcaagaatttacatgtataatctagacaaccacgcatcaaagaaggaacgggaacactttttttttcggagagggggttcagcagttgatgccacattgtgtggtgtctggacc

SEQ ID NO: 192860 - DNA, 337 bp, Gossypium hirsutum
atttgataaagtctaaaaaggttttcattcttcactgctcttgcgccgatcagttcttccccaccatcgattcatcatcataatcggcagatgacatcaaatccgactctatttggagtcgtatcctcctaaccctcatctaacttcgatttcaacgaagcagacaaggattcgaaggccattaataggtgcatggtggacgtgggctctgacgtggaggcgcgagtggcgcggcgcacggagccgaaggcagcgcgatgtgtggcgcttgggattggcttgcggcgctaggggtcgcttgaaaccgttttaaaatttgtgggcccaatttggccta

SEQ ID NO: 192861 - DNA, 821 bp, Gossypium hirsutum
gattagcactctctaaatgagtacctctaaaaggaggatatgcagacgctcagcttgatgaacgctgcgcagcaggtttcaccatgatggcattacccgttaaaaagttgttgaagcttttatatcctagcttgattcgaatcgatgaatatcttttgaagccatccgctcaagccgatgatttcaaaaacatcatgaagagattgcctttgctcgcagaaagcctagattcaagaggcctttatttgtatgatgatggcttacgctttgttatttggttcggtagaatgctttcacccgatatagcaaggaatttacttggaccagagtttgcagcagaattatcgagggttacgcttaccgagcatgataatgaaatgtcaagaaggctgatgaagatgttaaagagactaagagagagtgacccttcgtattatcaacttccttatcttgtaagacaaggtgaacagcctagggaaggtttcctgctgcttgtaaatcttcttgaggaccagatgggcggtactgttggttacgtggattggataatgcaaatacatcgacaagtccaacaaaatgcatgatatacgggtaattgttcaagaggttgctaaactttcatagtcttcttgaacttaagaacaactattgttccttcatttgggataacttctagtctagttttcggtagagacaagcaagtttttctagtcaagttctttagtcagtcttagtctcggagttaatggtgtttgagttaggggcttctttttatggaattacattgtaatgaatcatcatttgcttttgattctgattac

SEQ ID NO: 192862 - DNA, 450 bp, Gossypium hirsutum
gcaagtcactgttggggttaaatctccagcactgcaattcaatcagcagtcgaacctttgagctgctcgtcgagaccctatggaaatgtgacatccttttctaatcacggatacaactccgttgagatctgaacattaaactcatatagtcagctcacaagacagggtagtagcaaacattcgctgcattttttttttttttggtccgacaggggggtcatgccggttgctctacacttgatgtttcccaggaactttggcacagttttaagagatggcctataaaaccatccctttattttttttacaggctctcccgacacccgacacaagagctagcctgtttctcgatagccatggttcccggttttaggtttccactcatgatcatcatcacaccaccaccatagctttttccgtcctgctgctacccggtgttttagcttttgt

SEQ ID NO: 192863 - DNA, 913 bp, Gossypium hirsutum
atcaaatccgacctgcgtttaaattcgccgagaatgtagccattttgcatgcctaaaatccacagacaagaagaaaaaaaaaagagaggaggaaatttaaaaattaaaatactttttaaaatataaatattcaatccctcgagtatttttttttaatttcttttttctgcgacgataaaagagccacggttactttacatccacagtcgacgggctgactttgcggcggcccatggcgatcgtcgaccggcatcagcggagctccgaaaggaagatgtttagtctttgtcccttttggcacacttcgaccacgatgaacaactcttcctcttctttttccactaaaaatctcaaccacaatggcagccgacactcggagacggttgccgccaagcgctctaaatccgtctcatccattgctagatcgcttctccctccacggcgccggctgcgcctcgatccttctaataaactctatttcccttatgagcctggaactcaggcgagaagtgcgatcaggttgaagaacactagtaaatctcacgtagctttcaagtttcaaactactgcgccgaagagttgttttatgcgtccacctggtggtattttggcgccaggggaaagcattatcgcaaccgtgtttaaatttgtagagcgtccggagaataatgaggtgcaggtggatttaaagagtaaagttaaatttaagataatgagtttgaaggtaacagctggagtggattacttgcctgagctttttgatgaacaaagggatcaagtgactgtagaaagaattttgcgggttgtatttctagatatagggcggcctatccctgcattggacaaacttaagcgtcagttagctgaggccgatgctgcttttgaagcatgcaagaaacctgcccctgataca

SEQ ID NO: 192864 - DNA, 769 bp, Gossypium hirsutum
gtccttactaaaggattattctttaatgaatggaactttgagagatcaagaaaaagagattgaacagttgaggaatgatcttcttcagcttaagcgcgagcatgagaagcaaaatgttcttgtgctaacactttcagggtttttagctgatcaaatgaggcttgaaaacgagaagctaaaagatgaaaatgcatcattgaggaagaatgccaatcctaattgtaacttaccacagcttgcagaggagaatgcaaaattaagaattgaaaataaagtactcaaggtgcagaatgatgctttatgtgggaagattatcagtgacgatgacaagaagcgtgaacaagaacggttagctaaattaccactactatttgaagatatgccctgtgttctttctcactgacaaaatgtgctatattttatttcctagcacaacttgtctgtctttgtactttattttctgcttatcttcatgcactatatggctacttatggcatatcttgtgatagcagtgtagctttcatgtccttgaccgctcttctttgatcttccatgatctcttttcttgttttcacacgtgttatcttccttttcatgggtgtatagccggtgggtacactgtaagtcggccaatattggccggtatgatagtgagcctccattgtgttatttgtaggggtaatcatataggagttacttcggtggtgcagtgatgttgctaattctcttcagttatggtctttgaatttggtcatgtgtatactacct

SEQ ID NO: 192865 - DNA, 399 bp, Gossypium hirsutum
tgaacttttggtcaaattggggtccaaaaccctcttctcctgcgcacagtaaacaaaatccatggatcttgaaaacggaactgttcgatacgaagatgaatatataacgaattctcgaggactaaagctatttacatgcagatggttaccagtaaacgaagaacccaaagctttaatctttctctgccatggttatgcccatggaatgcagtatcaccatgaacagtactgcaatccgattggtgaaagcaggatatgcagtttatggcatagattatgaaggccatggcaagtcttcggggttgcagggctatatctcaaagttcagtcatgttgttgatgattgttccgattatttcactgatatttgtgagaaaaaggagaataaaaagaagatga

SEQ ID NO: 192866 - DNA, 731 bp, Gossypium hirsutum
tttctctaggcgaatctactataagggggcgcttccgaattgtcctgtcaagaagaaagtcgaaagatcacttgatggccaaatagctgaaatcgtttacaagggtgaacacaatcatccaaagcctcagcctccaaaacgaaactcgtcccaaggattaggatttactagtgatggaaccggtcaagatgccaacaactccttgtggagtaataatcataatgagaggggcgaaggttctgaaactagagctgaaaatcatagtgaagtcgggttgtctgtgctgccggcttatcaagtcaaagctctggcaccttacgaacatgttaccaccggtggagctcctgaaaattccgctggtcttagtggggaatgtgaggaagcgagcaaggagggagcagatgttgaatctaaaagtaaaagaaggaaaaatgagaatcaatcaagtgaagtgggcaccttaggggaatgcatacaagaacctcgtgtggtagtgcaaagttgtactgattctgagattatgggggacgggtttcgatggagaaaatatgggcagaaggtggtgaagggaaacccatatcccagaagttactacagatgcactaatgtaaaatgccacgtgcggaagcatgtggaaagagcatcagatgatccaagagctttcattacaacatatgaaggtaaacataaccatgagatgccacttagaaacacaaatcatgtgaccgccc

SEQ ID NO: 192867 - DNA, 728 bp, Gossypium hirsutum
  unsure (1)..(728): unsure at all n locations
cgtttttacgctattgttaagccaattcatgaagctatcaagcctgaaagctgggcatggtcttggaccgatgtcaagctaacatctcctcagctttccagagaaagcatgtataaattgtctcggaaacatttaacacttcagtgtgtatcttcaagtgaatcaaggaacccttttgtagaaaatgctattcaatatactatagcagctgcacatgcaacatttgacaagaataagaaagaggcattagataaactactcttacaaggtcttgatattacgatcttaggttgcaatgacttttactcatacaggaatcagatagaagcacttggtcttccgttgacacctgaagcattggctactctaccaccgtttacatcaattacattcaattctgaggaatcaaatggagcaaattgcaaacctgaagttgcaaaaactggattgggttcatctgcagcaatgacaactgctgtagttgctgctttacttcattatcttggtgttgttaacctttccacctcttctgcagatcaacaccaagaaaataagaattccacagatctcgatattgtgcatatgatagctcaaagtgcccactgtattgcccaaggtaaagttggcagtggctttgatgtcagttctgctgtctatgggagtcagcgttatgttcgtttttcaccaaaagtgctttctgctgctcaggctgcantgaaagggatgcc

SEQ ID NO: 192868 - DNA, 368 bp, Gossypium hirsutum
tgaaaaatggctggttacagagcagaagatgtctatgattaccttttcaaagtagtattaatcggtgattcaggtgtgggaaaatctaatttactctcaagattcacaaggaacgagttcagcttagaatccaaatccaccattggtgttgagttcgcaactcgaagcttaaatgttgatggcaaagtcatcaaagctcagatttgggatactgctggtcaagaaaggtaccgagccataacaagtgcttattaccgaggagccgttggtgcactccttgtgtacgacgttacccgtcattccacatttcgagaacatttgagagggtggttaaagagaggtttaggggatcacaacaattttcctaa

SEQ ID NO: 192869 - DNA, 513 bp, Gossypium hirsutum
  unsure (1)..(513): unsure at all n locations
ggacaatatggaaacttgggcttaggtgacagaaatgatcgcttagttcctgagaaggtttctactctcaatggagagaagatgaatatggttgcttgtggatggcggcataccatatcagtctctgatactggtagattatacacttacgggtggagcaagtatggtcaactaggacatggggactttgaggatcaccttgttccgcataaggtggaatctttagccgacagttttattaagcagatagcaggtggatggagacatacaatggcactcacatctgatggaaaactctatggctggggatggaacaagtttggacaggtgggggttgatgacaacgctgatcattgctctccagtgctagttaaatttcctcatgagcagaaagtagttcaggtttcgtgcggctggaggcacacacttgctattaccgaagagcaaaacggcttctcctggggtaggggtacaaatggacagctcgggcatggagaatncacggaccggaat

SEQ ID NO: 192870 - DNA, 692 bp, Gossypium hirsutum
  unsure (1)..(692): unsure at all n locations
cttggaagaggaagaaagggggcggagcatttggcgtcgatatttgggactgaaaaggacagagtgaactgccccttctatttcaagataggcgcgtgccgtcatggggatcgctgctcgcgtctccacaccaagcccagcatcagccctactatccttctctccaacatgtaccaacggccggacatgatcaccccgggcgtcgacgcccagggtaaccccatcgatccccgcaagatccaacaacattttgaggctttttatgaggatttgtttgaggagttgagcaagtacggtcaaattgagagtttgaacatatgtgataacttggctgaccatatggtaggcaatgtccgtatgttcagtttagagaaggaagaacacgctgcaaatgcagtaaagaatcttagcggaagattttatgctgcccgtcctatcattggtgacttctcacctgtgacggacttccgagaggccacctgtaggcagtatgatgagaatacttgcagtcgtgggggatactgcaattttatgcaccttaaaagaataagcagggagttgaggcgccagttattgggaggtcaaaagagcnaagtctaccgagcagagcctaccgcgtgtatagcatgagacgcctatggtacggacatagaacgtcaagatgggtatatccgaaccgacaagaccaaact

SEQ ID NO: 192871 - DNA, 764 bp, Gossypium hirsutum
agtaacccaattatataaatttattactttaaaatgaaatattatcaaggaaaataaaagaaaaagcatttctcaccaaaatgttgcattttatgaattggaacaataccattgaagcagtaaatatccaaaacaatcctaatcctcctcaataacacacccagaggacactacaggcatatttgaccaggcgtggaggttagggaattatgcaatgtagtttccatgtctcacatgagcaaagtgaaagcaaagaaaaagagtttatacttttcactctactttgcctgagggtgagaagcaatgaactcaacagcatgattgatagtgccgatcttgtctgcctcattatcaggtatctcaaacccagattcttcttcaagggccatgactacctccacagtgtccaaactatctaacccgagatcattttgaaaatgggcatttggggtaaccttggaaggatctactttctggaagtttttgacgacggagacgacgcgatcggtgacctcagatttgtcgagaaatgagcccatgacgtcgtcggaaaaacgacgatggacggcgttgaaggtgagagcaaagagaccgttaaggctaggtttagggttacggagcagcgacagagatgttgcgttcaccctcaggcgctttagcaaagcttctctcaccgcagccatttcaatagataatagcccgcttctatcctcttgtgtctgctggaaaagaaaccttttattttctgctgccgctcactctcg

SEQ ID NO: 192872 - DNA, 443 bp, Gossypium hirsutum
atcttgtctgcctcattatcaggtatctcaaacccaaattcttcttcaagagccataacaacctccccagtgtccaaactatctaacccgagatctttttgaaaatgggcatttggagtaaccttggatggatcaattttctggaagttttttactacggagacaacgcgatcggtgacctcagatttgtcaaggaatgagcccatgacgtcgtcggaatatcggcgccgtatggcgttgaaggtgagagcacagtggccgttagggatgggtttagggttacgaagcagggacaaggatgttgcattcactctcaggtgctttagcacaactcctctcaccgccgccatttccatagctaatcgccccttctcttccacctgctgaaacttgaaatgtccaccgaaagcttggccgacggcttggccgacggcgtggccgac

SEQ ID NO: 192873 - DNA, 574 bp, Gossypium hirsutum
ctagtctcgagtttttttttgactgtttttagtttcttgtttcgcttgtctttctagttgcttcaaacagctgaggtgtatatatatatatataatggagattctggttagatgttttcaaattattgcatgagagaagagcttgtcagagttgagaggaactaaattggaaggaaatggggtgcctgttatcgacgccagaggttgcaggaggagctcgaagaaggccgagaaatattggtgaagttgtagtttttgttcctggactgaaaactcctaggccccttgatttcgcacagccacttggtgatggactatccaagagcttggttgaacgtctatcggcgttgagaacacgtatagaggtcatggcaggtcaagaagcacctatgactactaaaccgagaagaacatccacacaacacggtggttcaacgttgactgatttgcaacatgctctcgaggattatctgccggtcttgttggggctagttgaaaatggtaactggctaaaacataacttgcggttctgttggataaatcaggaagatgatgtggaggaaactaccatgtc

SEQ ID NO: 192874 - DNA, 769 bp, Gossypium hirsutum
  unsure (1)..(769): unsure at all n locations
tctctctagagaatttacgggagaaaaaaaaaagaaagaaagaaaactcaaccctcccaaaaatggcgttccctcagcagcagtttcaacaacactaccaacctcaacaacaacaacaacagcaatcaaaaagtttcaggaacttgtacgcaatcgacgctcaggtttcgccaccacttgcttattacaatacgcctaatttacaagattcctctcagcatcctccatatatccctccttttcatgttgtggggtttgcaccgggtccggtaccggttacagatgggagtgatggaggagctgagatgcaatggaacaatggggttgagcctaaaaggaagaagttaaaggaacaagattttttggagaacaattcacaaatatcttctgttgacttttttcaagcacagtcagtctcgacagggttaggtttgtcacttgacaataacaataataatcgaatggcttcttcgggtgattcggctttgttgtccctcattggtgatgacataaataatgagttgcaacgacaagatgcagagattgataggttcctcaaagttcagggtgaccgattacaccaatctgtgttggaaaaggttcanggctaacanctccaaacaatttcgcttgtggaagaaaaagtttttcagaaacttcgtgaaaaagaagcagaagtggagaatattaacaaaaagaatatggaacttgaagagaagatggagcaactgaccatggaagcaggtgcctggcancancgagccagata

SEQ ID NO: 192875 - DNA, 431 bp, Gossypium hirsutum
gaaatatccaaccacaatcttctaacctcgactccgaattcggtttcctcttttcttttacggtggttgtttgcggtgggtggacaacgatcatgatcgccgatcctaaatcttgtgacgttctgttggttttcgttttatttgcgattatatcctcttccagcgccttggtttccactccctatcctaaggccatttctgatttaaaagaggcagttgtgaagggattgggattccaagccgatgattttaagatttcagggttcgatctcagagatgcccttgtgggccattctgtggcatatgaattcgacattgaaatcgataacaaagtgattccttttaagctcttggaggatgtaaatcgttgggaatatgttgatttgcctatttttagggtggaagagccagctagacccggagttgaaaat

SEQ ID NO: 192876 - DNA, 664 bp, Gossypium hirsutum
atacatctaagcaatcgattaaaccagacgggctctcttaaaaatccctttattttccctgtataattcttgtttcttgtctaacgcataagaatggcggccaaagctgaaggcaaggcaattgggattgatctcgggacgacatacacttgtgttgctgtatggcagaatgatccagtggtgattattgccaacgaccaaggcaaccgaacgacaccgtcttacgttgctttcaccgacaccgagcgtctcatcggtgatgctgctaaaaaccaagtcgctatgaacccacagaacactgttttcgacgctaaacgtctgatcggtcgtcgattctctgacccagcggtgcaagccgatatgaagcattggcctttcaaggttgttgccggccctggtgataagccgatgatcgtcgttaattacaagggtgaggagaagcagttcgctcctgaagaaatttcttccatggtgttagtcaagatgaaggaggttgccgaggcctatatgggtcaaaccgtgaaaaacgctgttatcaccgtgcctgcttatttcaatgattcccaaaggcaagctacaaaagatgccggatccatttccgggcttaatattttaaggattatcaatgagccaacggctgctgcaattgcgtatggcttggaca

SEQ ID NO: 192877 - DNA, 649 bp, Gossypium hirsutum
  unsure (1)..(649): unsure at all n locations
taaagacgacaacacagatcgctctcgcgctttcccttaatcaatcatttttcttaccatgaagattatagattttttcctgatctcgtcacttctcttctcaatctctagggctgaatctattggatcagttttcttcatcgacagtcctactcatcaattccttcgcgctccatcctctaacgatgcctttcagtcagagccaatgttgttacctgaagttggtgcgactgcatcagtcttgcttggttttccaccacccattacactttcagctgctggctcatctaagctgaatgaggttctcatttctaatccatttgatagacctcgtgccgtttttatgcttgaagttagtggagttgatgatcctcttgttgttggacccaagaatgctctcttctgcaaagccttgaagaatagtgttgatcttggttcaagtaaagcggacatattgtttccagatgaggaggagttatccacgatctctttggaccaccctctaggagactactgtgaagaagagatcaatgaanttgcatcttggttgggtggatcatatgctactgattgtacaaaacccctggatggagtattgagtattccctggcaaatggtgataactgaatcttctatgtcaaaaaaggcg

SEQ ID NO: 192878 - DNA, 346 bp, Gossypium hirsutum
atctctctcgctctgaaaacccgtacggattctcgaatggccaacaaatctgcttggtacctggaaaaaccaaagaaaatgaaaaggaatgcctgttgattgacgggaaatttttgttcctctaggctcgactttctgcatcatcaaaaggggagaaattagtcaggaaatgggggtatatctcagcaccccaaaaactgagaagttatcagaagatggtgaaaatgacaagcttcgatttggattgtcgtccatgcaaggatggcgtgcatctatggaagatgctcatgcagcatatctggatctggacgactcaacatcattttttggtgtttatgatggtcat

SEQ ID NO: 192879 - DNA, 552 bp, Gossypium hirsutum
tgtggctcctctagtcctcactgcatcttcccagctacttcttttcctctctatgggtctctgtttcctttcatttcccatttattttgcttcattttcagctgttggaactgtgagtccttttgccatttcatgtgatcaacattttggtaaaaaaaatggtagcggagtcttggtttcgtagtttttggaaaattccgcggaggcatgaaggaggggctgagagagttgaaattggagtattagcatttgaagttgcaagcttgttgtctaagcttgggcatctatggcggcgtcttagtgataagcaggttagcaggttgagagaggagatcatggcttgtggtggcgattagaccgctggtcatctgaagatgaaagttacattggacacttgatatgtgcagaaatgattgaaactgttacacatgtggcgaagtccgtggctaggcttgcaaagaaatgtagtgacccgggtttgaagagttttgaacttgctttcactgagttagtccagattggggctgacccttattgatggatattttcctt

SEQ ID NO: 192880 - DNA, 796 bp, Gossypium hirsutum
  unsure (1)..(796): unsure at all n locations
aggaaatggggaacagcataggaggaagaaacagggcaaaggtaatgaaaatcgatggtgaaaccatcaaattaaagacaccaattcgggtttgggatgttctaaaagattatccaacaggtcatgttttattagattcacaaactgtgaagcattatgggatccgtgctaagccattagagccacaagagagcttgaaacccaagaaaatatacttcttggtggagctgccgaagcttgccgatgatgaagttcataaggcgccgaggagggtgcggtcaggggggattcatatgagtgctaaagataggttagagtgtttgatgttgtcgagaaggacggtgtcggacctttctatggttcgaccgtcgtcgacgagcatggtgtccgatggggttcgactaggtggtggtggtggtggtacttccggtggggggatgatgactgtgaaaatgaggttgcctaagtctcaaatggctaagttggtggaagagagcaaagatggtgttgaggtggctganaagatccttgatctttatatcngaaatggtggtantggcggtgatgatgccggtaaccgaatccaccgtgaagcaccgtggaagcctggccttggtaccgctggagaaaactttaagcccaaacgtgagaagagagtgagttttattccacaagaagaaagttaaatccatttagcaaatccattgtaaccacccaatttggaattcgcctccaaatcccgccattccggccccgatacaagttttctttctaaataatttattatttatgattt

SEQ ID NO: 192881 - DNA, 619 bp, Gossypium hirsutum
caatttgtgaagcaaggtttcagaaaaattcaaattcacaaaagagaacgatcgaaaataccactagtattttgaaataagctccaatccatggctacacggttgatctattccagactctcactctctagactctctgcaatgggtggacccaagaatggaagatttctttcaacagagtctaacaagattgatgagccttttaaagttgaagaagcagagaccgtgaatgtacctcctcctccttctgagaagctgcttgtgttgggtggaaatggatttgttggctcccatatctgtagggaagctttgaaccgtggtctggctgttgcaagcctcagcaggtctggcggatcatctttacatgacccttgggctaagaatgtgacatggcataaagggaaccttctttcttctgattcgtggaaggaagctctggatggagttacatctgttatctcttgcattggcggttttggatctaattcatatatgtataagattaatgggactgcaaacatcaatgctatcagagctgctggagataaaggtgtgaaaagatgtgtgtatatctccgctgctgattttggcttggcaaactatttacttagaggatatc

SEQ ID NO: 192882 - DNA, 567 bp, Gossypium hirsutum
ggttcatgaaatggaaaatgggttcaacatatggtcctttaatggcaggctactttatcggatactgaaggatcatttcttccagttcttgtggcgtccaaggccaccatccttcttgacacctgagaaggaggaagagattgcaaggaacttgaagaagtatagctagaagtacgaggcagaggaccaggatgtatcgatgttattgagcgagcaagatcgtgagaagagaaggatgttgaaggaggaatgggaaaagtgggttagtgaatggaggcgggcacaagaggaagaaaaattggagaggcaaaagttgagggatggagaagctagtgatgaagaagaagaatacgaggccaaagaagttgaagtagaggaagtgttggatgtgtcggaagaggtccttccatttgaagagtgagaacctgtagtagaggagcttgattcttcattatgatgttgttgttacctttactttttgattttgttaccgtaagaattttgggtcatgacattgccaagtctagttgattatgatttatttgaaaactgagttaattttagatc

SEQ ID NO: 192883 - DNA, 636 bp, Gossypium hirsutum
  unsure (1)..(636): unsure at all n locations
cgaaaaaacaaattccgttttttcgttaatttcctcccaacgctgatccgatcacagttgccgacatgtcttgttcttcatcatcgggctcggaggaagatgacgagggaatcgactcttacaggaaaggaggatatcatgccgtccggatcggcgatccattcgccgctggtcgttacatcgctcaaaggaagctgggttggggtcagttctccactgtttggctcgcttatgatacccaatcctctaaatatgttgctctaaagatccagaaaagcgcacaacaatttgcacaagctgcacttcatgaaattgatgtcctttcatctattgctgacggagacccctcaaactcgaagtgtgtggtgcgcctgattgaccactttaagcacagtggtccaaatggccaacatctatgcatggtcctcgaattcctcggtgatagcttacttcaattaatcaggtttaaccgttacaaagggcttgaattgaataaagttagggagatctgcaaatgcattttgatagccctggattacttgcatagggaggttggtataatccacacggatttaaagcctgaaaatattcttctcttttccactattgatccaaccaaggatccatttanatctc

SEQ ID NO: 192884 - DNA, 493 bp, Gossypium hirsutum
agaatcatgagtttattactggaatgctcctcaataagtttagactgttaagagtatgccttacatgaaaacctaaataaagccgcatatgtttaaggccttaatagagtttacataaaactaaccgtagctgatgtagccagtgcaatggctacagcctgttctcttaattttagctcattctccacctctttcctttgtaactcactctgccgcaacagacctacaagttccttaagttgttctttcatttccctgatttctatgcctttttcccataactggtaccttgagtctccgagagaattgaacatatattgaagcaagttctttgcatctcccatggagcgcaactgattccaacgtccacggttagtgaacgcacgctcccgctcttctgcctctgaaagttgtgaagccattgctacaagtgaattagatgatatgcccagcatatggtcaagtgaagccattcgtgccacttttggatttg

SEQ ID NO: 192885 - DNA, 924 bp, Gossypium hirsutum
gaaagaatatatcaaacaaaaagtcacaaaccagagtaaaccctaagaacactgtcggcggcaatggcaacttacgatctaaccccgcgtatcggcccgaacctagacaggcacttagtgtttccattgctggagttcttgcaagagcgacaactatacccagatgaacagatcttgaaagcaaagatcgagcttttgaacaagacaaatatggtcgattacgctatggatatccataagagcctttaccgcaccgatgatgtccctcaggacatggtcgagaggagagtcgaggttgtcgctcgtctcaaagctttggaagatgccgccgctcctctcgtcactttcttgcaaaaccctaacgctgttcaggaattgcgtgctgataaacagtataatctccagatgcttaatgaccgctaccagattggtccagatcaaatagaggcattgtatcagtatgcaaaattccaatgtgagtgtggcaactactctggtgctgctgactatctgtatcagtatcgggctttgtgtactaacagcgaaaggagtttgagtgcattgtgggggaagcttgctgccgagatactgatgcaaaactgggatattgctcttgaagaacttaactcgtttgaaagaaataatcgattccaagagcttctcatcacctttggaccaagttcagagtagaatatggctcatgcattggcagcctcttcatctttttcaaccatgaccatggaagaacacagatcatcgacctatttaatcaagacaagtatctaaacgccattcaaaccagtgctccccatcttctaaggtacttagccactgcttttattgtcaacaaaaggagaagacctcaattcaaagaatttatcaaggttatccagcaagatcaatgctcttacaaagatcccatca

SEQ ID NO: 192886 - DNA, 440 bp, Gossypium hirsutum
  unsure (1)..(440): unsure at all n locations
gtccgacactcctttcctcattcttcggaactcgttcttcctttccgaccagcgacaacgatcatcgtgatatcccaattctaccctcaccgaaccccccaaattctccgctagctcatagaaaacttgtccgggattttttttcctttttttgttcttttttctttggggatggctgaatccgacaatgaatcgggggggcataacaacagcggaggaaacgctcacagcgaaacgtcggcgcgtgagcaagacaggttcttgccgatcgcggacgtgggcaggatcatgaaaaaggcgttgccggcaaacgctaagatctccaaagacgctaaagaaacggtccaggaatgcgtctccgagttcatcagtttcatcacgggagaagcttncgacaagtgtcagcgccgaaaggcggagaacatttacggtgatgatct

SEQ ID NO: 192887 - DNA, 675 bp, Gossypium hirsutum
  unsure (1)..(675): unsure at all n locations
ccgcagatgaggcattagccgacccttactggaggggcttgtctaaaatcgagagggaaccttcttgtcaaccaatatcaaaattagagttcgagtttgagagacgacgggtgacaaaggaggacgtaagggaattaatttacagggaggcactagaatatcatcctcagctgctcaaagactacctgaacggacatgaaggatccaatttcctttatcctagtcctgtcggccaattcaaaaagcagtttgcatatctcgaggaaaatggtggcagaagtgcaccagttttccctctggagaggaagcatgtgtccctcccaaggtctaccgtccattcaaatggtattactccaaatacacagtcaacttcagtttcgtacgagaaccgacaagatagagaagcagatgccaggaaagcaatggatgtaatttctagtaaaccaaagccaacacggcctccgcctagggtgccttcagcaaagcccgggagagttgtcggatccgttgtaccatatgaggacgtaaaaaacattaaagatggttacgacactaagaacttctacagaaatgcagtccctccacagaatgtcaccccccattgtttcctcctaaatcaagagaaatccngaacacaggccgacaggaatcttgcaaccaaaccgcaacaacagt

SEQ ID NO: 192888 - DNA, 538 bp, Gossypium hirsutum
gttaaatcccagcagaagaatatacagaaaggtagaagatgagttcgggggaacctagtttcgaagaattgttggaggagaagaagcgtgtcaggaaccctcttgtccctgtcggtgcacttattaccgctggagtgctcactgcggggttgatcagttttagacaaggaaattctcagttgggtcagatgctgatgcgagctagggtggtagttcagggagctacagttgctcttatggttggcactgcatactactatggggataatccctggaaatcgagttagaacactcggtttcatggttgcaaccattatattgtttttattttgatatgcaatttctttttatagctatagatgttgaacaaaagcatcataccaagaaagcaaatgccctcagattgatatagcttgggaataaattaaatatgctctatgcatgtcttattctaagatattattatttggtacatatgtatatgtaatgttgaatatgtatttgtttaaaacccaaaggatagggacaaagaaccagc

SEQ ID NO: 192889 - DNA, 962 bp, Gossypium hirsutum
tttttttttttttttgaaaaatatctactgaaaactcccttttaaccaaaaataacttgtcaattactcaaataaaaaacgagacattcatagcatgtccagaatacaaaaacggcttataaagtactgactaaaacaacaaaattctccactcccatggtgtttaatcttcttccaattcctcaacgattagccttagcaactctctcaatttcatccttcttcttgatggcatagctgttagatgatcccttagcagcattaataagctcatcagccaaacactctgcaattgttttaatgttcctgaatgcagactcacgtgcaccagtggtcaaaagatagatggcctgattcacgcgacgaagaggagaaatatcaacagcctgacgcctgacaacaccagcagaaccaattcgagtagcatcttcacgtggcccactgttgataatagcatcaacaatgacttgaattgggttctgatcagtcaagagataaataatatccatggcatgcttcacaatcctgactgccataagcttcttcccattgtttcggccatgcatcataagtgagtttgtaagcctttcaacaattgggcactgagccttcctgaaacgcttaactgagtacctcccagcagtgtgtggcacataggtagcatgcttcgaagcttggacaccaatgtaatcactcaaggagatatcagcaacctgaacttcctcgaagctccagcggttgaagagttttacttcaaggtgaggttgggttgggtctttgggtgcggcggtggcgggggctgcaacatctgtcgccattcctgtgatgtagagatggagcggcaggcaaaatttcagaatcgtgcacgaagcggcggacgcgaaatgaaaaaaccctagtcttctttcacatttatactgagattctgactagggttgtttcctttcagtgactaggcttcg

SEQ ID NO: 192890 - DNA, 968 bp, Gossypium hirsutum
catatcatacataatccttgacctgcgcttatcagctataaataggtggttattgaattatcgtcacatggtgtgttttttgaccatcttgacacttttgtaaactccagttttttttcttcaataacatctcaacttaaataacggaacattcatattatgtctggaacataaaataggtaacttataaagtactgaatgaaaaaacaaaagtgtccaccgccatggtttatgcgaactcctaccaattcctcaacgattggccttggcaactctctcaatttcgtccttcttcttgatggcatagctgttagatgatccctttgctgcgttaataagctcatcagctaaacattcagcgatagttttactgtttctgaatgcagactcacgtgctccggtggtcaagagatagatggcttgattcacacgacgaagaggagaaatatcaacagcctgacgcctcacaacacccgcagaaccgatacgagtagcatcttcacgaggtccactgttgattatagcatcgacaatgacttgaattgggttctgatcagtcaggagataaataatttccatggcatgcttcacaatcctaactgccataagtttcttcccattgtttcggccgtgcatcatcagtgagttcgtaagcctctcaacaattgggcattgagccttccggaaacgcttcactgagtaccttccagcagtgtgcggcacataggttgcatgcttcgaagcttggacaccaatgtagtcactcaaagagatatcagtaacctgaacatcctcaaaagaccagcgattgaaaagcttgacttcggaggtaggttgggttgggtctttgctggtctcggtggctgccacggccgtcgacatacctcagattgaatagatagaaagggggagcggcgaccgaagactgaatagtgcggctttcactggtagcggtacccacgcgtccg

SEQ ID NO: 192891 - DNA, 973 bp, Gossypium hirsutum
ttgaaggaaacatgaattgttgctgcattataaatcacaagcaagttaaaagtgaatgttttaattcaatgagacatgcatttcatcaaatcaatcagcaaaaattctatcattttaataatatctactgaaaaactccaatttaaacataagctaacttgtcaacttagatagcaaacacaacactcattgcatgtccaggacaccaaaaataaaagatagcccataaagtactgattaaaacaattgaaattctccccgcccacggtgtaataatctcgtctaatgcctcaacggttggccttggcaaccctctcgatttcatctatcttcttgatcgcgtagctgttcgatgatccctttgctgcgttaataagctcatcagctaaacattcagcgatagttttactgtttttgaatgcaggccccccgagcaccagtggtgaggagatagatggcctgattcactcgacgaagaggagaaatatcaacagcttgacgcctcacaacaccagcagaaccaatacgagtagcatcttcacgaggtccactgttgataatggcatcaacaatgacttgaattgggttctgatcagtcaggagataaataatttccatagcatgcttcacaatcctgactgccataagtttctttccattgtttcggccatgcatcatcaatgagtttgtaagcctctcaacaatggggcactgagcctttctaaaacgcttaactgagtacctcccagcagtgtgtggcacataggttgcatgcttggaaggttgaacaccaatgtagtcactcaaagagatatcagaaacttgaacttcctcgaagctccagcgattgaagagcttgacgtcagggtgagacttggttgggtcttgcagtgaggcggtggcaggggctgcaatggctgtcgccatagctatgatagatgctgcaaacagagagaaccgaagtgcgcctgaa

SEQ ID NO: 192892 - DNA, 992 bp, Gossypium hirsutum
  unsure (1)..(992): unsure at all n locations
cggacgcgtgggctggtgatggcaccacttgtgcaacagtccttacccgcgcaatatttgttgaaggatgtaaatcagtggcggctggaatgaatgccatggacctcagacgaggaatcacaatggcagttgatgcagttgtgaccaacttgaagagtagagcgcggatgatcagcacgtccgaggaaattgcacaggttggaacaatatctgcgaatggagaaagggagattggcgagctcattgccaaggccatggagaaagttggcaaagaaggtgttattaccattgctgatgggaaaaccttgtacaatgaattagaggttgttgagggaatgaagcttgatagaggctacatatccccttactttatcaccaaccagaagaaccagaaatgtgaattggagaacccacttattttgatccatgagaaaaagatctctaacttgcctgctttggtgaaatttttggaattgtccttgacgaagcaaaggcctttactaattgttgctgaagatcttgaaagtgaagcacttgcaactctcattctgaacaagcttcgtgccggaatcaaggtgtgtgccattaaggccccaggttttggggaaaataggaaagctggcttgcaggaccttgctgctcttaccgggggcgaggtaataactgaagaacttggtcttgacattgagaaagttggagcgggaagtgcttggctcttgcaaaaaggttacagtatcaaaggatgacacaattatccttgatggcctggaacaaggctacattgaagaagatgcgatcaatnagatcagcattgaatcagcacttctgatacgacaggacnaatacnagaaggcttgcaagctcttgtggcgtgncatntgaagatgagancagtgagcaagttgtgaaagaagatgagtactgtgcctaatgcacaagctgtggagaagatgtccggggggctgatctttgcttagactgaactgaactga

SEQ ID NO: 192893 - DNA, 729 bp, Gossypium hirsutum
aagatcttgaaagtgaagcacttgcaactctcattctgaacaagcttcgtgccggaatcaaggtgtgtgccattaaggccccaggttttggggaaaataggaaagctggcttgcaggaccttgctgctcttaccgggggcgaggtaataactgaagaacttggtcttgacattgagaaagttggagcggaagtgcttggctcttgcaaaaaggttacagtatcaaaggatgacacaattatccttgatggcgctggagacaaggctaccattgaagaaagatgcgatcagataagatcagcaattgaatcaagcacttctgattacgacaaggacaaattacaagagaggcttgcaaagctctctggtggcgttgcagttttgaagattggaggagcaagtgaagcagaagttggtgaaaagaaggatagagttactgatgccctaaatgccacgaaagctgctgtggaggaaggaattgttcctggtggtggtgctgcacttctttatgcctctaaggaacttgaaaacctggagactgcaaactttgatcagaagatcggtgttcagatcatccaaaatgctcttaagatgcctgtacatacaattgcatctaatgctggagttgagggtgcagtggttggtggaaagctactggaacaggacaatcccgacctcggttatgatgctgccaagggtgagtatgtagatatggttaaagctggaatta

SEQ ID NO: 192894 - DNA, 568 bp, Gossypium hirsutum
tgttaactccgctaccaatgctcttaggcgaatgcagggctttcctttttacgacaaggaaatgagaatacaatatgcaaagactaaatctgacataatagcaaaagcagatggcacttttgtcccccgagagaagcgaaagaggcatgacgaaaagggagggaaaaaacggaaagaacaacttgatcctaatcaagctgcagcaggtttgaatccatcttatgcgggtgcttatggtgcaacacctcctctatcacaattaccctacctgggtgctagaccaattgttccagaagctcctgcaccaccaaataacatcctgtttgttcagaatcttcctcatgatgcaaccacaatgatgctgcaaatgctcttcaatcaataccccggtttaaaggatgtcagaacggtggaaacaaaaccaggtatagcctttgtcgagtatgaaaatgagatgcaatcaaccgtcgctatgcaggcactgcaaggtttcaagatacagcaaaaccagatgttgattacttacgcgaagaagtagatgaataaagacccaaatggtccttttatg

SEQ ID NO: 192895 - DNA, 482 bp, Gossypium hirsutum
  unsure (1)..(482): unsure at all n locations
tatcgacggccgcgacatgaagcaaaaaacatggccggatcgatccgacggcgtccgcttcactgcttttcccttgtcgaaacccaacgacaatgaagaaaatatcatattatcgaggcgttccaagatcggttcaaaaccttcattatcgccgaccgacggccctgatttctcggctctcccttttgacatcttgacgaaaatcgcggcgtcgtttaattttccgaaccttctagcggcttcgctggtttgccggtcatggagggacgcgctccggccgttgagggaagcgatgatgctgctgcgttacgggaagcgattcaagcatggccgtggcggtgttcggcgtaatttggataaagctctcgactctttcttgaaaggcgctgcgcgtggatctacgcttgctatggtcgatgcggngcttatctactgggaaaggngtctaaaagaagaagcaattgctttttaccagaaagccg

SEQ ID NO: 192896 - DNA, 885 bp, Gossypium hirsutum
tccacgcgtccgggatgaggaagtttcagaaccctcaagtataaggaatcattgggccggcatctagaattctcgttatttgcaacaactaagcgaagcgagacaaaaatggcgacttcagccatgtcggaaaaacgggtcgtcctgctctgcggcgactatgccgaggactatgaggttatggtccctttccaggctctgttggcttatggtatatcagtggacgctgtttgtcccggcaagaaggccggcgaaacttgccgcaccgctattcatcaactttccggccatcagacctataccgagatccgtggtcacaatttcacactaaatgcatcatttgaagatatagaccatactaaatatgatggtttagttatagccggaggacgagctcctgaatatcttgctatggatgcatttgtattgaacatggttcgcaattttgttaattctggaaagcctgttgcttcaatttgtcatggtcaattgatattagctgctgccggggcagttggtggtctaaaatgtactggtttccctgctgttggacctacacttattgctgctggtgcattgtggattgaacctgatactttggcagcttgtgttgttgatggtaatatcattactgctgctacttatattggtcatcccgagtttatcaggctgtttgtgaaagcattagggggcaccatatccaaatcgaacaaaaggatcctatttctttgtggggattatatggaagattatgaagtaactgtgcctttccaatcacttcaagctctaggctgccatgtagatgcagtttgtcctaagaagaaggctggcgatttgtgtccaactgctgtccatgatttcgaaggtgaccaaacttacagcgag

SEQ ID NO: 192897 - DNA, 395 bp, Gossypium hirsutum
cccacgcgtccggttggaaactccgagacacagtgcccaggtcaatgcgcatggccattccaccagcccatctacggaccacagaacccacctttggttgcacccaacaatgatatcggtcttgatgggatggtgatcaacctggcaagcctcttggctgggacagtgaccaacccgtttggaaatgggtactaccaaggtccaaaagaggcaccactggaggctgcatctgcttgtcccggtatttatggtaaaggagcatacccaggctatgctggagaccttccggtggacgccacaactggcgctaactacaacgcacatggtgtgaatgggagaaagtatctgcttccggctttgtttgacccttcaacctcaacttgctctacactggc

SEQ ID NO: 192898 - DNA, 703 bp, Gossypium hirsutum
  unsure (1)..(703): unsure at all n locations
cccacgcgtccgcccacgcgtccggtgtaaataaaaatcagaaacattttctggtaagtgaaggaaaagcagagtgagtgaagaagatggagaccaaacccacagagattgggagttctaagatgtttggagggtacaacaaaagatacaagcatttcagtcccaccctcggctgttccctgactttccatatctacttccctccttgttcttctccttcccacaagttccctatactttactggctctctggacttacttgcactgatgagaatttcataatcaagtcaggagcacaacgtgctgcttctgctgagggtgttgctctaattgctcctgatacatctccaagaggcctgaatgtggaaggagaggctgacagctgggattttggtgtaggtgctggattttatcttaatgctacacaacagatgtggaagaactggcgtatgtacgattatgttgtgaaagaactgccaaaacttctgagtgaaaattttcctcaacttgatacatcaaaagcatctatntctggtcattctatgggtggacatggtgctctcacaatntatctgaaaaaccttgataagtataagtcagcgtctgcctttgcnaccattgccaatcctataaattgtccctggggtcanaaagcatncacaaactatcttggcaacgacnaagctgcttggggaagaatatt

SEQ ID NO: 192899 - DNA, 337 bp, Gossypium hirsutum
ggaaagcgaactcgaaactcgttggcatagctaactgagacagagatgaactcaccgcagcttccacagacgcgtgggcgcgtgttatcctcatccgagataaacaaatccccagccgggtcaggaggagatcttgaatcttctttaatccaaatctaccaccatcaccaccacaactccctcaagctccgggatcaggccgagaaagcgaagaaagatgcgattaagaaagcggggagagtgtcggatttgttggtggaggcggtgaacggaggtgtgcaagagtcgtttataaacgagaagcgaatcgaggcggagattcgtgctttggcttcta

SEQ ID NO: 192900 - DNA, 618 bp, Gossypium hirsutum
cggacgcgtgggatatctgtagatgtcaggtgaactcctttctacaagtgagtgaccttccaattcgatcacatgttttacacctttcaagttatttaccggtggaagattatcattccatttccgaacaaatttgctagtcccaattttgtatctcagtgtaaaagatgtaatgagtaagcttcaagaatgcggagattacataaacgaaaatctaaacaagctagacacacggggtccggtttcaaaatatatcctccatgacgaaaaccttataggaagccttactttgactttcgacgaggcaacgtccggtgttgcttgtgatctcaattctcgtggattccatgtattgtgcaaagcaactgaagaggctgttggacatgtgaaaccttactcaattaccggaagtttgccactcattcgggagctacaagatgaaggttttgatgttcaaactgctggctacggtttaatggccacgtaccacgccaagaacgagtactgccttctttccgatatgtgccaaggttatcacgtatttaccggcatcatcgctcagctagaggattgaaagatgacaatagattagatatgaactttcataatagttttctc

SEQ ID NO: 192901 - DNA, 420 bp, Gossypium hirsutum
gataaactgaagggaggcccacttttctggggggattcggctgataaacaaccttgcattggtaccggtggtatgataccgtggaaacttcaagtgacggggatgctttttcacagtgggttaccacacatggctataaatgcattggagctcggcatggaagcacttaaagaaatccagctacggtcttataaagacttcccaccccatcccgatgagcaagtatctggatgtgcttcaccatcaaccatgaaaccaacgcaatggaattatccaggtggtggaatcaatcaaattccaggagagtgtacaatatcaggagatgtcaggttaactcctttctacaatgtaaaagatgtaatgaataagcttcaagaatacgtagattacataaacgaaaatctaaacaagctagacaca

SEQ ID NO: 192902 - DNA, 350 bp, Gossypium hirsutum
ttactagaagaaagggatagagaaggggaaggggatcagctgtctttattgacgcttttggtggctgcttttaggaagtctttgattgggtgtagcctttctggaagtaaagagctttgttcaatggaaattgggttgcctaccaatgttagacatgttgctcatgtgacttttgataggttccatggatttcttggtttgccggttgaatttgagcctgaggtccccaggagagctccaagtgccagtgcgagtgtatttggggtttcaacagaatctatgcagctctcactggactctagagggaacagtgttccaacaatactactcctgatgcaaagtcatttata

SEQ ID NO: 192903 - DNA, 454 bp, Gossypium hirsutum
cccacgcgtccggctcaatctctccttttagctcagaacgctcttcacgctgtgtagaaatgccgttcaaaaggtacgttgagatcgggagagtcgctctcgttaactacagcaaagactacggcaagctcgtcgtcatcgtcgatgttgttgaccagaacagagctctagttgatgccccagatatggtgaggggccaaatgaactttaagaggcttcaattgactgatttcaaaattgacattcctcgtgttccaaagaagaagacactgattgaagcaatggaaaaagctgatgttaaaaacaagtgggagaatagctcatggggtaaaaagctgattgttcaaaagaagagagcatctctcaatgacttcgacagattcaagatcatgttggccaagatcaagaaagctggagttgtgaggcaagagcttgctaagttgaaaaaggagaa

SEQ ID NO: 192904 - DNA, 461 bp, Gossypium hirsutum
ggttaatgccgtgttatgggttgtggtcgcgatggctctggtgctcggaatagccgagagtttcgacttccatgagaaggatttagcatcggaggagagtctgtgggatttgtacgagaggtggagaagccatctcatggtttctcggagtctagacgagaaacacaagcgtttcaacgtgtttaaacaaaatgtcaaacatgtgctccacaccaataatgacaacaagccttataagttgatgctgaacaagtttgcagacatgacaaaccatgaatttcgaaatgcttatgccagttccaagatcagacatcataggatgttccaagggacaccccgtggaacaagcagtttcacgtatgaaaacgtgaacaatgtcccaacctccgttgattggagaaagaaaggtgctgtcaccgctgttaaagaccaaggccaatgtggtagctgttgggcatttt

SEQ ID NO: 192905 - DNA, 407 bp, Gossypium hirsutum
gacaaaatctgtgaagtctgctggtagcagcagtgctaggcctggtgagcctacagcttcctcaacgactcctaggtttgctgggttagctcgttcttcttcatggtttgacatgaatggaggtcatctgcctttaacgttcagaactcctcctgttagcccccctcggcaaaattttttgacaggaatgcgtagagtttgctctttagaattcaggcctcatctgatgaattctccggactccggattggctgacccacttctagggtcttcttctggggtttctgagcgcagtttacttccacaatcaactatctataattttagttgtggccacttctcaaagccacttcttactgcatcagatgatagtgaagaactattggctataagagaagagcgggaga

SEQ ID NO: 192906 - DNA, 929 bp, Gossypium hirsutum
aaactaatagctgtctgcttgggaggttactcactagccttgtggggggttagttagccgacaacctcgaactccttgtgtatacaccatatccacagttctctgctaacctatatttgtaaccaaacatccatttaacgcataccaaatagtcataagcaacatcaatggctccttcaactctcacagagcttgcagggaaggaaaccttacaggcaagctttgttcgtgatgaagatgagcgtcctaaggttgcttacaaccaattcagcgatgaaatccctgtgatctctcttgccggtatcaattatgtaggtgaaaagagggcggagatatgccagaaaatcgtcgaggcttgtgaaaattggggtatcttccaggtcgtggatcatggtgtcgacactaaactcatttctgagatgacccgtcttgccagagagttcttcgctttgcccgccgaagataagcttcggttcgatatgtctggtggcaagaaaggtggtttcatcgtctccagccaccttcagggagaagcagtgcaagattggcgggagattgtgacatacttttcatacccattgaagagcagggactattcaaggtggcctgataagccagagggttggattgaagttacaaaggagtacagcgagaagttgatgggcctagcttgcaagcttcttgaggtgttgtcagaggccatggggttagagaaggaggctttgactaaggcatgtgtggacatggatcagaaagtggtggttaacttctatcctaaatgccctcaacctgacctcactttaggactcaagcgccacactgacccaggcaccatcacactcttgcttcaagaccaagttggtgggcttcaggccacccggcacattggcaagacgtggatcactgtccaacctgtggaaggagccttt

SEQ ID NO: 192907 - DNA, 579 bp, Gossypium hirsutum
  unsure (1)..(579): unsure at all n locations
cccacgcgtccgcccacgcgtccgcggacgcgtggggttctcaactaaacttataacgttcgatcgtttaacgcaaacccatttttaagtgagggaaaggtttcagttcagagtcataagcaacatcaatggctccttcaactctgacggctcttgcggaagagaaaaccttgcaggcaagcttcgttcgtgatgaagatgagcgtcctaaggttgcttacaaccaattcagtaatgatatccctgtcatctctcttgctggtatcgatgatgttgatggcaagaggggtgagatatgcaagaagattgttgaggcttgtgaggattggggtgtcttccaggttgtggatcatggtgttgatactaaactcgtgtccgaaatgacccgtcttgcgagagagttttttgctttgcctgctgaagagaagcttcggttcgatatgtctggtggcaagaaaggttgttttattcttcttcgccaacctcagggagaagcagtgncaggatgggcgaaaaattgtgacttacttttataccattgggaacaggaacattaatgtggactgatagcaaagtttg

SEQ ID NO: 192908 - DNA, 1181 bp, Gossypium hirsutum
  unsure (1)..(1181): unsure at all n locations
tttgacgcgtgggtttgttttctaagttttcaaagctttcatggcttcttccattacatccaagcctttccttggagctactaaacccaattcttctctttctcctgatcttcaaagactttctttttcctctcttcgcatctcaatcaaaccaagaacccacaaaaagcttcagatacaagcagctgggagcacatttggaaattatttccgtgttacaacttttggagaatctcatggaggtggtgttggttgtatagttgatggatgtcctcctaggattcctctctcagaagctgatttgcaaggtgatcttgatcgaaggaggccaggtcagagccgaattactaccccaaggaaagagacagacacatgccgaatatattctggagtttccgaaggagtgactactggaacaccaatccatgtacttgtaccaaatactgatcagagaggacatgattacaaggaaatgtcaatagcttataggccatctcatgctgatgccacttatgacatgaaatatggtgtcagggcagtgcagggtggtggcagatcatccgccagagaaaccattggaagagttgcctctggagctattgctaagaaaattctcaagctgttttcaggaactgaggttcttgcctatgtctctcaagttcaccaggttgttcttccagatggctcagttgaccatgacactgtaactcttgatcagatagagagcaatattgtgaggtgcccaaatcctgattatgctgagaaaatgatcgctgctattgatgctgtgcggacaaaaagaaattctattggcggagttgtcacatgcatattgaggaatgctccacgcgggcttggttcaccagttttttgataacccttgaagcaagaacctggctaagggctgttattgttccttaccttgccacccaaagggcttggaattttggggattggatttgccnggtacttttcttgaaacgggtagttgaaccttaataatgaaattcctattcgtgatagaacttgggaagaatttagggagccggaacaaatctcctcccgcgtgggaataccagggttggaataatcccctgggggaagtttaataaatatgaggaattacctttctcagcccacagcctacaatttgggtaggaaaaccaccgcacgggtgactt

SEQ ID NO: 192909 - DNA, 1028 bp, Gossypium hirsutum
  unsure (1)..(1028): unsure at all n locations
ccaatccatgtttttgtaccaaatactgatcagaggggacatgattacaaggaaatgtcgatagcttataggccctctcatgctgatgccacttatgacatgaaatatggtgtcagagcagtgcagggtggtggtagatcttctgccagagaaaccattggaagagttgcctctggagctattgcaaagaaaatcctcaagcatttctcaggaactgaggttctcgcttacgtctcacaagttcaccaggttgtgcttccagacggttcagtttaccatgatactgtaactcttgatcagatagaaagtaatattgtaaggtgcccaaatcctgattatgctgagaaaatgattgctgctattgatgctgtgcggacaagaggaaattctattggcggagttgtcacatgcatagtgaggaatgctccacgcgggcttggttcaccagtttttgataagcttgaagcagagcttgctaaggctgtaatgtcactacctgcaaccaaaggtctttgaatttgggagtggatttgcaggtactttcttgaccggtagtgaacataatgatgagttctatactgatgaacatggaagaataaggacaagaacaaatcgctccggtgggatacagggtggaatatccaatggggaaattataaatatgagagtagctttcaagccaacagctacaattggtaagaaacagcacacggtgactcgagaaaaacaagagatagaactactagcccgtggtcgtcatgatccttgtgttgtccctcgagcggtgccgatggttgaagcgatggtagcgttggtgcttgtggaccaattaatggcacaatatgcacaatgtaaccttttccctatcaattcggagttacaagaaccgttgaacttggaaccggcaaatatatagacttgaatggttgcagaaccggcaacatcggcccttgctttcatcaacttgaattttcttaaatactccatttttcatgagaatgttgtggttntaatgtttttgtcaacac

SEQ ID NO: 192910 - DNA, 542 bp, Gossypium hirsutum
cggacgcgtgggctccggtgggatacagggtggaatatccaatggggaaattatcaacatgagagtagctttcaagccaacacctgctattagtaggaagcagcacacagtgactcgtgagaaaaaagagatagaactactagtccacggtcgtcatgatccttgtgttgcccctcgagcggtgcctgttgttgaggccatggtagccttggtgcttgtggaccaattaatggcacaatatgcacaatgtaacctttttcctatcaatgcggagttacaagaaccgttgagcttaggtttccccaacttcgaaccagcaatgatttgaatggttgcagaatgttctggttttaaggttttatcaaccctaagtcgaagggcttattagcatttctgttttgccctactttgttgtttgtgtgttttctttgtaactgttcggagcttttattgcttctcatgttccaacagtagagaataacagtttcagtgtagttgaaattattgagttgacatgtttttaataatatggcttatgattt

SEQ ID NO: 192911 - DNA, 814 bp, Gossypium hirsutum
ttttctaggaactagtctcgagttttggttgttttttttaatataatctaatttctaatttattaataatagaaatgttatgcgataaaattaaaattttatgacctgattgaaagttcatgatggagaatataaatgatccatatcaatcacaattcaaaagaaaacaaagcaaacagtatagttataagctcaatccaaaggaaaccaaaagccagttgtgttggaaccgcatggcaggtatgtgaatccatcagatcttacaggcaaaagaaagaccttcatgtttcacagcttccaaactctgaactgaaggctgaagcttagccacttttgcaatagcttggttttctttggcagtgccgccttctaagaaagctccaaccaccttcccatctttgatccagtaagatccgaacttcgcctttggtgatttcgggttgctgtctccgaaaagtactgtatctcctacattgtcaccatagaattgccatgatagatcaaaggaacgtgaatagaagtacggtaggtagtcatattcgtcaactgatttcccttccccacttgccttgatagcctttaccgcctgttcagctgatttccgggcatggtcaacgtgttccacccttctcaattcattgtataacttcagaggaaaagtggttagatcacccacagcatatacattgaggcccccttggttcgaaaaaaggcatcagtctttattccacccttttccttttcaacctgtcctttaaatagtggtgttaaaggccttccaccggaagggttggtcgaaccggaatccgggccg

SEQ ID NO: 192912 - DNA, 805 bp, Gossypium hirsutum
  unsure (1)..(805): unsure at all n locations
gttagttttggctttggttcaaaggtagaaaagagaatctagccgccgacaagcatataattttcggctcaaggaaagcacatgagaagatccggtttgagccgtagggaatcaaattcccaagtgtgaattcaaaggtcaagccaagccaatctttaagccaagcgagccatagaaacataatttcctcctctctattttatctgtcgtctctctcggaacttgcttctctatcagataaagcgaaatctgacaaaatcgatggcctcgcgtgacaagaaacctgcgaagccgtcgagcagccgtgccggtggaatacgcacgctctcggatctgaaccggccctctggacccgattccgacagcgattccgatgatccccaggagtactacactggaggcgagaaaagtggcatgcttgttcaagatccttcaaagaaaaatgatgtagatgaaattttcaatcaagctaggcaactgggagctgtagaaggtcctctcgagcatcctcgtccatcaagttcaacaagttttactggaaccggtagattactctcaggggaaactgttccttctgcacctcagcagcctgattccattattcacaacatatttttctggaccaacggtttcaccgtggatgatggccctctgaggaggttggatgatcctgaaaatgcagcatttttaaagagcatcagaaagtctgagtgtcctaaagagcttgagcctgctgatagaaggtcttctgtccatgtcaatctgatnaagaaggacgagaaatgccctgaaccagagaagaaat

SEQ ID NO: 192913 - DNA, 490 bp, Gossypium hirsutum
atggatttagcatggatgggggcttggaagttaaaaaaatagagagagtaactaatcatgatgtaaaagcagtcgagtacttcttgaaacagaaatgccaatcacagccagaaattgccaaggtccttgaatttttccattttgcttgcacatccgaggacataaacaaccttgcccatgcattgatgttgaaagaagcaatgaccaaagtcatgtttccaaccatggataaattggtcgaggcaatatgtaagctggctaaggctaatgcaagcgtttctatgctttctcgcacgcatggccagccagcttcacctacaaccttgggaaaggagatggccattttttctgttaggctaagcagagaaaggcaagaaatttctcaagtcgagatgatgggaaaatttgctggtgcagttggaaactacaatgcccatattgttgcatatcctactgttaattggcctcaaatcgcaaaacagtttgtgac

SEQ ID NO: 192914 - DNA, 633 bp, Gossypium hirsutum
aaaaagaaaaaaaatggtttctgatcagaacaacgtttcccggcagttgcagtcgaacacgttcctagtgtcaatctccgtaaataaaccgaaagccagtgttctttaatccctggcttcactctattactgaaacaagtttctccttgttttcttttatttttaatctaatttttgttttctttttggatatctttgaaaaattatatactaaaagactgaaaaatatggggaatgcaaacggaagacaggacggagctaacggcggtgtcgacgatctatccggaagatccaatggcggcgaggccgttgttcctggagccgctgcagctggaattcgcgtgccatcgtctgattcaatggtgaatacttcgccgcagagccctgggcggtctcgatccccgcttttattcgctcctcaggttcctgtagctcccttaccaagggctgatggccattcctttttcaaccaaacttggcggcatgattctcctgtggttgctgatagtccgtcagagaaaggaatccctgtcatcattacatggaattatggtggtaatgacgtggccgttgaaggttcttgggacaattggagatcaaggaagatgctgcagacatctggtaaggaccact

SEQ ID NO: 192915 - DNA, 722 bp, Gossypium hirsutum
tctcatgcgtccgaggaaaacaagggaaaaagaaaaccctagctttacctttttgttctttgtgaaacatcaaatcgcagagatggatctttcatagatttcacctcagatctctttctctttgtaaaagaaaattgggtttacttatttatttgggtcggattgggttggtttggttttagaaaagaaggaaggcgatgtcaaccccagcaaggaagaggctgatgagagacttcaagaggttacagcaggatccacctgctggtattagtggggctcctcaagataataatatcatgctttggaacgctgttatttttgggcctgacgatactccttgggatggaggcacgttcaagttgactttgcagtttacagaggattatccaaataagcctccaactgtccgtttcgtctcacggatgtttcatccaaatatctatgcagatgggagtatttgtctcgatattttacaaaatcagtggagtcctatatatgatgttgccgctatactcacttcgattcagtctcttctttgtgatccgaacccgaactctccagcaaactcggaagcagctcgtatgtttagtgagaataagcgggaatacaaccgaagagtgcgcgaaatagtggagcagagctggactgctgactgaactgcagtattagcaatggtaacctgccatcactctgaaaaataagaaatgccatactggcagtgc

SEQ ID NO: 192916 - DNA, 463 bp, Gossypium hirsutum
caaaatcttagagatggatatttgatagatttccctttcatctccttttctctttaaagaaaaattggttttcgattccattttcaatttatatattttggattagattcggttggtcttagggaaaaacaaaggaaagggcaatgtcaaccccagcaaggaagaggctgatgagagacttcaagagactacagcaagatccacctgctggtattagtggggctcctcaagataataatatcatgttttggaacgctgtcatttttgggcctgatgatactccttgggatggcggtacgttcaagctgactttgcagttcatggaggattatccaaataagcctccaaccgttcggtttgtctcacggatgtttcatccaaatatctatgcagatgggagtatttgtctcgatattttacaaaatcagtggagtcctacatatgatgttgccgctatactcac

SEQ ID NO: 192917 - DNA, 444 bp, Gossypium hirsutum
ggaaaaaaaaaatccacattacattcatcaacagaaaacccaaaaaacccgaagctcgaaaatgggaagctctagattctcggtcagtttcctcgcgatttgcgcaatcctggccatccacgtggcggcttccgcttcgtctcccatgctcgatttcggcggcaaccatttcctctcgattaaatcggagtgcagtggatccatcgcggaatgcctgatgctaagcggggaatattcctcggacttcgacgccgaattcgccatggactccgagatcaacaggcgcattttagcggcgaggcgttacattagctacggtgcgctgaggagaaacacggtgccatgttcgcgacgcggtgcgtcgtattataactgccggccgggagctcaagcaaatccttactcacgcgggtgcagtagaattacacgctgtcggcgttagat

SEQ ID NO: 192918 - DNA, 397 bp, Gossypium hirsutum
gcaagaagaagcgctaagtatagtagatgtgctgagaaaagccgacctttctttttgtgtgcagttaaatagggttgccctgttgttgttgctttttaatttttcttttattacggttagaacatatgttatcgggaatttctattcaaatgagtttagcacaacaagaatcaactgattcctagttcctagggctagtaaacttgactgaaacaagtaatgctaggagtggattaagtaatattacagtgatgggttgacaattttgaaatttcccaaacaaaggaaaagtaacaataccttacccgatcagcacttacactaactgcaaaaatgtgaagtgcgaattggatgaagagagggttttgcagcggcttgaaagaaatataatataaag

SEQ ID NO: 192919 - DNA, 424 bp, Gossypium hirsutum
cccacgcgtccgatagtaaatgtgctgagaaaagccgacctttctttttgtttgcagttgaatagggttgccctgtgttgttgttttttaatttttcttttattacggttagaacatatgttatcgggaatttctattcaaatgagtttagcacaagaagaatcaactgattcctagttcctagggctagtaaacttgactgaaacaagtaatgctaggagtggattaagtaatattacagtgatggggtgtcaattttgaaatttgacacttatgattgtattgttatgttatgttgatagagttggtgagtcgttatatgcatactacattgcattagatgtgattgaagttagggatgaaaaaccctagactagactctgaggcttaccagccttataaatgaaggagcttttgttttttt

SEQ ID NO: 192920 - DNA, 653 bp, Gossypium hirsutum
ggcatccaaagctcatatctgataccaaatctgctatagccgatgcatacaaccacacagattctgaatttttaaaatcagaaaacaaccagaatagggatgctggatcgactgcttctactgctatacttgttggcgatcgtttgctagttgcaaatgttggagattcccgagctgttatctgcagaggaggcaatgcttttgctgtgtcccgtgaccacaagccagatcaaagtgatgagcgacaacggattgaggatgctggaggatttgtcatgtgggctggaacttggagagtgggaggtgtccttgctgtttctcgtgcatttggtgacaggctcttgaagcagtatgttgttgctgatccagaaattcaggaggaaaaaattgacagctcacttgagttccttattcttgcaagtgatggactatgggatgttgtttcaaacgaggaggctgtggcaatggtaaagccaatacaggatcctgagcaggcagccaagcggcttatgcaggaggcatgccagagaggcagtgcagataatatcacctgtgttgtcgtccgtttcttggccaatcaaggtggttcctcacatactgttcctgcataatccatccattctcagcatggttttaggctttggttcttctag

SEQ ID NO: 192921 - DNA, 984 bp, Gossypium hirsutum
ttgatttcgttcttggagaagaagctttctcttttctacataagaaatctgtgcatcaaaaacaccaaaacaataaaaaagaagaaggaacaagacaattccaaaggaacaagagagaaaatgagtcgaggaagtggtggcgggtacgatcgccatattaccatcttctcccccgaaggtcgtcttttccaagtcgagtatgcgtttaaggcagtgaaagccgctgggatcacatcaattggtgttcgagggaaagactccgtctgtgttgttactcagaagaaagttcccgacaaacttttggatcagactagcgtcactcatcttttccctattactaagttccttggattgttggctactggcatgacagctgatgcaaggaccttggtccagcaagcaaggaatgaagcggccgagtttcggttcagatatggatatgagatgcctgttgatgtattgtctaaatggattgctgacaaatcacaggtttatactcaacatgcttatatgagacctcttggagttgttgctatggtgttgggtattgatgaagagaaggggccccaactctacaaatgtgatccagcgggccacttttacggccacaaggcaaccagtgctggatcgaaagaacaagaggcaattaatttcttggaaaagaagatgaagaatgacccagcttttacttacgaggaaacggtgcagacggccatttctgctctgcaatctgttcttcaggaggatttcaaggctactgagatagaggtgggagtggtgaaagctgataatcctgctttccgagtgatgtcaaccgaggaaattgatgtacatctgacagccattagcgagcgcgactagcgagctcagaccatcaagagccgctgcaaaaatctctgttatcaatcgaaaatgacaaatgtgctttagtttatcatatcatgtttgagagaggatagaaaaaggggtttgtagcttcaaatt

SEQ ID NO: 192922 - DNA, 350 bp, Gossypium hirsutum
tccctcgattcaaaacacccccaaaaaaaattccaaaaaaatataaaagaaaaagaaaatgagccgaggaagtggaggcggctacgatcgtcatatcacaatcttctctcccgaaggtcgccttttccaagtggagtatgcgtttaaggcagttaaagcagctgggatcacctcgattggtgttcgaggcaaagactctgcctgcgttgttactcaaaaaaaagttcccgacaagctattggatcagactagggtcactcatcttttccctattaccaagttccttggattgttggctactggcctgacagctgatgcaagggaccttggccaacaagcaaagaatgaag

SEQ ID NO: 192923 - DNA, 568 bp, Gossypium hirsutum
ccgccttcactttcttctccttaattcttttttccgtcatcaaatgctttacaaggaggtccgaaaaaaaattgtctttttggtgctttgaagttgcaaagtagaaaaatgggaattccatcagaaataagggatgtttggatacagagaaaaagaaattccttcataattccttcccctgctgaagacgagaagaatttgagagccaagcaattctctcaagaaggaattcgtgccggtgtcaaggcggctgcggtcgccgccgttgtcagcgccgtacctaccttgattgcagtacgtaagattccttgggcaaaggcaaacctcaaccatactgctcaagctcttatcatcagtggagcatcaattgcggcctacttcattaccgtagataaaactgttttggaaagtgctaggagaaattctcgagcacagttcgacaaaactgtttgaatgctagaattgaaggtattcagtggcgaaggttcgcagggcaagtatgatacatgttaataagttttaaggctgttgtatgccatgcattcacttttttttcttttttttttct

SEQ ID NO: 192924 - DNA, 757 bp, Gossypium hirsutum
caaaccctttaaaaagcctaaaaaaccaccccctaaatgaccatcaccaccaccaccaccactacccctaccatctccaccaatgtctccgccgatgcctcaaatccctcccaaaaactacccttttctcttccccaaagtacaatcctctgttctctctgacccttctcgtttcttctccccaaacctcctctcatcccctctccctactaactctttcttccaaaacttcactctcaaaaatggcgaccagcctgaatacatccacccttatctcatcaaatcagccgactcttccctttctatttcctacccatccttctttcacaacccttctttcatttaccaaattttcgtccctgatttaaccatctttgctaccgataaaaccacctcaacttcggataaaagccacgttatctcttcttacagtgatctcagtcttactttagatatcccttcctccaacttccgtttctttcttgttcgaggtagtccctttttaacctgttctgtaaccggcaatacaccgatatcgatctccactgttcatgcaattctctcgttttcttccaatagttcactcaccaagcataccattaagctgaacaatggccaaacttggattatatatgcatcgtcatccatcagtttgaatcatagtgtttctttgattacttctggtgggttttcgggtattcttcggatagctgtattgtctgattctgacccgacatgtgaatcaatcctcgatcat

SEQ ID NO: 192925 - DNA, 594 bp, Gossypium hirsutum
gaaagtaatagtgggggtagaattaatgaaagaatctttatttttcaaaagctgaatccacttggaacatatcacctcaatcccatctttgaaagtgggaaatttatgtaacatattatgaaccaagaataatatctggatcaaagaaaaaaaataaaaagaaccccattgcagaaaatcaacacagcaatgacattggatcgttttacaaagtttttttcattgaagcagcagtgatgcacactgagatcattacgactcagctgcaatctccgtggttgtggttgtggttgatgttgcagcaggggcaggaaccttattggcggcggtggcggcttgtttctctcgttcggtctcgagttggctgtagtttcctttctccttgaagagttggatatggtgatgtttgcagtagagtttaccttcatgtgctatatagtttgatgggctaatggtacaccctccatgggtacacttgaagcagctcttgtggtatattgtcccattcacagtacccctctcaattggataagcagtcttagaacaggccgcacatttttctaaggtgccaccaaacgagttcatcactttcag

SEQ ID NO: 192926 - DNA, 755 bp, Gossypium hirsutum
ccggggcacggtttctgcaaatcttcgaaaaatcatactgaaaaaacatcaatcaaagacataactaatgagcttggtaattttgattaactttaacactcccacactcctcaaagttttacaaaacctatggcattccataaaccaacagcatctctctaatgctcaaacaaacaacatcaagtaacccgtcctggagcatgcgacgaaccaaaaccgtttcccgatcacttttgtcatgagtcatcatcttctggatctgctgtacaatctgtacatgatgtgtgcgcagctggagattacatagcacctggggcatctctcatgcttatattcacactgtttcgcatggttcgtctaccgattcctgcattgcctttttgcatcatggcaacaaattcaccataatcgattcttccatcattatcttgatcaacttctctgattatatcctcgagcaaaacatctgtcatgttatgctcagcacaagcttgttgaagctcatcaactgtaatatacccacttccatccttatcaaagtatcggaatgcagcaacgagatgctcctcacgctctagtttattaaggtgaactgttgcagctatgaattctccataatcaatggtcccactattatcgacatcagctgcatccataaggtcccttatctctgtatctttcaaggtagagccgtatcttcgcaaaccagctttgagttcatcaaatgtgattgcaccactgttatcagtatccat

SEQ ID NO: 192927 - DNA, 490 bp, Gossypium hirsutum
gtcatgctgaaaatgaacatttcatttatgacatttcttctaaagtgaaaaccaaatttttgggaaactcaatagatatctatccacttggaaggacccgtgtgactctcaaaagagatggcacagtttttgatttggttcctcctctcacgaaagttaacaacttaatttttggacgaacctgggttgactcatcaggggagatgatcatgacaaacttgacaacaggcgacaaagccgtgctatattttcaaccgtgtggttggtttggagctggccggtatgagattgatggatacgtgtataattccgctgaggagccaaagatattgatgactgggaaatggaatgagtcaatgagttatcaaccttgtgatagtgaaggggaaccacttccaggcactgaactaaaggaggcatggaaacttgctgatgctccaaaaaatgataaattccagtatacacattttgcgcataagattaacagctt

SEQ ID NO: 192928 - DNA, 593 bp, Gossypium hirsutum
cccacgcgtccgggagcatttgccaggggttcctaagaagaagctggaagatgagaagcaaaaagggtccataaagttgctgccattaacttcccccggccactcaccaacttcaaaaggaacaattttggaaaagattttagcccggaaaaaagcatcaatgccagccggaaggatacatttttcgcggcgatggtggaatgttgcaaagatgataatgatgaagaatcacgaagcaatttatggagtggagttaaagtaacaaggagtatcagtgacaggttgggatttattaatctctactcttcttgtaaaagaacctgtgctgtctcggaatcagtagtgtatctgccaaggtctagcagagcagctaattacggcatacttactactcgtcgctcaacttaaacagatccagtgatcacattctgctgctcttaatttctctttctttaattttcctctgttttatgttgcatatgaggacaaggatggatgatgtctgtaatatataatatgaatagaaagctgaaatgttgcctctgccttttgtcttttttaatgaatgaatgaaggaattgggctgtttgatc

SEQ ID NO: 192929 - DNA, 635 bp, Gossypium hirsutum
  unsure (1)..(635): unsure at all n locations
tgttttctctctcacgcacgaaaacagaggaaaaaaaaatgtcagtcaccttgaaatctccgccttcttcatttctttcatcttctttacctaaatcaagattgggatttgcaaatgggtcatcttcttcaactctactcttcaaattcaacagatcttttccagttcttcgtgcctcttctggttcctcttcttctgttgacactggtttgagtactgaattggatgctgtgtctactttcagtgagatagttcctgatactgtgatctttgatgattttgaaaagtttccaccaactgctgcaactgttagctcttcattgttgttgggcattttgagccttccagatactatttttagaaatgctgtggatatggctttggcggattcgacatgttctccgctggacaatcctgaactgaggttgtcttgttttgttaacaaggctttagtaaatgttggtggtgacttggcaaagctagttcctggtcgagtttcaactgaagtggatgcacgcttggcttacgatacacatggaattattaggagggtgcatgacttgctgaggctgtatgatgagattgccgttcctccaaaacgcttgttgtttanaattccttcaacttggcaaggc

SEQ ID NO: 192930 - DNA, 427 bp, Gossypium hirsutum
aaaaaaggctgaacatttcttcaacaactctactctggctggcggctttcagcagtcgacacggtgactttcttcaccaactctctcccgtgacagtctgtcaccttcccaaataccgccaccgctttaggcggcttccgccgctccatcacttgccgaagccgcccttcaccaagtgccataaacaaaagagagaggtcattaagcaaatagagtgagaaatggggtgtgggaatgtgttcttcacgttgatcataacattatcagtagctctaatcacctacaacatcctcatctcagccaatgcttctttaaagcaagagcttcctgggccttcaacctcatccatcatcgaccccataatccggatgccggtagaaagatccagaaagtatgggtcaaatgcagagaaaaagttgtttccaca

SEQ ID NO: 192931 - DNA, 1085 bp, Gossypium hirsutum
cccacgcgtccgcccacgcgtccgcagatctgattttccgggaaaacatacaacgaaaaagaaaatttcgaagagagagagaaaaaatgtttgcatacgatcgcgtaagccactcgagtgccaacaaggcggatgagatagatctagaatcaggggagactttgtacccgggactcagctacggcgagaaccaactccggtggggttttatccgcaaggtgtacggcatcttggcggcgcagctggttctaaccaccgtggtctccgccttcgtggttctttcggctccggtcaacgagctccttcgtggaaattctggcctcttgctcttcctctgtttaatccccttcgtcttgttgtggcccttgcatgtctatcaccaaaagcaccctgtgaacttggttatcctcagcctcttcaccgtgtcattgagtctcacagttggtgtgagctgtgcaaataccgatggaagaatcgtgcttgaagcgctaattttgacagctgctgtggttgcatctcttactggctacactttctgggcatcgaagaagggcaaggacttcagctatctcggaccgattttgttcaccggccttattatcctcatcttaactggtctaatccagatgttcttcccgctcggcccaacatctactgctgtatatggtggaattagtgcgttgattttctgtgggtacatagtatatgacaccgacaacctgatcaaacgcttcacatatgatgattacatattggcctccgccactctttatttggacatcctgaatttgttcatttccattttacgggttctgagatccggggataactagttatacaatatttctcacaaggccagtcggaaagatttcaaggtatggcgaacgaagtattgtctgatgaataggaaaaatattagtctatatagtataattgctagacttggcaattactgtattccgactgcatttgggtattttctcttgttataatcatgtgctatttacttatttgatatcgtgtaatcatgttgctagatctaatcttttcttgttgtgttttaccagccactaagatggttgcac

SEQ ID NO: 192932 - DNA, 583 bp, Gossypium hirsutum
caaaaaaaaaaaaaacccccgctagaaaattaaggggagggaatactaacaagagaagagggagtttgggagatttcctttttctttttggatttttgatggcgagcagcagaggctattactcgagaccgaactaccgctttctgtccagcgatcaacaactgcaatcgccgttgagtcacgactcggcgtcggcatttgagttagacgagtctgatatctacaacaacggtgtctcgactcgctctgactcgcctgagttcaggtccaccagtcgagtggcgaagaagcagtccaacaagcgcggcggcggagggaattccgtcgtcggaggggcgccggcctccctgccggtcaacataccggactggtcgaagatcttgagggaagagtaccgagataataggaggagatcggagagcgacgataatgacgtggaagccgatgattggtcggaaggaggtgtcaggattccgcctcacgagtttttggcgaagcaaatggcgaggacgaggatcgcgtcgttctcggttcatgaaggggtagggaggactttgaaaggaagagatctgaggagggtcag

SEQ ID NO: 192933 - DNA, 1163 bp, Gossypium hirsutum
cccaactgttgttcccgacgattccgtgaacccaaggttggctaagatcttggagaaagtagctgttcggaaagagcttatagttgcactcgccaattcgaatgtgaaagagatgttggaggtttggttttctagcatcaagagagtcggtatacctaattacctagttatagctttagatgaccacattgaagagttctgcaaatcgaatgatgtcccggtgtacaagagggatccagattcgggtattgatgccgttgggagatcaggaggcaatcatgctgtctctggattgaagttccggattttaagggagtttttgcaactgggttatagcgtccttctctcggatgttgatataatatacttacaaaacccattcaaccatctttaccgggattctgacgtaaagtccatgactgatggtcacaacaatatgactgcttatggatataacgatgtcttcgatgaacctgcgatgggttgggcacgttatgctcatacaatgagaatatgggtatacaactctggtttcttctttataagacctacaatcccttcaatcgagcttttggaccgtgtagctgatcggctagctaaacaaccaaactcatgggaccaagccgtttttaatgaggaactctttttcccatcacatccgggctacgagggactacacgccgctaagagaaccatggatttctacatgttcatgaacagcaaggtcctatttaaaacagtaaggaaagatgctaaactcaagaagttaaaacccgtaatcgttcacgtaaattaccacccggataagcttcgaagaatgaaagcagtggtagaattcttcgttaacggcaagcaagatgcattggatccatacccagatggctctgagtgagatagcaacaacaccatcaaggatctcatctcgacctacggatgatggatggactctccggttctcgctcgttccaaaagctacatgattatgggtatgtaattctgatattatcttacgagaagagtgtctgaacatctttctttactcactttctttttaacttaaagctttgtattacttgctgtaactttttttgtcaaactttacaagcagtttaattagtacacttgtgctatattatgcaaactaaggttttggttgttaaaaa

SEQ ID NO: 192934 - DNA, 922 bp, Gossypium hirsutum
taacaaccaaaagttttagatatagaattacggaagctcatctctctcttctctctctctctagatttcaccccttaggtttctctttccacacagagacagagagagaatcagaggagcttaatcgagatttgatattcctcaccacagatggatcagatattgaacaaggtgggctcctattggctcggccagaaggccaacaaggagatcgattccgtcggcgacgacctcaactcattatccaccagtattgaagggggagccaaatggttggttaataaaatcaaaggaaaaatgcaaaagccgttgccagagctgttaagagagtataacctgccaataggaatcttccctcgtgatgccacaaattatgaattcaatgaagagactgggaagctcactgtttttattccagcaatatgtgaagtgggatacaaggactcatctgttctgcgcttcttcaccactgtgactgggtatctggagaaaggaaagctggctgatataaaaggaatgaaaacaaaggtgatgatatgggtaaaagtaaccagtatcacttgtgaaggatctaagatctatgtcacggccggaatgaagaaaagcacgaatagagaggcgtacgaggtttccacggatggagtaactgtagataactcttaaagtggttaggatgccttggagatcctatttcttttaacttttaactctgaaccttcatacttttgtgtccataataagttttaggattcaagtgcaaagaccggtcaactttatggtttctattgtgataaggcttttattctgttctactatgttgaaggtgtctggccaaatatatatataatgaaagtggcaatgcatgaaccttgtgattaagatattataaattgtatggaaggtgctttagaggatctgcagt

SEQ ID NO: 192935 - DNA, 562 bp, Gossypium hirsutum
gaaagttttgagtgcttcagaaagaaagaaaaagggcggtgcacgtgtttgtatattcgggggaaaagcatttgccacttatgttcaagccaagagaattgtgaaattcattaccgatgttggagctacagttaatcatgatcctgatataggtgatttactgaaggttatttttgttcctgactacaatgtgaatgtggctgaattgcttatccctgcaagtgaattatcacaacatatcagtactgctggaatggcggcaagtggaaccagcaatatgaagttcgcgatgaatggttgcattgtaatcgggacctcggatggtgccaatgttgaaatacgagaagaggttggagaagaaaactttttcctcttaggtgctaaagctcacgaaattgctggacttcgaaaagaaagagctgatgggaagttcgctccggatcctcagttcgaagaagttaagaagtttatcaaaagtggcgtattcggatcttccaactataatgaactcctgggatcattagagggaaatgaaggtttcggtcgtgcagactattttctt

SEQ ID NO: 192936 - DNA, 697 bp, Gossypium hirsutum
  unsure (1)..(697): unsure at all n locations
cccacgcgtcagccactctcgaggatttcctcaagttcccatctttgtttggctttcgcatcagctccatggatcgggcccagctcctcctcgtaggattacctctcttcctcttcgccaccgatctcttcagcctcttcactcctccgcccccaaagccgccgtcccatcaccatcaccaccatcatccccacctacccaaacctccactcaatcctgaaaccctagatatttctttacagaaacccagcgctattggaggaatcggctatggcagcacggttaatatcaatttctgcgcttcatgctcttacaggggaactgctgtgacaatgaagaagatgttagaagcccagtttcctggaattgatgtaatccttgataactatccaccatcattgccgaaacgtttgctttcgaaagtggttccagttttccaatttggagttatagggattatgatggcaggtgaacagatttttcctatgattgggattacgacaccacctccgtggtattattccttgcgtgcaaacaggttcgggtccattgcaactgcttggcttcttgggaatgtaatgcagtcttttctgcaaagctccggtgctttcgaggtttactgcaatgatgaattggttttctctaancttaaggaaggaaagtntcctgaagagattgagttganagatattatcgt

SEQ ID NO: 192937 - DNA, 770 bp, Gossypium hirsutum
ctcgatttttctcgtccaatccaatttgttgaggaatcagacaaaggtttaggttatttgctgataatattttgaagaaaacatgacaactgctgctagaccgacatggcaacctgccaaaggtgggaatgaacagggtggcactcgcattttcggcccatctcagaagtattcgtcgagggaccttgctgctcatactactctaaagcctagaaaggatgggcaggacacccaggatgagttgcagaagagaaacctccgcaatgagcttgaagagcgtgaacggaggcatttctcatcgagggacaagtcctataatgatgacagagatcataggaagggaaaccatcttcttttagaaggggcaaaaagggaggctgaagaccgaattgttccgcgcagtgttgatgctgatgattctgatgtggaagtcaacagtgacaatgaaagtgatgacgacgacgacgatgatgatgaggatgatgaagaagctctcttggctgagctcgaacggataaagaaagagaaggctgaggagaagctccgccaggaaaaactagagcaagaagaacagctaaaagccaaagaagctgagcttcttcgaggaaatccactactcaataatccaacatcttttggtgtaaaaagaaggtgggatggatgatgtggtgttcaagaaccaggctcgcggtgaaaccaagcctcaaaagcgcttcattaatgataccataaggaatgacttccacaggaaattcctgctgaaatacatg

SEQ ID NO: 192938 - DNA, 482 bp, Gossypium hirsutum
attttgggttctttttgcttctagattttgggggggtttgttttaaattataaatccataactgagagatcatagaaaaagggctggtccttttatcgagctaaagcaaggaagtttacttttttgattggaaaaaatgctttttctttttaagttaaaaagattttaaaagacccaaaaaaagtaaaaaaaaaatgtctgttgcagagctgaaagagaagcacgcggcggcgacggagacagtgaataatctaagagaacgattaaagcaaagacgtcaacagttgctcgacactgatgttgctacatatgcaagatcacaagggaagagtccagttacttttggtcctacggatctggtttgttgcaggaccttgcaaggtcacactggcaaggtttactccttggattggactccggaaaggaaccggattgttagcgcgtctcaggatggacgattaattgtgtggaacgctctaact

SEQ ID NO: 192939 - DNA, 1256 bp, Gossypium hirsutum
agatcactccgttcttcactggaaaaacataatcaaactgctacaaaataattctccaccatgagctctccgggaagtggaatgtttagtggatttacaaagttatgtaagggattggctgtgatattaatcggtggccacgttgtggttcagcttcttcctacttctgttacttaccttgctcttattcccgccaggactattccttttggttggaacctcataactgctggttacattgaacaatcagtgcatggggtggttgttagcacccttggtcttcttttcatggggaagttgcttgagcctatatggggttctaaggagttcttgaagttcatcttcatagttaactttctgacgtctgtttgtgttttcattactgctattgctttatactacctaacaatgcaggaaaagtacctttacatgcctctttccggcttccatggggtgctggcaggcttcttggttggcatcaagcaaatagtacctgaccaagagctatatctcctaaaaatcaaagtaaagtggttgccatcacttatgctattgctttcaattgccataagtttcttcactccagagtccgcaacatatcttccaactttgatatttgggacatatattggctggatttacctcaggtacctgcagagaaaaccagaatcaaagcttaggggagatccaagtgaagattttgcattctccacattcttccctgaatttctcaggccaatcattgatcccattgcatcaatatttcaccggatgctttgtgggaaatctgaagtttcatcaaatcctcagggttatacattgggaggtgcaccattacttggttctgaccccattgaggcatctaggagacgagaaagaggggctagagcgctggaggagagattggcagctgagaaattggctgccggacgtgattcagaagagccacacatagacggaaatgatcgtgtttgattgctaagaaagtcaatcgtcattgacacccatcaaggcttatgcacaatcatccatatgtgctgttgccgcatatatgattagaaatgaaaagattccagagcatgttgttacccttacagtataacataggcgaaattcattctttttttttctttttttcactttcttttgttcctatttgttgattgcttgtacaactgcactttgtcctcattgtgaaccttctttttcaatgtaaaatttctctttttttcttcttaaaaaaaaaaaaaaaaaac

SEQ ID NO: 192940 - DNA, 539 bp, Gossypium hirsutum
attgaacaaaagaaaagcaagatcccgccgttcaccgaagaaaaatatcaactgcctcaattcgcgagcgtccaccatgagctccccggggagtggaatattcagtggatttacaaagctatgcaagggactaacggtgatactaatcggtggccacattgttgttcggcttctcccttcttctgttatttaccttgctcttattccggccaggacaatcccttttggttggaacctcataacagctggttatattgaacaatcattacatggggtggttgtcagtgttatcggtcttcttttcatggggaagttgcttgagcctatatggggttctaaggagttcttgaagttcatcttcatagttaactttctaacttctgtctgtgttttcactactgctatcgccttgtactacataacgagggaagaaaattacctttacatgcctctttccggcttccatggggtgctggcgggcttcttggttggcatcaaacaaattgtacctgaccaagaactgtctttgctgaaaatac

SEQ ID NO: 192941 - DNA, 445 bp, Gossypium hirsutum
tcgtttttattttatatacgaatccccaatagtttctcccactttccatctctttgtctttcataatcatcaacaggggaagcaagctaaagcagccaccccccttcccctttttctccaattattatctttattcatccattattctctctctgtgtctatgcttttgttcttctcatagtcttcttagtgttgcctaaatggcgtctttgagcttctttttcccttctggttaatggagtcctttggttattggatgatttgaggttatatcagttctaagttgtaacagatactagtagaaactcaaagcttcagtttgatttcggagatttcctcgagtttcggatttgttctgagtcctgtattggaacgatgatgatgtttgaggagatggggatttgtggggatatggatttctttggtgcttctttgggggaaaagg

SEQ ID NO: 192942 - DNA, 515 bp, Gossypium hirsutum
cccacgcgtcccctctctctctctctctctctcatgtctgaagcagtaaaatcgaaaggatgggtcaagggacaccaggcggtttgaaccggcaaggtcttcccggggaccgtaaaggcgacggatcgaacaagaaggaaaagaagttcgagccagccgcaccccctgcgagggtgggtcggaagcaacgaaaacaaaagggtccggaagcggctgctcgacttcccacagtaaccccactcagcaagtgcaagctacggctgttaaagctggagcggatcaaggattatttactaatggaagaagagttcgtagccaatcaggaaaggcttaagccccaggaagagaaagccgaggaagaccgatctaaggtcgatgatttgagaggctccccgatgagtgtgggcaatttagaggaactcatcgatgagaatcacgccattgtttccttttcggttggccctgaatactatgtgggcattttatcatttgttgataaagaccaacttgagccc

SEQ ID NO: 192943 - DNA, 475 bp, Gossypium hirsutum
tcaggttatgggtatacctgtaggaaaacgtgctcgttacacagctcttggaggagtccgtccttctgcgtgcttgcctattactattgatgtcgggacaaacaacgagaagttgttaaacgacgagttttacatcggcctcaggcaaaggagggcaactggacaggaatatgctgaacttcttcatgagttcatgtctgcagttaagcagaattatggggagaaagtcctaatacagtttgaagattttgcaaaccacaatgcattcgagctgttggcaagatatagttctagtcatctcgttttcaacgacgacatacagggtaccgcatctgtggtgctggctgggcttcttgcagccctgaaattactcggtggaaccctcgctgaccataagtttttgttccttggtgccggagaggctggaaccggtatagctgagctcattgctcttgagatgtcaaagcagactgga

SEQ ID NO: 192944 - DNA, 425 bp, Gossypium hirsutum
ttctttcgtccgaaaaaatacaagaagctaggggcgaagcagctgcaaaccgcgacaagtacgttggcctgtcatctacttgcataacttataagtccagtgcatcctcatacagaagtggtggcttcaatggtggtggggataagtatggaggcataagtagcagaagagaaagtgacagctatagagacagttataaagaaagcgatccatatggggaagaaaagtttgatacagatacctacgtcaaatcgcatcgagggactgcatgtgagatccaagggaattcctctaaggagtctaggcatcatggcagcaaggattcaaagaaaaaattctcttcagagttgaatgattccaataaatatagccaaagcaccagcaccccttcaaataattttgatgatgactttgatgattttgat

SEQ ID NO: 192945 - DNA, 563 bp, Gossypium hirsutum
gagagaaactgctttctcctttcttcctgttggagagattagtaaaaaccaaaaatggggagagaagtatcagaaagctgcattgatagcctactaatcgaaatggtttccacatattgcaaccgtttttacgccaataagcctgagctcgctgctcgtcggatcgaagccattgggtatcaggttggccaccagctctctgaacggtacacgatggagaggccacgttttagtgatcatttagaggcaatcaagttcatctgcaaggacttttggtctgaactctttaagaagcagatagacaacttgaagacaaatcatagaggtacctttgtattgcaagataatcgttttcgttggcttacacgcatgtcaattgatcaatcacctgaaaatggagcatctgaagagccttctatcatggctgatgagaaggctgtggaaagcatgcatctatattttccatgtggaatcatcaggggagctctttcaaacttgggaataccttgtgcagtttccgctgacatatccaaccttcctgcatgttcatttgtcatccgaat

SEQ ID NO: 192946 - DNA, 436 bp, Gossypium hirsutum
cccacgcgtccggtcgttgcgctaaaacacaaacatggagcttgtgcagctctggtaaatccttcatcagcagaacctcttgtctggccagcaactttaaagttcattaccgagcttaatgaagaggcaaaatcactattagaacaggccttaatggaggcaaaccgggaaagggaaaagaacatcttaaagggaacagcttactcacttccatcaccctcacattctgactcagggttagatgacagcgcttctgaggctagcgatactgaagtatgctgtatatgctttgagcagctctgcactattgaagttcaagactgtggccaccagatgtgtgcacaatgcacagttgccttgtgctgtcacaacaagccaaaccctgtgactgcaagcctaacaaccctggtatgccccttttgccggtgcaccattg

SEQ ID NO: 192947 - DNA, 1496 bp, Gossypium hirsutum
cccacgcgtccggaaacagaatttgtaacttgctatcctcttgcctagcgggcaaggatttacctccgtggaaaagatgattcattcggatccgcatgaaagcccaactccattgcattgccagaatccatgttgtatatttgaaagaggttgacctccttgcttctctcatggtacaatcctcttcccgctgagccccctttctcctcggtccacagagacaaaatggaatgtaggactaggactggcgccaacagttaatcacggaagaaaggactcactgagccgggatcactaactaatactaatctaatctaactaatactaatctaatactaatagaatactaatctaatactctaatactaatagaatagaaaaaatagaatagaaaatactaatataatagaaagaactgtcttttctgtatactttccccggttccgttgctaccgcaggctttacgcaatcgatcggatcatatagatatcccttcaacacaacataggtcgtcgaaaggatctcggagactcaccaaagcacgaaagccaggatctttcagaaaatggattcctattcgaagagtgcataaccgcatggataagctcacactaacccgtcaattttggatccaattcgggattttccttggggggtatcagtaaggaattggaatgtaataatattgattcatataggaggaaaaggttctctattgattcaaatgctgtacctatgggatagggatagagaaagaggaaaaaccgaagatttcacatagtgcttttgatcgaaaaatcaatctgatttatttcgtacccctcgctcaatgagaaaatgggtcagattctataggatcaaacctatgggacttagggaatgatggaagggaataaaataaaaaaaaaaaagaaatcaaaaaaagaggggaaaaaaataataaaaataataaataagtaaataaaaatgaagtagaagaacccagattccaaatgaacaaattcaaacttgaaaaggatctttctgattctcgaagaatgaggggcaaagggattgatcgagaaagatctcttgttcttattataagatcgtgtgattggatccgcagatgtttggtaaaaaaaatcttctcttttgagaataatcaaaaatggaaagtgttcaattggaacatgaaaacgtgactgaatttgtcctagttactcttcgggacagagtggaagaagggaggagattctcgaacgaggaaaaggacccaatgacttcgaaagaattgaacgaggagccgtatgaggtgaaaatctcatgtacggttctgtagagtggcagtaagggtgacttatctgtcaacttttccactatcacccccaaaaaaccaaactctgccttacgtaaagttgccagagttcgattaacctctgggtttgaaatcactgcttatatacctggtattggcataattacaagaacattttgtagtcttagtaagagggggt

SEQ ID NO: 192948 - DNA, 655 bp, Gossypium hirsutum
cataaatccatcactattacaagatccatagcaaaaatcatcactgtcgctgtttgttcatttctggggtttcttctattttttcacttcaaagctctctgtaaatggcagcttcggcgtcatcatcatcaacaacaaaaacgataccggcaaggaaaaggggatggctcagtaacatctcctcaatttcatcacggatttatttcttccttatcttccttcagatcccacttttcaggatcccatgcagatccggaatgtgttcaactccaattcatgtcacatcttcccagttgatcgcaagtgacatctttcctgtgcctgtggtgaaggcaatcctttttcctggagccattacaaatggccttgccaagaattggactgttccgagctgggacaacttgttaaacatgtataacttaactagtataaaggaatcctctgcattacccgatctccagcgcttagaggttctagctggaagctacttttgtgtggcaggagcactcgtgggacttctaaaacccggaagaatgagcatgtttgggacactgctcgtaatatggggtctcgtcaaggaagggatcataggaaaaccggcaaataccgatcctacaaaagctgtatatgtatatccaacaatggtgcttgcact

SEQ ID NO: 192949 - DNA, 797 bp, Gossypium hirsutum
taatactctaatactaatagaatagtattctattagtattagattagtattagttagattagagtagtattagttagtgatcccggctcaatgagtcctttcttccgtgattaactgttggcgccagtcctagtcctactaatactaatctaatactaatagaatactaatctaatactctaatactaatagaatagaaaaaatagaatagaaaatactaatataatagaaagaactgtcttttctgtatactttccccggttccgttgctaccgcaggctttacgcaatcgatcggatcatatagatatcccttcaacacaacatatgtcgtcgaaaggatctcggagactcaccaaagcacgaaagccaggatctttcagaaaatggattcctattcgaagagtgcataaccgcatggataagctcacactaacccgtcaattttggatccaattcgggattttccttggggggtatcagtaaggaattggaatgtaataatattgattcatataggaggaaaaggttctctattgattcaaatgctgtacctatgggatagggatagagaaagaggaaaaaccgaagatttcacatagtgcttttgatcgaaaaatcaatctgatttatttcgtacccctcgctcaatgagaaaatgggtcagattctataggatcaaacctatgggacttagggaatgatggtaggcgactaaattaatgaaaaaacgcagtcctatcccaaattaatcgtcttgcagaacataccctttttgtcattttgtttaaaacaaaa

SEQ ID NO: 192950 - DNA, 575 bp, Gossypium hirsutum
  unsure (1)..(575): unsure at all n locations
cccacgcgtccgcccacgcgtccgcccacgcgtccgtccaatttagggtttgcacgagccgtagttgcccgtttgcatcaggaagaaatggcggtccctttgctgtctaagaagattgtgaagaagcgtgtcaagaagttcaagaggccccaaagtgaccgcaagatctccgtcaagacaaactggcgaaggcctaaaggtattgactcccgtgttaggaggaagttcaagggatgcactttgatgcccaatattggttatgggtccgacaagaagactcgccactatcttcccaatgggtttaagaaatttgtcgtgcataacgtccaagagctggagcttctcatgatgcacaacaggacatactgtgctgagatagctcatgatgtttcaacgaagaagaggaaggaaattgttgagcgagcagcacagttggatgttgtcgttaccaacaaattggctaggttgcgcagccaggaggacgagtgaaggtcggttcttgaatgttgattttgctctttttaatatattttatttaccatntaggggttttctttcctgcaattcgatcaaat

SEQ ID NO: 192951 - DNA, 418 bp, Gossypium hirsutum
tcctgacaccagtccagagtttctatcaggaagaatggctgtccctttgctgtcaaagaagattgtgaagaagcgtgttaagaagttcaagagaccacaaagtgaccgcaagatctccgtcaagacaaactggcgaaggcccaagggtattgactctcgtgttaggaggaagttcaagggatgcactttgatgcccaacatcggttatggctcagacaagaagactcgccactatcttcccaacgggtttaagaaattcgtcgtgcacaatgtccaagagctagaacttctcatgatgcacaacaggacatactgtgctgagatagcacatgatgtttcgacgaagaagaggaaggaaattgttgagcgagcggctcagttggatgttgtcgttaccaacaaattggctaggttgcgc

SEQ ID NO: 192952 - DNA, 426 bp, Gossypium hirsutum
cacaattcccgcttaactcctatcttcttcacctttagggttacaacagccgcacgccagccccagcctagcgtttccataaggaagaaatggcggtccctttgctgtcgaagaagattgtgaagaagcgtgttaagaagttcaagaggccccaaagtgatcgcaagatctccgtcaagacaaactggcgaaggcccaagggtattgactcccgtgttaggaggaagttcaagggatgcactttgatgcccaacatcgggtatgggtcagacaagaaaacaccccactttcttcccgatggatttaagaaattcggggggcccaatgtccaagagctagagcttctcttgatgcacaccaggccttcctgggctgagatagcccatgatgtttcaacgaagaagaggaaggaaatcgttgagcgag

SEQ ID NO: 192953 - DNA, 438 bp, Gossypium hirsutum
gtctaattgaatttcacaaacccccaaaatggctaacctcatgatcatggcgggtctcctggttgcggtgtcgacggcggcaaccgttacggacgcgcaagcaacttgtgcggcaaagctagtgtcttgttctcgttacatcctaaacaccaccatcaaacctcaagatgactgttgtaacccgatcaaggaagaggtaaccaacgatctttcctgcctttgtaacctctacaaagaccctaaagtttttgcttctttgaacatctccaccgcgcaagctctcaatgtcactcgtgaatgcggcgtcactactgatctaaaccgcttgcaacagcaacagcacttctacaagctctgctacatccccaccaggaggacgatctgcagatcaaaatggaggtgctgacaggatatcattgactggagtaccatcggatt

SEQ ID NO: 192954 - DNA, 811 bp, Gossypium hirsutum
  unsure (1)..(811): unsure at all n locations
cggacgcgtgggttggtctgtttagatactgtgtcagagacttagtcagcttttgtccctgcgaaccaaccgtgtctgaaccacttctcttccatcccttaaaagggcaatacccttattagatatttgcttgatctcataacccaacaccccccaaaaagaaccctaatttgttatcaactttcatatctcaataaatcatatagtatatcccccctccccatgaataaccctcaccatctgaaccctacttctctaaaatccaggttcaccacgaggttcctccgcgccctgactaaaatccgtgctcaaaaacctatctcctcgtcttctcccacagagatcttccgacggtatcgaaggatcaaggttgcagctgacaagtccatggcttactccgttaggtcgaggagaatttggagtaaggcaatgctttggaagcttcgaagccgatcttatcgtcgtcaagacccttgttcaggcagaagatctgggaagactaatcaagccatcatgaaaaaatcaagtaacgagaatactacaacaagaagggaagatggggttgggtttgttgaagaggcagatgaactaagacagcttgttccaggtggtgaaaccatgaatttatgcaacttgttggatgagactgcacattacataaagtgtcttaccacccaggtacaggtgatgaaaaaaattgcggatttctactctttctgagtaattatatataaatatattcttatcacttcaatatatataaaataaatccaaggaacataatttnnnnnnnnnnnnnnnnnnnnnnnnn

SEQ ID NO: 192955 - DNA, 490 bp, Gossypium hirsutum
  unsure (1)..(490): unsure at all n locations
cccacgcgtncgcccacgcgtncggatgaacttaatgctcaatggaagcaacaaaagagacggggtttcaaaagctggagtacaagggactgaaatgaatgatgttactattactgttgatcaagaccacggaagtttgctggctggggagatattgaagcgtaattatagttcctggctatccggcctttttaacaaagacaacaacagtgtggaagttgcacacttccatggcttacaagaagcattggacaaaactcgctgtggggaaacaccagactacctcaaacgtatcgcggccctaatcgaactggatcgtggaaaggctactaagtttggccataaaaatattgaagttctggtttgtgccgcaatcaaagagatggaagactggcgtacacctaaggattccggctgtaaccagttgaaaaagtgggctgcgacgctcaatatgggtaaggaacaagattttgaagtgaaatttgctgat

SEQ ID NO: 192956 - DNA, 916 bp, Gossypium hirsutum
tagcgagttttttctttttccattgaagaaattggtgggtgtgtttagccattatttcttgtttgaaattggttgaacatatcgtcgtgttgcttttttgaaggcttggtgaaaatggacaaaaatttgatggataaagttagtgcctttggtgaacgcctcaaagttgaaggagctgaggtgggtagaaaggtgagtgctggcatgagttcaatgagcttcaagataaaggagctcttccaaggccctaacccagctgatcaacttgtcgaggatgccacctctgacgccctcgatgagcctgattgggccatgaatcttgatatttgtgacatgataaaccatgaaagagttaatagtgtagatttaatccgtggcataaagcggaggttaatgttgaagagccctagggttcaatacttgtcattggtgttgctggaaacttgtgtcaagaactgtgacaaggcattttcggaggtggcagcggagagggttcttgatgacatggttaatctaattgatgaccctcagactgttgttaataatcggaacaaagctttgatgcttattgaagcctggggggagtcaaccagtgagctccgctatttgcctgtttacgaggagacttactagagtttaaaatcaaggggtgttcgctttccgggtcgtgacaatgagagtttggcacctatttttacccctcctcgctcagtttccgcacctgaagtggatgccagtcttgcacatcagtttcaacatgacctgcaccttccgcacgacactcctcctccaagcctttaccgccgaacaaactaaggaagcttttgatgttgccagaaacagcattgaacttctttcaactgtgttatcctcatcaccacaacaagatgctctcgaggatgacttgacaactaca

SEQ ID NO: 192957 - DNA, 535 bp, Gossypium hirsutum
aagcaggctgttgttgtttcgtctcatgaagatcccgagagtggtgacgatgaaatcatcgaggaactcaaagtggagaagacagaagaagatagtggcgatgtaaaaggttcggttccaatcaaggagatgaaaaatcaagctgtcacggagaacgggcggaaacggaaaaggtcaatgcaggcgaaagaaaatgggattacgacaaagttaagcaccaatgattcgattaaacctgtggggtatcgacaaaatggtagcaggcgcaaaaacaaacctcaacgggctgccgaagctattgttgagtgcaaatgacgaggttttgaataaccgtcaccgtgtcttttaccttattttttcgtactaaaagtaatgcttgtttgcttgctcgtgtatggattccgttttttccattttgtcacatttgattcgtttgtgtagtctcggaattcaacttcggggtttttcgatttgatgatgttactaatgttttctattatacaaaaaaccgagaacgtgtgtgtttttgcacagt

SEQ ID NO: 192958 - DNA, 1327 bp, Gossypium hirsutum
ttaacatcgggatcgatccttcaccgtacgtgatcaaattacaatgttgagctctcgagtgaagattcaatgggggttaaattcattggtagcgctaaggttattaacccaaatgctgtgaaccgtccagatggggtcatccatggcatcgaacagttactaatccctcaatcggtgcaacaagatttcaacagtcggagaagcctccgctcaatctccgccgtcaaaccagaaggtgctcccgaagttgaccccagaacccaccgcttgaagaaacctgcccccccagtgaaacccggttcaccacccgtccttccgatttacgacgcaatggctccaggtccatcactagccccggcaccagctcccggacccggcggacctcaccatcatttcaacggaatgaggcaagtcaaagatttcatccaaactctgattcaatatggtgggtacaatgaaatggctgatatattagtgaatttaacatcattagccactgaaatgggtcggttagtttccgagggttacgttttaactgtattagcacccaacgatgaagccatggctaagttaaccaccgatcaattaagcgaacccggtgcaccggaacaaatcatttattatcacataatcccggagtaccaaaccgaagaaagtatgtacaatacagtgagaagattcgggaaagtatcgtacgatacattgaggttaccacacaaagtatcagctcaagaagctgatggttctgttaaattcgggcacgccgatggatccgcttatttgttcgacccggacatttataccgacggaaggatctcggtgcaaggaatcgacggtgtacttttcccgcctgaagagaaaactaaagaagaaaagaagactatccaagttgctacagcgaaacccagaaaaggcaagttgcttgaagttgcatgcataatgcttgtggcaattggtcaagattctcattttagcacatgccaaatataaaaatcacaaccatcatttccccatatcataaacaaaaaacttcaaaagaattggaaggtgaagcaacatagtttaaaactctttgaatatggtgtgatgcattgctctctacaataggatttaggtttttcttttttaaagttgggatcaagcagctaaacatgggaagatatggaaaatggttaccaaaaaatatataatattttccattcccacatgctgaaattcaatgattcaccctggttagttgctgataccctctaaatgtacaagttttttttttttttcaattgtgtgtaatgtggcggcacggtggtggtggcggtggtgggaggag

SEQ ID NO: 192959 - DNA, 568 bp, Gossypium hirsutum
cggacgcgtgggcgttcccttgttctccgatccccatccatgtcagaagctgaacaagccaattccccaaagcctcctccatatttagaggttttatgcaaaagttccggcaagaaaacccggtttgcagccggcactaaggccggatttgcagtgtcattgataaatagaaagttgggtatcggagctccggttgccttgcatattgaatcctttagagaaggggaggaacccattatttttggccctgatgctgttcttgtgaattatggcaatggttggaatttgcaaactgttaatgaaatggattttcctggcattggaaaaggcaaacatgttcggggatttccgacacagctccctaatggaaagaacgttgatctcactaattctcgcaaaatggtttcaaaaccaggaataagttttctttacattgcaaaagtttcgttagcttttgttttgatgtttatgttggcgggagttttcatgttggctcttgacaatcttcctaaactaattttgctctttaactcttccatgtaactatgtcagatttgaaaaaagttat

SEQ ID NO: 192960 - DNA, 442 bp, Gossypium hirsutum
attaaaaaaactgctttccatttttccctttttgtctgtgtgtttgagggttcagtcaatcgaagaagatgatgcacatgaccttgtactggggaaaggacgtgactctgctcatcgattcctggaagactgattcatggctgagttacctcctcactttgcttgcttgttttctcttctcttccttttaccagtacatggaagatcgacgcctccgtttcagatcccttgcttcctccaacccatccccgccttcctccgccggcgcttctgttcctctcctccccaaataccgccgctccgctaaattcgcgacggccttgctcttcgggatcaattcggctatcggttatctcctgatgttggccatcatgtctttcaacggaggcattttcttggctatggttttggaactggctgttgggtacctgattttaaggtc

SEQ ID NO: 192961 - DNA, 1805 bp, Gossypium hirsutum
agcaaagatccttttttcctgtttctctcctttttccattgttcttcttcttcacccagattttgtttctttttctttgatctaacaactcaacacccaccaaggatatcagaaatggtgaagatctgttgcatcggtgctggttatgtcggtgggccgacaatggctgtcattgcattgaagtgccctgaaattgaagtggctgttgtggatatttctgtctcaagaattactgcctggaacagtgatacacttccgatctatgagcctggacttgacgaggtggtgaagaagtgcagagggaagaaccttttctttagcagtgatgttgagaagcatgtttccgaggccgatattgtgtttgtttcggttaacaccccgacgaaaacccaaggtctgggagctgggaaagccgctgatctgacctactgggagagtgctgcccgtatgattgctgatgtatcgaaatctaacaagatcgtggtcgagaaatcaactgtccctgttaaaacagctgaggcaattgagaaaattttgacccacaacagcaaaggcatcgactttcagattctctccaaccctgaattccttgccgagggaactgcgattcaggaccttttcaatccggaccgtgttcttattggaggcagggaaacaccagaaggtcaaaaggcaatcgcaccattgagagatgtgtatgcgcattgggtccctgtggaccggatcatatgctccaacctctggtctgccgagctatcaaaacttgctgccaatgccttcttggcgcagagaatctcttcggttaatgctatgtccgcattgtgtgagggcacccggtgctgatgtgagccaagtgtctcatgctgttgggaaagacacaagaattggacccaagttcttgaatgcgagtgtgggtttcggtggatcgtgtttccaaaaggatattttgaacctggtctacatctgtgagtgcaatggcctcccagaggttgcaaactactggaaacaagtcattaagattaatgactaccagaaaactcggtttgtgaaccggattgtttcctcaatgtttaacacagtttcagggaagaagattgccattctcggatttgctttcaagaaagataccggtgacactcgggagaccccagggatcgatgtatgcaaagggctgttgggcgacaaggctcttctgagcatatatgaccctcaagtcaatgaggagcagattcagagggatcttgcaatgaaaaagttcgattgggaccattcggttcatcttaagccgatgagccctacttcgatcaagcaagttaatgttgtttgggatgcctatgcagcaacgaaggatgctcatggggtttgcattctgacagagtgggatgagtttaaaaccctcgattaccagaagatttatgataacatgcagaagcctgcattcgtcttcgatggccggaacatcgtggatgtagctaagctgagggaaatcgggtttattgtctactccattggaaagccattggatgaatggctaaaggacatgccagcggtggcataagactgtattctggaccatggttgagctacaactttataatctcgaggaaaacattatccgatagtatactttataacattcatttcttttagaattaagattatgggatttcaacttatattggattacttgggagagctgaaacattagtgtctggatctgtccttagccgccacagtatctgctttgttattagtttaatataataaaacatttaccatttaattttataccacactttacctta

SEQ ID NO: 192962 - DNA, 722 bp, Gossypium hirsutum
cctgttcctacatcctcattcgtgagttatcccatcattgatcaaagtgttgtagtacctgtttcccaaccacctatacaatcttcatctgaggcatatcccatcagtgaccaaggcatttcagtccctgcggttccacaaactccaccttcatctgtgtcttatcctatcattgatttttcagaagctgctcctgttggaccctctcaagtgccacaccctgcaatcagcgtgcaagcacctagtcaaggggagagtgaaaatattgttgagcagtctctacttaaggaacttgaagatatggggttcaagcaggttgatttgaacaaggacattttgaggaggaatgaatatgatctggagaagtctgttgatgatctttgtggggtggctgaatgggatccgatacttgaggagctgcaggaaatgggtttctgtgatgctgaaacgaacaagaagctgctgaagaagaacaacggaagcatcaagggagttgtcatggatctgttaacaggagaaggtgcttaaattattaattatggatgatggctcgtggtttctaggcattttattatatataaataaatgagtgtgcgcatctaaaccatgtctttatgaagcagctgccttttaatttcttgtcttctgaagtatgcgggggctaaagaaacgagctgtaaacgtttcgcggtaattgactttgagcctaaaggctataacta

SEQ ID NO: 192963 - DNA, 422 bp, Gossypium hirsutum
cagagatggttaatgccctgaggaaggctagtggacaggtggatcgggcaaatgcagctgtgagacggcttgagactgagaatgcagaaatcagagctgagatggaggcgtctaaattaagtgcatcagtatcggtcacaacatgtctggaggttgcaaaaagagagaaaaagtgcctgaagaagcttttggcttgggagaaacagaaagctaagttacaggatgagattgctgatgaaaaggataagattaaagatctgcaacgatgcttagctcgagtagagcaggatcagaaagaaacagagttaaaatggagagaggagttaaagtccaaagaacttgccttggctcaaattgaggaggaacgatgctccaaggaagcagctgaggcaagcaataaaaggaagcttgaagcattgcgc

SEQ ID NO: 192964 - DNA, 426 bp, Gossypium hirsutum
  unsure (1)..(426): unsure at all n locations
gtttnntttttttttttttttctttattttaagctcgaatagaatataaatattttattgaacgaacaaaagataagggggagcttcatttagttcatgcaaatctttatgtacattgtcaaatcttaaatccacacaaattttgaagtagacgattcaataatacaacacggcctctcttcatgttttgcaacatgacctgcggtactcccatcaacaaaatcacttctctgctacatgccttaaagtgccatctcagcctgcaatgcagcaagttcatcttcctcagcagtgcgcttttgaggaataggacgagctggttgcctaccagcaggcacctgcactggagctgcaggagcagttgttgcaggctggagaagttgttcttccaactcagcaccttcaagttcttccggacgcgataag

SEQ ID NO: 192965 - DNA, 715 bp, Gossypium hirsutum
ttccacgcgtccgcccacgcgtccgtccacgcgtcggggcgtcaagatgcagatcttcgtcaaaaccctaacggggaaaaccataacccttgaggtcgagtcttctgacaccatcgacaatgtcaaagccaagatccaagacaaggaaggcatccctcccgatcaacaacgccttatcttcgccgggaagcagcttgaagacggccgcaccttagccgactacaatatccagaaggaatccactcttcacctcgtcctccgcctccggggtggtgccaagaagaggaagaagaagacctacaccaagcccaagaagatcaagcacaagaagaagaaggtcaagctcgccgtgctccagttttacaaggtggacgagtcgggtaaggttcagaggctgagaaaagagtgtcctaatgcggagtgtggtgctggaaccttcatggctaaccattttgataggcactattgcggtaagtgtgggctcacttacgtttaccagaaggctggtggggattgagtagagtccgcttctaccttccgttagtgtcctgcaaaaattgaatctatagctatttttctttacaatatgaacattagggctttgattttccgtaatcgttgaacttttttaaatttatgtatgctttattatgggatgatactttgggtatgattttggagttttgaatgatttatcaaatcagctgtttgaatc

SEQ ID NO: 192966 - DNA, 689 bp, Gossypium hirsutum
ttttaacccattttccgctgcttcttcagctgaggcaaaccgtagccactaagaatgcagatcttcgtgaaaaccctaacggggaagaccataaccctagaggtcgagtcttccgacaccatcgacaatgtcaaagccaagatccaagacaaagaaggcatccccccggaccaacaacgcctcatcttcgccggtaagcaactcgaagatggccgcaccctagccgactacaacatccaaaaggaatccactctccaccttgttctccgtctcaggggtggcgccaagaagaggaagaagaagacctacaccaagcctaagaagatcaagcacaagaagaagaaggtcaagctcgccgtgctccagttctacaaggtcgatgaatccggcaaggttcagaggctgaggaaagagtgccccaatgctgagtgtggggctggcactttcatggctaaccattttgataggcactattgcggtaagtgtggactcacttatgtttaccaaaaggctggtggcgattgagtttccatctttagcttgtcgatcttttgttagtatgagagacgggattttaatttccaattatcgttcgactgtttaattttttattatgttttatcatgttacgatacttgggatatgattatcaattttagcttttctgaatctaagtaagggcattttac

SEQ ID NO: 192967 - DNA, 663 bp, Gossypium hirsutum
cccacgcgtccgagccgaaccctccatttctctctgccaccagcggcacccaaagatgcaaatcttcgtcaaaaccctaacggggaagaccataaccctagaggttgagtcttccgacaccatcgacaatgtcaaagccaagatccaagacaaggaaggcatcccacccgaccaacagcgcctcatctttgccggcaagcagctcgaggacggccgcaccttagccgactacaacatccagaaggaatccaccctccatctcgtgctccgtcttaggggaggtgctaagaagagaaagaagaagacctacaccaagcccaagaagatcaagcacaagaagaagaaggtcaagctcgctgtgctacagttctacaaggtggatgaatcgggtaaggttcagaggctgaggaaagagtgtcctaatgctgagtgtggggccgggactttcatggccaatcattttgataggcactattgtggtaagggtgggctcacttacgtttaccacaaggctggtggagactgagcagcgtccgattccaccttcaggaaaaaaaaaaaagctgaaatcaatagtttatttgtatcagtatgagtcgcattaatattcgctaatattcggatctttttatatatttgtcatgctatgatactttggatatg

SEQ ID NO: 192968 - DNA, 781 bp, Gossypium hirsutum
tgaccaagttcgctgtaaagtcctaaaacccataggagtcagatttgtcctccctgtacttcctataagtttgatattcgctggatattcactagctgcacttgaggaacgtggttctcgaaatggtgaaaagaaaagatcttcgtgcatttgcaacaaatggcgttccaaaaagcaacttgccatattcttcttgcttgcatccaatattccaatggccctgtatatgagtttgattcaccagagaggaactgaggatgcgatgaactatctatctaaagaagctgcaaaagggaaagtgaaaagtatcgttttcctaatgccttgccatgccacaccctactattccactctgcataacaacctgcctatgcgtttcttggattgcacacccaataagggaatgcctactgaatcagaccgtttcatgatggatccagttagttttgcagtagattttgcaaaaaattggtctcaccctagtcacattgtattgtttgattcagaggagaggcacttgaaggattttctaatttcacattcttttagagaggttagaaggttcttccatgctcactttaaggtggaccgtgatcttcaagcatccgttgttgtatacgctgactgacacgtaaaagtttttaaaacctgtttcgcaatctagccttgatctttctgagccttttttgtttccagatgatggaattcatttattctttttagaaattttgttttttttaaaaaagaattttaccttttgaaaaaaaaaccatagctgctg

SEQ ID NO: 192969 - DNA, 471 bp, Gossypium hirsutum
ataattcataaactcttatttttcggagtttttacgggtaatggtatctctccagcaacgcacagtagcaccaaatttccgtacgcccaaacctttgatccattatcaccttctctgatcttccctcgactatcggagacttgaagatggtgtcggacgcgagcaagatgaaggctgctcacaagaaggctgctgccgctgcgaagagaggagggaaggctgctgcacccgctgcatcttccaaggcggcagctgccgcgaccgcggagaacggcgttgataaggtttctgataaagttagtatgctccagatatccgatcggacctgtaccggtgttctctgctcgcatcctctttcccgagatattcgtatagagtccttatcagttactttccacggacatgatcttattgttgattcaatattggagcttaattatggcagacgctatggtttgctaggattaaatg

SEQ ID NO: 192970 - DNA, 665 bp, Gossypium hirsutum
atttgctcaccttttctatcagtttagtcttcgttcctacatttgttctttattttctttaccagaaacggagtgctgcatggatttgagagcattgaaatcgagtgtaagagaactgaccatgcaaaacacccaccatgttttcgatgattccttggtcatgaatgttatgaacggcgccgttgctggtgaagatttctccatcgattgcttccttgatttcaataacggagaatttgaagaaggttccgttgaagaagaagaaaaaaactctgtttctacttcatatcaacaacgtgttgcagatgatgatagtaactctaattccaccagttttacactctccgtaccggatgatgaaatagcagggcttgaatgggtgtctcactttgtggacgagtcggtaccggagattcctttgccatgccctgtttttaagcaggaaactgataaccatgcaggaactcggtttgaagcggaaaccggcccggtttttgtgaaaacgccgtctctttcatcgtcggttccaagtaaagcgaggagcaagaggtctaaaccgacagtcccgacatggtcggttgggtcactgcctacttccgagtcatcgtcttcgacagcatcatcttcgagtacttgctcggggtcttccatgacttctacggagt

SEQ ID NO: 192971 - DNA, 654 bp, Gossypium hirsutum
gggatgggaactgtgttagaaatcattgtttttgctgagtccgctagtcagtttggtgaggtggttgttgacccgatcacaaaacagctattgcactacaccgaaaagcccgagacttttgtaagcgatttaattaactgtggagtttacgtctttactcctgatatctttactgccattcaagaagtctccacacaccgagaagaccaagctaatttacgccatttgacaagctttgaaacgctgcagtctccaacaagggctcttccccaagattttgttagattggatcaagatatcttgtccccttttgctggaaagaagcaatgatatacgtacgaaactatggatttctgggaacagatcaagactccagggatgtctctaaaatgttctggtctttatcttgctcaattccggtatacctcccctgatctattagctggtggagatggaactaaaagtgcttcgattcttggtgatgtctatgtgcatccctcggccaaagtacacccgaccgcaaagatcggtcccaatgtctctatttcggcaaatgttcgtataggagctggggtgagacttataggttgcatcatcttggatgatgttgaagttcaggaaaacgcggctgttattaattttattggtggatgg

SEQ ID NO: 192972 - DNA, 451 bp, Gossypium hirsutum
ctctcccgagaagtaaacagaaaagggaagaattttggtgaccggtgattcgtgagtattgtaaacagcagcagcagcaatggagctgttctacttcgtggtgttcggggcattgggagcggtggtggcagcattagagctaagcaagaacagcaaagatcgaatcaacacatcctctgctttcaattccttcaagaacaattatcttgtcgtttattctctcatgatggctggagactggctgcagggtccgtatgtttactatctttacagtacatatgggttcggaaaaggtgaaattggacaactttttattgccggttttgggtcctctatgttgttcgggacaattgtcggatctttagcagacaaacagggccgaaggagggcgtgtgttacttactgcataacttacatacttagttgcataacgaaacattctcctcaatac

SEQ ID NO: 192973 - DNA, 838 bp, Gossypium hirsutum
gttaggaaagcactaagaccaggggttatgtcgattaccttcccgtttgaacttagattaggttcaaaggtagaccaaggaataccagaagcacagtggataactgcatcgtatttgcgaccggaagggcttttcagagctgcaccgtcaggagttttgtagtcaagaacctcatctgctccgaggcttttgacaaaatccagattacgagccccacaagtagctgttacatgtgtgtttccaagctttgctagttgaactgcataatgacctacaccacctgaagcagcagtaatcaagaggtttaattgctggccacttccgtcaagcttgaccccagccccatgggtgactgctcggtgagctgtgagaccagccatgggtaaaccagcagcttcggcaactgatattcttggtgggccttgcaactgtcagattctccgtagccacagcatattcagctagtccaccagtcaaatgatcaagaagagatacaactttatccccaactttgtaatttgtgactcctggtccaacctttacgacttctccggctacatcacttgcaggtatgtgggggaattttcttggtaaaactgggcgcagaatccctttctgtattttccagtcaattgggtttagactagttgcctccagcttaagcaaaatttcacctttacttggagtggggatcggaacttcaacatgcttcaaagcagcagcgcctccgccatagctgttatattgtaaagcatgcataagattttcagccatttttttcactaaaagagatcaaatcgaagcttttttttttaaggatggcgttcggacgagaagg

SEQ ID NO: 192974 - DNA, 521 bp, Gossypium hirsutum
  unsure (1)..(521): unsure at all n locations
nnnnnnnnnnnnnnnnnnnnnnnnnnnnnnnnnnnnnnnnnnnnnnnnnnnnnnnnttgtttatttcatttttttaggttttttttttggcatgttttttttnaaaaggaaaattatatttatttataccgatttaaacttataaactacactattttgatttgcatacagataagcatccatagtgcagttcagattcgactaaattgaacaaagttttaagaaatttcagaccctaaaaagcgaaagtaaaaagggaaaaaaaagatagatgagtacttgaaacgattcttctttgtttttttagtcgatatcggagtcatcaaaatcgtcttcgaagttgttgaagaaatcggcatcggcgagcttgttgtcggaagcgatgacgccttcgccgaagatctccggtgtgtcaacatcgtcgacttccatggctgaaccttggtcgtctgggtccgtcacgaattccatcggcatcggcctcatctttcccccctttctttaagcttctagggatttct

SEQ ID NO: 192975 - DNA, 547 bp, Gossypium hirsutum
agaagaagaagagatggtattaaagaaagaagcaagtaaaagagaaacgaactaaaaggaaaattatatttatttaaaacgatttaaacttataaactacactattttgatttgcatacagataagcatccatagtgcagttcagattaaactaaattgaacaaagttttaagaaatttcagaccctaaaaagcgaaagtaagaagggaaaaaaaagatagatgagtacttgaaacgattcttctttgtttttttagtggatatcggagtcatcaaaatcgtcttcgaagttgttgaagaattcggcatcggcgagcttgttgttggaagtgatgactccttcgtcgaagatcccggtgtgtcaacatcatcggcttccatggctgaatctttcgggaaatcttttgggaaaatttggattttcctgaaaaatacaccgaccggataaacgagagaaaaacaaagacggtggttaagaagaagaggagcttaaagtagcaaaagtagggaacgatgatgatgaagacgtggtggcggagagaaacac

SEQ ID NO: 192976 - DNA, 679 bp, Gossypium hirsutum
  unsure (1)..(679): unsure at all n locations
aaaaaaaaaaacctgagcagccttttttttttctctcagcctccccacctccggcctgggcactggcgagcctgcgctgggatgagcacgtatatgagtcncttggttccaaaatctaatttcagcatgttgttatttagtggacaagccattaaagctgaagttttacgcttaagagaacaaacggtgttggttgatgcagggattgggagccctaggatttgtacccaagacgagaccacattaaccagatcggaaatcaatcgatttgaggataaggtgggattcttcgataaaggagtgggcggcggtgaatcactggtgagaaagcggtttttggagagattcttcgtcgatttagtgagcggtgaatcgatcgccaaagagcgagctgccgttaggtttaacgatttgttgggatcgagatcactggacgtggtcgccggcgagccgactcttcttaatccacggaggttcaggcaaaccctagtttggcaagaattgaataagcattggcgaaacaattcgaaggtcaagggcttttttattgataaagtgagaggtggttattcagtagccatagcaggctacgttgcttttcttccgtacagtcgttttgggagaaaaatggtcagggatgcagataaaagatcgattcatcattgaacgcgattgcccc

SEQ ID NO: 192977 - DNA, 717 bp, Gossypium hirsutum
  unsure (1)..(717): unsure at all n locations
cttttatagaagccaaagaaaaaaaaatatcccatctttatagtcgctctctttctcccaggttatttcaatctgctacattgggtacccaagcactaaactttctccctgggttcctctttagtaaggaatttggagttggtggtggtaaaaaatggagttttccagggtttctatgattagttgttttgcgttactcttgtgctcctccttggcatatggtgcctctagtcctccagctcctatggcaatgagtcccagcccgacaccgtcaccggcaccagcccctgcaccggaatatgtaaacctaacttatttgctctctgtggctggtccatttcacacattcctcaactaccttgaatccactaaagtcctggatactttccaaaaccaagccaacaacactgaccaaggcattacgattttcgtgccaaaagacagtgcctttaaagctcttaagaagccttcattatctaatctcactaacgaccaacttaaatcactcatccttttccatgccatgcccaaattctactctctcgccgacttcaacaagcttagtaccaaaggccctgttagtaccctcgcaggtagccaatacagtttgaacttcacagacaattccggcactgttcaccttgattcaggatggagcanaacgaaagtttccagcgctgttcactcaactgaccctgttgccatataccaagtcga

SEQ ID NO: 192978 - DNA, 519 bp, Gossypium hirsutum
cccacgcgtccgaaaaaagtaaaccagagagaaaaaagagattcagctttcttaattttttggctttggtttttgtttttttgcaattctgttgttgtaatttgattgatttacgtgttaatcaacaagatttggtggtgaatttgactgaaatttaaggttttttagggattgttcgtggatattatgatttttttttcgagagttaatcagatgagagatctgagctaaaaaagagattttgaaaaatgacgaatacggaggtagctatgaaagggaattgtgtgaacggaagaggaggaggagagagcttttcttctggttatagtgagccaaatgatggtaggaacaccgtggaagggcaaaatggtcattcgactcgtcaagctccggctacagaccccgaatcggcgttgtataatgaactatggcatgcatgtgctggacctttggtcactgttcctcgtgaacaagatcgtgtgttttactttcctcaaggtcacatagaacaggttgagg

SEQ ID NO: 192979 - DNA, 473 bp, Gossypium hirsutum
gcgcttacgcgtgcgcccacgcgtgcgcccacgcgtgcgaaaattttcaaaattaaatcaaataaaaatgagtcttgctctaatactcaccgtgtccatcatcgccttcttcttaacgggcaagctttaccaatggctaaggttcaagctcccaccaggtccacgcccatggccggtggtcggcaacctttacgacataaagcctattaggttccggtgttttgcggaatgggcgcaggtgtacggccccattatatctgtttggtttggttccactctcaacgtgatcgtgtcgaattcggaactggctagggaagttttgaaagagcatgatcaacagttagctgataggcatcggagtagatcggcagccaagtttagcagagatggacaggaccttatatgggccgattatggacctcattatgttaaggtaaggaaagtatgcacgctggagcttttctctccgaaga

SEQ ID NO: 192980 - DNA, 814 bp, Gossypium hirsutum
tttctgaacctgatagtgttgtggcctcagatgtgtcaaaattggaggattctgcaagccatgctgagaatgtatcaggaaagccaaacttgatggagttcagatcattttcatcttctgatggagcagcggagggcccggtcttatgggcttctgcggctgtctcatcagatgcatccctcaagaaaactcctgcttcaaatgctaaatctgaaaggattaataaggggaagttcgcaccatctggtgggaagttggcaaaaatcgaggaaaaggttttcaatgatgatacaacaaaaacaagttctgaaggtgttgaacctcgtagatctaatcgcaggattcagccaacatcaacacttttgggagggctacacagctcgttggccatctcgaaaattccttcggtttcactcgacaaaagtcacaaaagtcaaagtagaagtatgagaggttgagaggtgccctcctgcaactaggggaatccagtcttaaaagaaattcagcgaatagatgaccaacatacaccagtgtagctttgtgtaaattatcagatgatagaggagaaagctaggaacgaaaatttgcttctttgtatttttgatgtagcggtagatatatacatatatatgtttagtgttctttagttttatttagaattattataatctgatctgtctaggccatgctcttttgtatatggaacgtctctaagtagttgggtttgataattgaagtgcagcatcggaagtgatatcaacccatgtattttgttgcatctaactgctcattgcttattcagccttctttgctc

SEQ ID NO: 192981 - DNA, 887 bp, Gossypium hirsutum
tcgctcacgcgttcgtgacacttacttcttcttaccacacaaaacacataaattcaaagcagagagaacagggaaaagaaaacccttgttaaggtgaaataatggcgagtaaggaggaagttttttctgttgagcttccagcacctgcttcttggaagaaaatgttttctcccaagaaagtcggttcacccaggaagactgagatcatgttcattgcaccaactggggaggagattagtagcaggaaacagttggagcaatatctaaaatcacaccctggtaatcctccaataacggagtttgattggggtaccggtgagacccctagaagatcagcaaggatcagtgaaaaggccaaggctactccaacaccagaaaaggaacccccaaagaagcgaggccgaaaatcgttgagtgcaaagaaggaaaacaaggaaacagaggctgttcccgaaaaatccgaaggtgagaaagaaaatgaaaaggaagatgcaccaaccactgaaaaggaaactgcggaagctgaaagagaaaaagatacttccattgaaactcaggttcaggatggaggtaaaacagaagtggcagaccagactgggcatgctgacaccaagatggaggaagctggtacagatgttaaggtaccagaaactgcagaggctggcaaaaaagaagaggctgctggtaccgaagaaacaccaactgcaatggaggttcaagagaaacctgcagaagctagttgcatagatgggactcaaactgcaaaagaagaggaagcccctactgaaaaggtgccacaaactcaggcagagaaagagaatggtacatgtgagaaacaaccagaaaacccagaaactgtgacattggaagctaatgggggagtggag

SEQ ID NO: 192982 - DNA, 533 bp, Gossypium hirsutum
  unsure (1)..(533): unsure at all n locations
ccggccggaattccggtcgccacgcgncggggatttcatccatttccgcgttatatatacacttggaagggataaaattacagagctttgctgcgtctagaccgatcgaaaggggattcagtgatggccactgaaatcatgaataatgaagttggtgtggaaaaaaatgaggagtcggaggcttcaaatggcattgagaaattagagatttcgaatggcactgatgaggtctccgaaaactcttcatctatgcaaaaagatgaagatggggtgacagaagttgccaaaaagaaaaagaagaaaaataaaagcaaaaaaaagaaggagcccttgaagcagactgatcctccatctattcccgttgttgagctttttccgtccagggagtttcctgagggtgaaattcaacagtacaaggatgataatttgtggaggactacctctgaggagaagagagacttggagcgatttgaaaagccaaaatataatgcagtgcgacaagcagccgaagtccatcgtcaggttcggaaata

SEQ ID NO: 192983 - DNA, 384 bp, Gossypium hirsutum
ggaaaatcctatttaaaaagcaaaaagattatgcttcgactcttgcaaagaacggactaacagggtcagctgcccaattaatcctcatccgtacataccgttactgtataagatagatctcgttgtgaaagatctattactggaaaatttatgagtagagccgaagagtgtgaactgtacaagttaccaattaaatgaaggaatgagctccggtgtatagagaggacctcaccgtttaagaagtaaccatagaaacgatggaacccactatttatttatccatttctatttactcctttattttagttaatatgctttttttgatccctagtatcaatacaatttcttatttcaaggcgaaatgcctagaaaaaaggaaaaatc

SEQ ID NO: 192984 - DNA, 546 bp, Gossypium hirsutum
tctttatggggtcacctttaatgccgtttattgctctcgcttggatcgggctagatccatggctctctccgtttgtcaggagatgaattttgcagtgtcagagatacaatcctctgatgcacttatggatctgaacatgggccattgggaggggtgccctcgatcagaaatatatacgcctgaagttttgagtctgatggaaagatatcagcctgatttttctgcaccttctggagaatctcttaggcaactggaatttcgaatggttcaattcttgaatgggactgtccttgggcttcctgaaaaatttagatctgaattttctttacaccaaaatgagagtcaaggatttacacaccataataaccctgctttaaccaactcagttcatgacagagatgtagcttctcttcaactaccccattgggacaggcagcggcatgtgctatcaaggaagaagtctggtaagagcaggctccaatttgtgtcgaatattggtgaacatgatgctgacgatgaaatgtctcctcgggaagccagtcatca

SEQ ID NO: 192985 - DNA, 321 bp, Gossypium hirsutum
gcccttttgttatatcgacaaatatcctagtcgcttgccttttcctcatctgctgtctcattgaaaaataatgacgtggagaaccagtgaaccccaaagcatacccactagcggatgctcagttaacaaccgcgattttagatcttgttcaacaagctgccaactacaagcagctcaaaaagggagctaatgaagctactaagaccctgaatagaggtatctcggagttcattgtgatggctgctgataccgagccccttgagattctgcctcatcttcctttgcttgctgaagataagaatgttccctacgtatttgttc

SEQ ID NO: 192986 - DNA, 576 bp, Gossypium hirsutum
cccacgcgtccgcccacgcgtccgtaaaagctactttgaatttgataaaagaagacaaagtggtttttaaaatggctttactcatagcagtactgaccttagttttgctcgtgtctgcgtcgacttcaccagccattgctcttagcttgaatcattatgagaaaacctgtcctgatgttgagtcgatagttgcaaaagctgtcgagcgtgccaccatgaaggataagacggtccctgcagcccttcttcgaatgcattttcatgattgttttatagggggtctgtgatgctctctgtgctgttgtactcaaagggaaacaataaagctgaaaaagatgggcctgcaaatctttctttgcttggattttatgttatagaaaatgcaaagaaaaaagtcgaagcagcgtgtcctggtgtagtctcgtgtgctgatattttggcttttgccgcaagggatgctgtcgtgctctctggaggtcctacatgggaagtgcctaagggaagaaaagatggtagaacatcaaaggctagcgaaactatacaattgccggctccgactttcaacatatctcaact

SEQ ID NO: 192987 - DNA, 820 bp, Gossypium hirsutum
atggggtcttggatttgtcattccagcattgtttatgggccttgcaattggaagttttttctcaggcacggcactctatagatttcaaagaccaggaggaagccctattacaagaatgttccaggttttggttgcagcatttcataaacggagcctcaaggtacctgaagacagtactctcctatatgaaactggtgacaagcactctgccatagaaggaagtcggaaactagagcacagtgaggagttgaagtgcctagataaagctgccatagtcactgatgttgaaaccaaaagtggggacttctcaaatccttggaggctttgcactgtaacacaagtggaggaattgaaaatcttgatccgcatgtttcccatatgggttactggaattgtgttctctgctgtatatgctcaaatgtcaactatgtttgtggaacaagggatgatgatggacacaaaaattggttctttcactattcctcctgcttctctctcaacttttgatggtattagtgttattttttgggttcccatctatgataggatcattgtcccaattgcaagaaagttcacacgtaaggagcggggcttctcagagttgcggcgtatgggaattggtctctttatttcagtcctatgcatgtcagccgcagctgtggtggagaccaggagattgcaccttgctaaagagctagatttggtcgataagcaggtcgccgtacccattagtattctttggcaaatacctcaatatttcttgttgggtgccgcagaggtctgcacatttatcggacagcttgagttcttttatgatcag

SEQ ID NO: 192988 - DNA, 547 bp, Gossypium hirsutum
ccatcatcatcttcttcctcgacgctttctcttcccttggaagccctgcaacttctttaagtgtctcttcttcttctcccaactcgccggctatgttgttgatgctcggattcgattccttcaatccccatttctcaacctttcaactgttacaaatcggatacgcaatttcatgagagcaaatcacaagattatgatcaaagaaaagattagatcaagcaaaaagaagttttcaaagaattctgcaaagatttattcgggtcatacttgcttttctacaaagtacgcaatacctatttgaatacttgtgttttcgactttttaagatgagatgaagagagtgcttattttgtttaggtaggaagttatttctgttcaaatttgttataagttagatttgttattcagcttgcaattaagctttgagtgagattgtatcttagtgaatgagttatacttaaataatgttttactttttgagtaagactccgtttacataaagagtttccaaattgtgtatataaacttttgatgtccatttttattt

SEQ ID NO: 192989 - DNA, 410 bp, Gossypium hirsutum
ggcaggtgtgttattggcaaaacatgaatgcattattcctttcattggaattgctttttgctcacaccacttgcttctcctccttactcatctcagcatggcctcaaaacccttcatcgcattagccaccactgttttcttcttctccctcatcgccgtcaatcattttgggaaacctttccagggaaaacttggggaaatggaagttgtcccaattacggatgccgtaggacctgaaagtgtagcatttcacccacttggagacggtccctacgtcggaatatccgacggtcggattatcaagtggcaaccaaatgagcatcggtggatcagttttggcatcacttctcctaacagagaaggatgtgaagggaaacacgatcatgagacaagggaacacatatgtggac

SEQ ID NO: 192990 - DNA, 553 bp, Gossypium hirsutum
ctttgatatgaagaatgaacaaggaagaagatccgagcaagaattatggctaaggctaaagaataaaccaaggattcttatcatccttgatgatatttgggaatctatcaacttaatggaggagataggaattccaattggggatgatcataaaggctgcaaagttcttttaacaacacgtcattaacaagtatgtcgagctatggattgtcaaaacgtggtacaacttggctgtttggatgatgatgaagcttggactctgtttgaaaagaaagcaggtctagatgacttttctgatgattctattaaaatcctagcaaatcaaattgccaaaaaatgcgggggtttgcctatagctatagttccactgggaagtgccttgaaaggtaaaacccatcatgagtggcaagctgcatacgggagactcaaagatcgtagattgactgaaattgaggatgttaatgaagaaaatgcctatgtatgtcttgaggcgaccatcgactacttgaagaatatggagaccaagacatgtttcttattttgctctttattt

SEQ ID NO: 192991 - DNA, 810 bp, Gossypium hirsutum
cccacgcgtccgcccacgcgtccgggatgggttaggggggttttggaacagaggaatctcggcgtgcgctgtgtgtgatggggcagctccgatcttcagggagaagcccttggcagtgatcggtggaggtgactccgccatggaagaatccacttttctcaccaagtacggttccaaggtttacatcattcacaggagggatacgttcagggcatccaagattatgcagaacagggttatttcgaaccctaagatagaagtcatatggaactcggtggtcgtagaggcctacggcgatagggttttgggagggctcaaggtgaagaacttggtcaccgaagaagtttccgatttgaaagtcaatggtctattctttgccatcgggcacgagcctgccaccaagtttttgggaggtcagctggagctcgactcagatggctacgttgtcactaaaccaggtacaactcagaccagcgtgcacggcgtttttgctgccggagatgtccaggacaagaagtatagacaagctgttactgcggctggcaccgggtgcatggcagccttggaagccgaacattacttgcaagaacttggatctcaggagggtaagagcgattgatcattgttctaccaaggatttaaaagctgtttgcttcgaattgcgattgttttcggtattcgtctagacgtagatttatcctttgttctggatcaatattagaattgccattgccatctatattcaatatctgttttaatgggattggcacagcattgacttttgctgttaaaaaaaagtcgacgcggccg

SEQ ID NO: 192992 - DNA, 435 bp, Gossypium hirsutum
  unsure (1)..(435): unsure at all n locations
atcgaaacaaacaaaaaaaaacaccccatcttcaacatctcaatcatgggttcatccaatgattacattcacatcgtaatggttccattcatggctcatggccatctcattccattcttagctttagcaaaacaaatccatcaccaaactggcttcaacatcgccattgctaatacccctcttaacatccaatacctccgttcaactctccgaggaaaccccattcccggtatccattttttgcagcttcaattcaacagttccgaccatgggttaccacccaacacagagaacacggagaacttatcgttagatctcatcgataatgcagagtttaatgtgcctggattccctgatagatgcaaatttcatgtttctcaactccatgattntttgagaaaagctgatgggactgatttatggtccaagtttatg

SEQ ID NO: 192993 - DNA, 675 bp, Gossypium hirsutum
caagagccaaactgagaaaaagattcatccatggagggcatgaatgatgacaatatgcatggcatgatgatgcacaacacatcagatggcggcatgaacatgacgaaccaccataagatgatgatgcatatgaccttcttctggggtagcgatgccgagattctcttctccggttggccaggaaccagaaccggtatgtatgtcttggccctcatagttgtcttccagcttgctttcatggtggaggggatttctcactctcggttcatgaaacccggttccaccaaacacgtgaccgccggtctggttcagactttgttgcatgctctgagggttggacttgcgtatctggtgatgttggctatcatgtctttcaacggtggcgttttcttggccgccgtggctggccattctctggggtttttattatttggcagtcgtgtttttaacaaaccttccgccaccgtccccgccgccaaaacatccgatcttccgcctatgagttgttgaatattagggtttatttctttcgggtttgggtctaaaaggattgatgtttatggttttagatttttgtttttatcttttaatctgtgctttgctctgtatttgtttttcatttgatacaaaaaaaaaaaaaagattgcttaataaccagtgattgtacattttacc

SEQ ID NO: 192994 - DNA, 558 bp, Gossypium hirsutum
caagaatgaggacgcctcatcatcttttcactctagctctcttcttcaccttcatgtgtgtttctgttgaagcccttaatgttggaatccaggccgctgataccgccatctctgtgagcaaagaatgcagtaggacatgtgagtcagagttctgtgtcagtgcctccatttttgaggtatggcaagtattgcggcctattgtacagtggatgccctggagagaaaccttgcgatggacttgatgcttgctgtatgaagcacgatgcctgcgttcaagctatgaacaatgactatctgagtcaaaagtgcagccaaagcttcataaagtgcatgaaggatttccagaaaggaggaggaaggagtttcaagggtaataaatgccaagtcgatcaagtcgttgatgtcatctctgttgtcatgaaggctgccctgattgctggaggagtgcttcataaaccttagtctttttacccaacccaacactgtcagacacgacattcttctgcttctgcaatccctaagattgatgatggcatggcatccctcaattaaatcatt

SEQ ID NO: 192995 - DNA, 317 bp, Gossypium hirsutum
atacgaaaatatgagcaaccaaaactgtttccgacaaaatgcattataaagtagaaaaatccacaatgaaccaaacccttcaaaagatttcaagtaaaaacatacttgaacatacttggtctatgggcaattacactaagcattaaacaaaacaaaggttctttcaacaagacgagtgaataagataactatcaagactcagccaacttgttgaggatttagagtatcgtcagatctcaaacggcagcatggaggaatgctcttcctggctcccgattggctagaggcccacgcgtccgcggacgccgtcgggcggc

SEQ ID NO: 192996 - DNA, 721 bp, Gossypium hirsutum
gaaattcaactgttactgagactaaaaagaaacatctgagttcagaattaagacaaccaaaatgagtgccttgacggagcttgtgattcttgtcccatgttgtttcttcctcgtagctttaatcaagttcctttatgattacctgtgggtgcctctccgtatacagcgtctcctgaattcacagggaatcaaaggacctccttacaaattcatccatggcaacaaccatgaagctaccaagatgagagaggaagcattaagcaagcctctggccctgacgcatgatatatttcccaaggtgcagccacatatttacacttggatcaacagatatgggaggaattatctttattggaacggtattcgacctgaactggttatttcagagcctgaactagtcaaagaggttctcaaaaatagtgaaaatacatttccgaaaaagaagccttcgatcttttttagcaagctactggggaacggacttgtgcttcttgagggtgaaaaatgggtgaagcatcggaagctagccaatcatgttgtccatggggaaagattaaagaacatgacaccagcagtaattgccagcgttgaaacaatgttagagaagtggaaaggccaagaaagaaaagaaattgaagtgtttcaagaatttagattgctgacttcataagtgatatccagaacagcttttggtagcaactacttggaaggggagaagatt

SEQ ID NO: 192997 - DNA, 585 bp, Gossypium hirsutum
gatttattgtccttactaattcaaatatagattaatgagtttggtttattttttttaaaacatatcattatataaggctgatttgaagttaagaaatcatctaaggtcgtgcgatttttgaaattaaagttttagtcttgtgatagttgtgtcggactaagatttgaagttgccagatgacaaaaggagtaaaagagcagattgagcctagggagactcatgggagggatatgctgtcggctttcacaggggatcaaaggacctccttacagattcatccatggcaacaacaaggaagttaccaaaatgaaacaaaaagctttaagcaaatctgtgggcttgacagatgatttatttcccaaagtacagccacatttttacacctggaccaacagatatgggaagaattttgtttattggaacggtgctcgagctgaattggtgatttcagagcctgaattagtcaaagaggttctgagaaatagtgaacaaatttttcagaaaaagaaacttacagatattggtaggaagttcttggggaatgggcttatatttattgagggggaaaaatgggcaaagcaccga

SEQ ID NO: 192998 - DNA, 959 bp, Gossypium hirsutum
cttacacgatcatcttcttcagtgtccttccttaaactgatctacgcaaatcccaggaaaaccccacgtgtcaaaagagtaggagatggagatacggagattgcatcttcggcttcttcttcaagggtttatgttgttctctgtgatggggaattgttacgcgagatttgtggtggaaaagaacagcttgaggctgacttcacccgagaagattaagggtacctatgacagtgcaattggcaactttgggatacctcaatatgggggaagcatggctggtgccgtggtttaccctaaggagaatcaaaagggttgtaaaagttttgatgactttgggatttcctttaaatccaagcctggtgctcttcctacttttgttttggtcgatcgtggagattgcttctttgctttaaaggtctggaatgtacagcacgctggtgcttctgcagtgcttgttgctgatgatattcaagaagcattaataaccatggatacacctgaagaggataggttagctgccaaatacattgaaaatataacaattccatccgcccttatcgagaaaaattttggtgaaattcttaagaaagcaataagtggtggggatatggtcaatgttaatcttgattggcgagagtctgttccacaccctgaggatcgtgtggagtatgagctatggaccaacagcaatgatgagtgtggagttaaatgtgatatgctgatggaatttctgaaggatttcaagggtgctgcacagatacttgaaaaaggtggctatactcaattcacaccccattatataacttggtactgccctcaggctttctcgctaagcagacagtgcaaatctcagtgcatcaactacggaagatactgtgcacctgatcccgaacaagattttagctctggctatgaggggaaagatgtagttattgaaaatttgagacagctgtgtgttt

SEQ ID NO: 192999 - DNA, 445 bp, Gossypium hirsutum
ctcgtgccgattaaattaaaacgagaccataattctaaggtctaaattattttactttttatgctagacgaagtgatcttgaacttcactttatctgtgaaaaaccttcattgacccacgcgggttctaaatccaaacaacaaagttgcttgaattaagttgtctgggaaaaaaaaaaacccattctttctttgatctctgctccaaaagttgtcaccctttaatctctcttcggctcctcttcttagattgaagaatcaaggttagattttaaggcacaatgcggttggttccatcaaattcgagtgtgaaaaagaggcagagtaatgggggaagcaatggtgccttgttgtatctcaatgtctatgatctcacacctatgaataactatcttttctggttcgggcttgggattttccactccggtatcgaagtttatggtttg

SEQ ID NO: 193000 - DNA, 601 bp, Gossypium hirsutum
caaatggtggttataatggggcttatgctgatatagatgaaaatgggtcattttatggggattctacttggctcccttcacccttagacctacagcgatctagttcttttggttttggcccgggaaactcaacttcagatgttaggagtaatagctctactggctacattggtggttatggtgttcccaatatgcagtcagatagaggaattgctgcataggaggaggatgaagctatgatgtcaaattgtaggaaatttgtatggtggagctggttaatgactgtgatttctacatttcctttgtgaaaatatttcagttttatatggcaaaaaatatgagtagagctaatttggttcaccttgtttgatgaaaaaacttgatatagagatcagttgcaaaggattcatgtaaggtttgagcttttgagggttcatttttatttttatttttttttctttcaatacaggttttctttactgggattgattaagatgtaaaatcaagattgtgggtatacacagattatgtatcatgcatctcttggtgacattgggattcatattaagaaaagcccttttttttttcttccattaatttt

SEQ ID NO: 193001 - DNA, 468 bp, Gossypium hirsutum
tttattatgggttttgggtttatggagtgtttctgggattgatttgagccgagctgagagtttcctttcgtatttagatgaagaagttacaatgtcccctggtagtaccaccactcttatagttcctctcactctcattcaaggagctgcttctaaaggagctgtttgtttggatggaacgcttcctggttatcatcttcatcgtgggttcgggtcaggtgcaaacagttgggttatccatttagagggaggtggatggtgtaataccattcgaagttgtgtattccgcataactacaaggcgtggttcatcgaaatttatggagaagtccataaatttcactggaattttgagcaacaaagctgaagaaaatcctgatttctacaattggaatagagtcagggtacgttactgtgatggggcatcttttgctggtgagggccaaaatgaggctcacaagctttattt

SEQ ID NO: 193002 - DNA, 689 bp, Gossypium hirsutum
attgagcaaatccgacgtcggtttcccatgttggagtcgtgaccatgtgacgtatgatagcaaggtaaaccaagctgagaatcttatggtcgtgggcagaggacctgaatgcacagcaattgctgaccctaaatactcaatgtgccaacttgcattgaatggtttgccaagtgaagtttatgagatgaaatgggacttgataatggtggatgcaccgaccggttacttcgaggacgctccggggaggatgaccgccatatacaccgcgggtatgatggcaaggaataaagagaaaggagagactgatgtgttcgtgcatgatgtgaatagggtggtcgaagataagttctccatggcatttttatgccaagggggcatgaaaatgcgagaaggaaggcttagacactgcagaatccctagccataaggatagcttggaaagacccttttgccctgagtgatcttacaaatttcttgcctaccattttcccttcatcaattctttgttatattgttgattgatgctgtttcacgggggaattatcctatttttttgttcttttgttttgtttgatcaaagcaaaataggaaagcgtagcactattgcattggcaaattgctgtgcatgcatttctttgaactcaaatatagaactgcagaatttataataaagaatcagtttcgtattcc

SEQ ID NO: 193003 - DNA, 389 bp, Gossypium hirsutum
gggaacatctcaaatctcgggttgagaaaattactcaaatattcaaaagcccaaggcttctgtacattaaatggattttcagttcacacaacctctgaaagacaaaagaacctatggacatccatgattcatcttccagactatctctaaaatagtaaagcaagtacaaaatggggggggggggacaaaaaagatgctaagcaggggaagtaaaagcattttaagcggttctctgctcaatccattaattatcaactcccattttagataaaatgagggtctctctagttagatatgtacatatgtacttatctagtaacaaaagcctacttacagatcaagtcctgtcaagaacttttgctggccgcacgcgtggccgtacgcgtggg

SEQ ID NO: 193004 - DNA, 1897 bp, Gossypium hirsutum
  unsure (1)..(1897): unsure at all n locations
caaagtccaactaaaagacctccattttcatctgtttttttttccatcaaattaagttttgcgtttcgtttttcaggttgaagaaatcctccttttgggttcgatctctggcttcaccaccaatgctagagatcggacatgccccaggtaatgcccttttcggcaaatacgagatcggccggctcctcggttgcggtgctttcgccaaggtttatcatgccagaaacctccgcaccggcctcagcgtcgctgttaaggtcatcaacaaaaagaagctacccaacctcaccatgatgtccaacgtcaagcgcgagatctccatcatgagtcgcttgaaccatccttatatcgtcaaactttacgaggttctggccaccaaaaccaagatctatgtcgtcatggaattcgtcaaaggtggagaattgttcgctaaggttgctaaaggaaggttcaccgaaaatctcagccgtaagtatttccaacagctcatctccgccgttgggtactgccattctcgtgggatattccaccgtgatttgaaacctgaaaatctcctcctcgacgacaacgggaacttgaaggtttcagatttcggtctcagcgccgtaactgaacagatccgagccgacggcatgctgcacaccttgtgtgggaccccagcttacgtcgcaccggagatcttgtcaaagaagggatacgatggagctaaggtggacgtgtggtcatgcggcgtcatcctcttcgtgatgaacgccggttacttgccttttaatgatcccaatctcatggctatgtacaggaagatatacaacggtgagtttcgttgtcctaaatggatgtccagcgatatgaaacggttcatttctcgactcctggatacgaatcccgttacaaggatctcccttgatgagatccttaaggatccatggttcaggaagggttacaaagagcccaagttccacgaggagcaacccaaggatgacgctcaggcctcaagctcgaagctgaatgcattcgatttgatatccttctcctcgggtttgaacttgtcggggttgttggatgagtctcacgattacggtgaacggttcatattgagagagtccccagagaaattggtggagaaagtagagcaattaggcaagggtgagagattgaaggtcaagaagaaaaaacagtggggcgttgaattggaaggaaaagaaaggatttctggggtagctattgaggtataccagttaaccgatgagctggttgtggtggaaaccaaaagaacaggcagtgatgctcaatggtacaaggaactctggaacaacaagctgagacctgccctagtgggaaattagccgtacgtattggtttggcttttgtggaaacgcaaaaatgaagtcttgttgatttcaatatgggtgcatttgctattgttgttattattgttatgaattgattgatgaatgatgtgaataaaaggggagaatacagacaatatttgcttcagcaatggaggaattttccttccaaggcagagcagaaggagaaggatgagtgaaacttactacttcatacagaagttagtataacaatcatagtagttattataattatgtaagttgctgtatgttagcagcattttggtggagtaatactaaagataaccgggaactttgtttatttgggggttaacaaagtccccatccccaacataaagtttaccattggatttctctcgcttgtattgtattgtattttggtgggttgtatataccttcccttggggggtatataagagaagcgcacccaaagagaactctggatttttttaataataaagggagggatttttattggttttctttaaaaaaaaaaaaaaaaaacttcgggggnnnnnnnnnnnnnn

SEQ ID NO: 193005 - DNA, 395 bp, Gossypium hirsutum
gttgaatatgtcggattttagagatgaggctcactcaagttcatgggatcactccgcctttatgggaacctatgctatgtatttggatcaaagacttgaattgatgcttttcgacaggaaaagcagtggaggcagtggcgctgggggaagtagtcatggaagtgctgatgatagatatggtgggcgagataatttccgatcaccaccaccgaggccgtacgaatatgattatggggatatcagaggtgataatggatatggaaattatgggatgacaaggagaacgaggtcttatggcgatatgagtgaggcagcggggagtgatgggagagatgggagagaggagaagaaagcagtgacgccattgaaggaaatgacaccagagaggatttttg

SEQ ID NO: 193006 - DNA, 1379 bp, Gossypium hirsutum
ccctcgcgtccgctcaaggccatcatcaagccacagtatgttgatcatattccaaaggcagtccaaggcaatgtgggacaggtgcttgaccaaaaagatgagagagagatgaaggctgaactctgtgctgatcttgaactaaaccaggtcatagatcgtaatgttggggatttatcaggtggggagctccagagatttgctattgctgttgtcgccatacagaatgctgagatttatatgtttgatgagccttcaagttaccttgatgttaaacagagactgaaagcagcacaggtcattcgatctctgctcaggcctaatagctatgttattgtggtcgagcatgatcttagtgtcctggattacttgtcggatttcatttgctgcttgtatggaaaaccgggtgcatatggagtcgtaacccttcccttctctgtaagagagggaatcaatatcttcttggctggatttgtacctactgaaaatctaaggtttcgagatgaatctttgaccttcaaggtagctgagaccccacaggaaagtgctgaagaaattgaaacctatgcacgatacaaatacccaaccatgactaaaactcagggcaattttaaacttaaagttatggagggtgaatttactgattctcagattattgtaatgctgggtgagaatggtactgggaagaccacatttattcgtatgctggctggtttgttgaaacctgataacgtaaaaggttcagatgtggagatacctgagtttaatgtttcatacaaacctcaaaagatcagtcccaaatttcaatctactgtccggcacttgctgcatcaaaagatacgtgattcatacatgcacccccagtttgtttcagatgtgatgaagcctcttctcattgagcaattaatggatcaggaagtggttaatctctctggaggagagctgcaaagagttgcattatgcttatgtcttggaaagccagcagatatttatctgatagatgaaccaagtgcttatcttgactccgagcagcgtattgttgcttctaaagtcataaagaggtttatcctccatgcaaagaaaactgcgtttgtggtcgagcatgattttataatggcgacttacctcgcagatagagttattgtctacgaagggaagccttcagtggattgtattgcaaacgctcctcagtccttgttaactggcctgaatccgttcctatcccaccgggaatccgtttttagggggaacccacccagttccgaacgaaaacccaccaactggatccgcccagggatagaaaccaaaactcgcctgggtcttttttttccccaaataatggattaacccttctccgggcagttggtcattgtgaaaagaat

SEQ ID NO: 193007 - DNA, 679 bp, Gossypium hirsutum
cccacgcgtccgggtttatcctccatgcattgaaaactgcgtttgtggtcgagcatgagttgggaatggcgacttacctcgcagatagagttattgtctacgaggggaagccttcagtggattgtattgcaaacgctcctcagtccttgttaactggcatgaatctgttcctatctcatctggacatcacttttaggcgggacccaaccaattaccgaccgagaatcaacaaactggactcaaccaaggatagagagcaaaagtctgctgggtcatattattacctagatgattgatcgacacatctactggcagttgtcaattgtgatgagatgaacaacaagacgtgaatgttgggtattcccgggatctctgagtggagcagtgatggtatgttgataagctgagaagaggtccgttgatggtatccatgaggcggcaagccatttgttttagaaaaatatttcaattatcctacagtgtgcttttctttatgttttagcaattttggttgatattttatgagtcaggaatactgatactcctgttttatttacttttaagagcaaaggtatgctgttgacatgagagagctttgaattattcatgtagctagagaattattattattattattattacccttttacttttaaacattagtaaataactatactat

SEQ ID NO: 193008 - DNA, 1473 bp, Gossypium hirsutum
ttcactcgtccgccaggaggtcatcctcggatatcgaaaagctcgacaatcaaccccttgctcctcttgcttctaatgaagtgcaagaaataaaatcagtcaagtcctcctcttcacttgatagccaggcacttgatacacccatttcaataagccttcgaccccctcctattgaccgtcacaaatcattcgatgatgaagagttttctaaaaagcctgttgttgttaagaaagctgtaccggctcctacaaatgctacatcatattcgatagcagacctccagatagctactggcagtttcagtgttgaaaatcttctcggtgaagggtcatttggacgtgtttatcgagctcaattcgctgatggcaaggttcttgcggtgaagaaaatagactcatcggctcttcccagtaacatgtctgacaatttcatggagatggtttcaaatatatcccagttgcatcacacaaatgtaaccgagttggttggctattgttcagagcatggacaacacctgcttgtctacgagttccacaaaaatggctcactctacgatttcctacatatatcagatgagtacagcaagccattgatttggaacacccgagtcaaaattgctctcgggactgcacgtgcattaaagtacctccatgaagtttgctcgccatctgttgttcacaaaaatatcaagtcagctaacatcttacttgatgctgaactcaaccctcacctttcagactcgggcttggcgacgtttattccaaatgcagatgaggtactaaatcgtgacgatgtggggtctggacacagtgcacctgaggttactatgtccggacagtactctcttaagagtgatgtttatggttttggagtggttatgttggaacttctcactggacgtaagccatttgacagcacaaggcctagactggagcaatctttggttcgatgggcaacacctcaactccacgatatcgatgctctatccaagatggttgacccggcacttaaagggctttaccccgttaaatctctctcacgttttgccgatgtgatcgctctttgtgtccagcccgagcccgagtttcggccacccatgtcagaagtggttgaagcattggttcgactagtgcagcgagctaacatgagtaagagaacaactgggacagaccaaggtgcatctccacgaacgggaaaccccgatgatacacacgactacatgtcttaaatggctgcacaattcttgcttgattgttttggtgaccaggactctgagattggtatcatgtttgaatggcttttttttttttgtaaaataattatacatccctttagttacaatttcaattaagttctgcactttgtaatatgttagtatatagtccatttggtgagacccatccaatgaaattatttcacccttctgtacatgtttaacttgtaaagcatcctttttttctcaacacaataat

SEQ ID NO: 193009 - DNA, 532 bp, Gossypium hirsutum
  unsure (1)..(532): unsure at all n locations
accacacatacgggaagagaccgattttatcaatctcttaaccggcgaaaaaccagaggaaatacttttccgcctcaaccccaaccaaataatgccaagacgagtttctgggtgccaagattctctggatcaacggatataacaatttggagttgaagattcggacagccgtttaacgaagagtattgcatccttaccttcaacatatgcactcaatttacgatgatttggatgagaagaaacgagacttgaagctttacgtgaacgtcgctggccatggcgatgatcacaagggacggtggagatgcgttcccttcacgcatccttcaacgtttgaaacaatagctatggaatctgaccttaaaaacaaagtcaaatccgatctcgagtctttcctcaaagccaaacagtattaccataggttgggtcgtgtttggaaacgaagctatctcctttacggtccttcaggtactggaaaatcaagctttatcgcagctttggctaatttcttgagttancgatgttacgacat

SEQ ID NO: 193010 - DNA, 418 bp, Gossypium hirsutum
cccacgcgtccgcaaggcgcgagaatcggatttggtgccaatcgttctttccctgtataaaaaccccgaatctaatttcatctcattttccatttcattttcattttttcattttcttgttctttcttctttgacttttcttctacagagaggaaaaggggaaggaaagaaagaaaaaatatatatttatttttgcaaggatgcagaggcgtcaagatcaacggtcgagatctgttaaacccattacggttcatgggttagctcagtctggggatcttgttggtcttcaaaagttgctcaatgataaaccttttcttctcaatgagagaaaccctgttatggcacaaacaccacttcatgtatcctctggaaatgacagggctgagatagttaaatttttgctcgattggcaaggatc

SEQ ID NO: 193011 - DNA, 466 bp, Gossypium hirsutum
gaagccaattttggatgggctcaaggagaggcaggaacaggagaagagactacaaaaggttgccaaaacaatggaccatctagaaagggcaaagagagaggaagcagcccccttgattgaagctgcttttcaacggcgattggtagaagagaaggtgcttcatgaacgtgagcaacagctggaagttgagttgagcagacagcgccatgatggggacttgaaagagaagaataggctggcacgtatgttagaaaacaagatgattttccaggagagtgtaataagtcgtcggcaagctgagtttgaccaacggagagtggagagagaggagaggatcaaacaaataattcaggcccggaagcaggaaagagatatcaagagaaagaaaatattttatgtgaggtctgaggaggagagaataaagaagatgcgcaaagaggaggaggcttgtaaacgtgaagaggct

SEQ ID NO: 193012 - DNA, 1188 bp, Gossypium hirsutum
  unsure (1)..(1188): unsure at all n locations
ggaaaaggaaaaaaagaaaaaaaaaacagagatgagctgttatcaattttcagtgataacaaaaaaacacggtttttccttcttccctgtctttctctgtcttctcttactttttatattactctcaattcccattaaaactttcaatctttcagccataattaagcttcttcccttcagaaaacatcgactgaagctgctccaagattaaagaagcttcaatttataatactctgccccttaaactagcaaagcctgatctgctgcataatcgtctaaagaaaaattgatggggataaataagttgctgtgttggtttgcagttttcttctttttgttgggtttctctgcttgcagttcgatttctgatggtgtttttgactctttcacttctactggaaggcacctccttcaagctaagaaagcttgccctgttaactttgagtttctgaactacacaattatcacaagccaatgcaaaggaccaaagtatccacctgaaagttgttgttctgcattcaaggaatttgcttgtccttatgcagaacagatcaacgacttgacgaccgaatgcgcttcaaccatgttcagctacattaatctttacgggaaataccctcctggtctttttgctagtgagtgccgtgaagggaaagaagggctcgcttgccctgccttatcgccatcagcatcagcatcggagaatgctaatggtagtcaacagctgatacgtaatccttggatgctggtaatggccgcaatcatagctgcagctatgttgttatgaaatcctggaaatgaattccgattattccattgtttgatttttatataatatttatattattttcccacttttaacgctgagaaaagtggccagtattttgatttcatacaccaggttctttcctggggcatccttttattggtacttccagaagtgttgtagaaataatatacttcattgggtttgccgtggacaggcatcaggcagtagtataggaaattccaagcgtntctaccactaagtaaatggggaaatgtaccattcgcttctttatgttgatgaccatgagaccaacttggcaagcaaggagaaacctgattggagtaatataattaancgaaccatggctatgtatctgttaacatggtatgaaattccaaantggatccttagtgaaaaat

SEQ ID NO: 193013 - DNA, 725 bp, Gossypium hirsutum
cgtttgtataaatttagatgaagacgttaatgcattggtgtggatggatagaaaactttgcctacggtttgggtttttgagagacatctgaaactgagaaggaacagagatttttattacagagagattaaaaaaaaaaaagaaaaaagaaaaaagagaagagagtgaaaggtcaaactttatcaatggcgtgggtcaacggttgataaccctctttctctcctttttttttttaaatctctaaattctctctctttctttagctatctttgaatttcatttgaagggttcttaaaaaaattatttgataaaaaagtagcttctttttattgggaattctggatattctttctcaagtttgctgagagagaaagaaatggcacaacgatctcatgtacccaagtttggcaattgggagggtgaagaagatgttccttacacagcttattttgacaaggctcgtaagggccgaaccggagggaagattgtgaatccgaatgatccccaagagaatccagacttgcgtcgtgattatgtggctccaaataaagctcctccggcgtcgagaacgaatccggaagcaaatgaactggtaggagatggacctgttagaaggggacatgagtgtggaaagagcagggatgaagttgacttcaaacagtatgccgactctccggtacgccatgacaatgtcaaccgtagagctttgggggacagtacaccta

SEQ ID NO: 193014 - DNA, 578 bp, Gossypium hirsutum
aagatgttcagggagagtaccattaccaagcttgcagatgtacctctatcacatatttctgatgatgtttataagacttcagctgattggatcagccaacaatcccttgaggcacttggtttttttgtcttatggtctttggacatcattcttggggatttggtggcccaacaagcaaatgctaagggctccaaaaaaagcgtgcaacaaccatcctcgaagtctaaggttggtatatttgtggcattagcaatggtattgcggcgtaaacccgatgccctaattagtgtattgccaaagctgagagaaggatcgaaatatcaaggacaagataagctccctgttattatatggatgataattcaggcatcccgaggagatcttgctgtggggctgtacatgtgggcgcatcacctcttgcctatagttggtggcaagaactgtaatccacaatccagagatctaattttacaactagtggaatggatcttatctgccccaaaagcttggacaattttagtaaatgccgcagttaaaaaaagggagcgtttggtgcccccggcttcatttgagattct

SEQ ID NO: 193015 - DNA, 1511 bp, Gossypium hirsutum
ctttcctcttcttcgtttgaaagaaagagctcatccccttgacctttgtcgccgactccttctcgactcgctattactcattgaactcgcctcgccttgactcactctcaccatggctttccatttttccacttaaaacctcattcctttcttctcaaagtctcatcttttaagttctttttattgttattattattattctgaaagttaaatagagagagagagtaaaagggagagatgtatgtggcgccgccaacccagcgatcggatccgagttccatcggcggcggaccgggtgatttacgggtttaccaatcctggaaaggcagcaatatatttttatttcaagggaggtttatatttggaccagatgtaagatcattagggctgactattctgcttatattagctccagtctccattttctgtgtatttgttgctaggaaattgatggatgacttttctcatcatttgggcatttcaattatggttgttgctgttgtcttcactctctatgatttagttcttttactgctaacatctgggagagatcctggtataattccacgtaatgcacaccctccggagccagaaagttttgatggaaatgcggatgttggggctgggcaaactccaccgttacggttgccacaaattaaagaaatggaagtcaatgggatctctgtgaagatcaaatattgtgacacttgcatgctttataggcctcctcgctgctcacactgttcgatttgcaataactgtgtagaacgatttgatcaccactgtccttgggtggggcaatgtattggactgcgaaattatcggttcttcttcatgtttgtcttctcaacaacccttctttgtatatatgttttcgcattcagttgggtctacattagtaggatcatggcatcagaggacacaacaatttggagagcaatgattaaaaccccggcttccattgttctaatagtttacacgttcatttcaatgtggtttgttggtggtttgactgccttccatttgtatctaatcagtacaaatcagacaacgtatgagaatttcagataccgatatgatcgtcgagcaaacccctataacaaaggagtggttgataacttcaaggagatattttgctccagtattccatcatccaagaacaacttcagggaaaaggtgcccagggaacctgtgctaccaacacgaccaggtggttttatgagtccaaatatggggaaggctgtggacgacataaaaatgggtaggaagacagtgtggggtgatattggtgctggcactgatcattgtgaagggcaactcataagtgaccgagtaaatgttaaggagggtgaattaggagatttatctccagatattagaagtacagtagatgacacaggtgaccgttctggtatacatcccaggcggtctagttggggtagaaaaagtggtcgatgggaaatgtcacctgaagttcttgctttggcagctagagtgggggaaccaaaccg

SEQ ID NO: 193016 - DNA, 539 bp, Gossypium hirsutum
caacgaagaaacaaaataaaagaaaaaggaagggaaaacccacatagcccccaaccatcgtcccttttcctctactttcagtactttgttggaaagaggctcatgacttgtcgcctacccttccccgactcgctattactcagttaactcgccctcccttcactcactcccaccatggcattccatttttctgcttaaaagctctttcctttccttttttgtttttttttcctcaaatctcatcttttgaagtaaattatttttatcattattctttagagtaaaagggagagtaaaagggagagatgtatatggtgccgccaccccagcgatcggatccgggttccatcggcggcgggtcgggtgatttacgggtttaccaagcttggaaaggcagcaatatatttttatttcaagggaggtttatatttggaccggatgtaagatcattagggctgactattttgcttataagagctccagtttccattttctgtgtttttgttgcaaggaaattgatggatgatttttctcatcac

SEQ ID NO: 193017 - DNA, 504 bp, Gossypium hirsutum
gaccaaaaaatacgagacacacttcataatatattatataatactttaatattacacaattttctttttcaggtacaaattttcactataacatttaattataataagttcacttgtgtttcaagatcaaaatctcatcatcttgaagtttcaattctctctccaacctcgagttcccgaactcactcctctggttcagccaaccaatagtatctgcagacacaatctcgatgttttccggtaattcaccatacaacaggccatgccacatcccaggatacaacttgaaactcttgtccgaacttgctgcatcattgtacaattgctggctcactgctttgtctgttactttatcttcccctccatgtagaactagaaatggtaatgaaacctcatggagtctttgttcaatttccaggctggtgtttagaagttcattggctgtgttcaaacgaagccgtcctttgtagcaatacggatttgctctaacctgagctcttattt

SEQ ID NO: 193018 - DNA, 498 bp, Gossypium hirsutum
aaaatccaatctgttattcatgactagttgccagttcagattaaacagtcccatttgccattgcccacagatgatttttcactcgggcaatacaaaaataccaagttttaagcctttcattgagcaaacaaaaagaaaataaggacagaaattttacacacaaaatggttaagcatttggaagacacttgtaatttgttctctcaaggaaaccaacgaagtgagggaacagtgaagctcctgaaaattgtgtattgtacacaaactccacaaggaacaagaaacacaactgtcatcttagaaatctgaacctatcactccatcgtccatgcaaatcttcttcagaagccaaccaaataagatttacatgaaacccagaaatataatcacataatggagcatcggctcctttcttctgctggttggggggccaccggctgatacctgtttgacttcgaggggttgtaggtgaactccgatgtatccagcccatactttt

SEQ ID NO: 193019 - DNA, 830 bp, Gossypium hirsutum
aacctttcttatttggaaagataatacctgacaagtgcagatatgatgttttgtcaaccaaaaattgaaattaggttagcaaaagctgaaccaattcaatggacatccctcgaatttagcatggaagttgctgtgccccaaaggattaatgtatcttctgttgctgcaaatcaaagaccatcgtacccatcctccaaaccaaaaagggttgattgggataaaatcgaagctcaagtgaaaaaggaggagaaagatgaaaagctagatggtgatgcagctttgaataaatttttccgcgacatttatcaggatgctgacgaggatgcaagaagggccatgcagaaatcctttgtggaatcaaatgggactgttctttcgacaaactggaaagaagttggtgtaaagaaggtggaaggaagtcctccggatggtatggaactgaagaaatgggagtactgagctctttgttctcaatggtatgctgttttggcctccattatccaaatgttggatactttctctgcaatctaattacaatgcgtcacttggctgtgcttgattgtccaaaattgctcctaagtaaaagtagatggattttctttttccttttactttgttttgtacccttcgttttaaagctttcttttggagtttgtgtagttatactttggtaaaaccttccaacacttttaagctttgcaatgaaaaatgtgaccgtattttgtttttcaaaaaaaaaaaaaaaaaaaatccggccgcccccactggagcccgaaacaaaaattataactttaaagaaggtgaggaatggacaaaaaaacatatttgtg

SEQ ID NO: 193020 - DNA, 898 bp, Gossypium hirsutum
gaaaaatcatacgatcaaagatcgtctttctcgtctggatttctccgattatcatacataaaactcttcgattaagtgatcactgggttcgattttgttagacaagatcggccgattaggatttcaggggattagagaagatggagtctcacgatgagacagggtgccaagccccagaaggccccattctttgtatcaacaactgtggcttcttcggcagtgcagctaccatgaatatgtgctccaagtgtcacaaagcgatgatcctgaagcaggaacaggcgcaacttgcagcatcatcaatcggaagcatcgtgaatggcagctcaactgggaacggtaaggaaccagccgtggctactgctttggatgtacaatctggaaacgccgacaccaaaatggtctcaacagagctacccattgacccatccggaacgacttcatgtgggatgaaaatgaaagagggtcctaacaggtgtaccaaatgctgtaaacgtgttggtttgacaggatttaactgcaggtgtggaaacctcttctgtgcagctcatcgttactccgacaaacatgactgccctttcgattaccgagctgctgctcgcaatgctattgctaaagccaacccacttgttcgggcagagaagctcgataaaatctgagaacaacccgggtcaagatgaagatatgtggatggcttatgtaagttggttactcgtctcatcaaatgtccccttgattgatattaaatgttgggagaccaacatagggagggacatgatttgcattggaaggctatatttttccgtttgtaagtgattttaattgtgcttgtttgatggacattgataagaacaaacttgaatgcttcttccttgggggatgcaattctacttctttt

SEQ ID NO: 193021 - DNA, 969 bp, Gossypium hirsutum
  unsure (1)..(969): unsure at all n locations
taaaatgtcctttctttttttctttatctccattcattactttcctcaacttaattcaaagctgattattggcaggacaatttctttggtcagaattttgtcctgtttcatagccaccaaatctgtcattggcgcctatgcttctgctggagacttaatctgtttgttacaaacttgtgcgttcttggaagttgtacatggagcaatagggattgttccaagtggagtgttgtttcctctgatgcaatggggtggaagaacacatttcttattagcaatcgtccgccggattcacgaggtacaggaattatctgcagttttcataacattttttgcttggagcctaaccgaggtaatacggtattcgcattatgcattgaacatatctggcggttgtccgtcttggctcacctacctgaggtacactttattcattgtgctgtatcctatgggccttgctccgggtgaaatgtggctcatgtaccaagcacttccatatataaaggagaagaacctctacggggatttcttcgctagtgttccctttacctattataattttgtcacggttgttcttctcatctatccattcctttggttgaacctggacctccatttatttaagcagcgacggtcaaaacttggtaagcaacaccacaagaagaagaaaatttgaaggtcggaggttccgatttcaaaccagtcattgtggaattcaaattacaactactttgatattccatgatactatgtcgatggacttcagtaatttccagtgtatttcttatgtaaccagcaacatgtacttcttgggatgatatgtgcccttattttaagattaaatgttcaaacacatgatcatatcacagcgttctgttgtttgaactcaaaatgaatatatttttgaaggatttttggnnaaaaaaaaaaaaaaaaaaaaaaaaaaatnttnnnaatttttatataatt

SEQ ID NO: 193022 - DNA, 434 bp, Gossypium hirsutum
cgcctagcctaggttgtctgtcgacaacaatgtctcacctgctgaagctctatctctttgcgttacaactctctccaggcttttggctggacaatttctttggtcagaattttgtcctgtttcatagccaccaaatctgtcattggcgcctatgcttctgctggagacttaatctgtttgttacaaacttgtgcgttcttggaagttgtacatggagcaatagggattgttccaagtggagtgttgtttcctctgatgcaatggggtggaagaacacatttcttattagcaatcgtccgccggattcacgaggtacaggaattatctgcagttttcataacattttttgcttggagcctaaccgaggtaatacggtattcgcattatgcattgaacatatctgggcggttgttcgtcttggctcacctacctga

SEQ ID NO: 193023 - DNA, 541 bp, Gossypium hirsutum
ctcaatcccagctgaaaaggatgcagcaccaaattccaactcatcaaagtcatcaaatttcccattttacagtccaagtccattgccccccctcttcaagacatcccctgctgtacccagtgtgaatgcgactcctcttcgcttcttcaaacggccattccctcccccctctcctgcaaagcatatcaagtcattgctggcaagaaggcatggctcaattaagcctaacgaggcctcaatccctgaaggaaatgagtgtgaggttggtttgaataagagttttgggttttcgaagcattttacgtctcattatgagcttggtgaggaagtggggcgtggacattttggatatacttgctcccctaaggccaagaaaggaagcctcaaaggcaatgacccccctgccaaagttattccttagtccaagatgaccactgcatttgccatagaggatgtaagactagaggtgaagatactacgagctttaactggtcataagaacttggtttagttctacgatgcctattaagatgatgaaaat

SEQ ID NO: 193024 - DNA, 540 bp, Gossypium hirsutum
  unsure (1)..(540): unsure at all n locations
ataaatcataccacccaaaattttctctcttctcttctcgtctcggtttgcataaatctcttcggtttaggaactgccggggttccattttgtcatcaagatcggccaaattaaaatttcaggcgatcggagaagatggactctcatgatgaaactgggtgccaagctccagaaggtcccatcctgtgcgtcaacaactgcggcttctttggaagtgcggctaccatgaatatgtgctccaagtgtcacaaggcaatgattctgaagcaggaacaggtgcaacttgcagcagcatccattggaagcattgttaatggctgctctactggtagcagtaaggaaccagctgtggctgctgctttggatgtacaacctgtaaatattgagtcaaagattgtgtcagcagagccatccattgatccttctagaacaaccgtcagtgagttggagacaaaaaagggtcctaatangtgctcaacatgccataagcgtgttggtttgacaggatttaactgcaggtgtggaaacctcttctgtgct

SEQ ID NO: 193025 - DNA, 683 bp, Gossypium hirsutum
  unsure (1)..(683): unsure at all n locations
atttgatgaaaaagggagtgaaggtgagacaaaaggacgccatctgagggggaagagatctacagaaagtgatgggaaagcggataacggtgatgataagatcgtggttcggagccagactaagaagaacagaagattgggccttgataaaaggattgaactgaaaaagaatagagaagaaaagtcggttgtttctggccagagtaaaaagggtatctcgaatgaaagtgagaagatcgataggcttgtccgggactattcggcttcaaccgatttggtcagcctggactggaagaaaatgaagatacctccggttctgccgtccaccgaacatacttggttgtttaagctaatgcagccaatgaaggcactgcttgaggcaaaagagaacttgcaaaaggatctgggtagagatcctactgaagatgaattagctgaggcaacaaattcgagtgcagctcaagtgagaagacagttagaggttggtcgagctgctagaaataagctcattaagcacaacctccggctcgttttgtttgtgataaaaaaatattttcaagattttgcaaatggtccaagatttcaagacctttgtcaggctggagttaaaggacttattacagccatcgaccgctttgaaccaagaaggagattccgtctttctacatacggncttttttgga

SEQ ID NO: 193026 - DNA, 960 bp, Gossypium hirsutum
caacttttcttttctccataagaagaatcacaataatttttaagagtcttacaggagtgccgaaagaattaacaatgatcttacaagagcaacaactcaccgagaacacgaacaggtttgggcctttttaatggatgatgatgtttggctccatagaaaacaagggtaactatacttaaagactacctataggattaactctggaattcttgtttgaaattcttttacgaggcaatgacagatcatttagacagcttgaattttacccttacgagtctgtatgagatttggcaaccccttctctccaccctttttgacgagctcgtgtttcccacattgctgtcaatttcttctgagctaccagtgctgcttcggctttctcccttgcttcttcacatgtttccatacctgaattgcacttgtctgcttccttttggtactgtgatgctatcttcttagcctcaagtaatgccatgtcggcccgtcgctgactttccaaagcttcagcttctcttagcttcagttcctccattaaaagttctgcagagttcttctcagtatcctcggtcacttccgggtcatgctttgcgcaatctgcaaaggaagcattgctcagtccttcagggagtgtgagaagtggctgagaagaacaatcacaaagacacggggggcaagtgttggaagtacggctgacggcagccaagccttccatgagatgccagtatagtggtggaccaactatgtagccgaataaacatagacctagtaaacctaaccccaccttcaccgctgccgcatggttcattgccatctcttttctgagaaagggactctggtttttttgggttcagtgcgaaattgaaatggagatagattttggttagttttttttgtatagattcagagatcgatttgaggttaagacaaaggttatcgaaagttgatttgttttggactttg

SEQ ID NO: 193027 - DNA, 1632 bp, Gossypium hirsutum
aaatcccgggggcgcccccgcctccgagaaacttgaggggaagaatcttgctatcccttgcttttctctcgcaaaaaattctcaaacttgtttttaacgttcgctgaatactatcgctcatttcttccctcagaaccctaatcgataactgaagccatttaatcatgtttgggcgtgttccaaaaaaatctgataacactaagttttacgaagtacttggggttcccaaaagtgcaagtcaggatgaattaaagaaggcttataagaaagctgcaattaagaatcatccggataaaggtggagaccccgagaagtttaaggaactggctcatgcttatgaagtacttagtgacccagagaagagagaaatatatgatcaatatggtgaagatgctcttaaagagggaatgggaggaggcggttcttctcacaacccatttgacatatttgagtcatttttcggtgggggagccttcggaggcggtggtagctcgagaggaagaaggcagaagcgaggtgaagatgtagtgcatgctcttaaagtttctctggaagaattgtacaatgggacgacaaaaaagctctctctttccaggaacgcaatatgcagtaaatgtaaagggaaaggttcaaagagtggagcctcctctagatgctatggttgccagggcacaggaatgaaaattacaacacggcagattggactgggcatgatccaacagatgcagcatgtttgtcctgaatgcagaggctcaggtgagatgatcagtgatcgggatagatgcccacagtgcaaagggaacaaggttactcaggaaaagaaggtgctggaagtacatattgagaaaggaatgagagatggtcagaaaattacatttgagggacaagctgatgaggctccagatacaataactggagacattgtttttgtattggaacaaaagaaacaccccaaatttgataggagatttggggacgaactttatgttgaccacaaactcagtttgacagaggctctatgtgggtttcagtttgccctaactcaccttgatggcaggcagctcttaattaaatcgaaccctggcgaggtcattaagcctggtcaatacaaggctatcaatgatgagggtatgcctcaccatcagagacctttcatgaagggcaagctagtcatccagttccatgttattttcccagaatctggggtattttcacctgagcaatgccggaagatcgagagtatattgcccatgaggcctagtaagcatttgacagacatggagcttgatgactgtgaagagactactttgcatgatgtcagtgctgaggaggtaaagaggcggaaggaacgacagcataggcaccgtgaagcttatgatgaagatgacgatgacgatgagtcagcaccaagagtgccatgtgcccagcagtaagaaatgtttgcgttcaatgttttgcccctcttattttatagcagcagctaactttgattacttcattccccgaacctgtttgccgtttgtcttccacccacccattaattggggttttgttcccttatttttaatgtttccttccacccacacctttcctttttttatcccatttttctccacctttctaggattattt

SEQ ID NO: 193028 - DNA, 473 bp, Gossypium hirsutum
  unsure (1)..(473): unsure at all n locations
tggagcaatgccggaagatcgagagtatattgcccatgaggcctagtaagcatttgacagacatggagcttgatgactgtgaagagactactttgcatgatgtcagtgctgaggaggtaaagaggcggaaggaacgacagcataggcaccgtgaagcttatgatgaagatgacgatgacgatgagtcagcaccaagagtgcaatgtgcccagcagtaagaaatgtttgcgttcaatgttttgcccctcttattttatagcagcagccaccttagatcactacatatccggaacttgtatgcggttttgtctgcaaccagcacattaaattggtgttttgtctctttattttttatttttgcgttcatctcagcatgttgtggtattttacctcgacatttcaaggatctatctactatgttcagatgctatatttgatttttnaaaaaaaaaaannnnnnnnnaannnnnnna

SEQ ID NO: 193029 - DNA, 418 bp, Gossypium hirsutum
cttctgctttcgttttacttttttgtttcttccttatcttgcaagagtgcaagctgtactgcataactgattttttctgagctctggctttttattcctctccttcatgcagatttccatcttgattttgcctcgcatgcgagattaaacgttgtccaaactccaagcctttaccaattcaaaggcaagtcggtttcatggactccaatttacagacttcgcctaatagttctgatgcaaaaacagcatttcgtaagccttctaccgactcatctaaccgacaatataggcgtcgttctccagtcagcgggttatcttcatctgaaggaagttctccccagcgtgaccgtagcattagtcccatagtttcaagggatgatctggaaaaaagtgctgatactcgaccggggagagatgg

SEQ ID NO: 193030 - DNA, 882 bp, Gossypium hirsutum
gcatattcgctgcgtcacatagtactccaataccctggtttacctgaaccggaagtaagatccggttcaatctcatagtaaaaccaaaacttttgttttccttagtattctttctctaaaatcaaaatccaaatggaaaagaaaggcttgacaatattttgatttctgtaaaacgcatagaagagagagtactttatctttaaaaccataccggtaaagagaaagttccgattttttttttttcatttctttcaagctcaaccaaaatatattaaaggaaacctaacttgccggagctctggatacagttaagaatccgatggactccttgggtccgaatcggtttgatatcttcgagatttatcggcgattctgtgaacttagaacaggatatgagcatgtttgtgatggagaaggctaccgacaaggcgaggaatcacaaagagctaagtgctctagggacagattgaatcacctcttaaagatggtggagtcaaggatgcgcgcgaggcatatgactgccatctttgatgaacttctcaagctcatgttacagctcgacttgacggtggacttttctgtattctcgtgcttctatgattttgttttcttcgtgtgccgagaaaatggtcaaaagaatattactgtaagcagggcagttgctgcttggagattagtcttagcaggcaggttccgtttgcttaaccaatggtgtgactttgttgagaaaaatcagcggcacaatatttctgaggatacatggcagcaagttttagcttttagtcggtgtgtgcatgaaaccctagaagggtatgatcctgaaggtgcttggcccgttttaattgatgactttgttgagcatatgtacagaatttcagggtc

SEQ ID NO: 193031 - DNA, 440 bp, Gossypium hirsutum
gggggcccaacgcgtccgtccaaacaccgggtgcacctgaaccggaagggatccggttcattcctcctgttaatttcaccgaaaaaccagtattttcgttttcgtttcctttctttctcttcctgaaaacaaaatccaaaggaaacctgatttttgtaaaatacagaggaagagaggagactacaacttttaaacgacaccgtcaagaccaagttccaatttttattacttctgtgtgtttcctttgaaattcaccctcccaaataaattccccaactcgtccgagctcctgaaacagctgagaatccgatggactctttgggtccgaatcgctttgatatctttgaaatttaccggcaattttgtgaacttagaagaggagatactttatgtttgtggcgaagaaggttaccgacaagatgaggaatcacaaagagcta

SEQ ID NO: 193032 - DNA, 306 bp, Gossypium hirsutum
tgatgatatcctacttttgtggaagataacgagattatttgaaaatggggtggagtgccgtgaggtcctagatgctattattgatagatgtgcagcactgcagaacatacggcaagcagttctgcactataggaaggtgttcaaccaacagcatattgagccgagggtgaggagagtagctctgaaccgtggagccgagtacttggagcggtactttcgcttaattgcttttgctgcatatcttggcagtgaagcatttgacagtttttgcggacaaggagaatgtaagatgtcatttaagaattg

SEQ ID NO: 193033 - DNA, 463 bp, Gossypium hirsutum
cccacgcgttcactactttagaaactcaaacaaactttttagttctcaactctctcaaattcaccatggctgacaagtgtggcaactgcgattgcgctgacaagagccagtgtgtgaagaaaggaaacagcttggtcattgagactgaggagagctacatcagcaccgtagtggtcgagcctctggcagagaacgatggcaagtgcaagtgcggaactagctgcagctgcacaaactgcacatgtggcagtcactaagcagacatatagaatgatgaagtttgggacctaaaaagaataaaagttgggttgaataatttgtgtcttttgttgtagtttgagtgtgttttcttgtctatctgtccgatgattgtctatgtctctcattttatacaatgatggaatgaccatgtcaatggcctttgtctgattaatgaactattattagtattaatcttctgact

SEQ ID NO: 193034 - DNA, 496 bp, Gossypium hirsutum
gtacactatgatggaatggtcatatctatggactcagacataagacagacagggatgaaaacgcattcaatgtctcaaactacaacaacaaaccttttacttctcaactctctcaaattcaccatggctgacaagtgcggcaactgcgactgctctgacaagagccagtgtgtgaagaaaggaaacgccttggtcattgagactgagaaaagctacatcagcactgtagtggtcgaggctgtggcagagaacgatggcaagtgcaagtgtggaactagctgcagctgcacaaactgcacatgtggcaatcattaagcagacatatatagaactgcacgatgttttagtccataattaaattaagttgaataattggtggcgtgttgcatgtttgtctccgcctcattgtataccatgatagaatggccatgtctatggactttgtctgattaatgaatgattattagcacaaaaaaaaaaaataaaaaaaaaattg

SEQ ID NO: 193035 - DNA, 465 bp, Gossypium hirsutum
cccacgcgtccgcgtgctttagaaactcaaacaaaccttttacttctcaactctttcaaattcatcatgtctgacaagtgcggcaactgcgactgctctgacaagagccagtgcgtgaagaaaggaaatagcttggtcattgagactgaaaagagctacatcagcactgtagtggtcgaggctgtggcagagaacgatggcaagtgcaagtgtggagatagctgcagctgcacagactgcacatgtggcactcattaagcagacatagaaccatgatgttttagtccatagcaatattaggacctaaaaataatgaaattgagttgaataaattggtgttttggtgttgtagtttgagacattgaatgcgttttcatgcctgtctgtcttatgtctgagtctcattgtacacaatgatggaatggccatatctatggacattgtatgattaatgaattattatca

SEQ ID NO: 193036 - DNA, 902 bp, Gossypium hirsutum
  unsure (1)..(902): unsure at all n locations
ccgaccggcggcggaaaaacgggcggccagattctcgactctgtctcctccatcgctctttttcatcgatcagatctcttcaaacccatctgtcaaaacaaccctccactcattccatccatgacgcttggctcaggaggatccagtgttgtggtgcctcggaacttcagattgctggaggagcttgagcgtggagaaaaaggtattggagatggtactgtcagctatggaatggatgacggagatgacatttacatgcgctcttggactggcaccattattggtcctcataatactgtacatgaaggtcgaatctatcagctgaagctgttctgtgataaagattatccagagaagccaccaagcgtccgttttcattcaagaatcaacatgacttgtgttaaccacgaaactggagtggtggaaccaaagaagtttggacttcttgcaaattggcagagggagtataccatggaggatttactgacacagctgaaaaaggagatggcagcaccacataaccgaaagctggttcaacctcccgagggtacctacttctagctctcaagattatcggacatcctggatctaagtgcatttctggtatgcaatatatagtttgtaatgcttgttgatctttaaagaaaatagtggggaatgccccaaaaagcttctccaattactttcccctggtttcatcttcattatccttttcttatcaaactctgtttaaggaatgctgtttaattaatgggaccttatccgtttgttgaatattaaaaaaccccgtttgatttgggttggnggngcnngggngtaaaaaattctgcgggccccccccgcgtgaaacccaatttcccctatattgaattgttttacccccccccctggcctccttttat

SEQ ID NO: 193037 - DNA, 729 bp, Gossypium hirsutum
  unsure (1)..(729): unsure at all n locations
attcccctccgcctccccccattgactcattgctatctctctttccctctctctaatgacgcttagctctggaggatcgagtgtcgtggtgcctcggaacttccgattgctggaggagcttgagcgtggagaaaaaggtatcggagatggtactgtcagctatggaatggatgacggagatgatatttacatgcgctcttggaccggcaccattatcggtcctctcaataccgtacatgaaggtcgaatctatcagctgaagctattctgcgataaagattatccggagaagccaccgagtgtccgttttcattcaaggatcaacatggcttgtgttaaccatgacacagggctggtcgaatcaaagaagttcggaattctcgcaaattggcggagggagtatactatggaagatatactgacccagctgaaaaaggagatggcagcctctcataatcgaaagctggtccaacctcctgagggtacctacttctagctctcgaattcgtatcgatattctggatctaatttcatttgtggttatgcaatatatagtttgtaatgcttgttgatcctttataagaacaaactgtggaattggtcaaaaaacttctcgattacttctccttggcttcatgttcttgttctcaaaccggatgctgtttttctaacagaattttatccatgtttcaaaacccttcaaataaannnnnnnnnnnnnnnnnnnnn

SEQ ID NO: 193038 - DNA, 1156 bp, Gossypium hirsutum
  unsure (1)..(1156): unsure at all n locations
ctgttttcttttcctttttttcacaaattatgttctaatgcaaattcaaatggagaatggaatanggaaaaatggacatgtataagaaatcttctataaataccaccttctccttcgtttcatttccagactttacctacacattttacaaggcacaggatttctgggatttttctgcaaattggaagaaagataaagatggcaagaacaagaattaccatcttttttatggggctcgtgctttggtgttgcttgacaaaagcggaatacatgaaatataaagatccgaaacatgcggtacatgttcgaacccgggacctgttggatcgaatgacattggaggaaaagatcggacaaatggtccagatcgaacgcagcgttgcttcggccgacgtgatgaacaagtatttcattgggagtgtattgagtggaggagggagtgccccttctccacaagcttctccagaggcttggataaacatgatcaatgactttcagaagggtagtttagcaacccgaatgcagatccccatgatttacgggattgatgctgttcatggcaacaacaatgtttacaaggcaacaatttttcctcacaacattggtctaggtgctaccagggaccctaaactggttaagaaaattggggctgcaacagcacttgaatctagagcaactggcattccatatgttttcgcaccttgtatagcggtttgccgagatccgagatggggccgatgttacgaaagttacagcgaagatccccatcttgttgacgcaatgacagagattgtaccaggattacaaggagacatacctgctaaatcttctaaaggcattccatttgttgctggaaataaaaatgttgcagcttgtgctaagcactacgtaggagatggtggaacaaccaagggcataaatgagaacaacacagtgatcaactggcatgatttgcttagcattcatatgccaggctactacacttcgattatcaaaggtgtttcaacggtcatggtttcgtattctagttggaacggcgttaaaatgcatgctaatcgtgatttagtcactggtttcctcaagaacaaacttcgattcagaggcttcgtcatctcagattgggaaggcattgaccggatcacttatccacctcatg

SEQ ID NO: 193039 - DNA, 1178 bp, Gossypium hirsutum
aaggtcactctcggacaatacgagagtcacattgttttcactcttccagggctctaccgcgttgttgatgggatcgatgtttttgatcccaaattcaatattggctgccctgcagctgatatgagcatatacttcccttacacggaagagaagcgtaggttgatgaagttccacccggagattgaagagcttgtttacagccctgatgagaatacagagcacttatgtgtactaaaagaccgcaacaagccgattctgcttaccatggcaaggttggaccgagtgaagaacttaactgggctcgtagagttctatgccaagaacagccggctgagggaactggttaacttggttgtagtaggtggagataggagaaaggaatccaaggacttagaagaaaaggctgaaatgaagaagatgtatgaacttatcgaaaaatacaagttgaatggacaattcagatggatatcgtcccagatgaaccgagtgagaaatggtgaactctatcgttatatttgcgacaccaagggagcattcgttcagcctcctatatacgaggcttttggcttgactgttgttgaggcaatgacctgtggactaccaacatttgcaacatgttacgggggccctgctgagattatagttcacggaaaatcggggttcaacatcgatccttataacggtgatttggctgccgagacccttgccaatttcttcgagaagtgcaaagcggatccatcttattgggatgagatctcccagggagggttgaaacgcatacaggagaagtatacatggcagatttactccgagaagctattgactctcaccggagtttatggcttttcgaaacatgtagcttaccaggagcaacgtgggcgcaagcgttacattgaaatgttgcatgcatggatgtataacaatcgggtcaagactgttccactagctgttgagtaaagaaaaagcaaaaggctgcttggaaaccaaggaatttccaagaatgattgctattgaagttttatttttgcttctttttttcaatttcgtaaatgtttaatttcaactttggggtttccccttggaatgttttgaactctgggtttggtcccattgattgcaataaagttttaatttctgttgaatgatgtttgtatttaagttttgagtttgaagaggat

SEQ ID NO: 193040 - DNA, 438 bp, Gossypium hirsutum
aaatcaacatacgaaacaactaattcttccttttattttgctcgtaaattattatagattagatgagagcttctgcccctcaacagtgttatgaagctccattataatgacgggcaccaattgcaacaccaatggagctgtctcatctgtagaacatctcaccacttcattcaatgtctcatacgcagctgtcctcaaccgagattccctagcatcttctcggtgagtgacagtgagaagagactgcacaatttcctggaagaaaggagttaaaggagatgatggacccacctcctcataaccttgagcaagaaaatagagagcaccacaggccttctcagcaacattaggagtgtccttcatactctgtagcagaactacgactatctgttggcaatttgcctgagtgatgatgggtgaatcaacagctgagccatg

SEQ ID NO: 193041 - DNA, 887 bp, Gossypium hirsutum
atgataccaaagtagacgtgttttcatttgctctgatcttacaggagatgattgaaggctacccaccattttctgctaagcaagacaatgaagttcctaaggtatatgcagcaagggagcgtccacctttcaaagctccagctaagcattatgcccatgggctcaaagagttaattgaggaatgttggaatgagaaacctgccaagcgacctacattcagacagattataaccagacttgaatctattcacaacagtttcagtcatagaaagcgttggaaggttagaccactaaaatgctttcagaatctggaggcaatgctgaagaaagatcattctagtccaagcagccgtagcagttcatctcgatctactaacagcatttgaatgaatggctggtgttttatcttgcaaagcttataattctgcaaaatttattcagtttattggctaaaagattgagcgtataaccaggagcatacttgaaaaaaaaatgtttgatgtctttaagatttgttctcccttctgccttgtgggctgaaaactacattttgttccactccatttgtttgtaacttctactgtacattatgtatgctatcataagctgcataaaagaaaagtatgttatcgtaatcagctaagggaactactacaagaacaacgtatttggaccatatgaattggaattggaattggaattggggaaaacggttttgctaaagaaagtcgaatcaagcaaagatattttaattattatgtaatgatgtctgtctgcattcgattgattgtacttttctaagattattgaggagaaagcttgtttttgttttatttatgagattaaaatagcacgattttgtttcatgtaaatttatttatgagatt

SEQ ID NO: 193042 - DNA, 761 bp, Gossypium hirsutum
gaggcaagacctagtcatagatttttatatcaatggagatcaactacaaaagccaaatctagtcagtaagtagtaataattttatatcaggtgaatagtaattctaagatcagcaagctaataatattattacagcatgcacatgatgatattagacatgtcttaactataagaaccatataattagttgcttagaagaaccttaagctaagctaagagccacaaattcttctgccatctggtgctgataagatagccccccacgcctttgctttgcctcttaaccccaatggttaaacaatctgcattgttgatgcaccgctccacgaactcctctgtgctgctgctcccacaaacacagcttagaaatggagaatgccttttttgacccagtaccaacactgaaacctcaagtttcttcacttggctcatcactgtccccagctttggcccctggattaccagtgcttccacttcaacctcaggtttacaagccttgcaaagtgacccaagagagttagcaaggtaaggagaaaaagaagaagaagaataagaagtcttttgggttgggggaataacatgaagtaaagtaagcaaatcacccttgttagccacatgagtgagtgcccaaatcattgcatgcttagaatgcgagctctcatccactacaaccatcactctcttccttaacaccaacccattatcaaccccattgccatacatgttaagcccttccatctgagtcaaaccccacgcgtccg

SEQ ID NO: 193043 - DNA, 599 bp, Gossypium hirsutum
acagaatcattttgcgattgggtttctgatttacctgcaatgccaataacacaagtaattgaaacgatacgccgtaaattgatggaattcatctatacacgcaagatggattcggatcaatggtcatcaaaccttactccatctgcagaggaaaacctccaaagaagtcttgtcaattcacgttctcttgaagtagtactttcacacagtagttgtttcaaggttcgggatactttagacatgataaacgttgttaaccttgaaaattgggattgtagttgcagggaatggcagatcaacggattgccatgtttacatgcagtggcagcaattgagcacgttggcaagaatgtgtatgaggcctttaaagttacatattcagagtctataaacccaataccgccgttagacaggtgcatgaaaagagaatcatcaccggtgcttgtgcatcctccttgtgtgacccgtccggtggggcggcccaaggaaagaaaatacgcacttaaatccaatcaagctgttaagagaacacttcagtgcagcaagtgcaaaaagcttgtgcacaacaaaaggaaatgcaagcaatctgcttagggagt

SEQ ID NO: 193044 - DNA, 715 bp, Gossypium hirsutum
ttcctctcgtccgcccacgcgtccgttgctctccacgaactggttattgcaagtggtgaagatccgggagagcgcattgaggagatggcatcactgctcaagaagcttaaagattttgtcctcactgaaaatcctgaagctgacacctctgagggtgaaaagggcttgatgaaacacaggtcacctgttatcccagatgatttccggtgtccaatatctctcgagttgatgaaagaccctgtaattgtctccactggacagacatatgaaagatcctgtattcagaaatggttggatgctgggcacaagacgtgtccgaaaacacagcagacactattgcacactgcccttacgccaaactatgtcctaaaaagtctcatagctttgtggtgcgagagcaatggtgttgagctgcctaagaaacaggggacttgtagaagcagaaaagcaggtagcagtgcttcggactgtgatcgtactgctatcatcactttgttggaaaaactggcaaatggaaattcagaacaacaaagagcagctgctggtgaactccggctattggcaaaaagaaatgcggataatagggtgtgtattgctgaggcaggagccataccacttcttgtcgagttattgtcttccacagatcctcgaacccaggagcatgctgtgacagctcttctcaacctttccattaatgacagtaacaagggaacca

SEQ ID NO: 193045 - DNA, 510 bp, Gossypium hirsutum
ctagtctcgagttttttttttttttttttttttttttttttttgggtttaacaataaattcatcacttttgattccaaaacaaaaataagaaaaatccctaaataatatctataaaaaaaactattcaactaaatcgtgccagaacacacaattccattgttcgacatagctcatatttcaaaagcaaaccaaaacattttttgtcaaaatcataataaatccctctcattcccagccagtagcagcaggggctgacacatcgacaggagcaccagggatttgtgctggggcagctgcagcatcccacacatcagaagtaacggcaactgcaacttgatcaccccaattaccagcaggtacaccagagataggtggctgaaccatatcagcagaccattgatcacctatttgtgcgggccattggtcagttgctaaagaaaccattccataatcaggagcagcgattgcttcctcatcttcttcggacgcgtgggcggacgcgtgggcga

SEQ ID NO: 193046 - DNA, 1119 bp, Gossypium hirsutum
  unsure (1)..(1119): unsure at all n locations
attaagaatgagggaaccaacgatggtggttggcgcagacagcaatgctgctggtgctgctgttggcggtgctgatggatcacctctccctccaccgacgtcttcaccgccgcaatcattagtcgagaggctcaaggactacggccaggaacacgttttcgccctttgggacgagctttctcctgatgaacgcctccacctcgtcaaggatatccagagtttggatctttcgagaatagatcggatcattcgctgctctcttcgatctcaaggactgccggtggcagcaatagagccagttcccgagagttgcgtgtcctctgtagaggagagaacgatggaggaaagggaaaggtggtggaaagatgggattgaaggctatatcggaaggcaaattggctgttttgcttctatccggtggccaggggactcggcttggaagttcagatcccaagggatgtttcaatattggacttccttctgggaagtcactttttcaactgcaagctgagcggattttgtgtgttcaaagattagccgcacaagctaaaaatgagggctcagtgactattcactggtatgtaatgactagcccatttactgatgatgcaacgcgtaaattctttgagagtcataaatactttggtcttgaagcagatcaagttacctttttccagcaaggcaccctaccttgcatctcaaaggatggtagatatgtcatggagactccattcaaggttgctaagtctccagatgggaatggaggagtatatacagccctgaaatcttcaagattgttagaggatatggccgcgagagggattaaatatgtggattgctacggtgttgacaatgcattggttcgtgtagctgatccaacattcctgggatatttcattgataaaggtgtanctgcagctgctaaagttgtccggaaagcctatccccannaaaaggttggtgtttttgtaaggcgaagtaaaggtggaccacttactgtggttgaatacactgaattaaatcaatcactggcttctgcagtaaaccancaaactgggcgtcttcgtntttgttggagtaatgtgtgcttacacatgtttactttggattttctaaacc

SEQ ID NO: 193047 - DNA, 956 bp, Gossypium hirsutum
tgtgaatggatggggtgaagttaccagaggcttgccattaaagacccctccattttaagacagaaccatactgaaaccccgaaacccacctatgatagagttcgagcaccatgaatttgatgagattgaagatatatcaaacacaaacaagttgtatgaagaagaagaaatggtttacaagaccttcctgtttgatccagataagcttggacaactcaaggaacaagcccttgaagatggggttttatccaaatgcaccacattcgaagtccttgcagggtttgtgtggagagctccatgcaaagcattaaacttggttcctcagcaaaaaactaagctcctctttgctgctgatgggagaaaaagattcataccaccattacctgaaggttttgcaggtaatgggattgttttaacatattcaatctccactgccggtgagttagctgagaagccattatcatttgctgtgggattgatccgacaggcggtcaaattggcgaccgacagttttatgcgatcagccattgattattttgaagtgacaagagctaggccatctttggatggaactgttcttattacagcttggtctaaactatcttttcacaccatagattttggttggggagaacccatttcaacagggcctgttgctttgcctgaaaagccagttctgcttttccttcctcatcagaaagataagaaaagcattaatttactgttggggttgcctgtttcagcaatgaatagctttgaagagctgatgcaggtttaagcagaagaaaaaaaaagacatgttttatagcaagttattttatgtcagatactcagattcatatgttgcattgcatgcagtcattatctgaggattttctgacagtgggttttcggtaaattgaagaacaaaattaacctcagatcagatagactccgaattctgagtcatataattt

SEQ ID NO: 193048 - DNA, 256 bp, Gossypium hirsutum
ttcatcgtcatggacctcctcttcctagagaaagttctgatctctcttttcttcaccatcatctttgctatctgagtctctaaactacgtggcaagcgctttaaactcccccctggcccccttcccatcccggttgtcggcaactggctccaagtcggcgatgacttgaaccaccgcaacctcacagacttagccaagaagatcggtgacatcttcttgctcctgatgggacaacgtatcctcgtgggtgtttttt

SEQ ID NO: 193049 - DNA, 739 bp, Gossypium hirsutum
aaaaggccagccccaatatatataaaaataaaaagaaatatagatataaaaaaacaataaaaataataatataaaattagtaaatcccctagttttcagttacttcataaatgatttattgtcatacaatcaatagaacttcaaaattcccccactttgagcaaaattaaaaggaagaggcagcaaaaaccagcctccatcaaatctctaaattcaagagttcttttaatgctcagtttaaacacattattacaacatgttttttttagtaaaatttttcattatcttgttaactcacattgtggtatgagtcaatgatggcgtctgctagatattcacacttagccaaagataatcctgcaagtgatatccttccatccttggtcatataaacatgccacttgtttgtcatattatcgcactgagctttgtttaagcctgtgaacgaaaacatcccgatctgcttaagaacgaaagaccaatccttcccacttttatctttggaagaaagactatcaaacaatttatgtctcacattcttgattctccctgccatcatttccatctcagcattccattccttgaagagagctgaatccccaacaatgttggcgacaattcttgccccatgaacaggaggattcgagtacattggtcgagctattcttttcagttggctctttacccttgcagctgcctctggtgatgagcaaacaacattgattgccggacgcgtggg

SEQ ID NO: 193050 - DNA, 371 bp, Gossypium hirsutum
tgaaggttggtgaagctgagaaggccacaggtgctgtagaatttaacttctgcgcccaactgatagaagatgctgatggtttagagaagattgaaaatctacagactcatgataatagtgagatatatgagaaggcagtcaagattctcgagacttactggctggaggaggatgaagagacgctacctcctgctgacggtactcagcaaagttttcagtttggggagaatgggcttcaagttccatccggtggattcaacttcagttgaagggtttatagaataaacagttcgtaatgcgggttacgactgatacttggggtcgaagtttggtcagggcaccatgatgtgtctggttacataaaagtctgt

SEQ ID NO: 193051 - DNA, 853 bp, Gossypium hirsutum
  unsure (1)..(853): unsure at all n locations
gggaaaaaaaacaaagaaatgatgaagtttgaggctcagattctttcaaaagaaatcgtcaaacctgcttccccagaaattcatctaaaagaacccttgcggactctgtgtatttgatcagctgactcccaccacttacgctccaatcatattattttatgccccgagtgataccaacacctccaatattttgactcagctgaagaaatctctttcagaaaccctaaacatcttatatcccttctctgggagaatctttagtaacatgttcatccatgatttcgacgccggtgttccgtttttatcggctcgaatcggttgtcgattatccgagtttctcaggcatcatcaaattgagaccttgaacaacttgctcccatgccctcctttctacaaggaatcaaatcatcagggtcctctcttggtttgtcaagtcaccatgtttgcatgtgggggagtagctttaggcatctgcgcctcacataaaatcactgacgccaaaacaggcttcattttcacctttgtttggagaacaatctgccaaggataccaccctgaaattaaatttcctgccttatctaaggcctccttgatctttccacctaaaaatccaatgcccaagaattacatatccatgatggaaaacttatggttcaccaaaggtaattttgttacacggaaattcgtgtttaatgaggaaacaatagccatcctaaaggacatggcaaaaggggaagtctagactacaccgacacgaaccgaanctgtctctggtttcatctggaaatgttcaatggcggcatccanggcgatacaangaaccttgaaaccatccattgttgtccaagcanta

SEQ ID NO: 193052 - DNA, 1057 bp, Gossypium hirsutum
taactcttcaaccaaaaccctatacacttattttaaaagctcaatttctctagaaccagctcgccaattcgctctttcttcgctcgaccgcctgctgttcttcgctctccttacccttttgcatccctcagaaaagaagaaaaaaaaccgttgacttttcgtttttggggggggggccaaactcgaagaccccaatttgtttcaaaaagagagagggttgaaaaatggatcaagggttactggatgatattataaaccggcttttggaagttaggggtcgaccagggaaacaagttcagttatctgaatcagagatccggcagctttgtttggtttctaaagagattttcttacaacaacctaatttgttggaacttgaagcccccatcaagatttgtggtgatattcatggtcaatattctgatctggtaaggcggtttgagtacggtggattgccgccacatgccaactacttatttttgggggactatgttgatcgaggcaagcaaagtctggagaccatatgtcttcttcttgcttacaagataaaacaccctgaaaactttctcctcttgaggggtaaccatgaatgtgcttctataaaccgcatatatgggttctatgatgagtgtaagagaagatttaatgttaggctatggaggacattcacggaatgttttaactgccttccagtggcagcattaatcgatgagaagattctgtgcatgcatggaggcctttctcccgatctgaataatttggatcagattcgaagtttacatcgcccgactgatgtaccagacacaggtttgctctgtgatcttctctggtcagatcccagtaaagatgttcaaggttggggaatgaacgacagaggtgtttcatttacttttggtcctgacaaagtgtcagagtttttacagaaacatgacctagatctcatttgccgtgcccaccaggttgtggaagatggatatgagtttttcgccgaccgacaacttgtaactatattttcagcacccaattattgcggggaattcgataatgctggagccaa

SEQ ID NO: 193053 - DNA, 571 bp, Gossypium hirsutum
  unsure (1)..(571): unsure at all n locations
gactttatcaatcagttccggcgaatcaaatggcaaaagaagttgttaatcccgatgaactggttgttgttggagaggaattagaccatgtaagaatcatcactttgaacaggcctcgacatttgaatgtcatctcatccaaagtggtctccctgctagctaaatacttagaaaaatgggaaagagatgagcaagctcagcttatactgatcaagggagccgggcgtgcattttctgctggtggagatttaaaaatgttctatgagggaaggaaatcaaaggattcctgccttgaagtggtctatagaatgtattggctttgctatcacattcatacctataagaaaactcaggttgctcttgttcaaggaatttcaatgggaggtggtgcatcattgatggtcccgatgaagttctcagttgtaacagaaaaaactgtctttgcaacaccagaagcaagtattgggtttcatgtggactgtggtttctcatacatgctttcccatctccctggccatttgggggaatatttanctttaaccggggctaggttaaatggtaaggaattggc

SEQ ID NO: 193054 - DNA, 690 bp, Gossypium hirsutum
  unsure (1)..(690): unsure at all n locations
gctatatctaaaataaggttccaacctctgtttttcttcacaaattcccaatctaatcgcttcctccccttctttttccacatctcatagaagagttggcagtttgctctgctgtgtccacagtttgtcaaagtggagggcattaattttgaatcgtcttttatgtctgaacgggcctctctctttttatcatcaattggtttgctcggtgaatactgtcccacttctagaaaaaaggaaggtatctgcatgcatattgaggtcagtaatacagaaaaatttggttgccattttatgcgacctattccaagtgcaagaaagcagtctggtaaaggatttgttatcacaattggaatcactagtatctgatccctcctttgtgattaagagtttgttccacaagttcgatcgagatggctttgcagaatattggtgcttccaacagtgatgatgcctcttataggtataagatgcccaaaatgataaccaagattgaaggacgaggaaatggcatcaagactaatgtggttaacatggttgagattgcgaaggctttggctaaacctgcttcttaccctgtaaagtattttggttgtgaactgggagcccaatccaagtttgatgagaagaatggaacttcactggtanatggtgcccatgaaactgccaagcttgcagggcttcttgaaa

SEQ ID NO: 193055 - DNA, 1121 bp, Gossypium hirsutum
attgaaaacacaagtatttgatctgtcctttctgattaacgctcacctacggttttgatcaagatggctttgcaaaatattggtgcttcaaacagtgatgatgccttttataggtataagatgcccaaaatgataactaagattgaagggagaggaaatggcatcaagactaatgtagttaatatggttgagattgcaaaggctttggctagacctgcttcttacactacaaagtattttggttgtgaactgggagctcaatccaagtttgatgagaagactggaacttcacacgtaaatggggcccatgacactgccaagcttgcagggcttcttgaaaacttcattaagaagtatgttcaatgctatggttgtgggaaccctgaaacggagataattattaccaagacgcagatgattaccctgaaatgtgctgcatgtggatttgtttccgatgttgacatgcgagataagcttacgacattcattcttaaaaacccacctgaggcaaagaagtcaacgaaagacaagaaagcgatgaggagagctgaaaaggagagactcaaggagggtgaggctgctgatgaagagctgaagaagattaaaaaggaggcaaaaaagaaaggttcctctactacttcaaaggttgttgcttccaagggtgcagtaaccaagaagaaaagcaagcattctgatgaggatcattccccttcacaaagccaggttgatgagaatgaacaggtagccagtgatgacgacgatgatgcccccgggcaaacagatacttcactggcggctgctcaacaaaggattcaagagcagttaagtgctgttactgcagatatggtgatgctatctaccaatgaagagaagaaaaagtcagtgaagaagactccggagcctgatgtcaaggtacatgagaaatgtttcaatacccacgagaaacttgttaacgagataaaggaacatctcacgaaagggtcttctccaactcagcttaaatccttcctaggttcactctctggaacttcccaagaaatcatggatgctcttttcacagcactctttgaggatgttgggaaagggtttgctaaggaagtaactaagaagaagaactacct

SEQ ID NO: 193056 - DNA, 567 bp, Gossypium hirsutum
ggggggggcggttataaactagggggacccccgggccggcggaattcgggcccgagctcaaaggaggaacccacacacttccacggaaaatcaccgaacttggtccaagactcctaaaccggatttaaccgcctccgcggaacgctcaacccgccctaacaagccgtgggatgggatcagaaaagtggtgtttggaggtcaagtgaccgatgaagaatttgaaagcttaaacaaacggaaaccttgttctggatataaaatcaaggagatgaccggtagtggtatttttgcagccgatggagaaaatgacgaatcagaacctggtagtgcaaatcctactccaaacaacaaaacagcaatacgaatgtaccagcaatctctagctggaatcagtcacatctcgtttgccgaggaagagagaattacacccaaaaagccaactactcttcctgaggtggcgaagcagcgtgaattgagtggaacactacaaagtgaggaggcaaagttgaagaagcagctctccgatgccaagtcaaaggagcttggtggacatgacatctttgcacc

SEQ ID NO: 193057 - DNA, 578 bp, Gossypium hirsutum
  unsure (1)..(578): unsure at all n locations
ttctcgttacgcgtccgagctactctaccttttctttttatatttatttaaaaaaattcaaacgtatatatacatttatgaaaatccatgaaaatttaaacgaaaaggaaaagggtgagatcgaatttcaaagcaaaaggcacaaaaagaaagttccagatcaagagattttcaagtgtttcgacagttttgagagtgggaggggaaaaaaatggagaggagcactccagttaggaagccacatacttctacagcagatctgctcacttggtctgagactcctcagccggaccccgccaccttcgccgctcgctccgtccgacctcaccagccgtcggatgggatcagaaaagtggtgtttggaggccaagtaactgatgaagaatttgaaagcttaaacaaacggaaacctccttctggatataaaatgaaggagatgactggtagtggtatttttgcagccaatgtagaaaatgatgagtccgaaccaggcagtgccaatcctgcttcaaacaacaagacgggattacgaatgtaccangaagcactagctggaattagtcacatttcttttgctg

SEQ ID NO: 193058 - DNA, 404 bp, Gossypium hirsutum
  unsure (1)..(404): unsure at all n locations
aaaaaacacactccttttgaatctttnttttggtggtgcacagaaggattcgaaggcatttctccattgttgttttattcaattacaagctaccttttgttttggtggttttgagagtggaattagggaaaaaaatggagaagagcactccagtgaggaaaccacacacttccactgcagatctactcacttggtccgagactcctcaaccggattccaccgcctccgccgcacgctccacccgccctcaccagccgtcggatgggatcagaaaagtggtgtttggaggtcaagtgaccgatgaagaatttgaaagcttaaacaaacggaaaccttgttctggatataaaatcaaggagatgactggtagtggtatttttgcagccgatggagaaaatgacgaa

SEQ ID NO: 193059 - DNA, 447 bp, Gossypium hirsutum
ctcacgcgtccgctcacaggctcgatccaaaggggaagctgcaagagtgaaggctgtccatgaagcatacaaagaacttcaaaatgcaaggcaagaagcattgcagagaaagaaagcagagaagaaaaagatgttagaagaggcagaggcaaagctcagtgcagaagcggctcgcaagagagaagcaaaagatcgtgctcggcagatgaagaaggcaatgccaagaatgaagatgacccgcgcacattagatggctgtggacattagtagtatgaatgcttactcatctgcagattgcaggttattagttccctggtttctgtatgtcactgggaatgtatttttagttgtcaactaccgattcggaatgtccctgaagatactgctccaggaaccttgataaagttttcttccatgggatgacattttaaaacgcaattcccaagt

SEQ ID NO: 193060 - DNA, 396 bp, Gossypium hirsutum
cttacatacatgagggtaaatggcctcctgggtcagttgatattcacatcatcgaaaagagtcttcgaaaggctgtctttgcagctattctccttatacccattgcctgcattttcctatctctcaaggaaatttcagccactcttattttgtggagacttcagctaagtggactccttgtcatattattattggttttttggaaccctgttcacaaagagtctgtcatcataatgccagcctttggagttcagcttgaaacacactatacgagtggaagaatcatccgcagattcattcccgccggtgagattttgaaacctgttttattagaatgtgtcacccccgtaacttgttactggagcctctctttacttgtgcgtgggaaggaagagc

SEQ ID NO: 193061 - DNA, 770 bp, Gossypium hirsutum
  unsure (1)..(770): unsure at all n locations
ctcggtggaaactgnatcgggctccgtcgacctgcaangtnacgataagcttggacccgaattcgacacgagggctttctatcagatttttcttttctgttctttagaaaaaagatctattaatttgaaaaaaaaaacatggaaggagacgatgtaaacatggcagctgctgaatccactgaagcagatcttgatgacatgaagaaaaggttaaaagagatggaggaagaagccgctgctcttcgtgagatgcaagctaaagtcgagaaagagatgggttccgtacaagatcctgctgctgctgcagctacatctcaggcaaatcgagaggaagtggattctcgatcagtgtttgtgggcaatgtggattattcatgtactcccgaggaagttcaacagcatttccagtcttgtgggactgtaaatagggttactatccgtacggacaagtatggccagccaaagggttatgcttacgtggagttccttgaagctgaggctgtccaggaggctcttcttttgaatgaatctgaactgcatggcaggcagttgaaggtcactgctaagcggaccaatatacctgggatgaaacaatatcggccacgccggtccaacccttttatgcgacccaggggcccattcatggctccatatttctttgctccttatggatatgggaaggttccaaggttgaaaatggcaacacgatataacccctattattagagacatcaagggccatactagttccgaatgcttttccctatctt

SEQ ID NO: 193062 - DNA, 556 bp, Gossypium hirsutum
ccttctttgagtaatggtgagctgattgttcatggttctccccggccggttcgaaacatgttaaaccaggggctgccattgtccaatggcttggctagacctagagctcattcaagtgttggggcttttagtaatgaggatagtttcattattcaaggagatggtttaaattatgtaatgatcaataaggggcttgattgttcgagagggctaaacaaggcaaaggatattggtgcgagtaagcatcgagaaggaaggttgcaactcgatagttggtctcaattcgcaccagcttgtggaaattctaagaatgctgctaagttatgtacctcgttttctttgccccctaagtataactcgttggctgaagctcgtggatatatatacttgatagtgaaagatcaacatggttgtaggtttttacaacggctattcgatgagggtacccgagaggatgttgaaataatattcaaggagattattgatcatgtagtcgaacttatgatgaacccttttgggaattaccttatgcagaagttattggaagtgtgtaatg

SEQ ID NO: 193063 - DNA, 430 bp, Gossypium hirsutum
ctaaaaaacaaaaaggaaaatcttcctcttgttttgcttgaatggagatttgagccctgaaagtactgcatttgtgagctttctcctgaacttcgcgaaatgggaaaatcaccgggaaaatggattaaggctgtgctttttggaaagaagtcttccaaatctggttatcataaaggaagggagaatgttgccaatgtaaacgaggtgttggtttcagccagggcatcagaagctgaagtccctgtggctcctcccttcccttcacagcttaatcaatatgctaatgagagaaatgagagagatgaagggaaattagaactggaaaacaaggaggctgcaaatatctataacgatgacaggatatcactaccagtgagtcaaggcataggttctcaggaatccactcttcaagatttccaaaatgatcctg

SEQ ID NO: 193064 - DNA, 476 bp, Gossypium hirsutum
agaaaaaaataagcttatcccttcgattgattcaaacttatcaaaggtagacattatctcataagtataacgatagagtttgatgcagaaacaatccatgaaaaaagatttcagtttcatttacaaatttcaatctcttaagcatataatttcccctataatcagcaaattaaccatctatatccttcttaaatcataatttaaaaaaaaaaaagaaattaacgaggattcttacaagcacagatcaacaaagaaaactcatgacctcttcctttgtcactatgttccaaacacccacttttttcttctaaccaaagcctgctatcaaacccactccttgtcctaaacatgaactcagctctcccatctgtttgcttaaacacccaatcatgcgaatcccacatcatatccactaataatccatccaacaatataatttgatacgctctaagatacgacttcaatcacgtgtgacg

SEQ ID NO: 193065 - DNA, 948 bp, Gossypium hirsutum
  unsure (1)..(948): unsure at all n locations
ctcactattaaaccttctgcttagcttaaaaaatcttgaatctgcactctcctacttccctcgttatcgtcaatggcttcggacaagaagattaagatcgggattaacggatttggaagaatcggacgtttggttgccagagttgctcttcagaggaacgatgttgaactcgtcgccgttaacgatcccttcatttccaccgattacatgacatacatgttcaaatacgacagcgttcacggtcaatggaagcaccatgatcttaaggtcaaagactctaaaaccctcctcttcggcgaaaaacccgtcactgttttcggaatcaggaaccctgaggagattccatgggctgaagccggggctgagttcgttgttgagtcaactggagtgttcactgacaaagacaaggctgctgctcacttgaagggtggtgctaagaaagttgtgatatctgcccctagcaaagatgcacccatgtttgtaatgggtgtaaacgagaaagactacaagccagagcttgacattgtttccaatgctagctgcactaccaattgtcttgctccccttgctaaggttatccatgaccgatttggaatcgttgagggtctcatgactaccgttcatgccattactgcaacacaaaagaccgtcgatggaccatcaatgaagactggaaggtggtagagccgcttcttcacatcattctagcagaccggtctgcaggctgtgaaaaggtcttctgcctcatggaactctgaatgtatccgagtctacgcgatgatatcgggatctacgtagctgagaattctctatataatcaactgttcaggaatctgagcagctaggctttgggtcttaggaaatggcttgctttgtacaagtgacttgtccaagtgtgttacagactgtactgtctgcaaccatggtcgtctggatgatctcagtccn

SEQ ID NO: 193066 - DNA, 1165 bp, Gossypium hirsutum
cgccatttctgtattccactgctctgctcactcagcctttgaacaacactcctctttctctctgttctatccctctctatacacatggcaaaggtgaagatcggtatcaacggattcggtaggatcggtaggttggtggctcgagttgctttaaaaagagacgatgttgaactcgtcgctgttaacgatccttttatcactactgattacatgacatatatgttcaagtacgacagtgttcacgggcaatggaagcatcatgaactcaaagtcaaggattcgaagacccttctgtttggcgagaagccagtcactgttttcggtattaggaacccagaggagattccatggggcgagaccggagctgaatacattgttgaatcaactggagtgttcactgacaaagacaaggcagctgcccacttgaagggtggtgctaagaaagtaattatatctgccccaagcaaggatgctcccatgtttgtcatgggtgttaatgagaaggattacaagccggaatatgacattatttccaatgctagctgcactaccaactgtcttgctccccttgctaaggttattcatgacaaattcggcatcattgagggacttatgacaacggttcattctattacggctacacaaaaaactgtggatggtccatcaatgaaggactggagagaggggaagagctgcttcgttcaacatcattcctagcagtactggagctgctaaggctgttggaaaagtgcttcctgccttgaatggaaaattaactggaatggctttccgtgttcccaccgttgatgtttcagtggttgacctcacagtaagactagagaaagcagcctcttatgatgaaatcaaagctgctattaaggcggcgtccgagggagaattaaagggaatcttgggttacactgatgaagatttggtttccactgacttcgtcggtgacagcaggtcgagtatctttgatgcaaaagccggaatagctctgaatgaaaattttgccaagcttgtctcttggtacgacaatgaatggggctacagcacccgtgttgttgaccttatcattcacgtggatgctgttttgaaagctaagtaagttggtcggctggattgtctcggcagctgtatgtaatttcacggatcgatccttacc

SEQ ID NO: 193067 - DNA, 548 bp, Gossypium hirsutum
cgccaatgtcaaatttattttcgtgcttgtggttcaatgaagttgatcgatttgcctcacgtgaccaactaagctttgcatatacttatttgaagttgacgagaatgaatccagataaaccattccatctaaatatgtttaaggactgtgagcgcagagcactggcaaaattattcaggcatcggttgttgtcatctcctccacctccgtgaccagtcagattatgctagttttctgggagcataaatgcagtctttgcattgatatccacagcgaaagtgaaacactgggttctctatgaagtaaaaccacgatttttttttcttccgggaatctttttttcatggatttttcaagcttgacaggaattagaagcaaaccagtttcttgggatttctacaagtgcttaaattacagttggcagagtaaagttctgctgaagaaatggagctcttcatccataaaaacctattcaattcctacatgccaggtggaatgatgcttaagtttatagaaggtagtcataacccatgggttgctgaatgatt

SEQ ID NO: 193068 - DNA, 1356 bp, Gossypium hirsutum
aagaggactgccggagctcgcatcagtggacttatcaacaacaatggaattagctgcattaaacttagttaatgccactttaaattggatcacttttgctttggatgccccttctgcacgagctgtggtgtttggagttcacataggcgggcatttatttgtggaagttcttcttttggtggtcattctctttctgctttcccagaaaagttacaagcctcctaagcggccattgacaaagaaggaaatagatgagctctgtgatgaatgggtcccagaatcccttattcctcctatcacgcaagagatgctgagtgaacccccagtgttggaaagtgctgcagggccccatactataatcgatgggaaagaagttgtgaactttgcttctgctaattatcttggatttgtagggcatgataaattacttgaatcatgtacttctgcattggagaaatatggtgttggttcttgtggtcctcgtggattctatggcaccattgatgtccatcttgattgtgaggccagaatagcaaagtttttgggaacacatgattctatcctctattcttatgggctttccaccttgttcagtgcaatcccatgtttttgtaaaaagggtgacataattgttgtggatgagggagtccattggggaatacaaaatggcctctacctttctagaagcaccattgtttatttcaagcacaatgatatggaatctctagaaaaaactcttgagaaaattacagcacagaacatgcgggctaagaaattacggcgctacattgtggttgaatctgtgtatcagaattcaggtcaaatagctcctttggacaagatcatcagggggaaagagaagtatcgctcccgtgtcttattggatgagaccaactcatttggtgtacttggccgtactggaaggggtctgactgaatactgcggggttccgatagagaagatagacattgtcactgctgccatgggacatgcattggcaacagaaggaggattctgcactggaagtgctcgagtcattgatcatcaacggttgagcagttctggctacgtcttctctgcatctttacccccatatttggctagtgctgcaattactgctattgacatcttagagcaaaatcctgatctgacatcaaagctgaaggaaaacattgccattttatggaaaggactctctgatatccgggggctctcaatagcaagcaatccagaatcaccgattgtcttccttgtgcttgaaaaatcaactggttcaatgaaaagtgacctccagctacttgaagacattgctgatcgtgccttgaaacaagaatccatttttgtaatggcttcaaa

SEQ ID NO: 193069 - DNA, 626 bp, Gossypium hirsutum
gactgctgtccttttactttactcattggtgcaagggaactctgactttttggagtatgtactactgcgaacagatttggatacattgttgatgcccatcttggaaacactatacagtgcttcgaggaggacatcaaatcaaatatacatgttgctgattatactcctcatacttagtcaagactcttcattcaatgctagcattcacaagatgatactgcctggtgttccatggtataaagagcatctccttcatcagacatcacttggttccctgatggtcataattttgataaggactgtccagtataacttgtcaaagttgcgggatgtctatcttcatactacttgtctagcaactttggcaaatatggcacctcatgtccatcgtttgagtgcatatgcttcccagagacttgtcagcctcttctatatgctttcacgcaagtacaacaaattggtagagctaagggacgataaactgcaaaccaaagccatctcaacaggggatggccttgtaaaaaatatgtcagcacaattgcaaatgtataccgactttttgagaattgtccttgacatattaaatgctattttgacatatgcactgccacggaatcctgaggttt

SEQ ID NO: 193070 - DNA, 824 bp, Gossypium hirsutum
gagagagagagagagagagagagagagagagagagagagagagagagagagagagagagagaataaaacagagtttagacttaaggaatcagagctcgatccaacctccactcctacctaaatttccgatacagacatcatcatcatcagtagtgcctcagggaggttggttggtggaagaagacatcaatgaatcgcatctaaatgatcgaccatcaggcactacacaagaatctgatgtaataaaatctgataaattgcgaggttatcagaatccgtttcctcatacagcacctggttctgtttccactggtttaccatcgtatgcatcccaagtgaagattgaagaggcacgtactggacttgatacaccgaagcagaatgttctgcctactgctcatttatcagagataggtggaactcagaatcatctgccttctattactagagaattgcagtctgaaggtggaaaaatgaatcttctaccctcccatttgtcgataggtgttctacacgaaattggacgaagatgtggttcaaaggttgagttcaggtctgtggtaagcaccattaaggatttgcagttttctgttgaggttttattcactggggagaaaattggtgttggaatgggcaaaacaaggaaggatgctcagcagcaagctgctgagcttgctcttcataatttagcagaaaaatatgtagcatatatagcgcctcgttcgggagctgtggataaaaatttcaataatctctctcttggaactgaaaatggatttctatgggacgtgaatcctgcatcaaatgaagcaataaaagaaggt

SEQ ID NO: 193071 - DNA, 418 bp, Gossypium hirsutum
cggacgcgtgggctagttctagatcgcgagggccgccctttttttttttttttcttttatagctaagcaaatccaaaccttcacaccgtttcttgagtcacaagtcacaaaaaccttttctactacatacatacatacatatatgtttaattattatcatcattcatgataatcacacaaaagacgaggaaaagaggggaaaaaaaagggttttaattagttagaaattgggttttagttacgtatatgcatctgggctactgctttgatgtcgtcccatgcaatgcattattgttgcctggatatgtctaaatgtcaattcataatcatctacaaatcagggagtgagtggaccggtggcctttggatggctaacaaggcgcaagggaggtgcctgtggcatgtgatgaggtggtcg

SEQ ID NO: 193072 - DNA, 444 bp, Gossypium hirsutum
  unsure (1)..(444): unsure at all n locations
ttnaatgtaataaaattaatgtcgtaaattttaataatttattttggaaattcaaaaggctagtaacgtaaaacccaaaattaattgcacgtggggcatacatttataaaggctagcggccaaaaaaaaagagagccattttctataaatttaagacataaatacataatatttgcaggcattttaacagatcaaaacatataagtttgaaaaacggcaattcaacttcactgctccagagagttttaagagtccccagttgctgttgatgtacattgcctcagtcgaaatgccttacccgtggaaacacacttttctcgtggcggcggagggaaaaacaggcggtacagaaactctacaaatccattccaacaataaagtaccttacacagtcctctttggatcacgagctgctgcaagatggtccaaaataaaatcaaacgc

SEQ ID NO: 193073 - DNA, 481 bp, Gossypium hirsutum
cattctcgctgtcagggaagcaacgatagagtgaatcattgctcagctattgaaatacaactccagttaactgcgtttaagactttcctagatcttgctggcaaccaacttacaggaaaggattttacagaagcatttgatgcagcttgctttcctcttactctcttctctagctcatttgatgctggttgggcttctgggatctcagctacagtgatccaaggtttgttggatatgttggtggaggggggtgcagacaatgccgcccacgcgttccgggaagcctctcgattcggcagtacagaacttgttcgcattttattgcagattgcccaacggaatagcttggatgttgatgttgatcttgccttgggttttgcctcgcattactgcaagattgggacaatggagtgtctagtggaagagggtaatgctatggcgtttttgggccctttaatgagagcagctgaaagaggatgca

SEQ ID NO: 193074 - DNA, 723 bp, Gossypium hirsutum
tcgggatcaagatcctatactacgttatggtggtatgtatgcactagcattggcctataggggaactgctaacaacaaggctattcgtcagctgctgcactttgctgtatcagatgtgagtgatgatgttaggagaactgctgttttagcgctggggtttgtcctttactcggagccagagcagactcctcgaattgtctccttactgtctgagtcttacaaccctcatgttcgatacggtgcggcacttgcagtgggcatttcatgtgctggcacaggattgagtgaggccatatcattgctagaacccttaacatcagatgttgttgattttgttcgccaaggtgccctcattgcaatggctatggtcatggtccagaccaatgaagccagtgattctcgtgtcgggacattcaggcgacaattagaaaagataattcttgataaacatgaagacacaatgagcaagatgggagcaatcctagcctctgggatccttgatgctggtgggaggaatgtaaccataagattgctttccaagacaaagcatgacaaagtcaccgcagttgttggtcttgcagtttttagccaattttggtattggtatcctctcatttattttgtgagcttgtcattttcacctacggcttttattggactgaactatgaccttgaagttccaaaatttgagttcttatcacatgcaaaaccttcgctttttga

SEQ ID NO: 193075 - DNA, 529 bp, Gossypium hirsutum
cccacgtgtttttccacgcgtccgaaccactcctatattcgagggtagagcagccaagaaaccaagcaatggtcaaggcaaaagtgacacacccctttctgattcttctagatcataactcgaaggaggttcaagattgcatcagcttcctactggctgtcgcagattaagctctctgaatcagcttctaagcactctgtctcacttggatttttcaaacttgccttagaagctggatgtgagccccttcagaaaatgagtgatgagcttaaatcctatattcgtcgccataatcttggtgaaaatggggaagctataaatgagctactcgaaagctacaatgttccagacaatcccgagcaaccacaggtgtctgaaacctgttcacaggtgcctgatgagggaactcggtcatcggatgatgaggttcacagggtttcttctgtagcagcagcagctcggagattgaaacccaagtccttgaatactgatgctgctcgggtatcatcagtggccaaatcagcaaaag

SEQ ID NO: 193076 - DNA, 647 bp, Gossypium hirsutum
cccacgcgtacgatctcattgtcggatttttacctcccatttcagcataccaacatcctcgcctggaaatgagtgaaatgaaaacgatgtcatcttatcaaagctgctgaaggtttcagttatgaacctaggaatggcttctctggctcgatctccttctgccatgtccattactagaattcctcagggtcattccaaaatcctacaattgttaaaagcttcaaaggtgccttatgtgctccctttccgtcgcgtccacatcagaaggtcccctgtttgctgcacgaaatttcctcagtgggaaccttcaccggccacatatgctctaactgagaaagctggtgataagttcttggataaatcatctgaattatttgaaactctgcgttctgagtcttctgacagcaaagatgaggcttcaattactaaagctgaagatcgtacagatacaaccaatcaaccagttgcacagcttcagtttcttaaatggccattgtggctgcttggcccttctgttctcctcggcacgggcatggtacccactctatggttaccgatatccaccatattcattggcccaaatgtggtgagccttctttccttgattggacttgattgcatcttcaatctgggttgcaccctttttc

SEQ ID NO: 193077 - DNA, 402 bp, Gossypium hirsutum
ggcacccatatcgtttttctttgtcttcattttcattggtaagtgatttcattgaaaaagtgaaagattttttcaatttcgctgtctctgccatcattggaaacattttctctgcgatcttaactttcttctttgctttagttggtccattgttaggagccatgactggggctttgataggacaagaaaccgagagtggtttcgttcgaggggctgcggtcggggctatatccggagccgttttctccatcgaagtcttcgaatcatctcttcttctttggcaatctgacgaatccgggatcttatgtcttgctttacttgattgatgtcattgcaagccttttaagtggaaggcttgttcgagaacgtatcggtccagcaatgctgagtgccgttcaaagt

SEQ ID NO: 193078 - DNA, 380 bp, Gossypium hirsutum
gtgaaataggtggcggtcaagggcccgcattgttccctgctaacatgggagatcaggttggttcaagaatgtcctccctttataccacttcaatgcaacatgaaaacatctctccacatatgtcggccactgcattgcttcaaaaagctgctcaaataggttcaactacaagcaacaacactacttccactttgctaaggggattaagaagctcattatcaggtgcgactaaatccgacagacctgttttctcccctaacttcggcagtaatttcgagggtggcaatggaagtgaaaccctacgatcaaatatggaggatgatagcaatctgcagggataatgaactcacttgcagcaaatggtaactcttccattttcg

SEQ ID NO: 193079 - DNA, 639 bp, Gossypium hirsutum
  unsure (1)..(639): unsure at all n locations
cccattcgtctcgttcattctaattnttctttgtactcgagctagggctttactacggtgccctctctctagtggttttacgatcttcaaccagttagcttcgattctgagtcgtttcgcaatgcctcggtattactgtgattattgcgattcttatttgacccatgactctccatcagtttgaaagcaacacaatgcaggttacaagcacatggcgaatgttagaacttactatcagcaatttgaggagcaacagacccagagcttaatagaccaaaggatcaaggaacatcttggtcaagctgcggctttccagcaggttggagctgctttcaatcaacatttaatggcccagaggcctcgacttcctgttatggcgattcccggggctccattacctgtaaaccaaccgatggtcccaggcatgaggccccctgttctgccaagaccaattccaggtgccccaggttatattcccgttccaggcatgccaccaatgatggcaccacctggtgctcctttgcctggacaagtaaatggccttccacgacctcctacattggctcccccaacaacagtttctggaactgcaacgacacccagttcttctaacggagcacccactacatctgcaccata

SEQ ID NO: 193080 - DNA, 906 bp, Gossypium hirsutum
cacagcctaatgttccagccctccatcttccgggaagcaatcttcaatccagtcgcctgcgatcttctcttaatgctagagacattcaagctgaagactttaacttgctgtctgattttgatgtgcagcaacttcagctgatgaatgaattacctggacttactcagccatcaatgagttctagttcttttaatcgatctggtcgaatgaagaccctgaccccatcaaacctagatgacctcttttctgctgagagctcatctccacgatactctgatcaagtgttggctgctgctgttttctctccgacccataagtctgccgttctgaatcaatttcagcaacagcaaagcatgctatcacctattaatacaactttctctcctaaaagtattgagcatcctctcttgcaggcttctctatccggtaggatgtctcctcgaaacgttgagcctatctcaccgatgagctcgcgggtttcaatgttagctcaacgggagaagcagcaacaatttcgtagcctaagctctagggagcttggctctggctcggctgccattgttggttccccggtcaattcatggtcaaaatggggatcctccaatgggaagccagactgggctgtcaatgccgatgggttggacaagcatcgcaggtcttcctcatttgagcttggtaatggggatgaacccgatttatcatgggttcagtcccttgtaaaagaatctcccactgagatcaaagagaaaatagcagcaccagtctcgggtgagggttctagcatgaatgcagatccggtcgataatgcagtgttgggtgcttggctggagcaaatgcagctcgatcaactcgtggctcagcaaaactgaaacccgtttcgctgagccatcctgaggtagagataag

SEQ ID NO: 193081 - DNA, 527 bp, Gossypium hirsutum
ctttattgctcggaggtcactacctccccttaatgaagttggactcacgtgtttccgggaactggtttaccaagagctaaatgcaaaagtgagagatgctgtaatttctctgattgatcaagaacgtgaaggcgagcagattgatcgcgctttgttgaagaacgttttatatatatttgttgaaattggaatggggcaaatggattactatgagaatgactttgaggctactatgctcaaagatactgctgcctactactcaaggaaagctgcaaattggatcgtagatgattcttgtccggattacatgttgaaatctgaggaatgtttaaaatgtgagaaggatagggtctcccattacttgcattctagtagtgagccaaaactgctcgagaaagttcaacatgagttgttatctgtatgggaaacccgacttctcgataaagagcactccggctgccatgcattgctcagagacgacaaggtggatgatttgtcaagaatgtttagactcttttctaaaattc

SEQ ID NO: 193082 - DNA, 565 bp, Gossypium hirsutum
agaatacagacaaatgctcattcaagctattcattcctgtgcaattaagttcccagggggggcaagcacagttgtgcatcttcttatggatttcttgggtgacagtaatgttgcttcagccattgatgttgtggtttttgttcgagaaataattgagactaaccctaaacttagggtctccattataacaaggctattggatacatgctatcagatccgagctgcacgggtttgctcctgtgccctttggatcattggagagtattgcctatctctatctgaagttgagagtgggatggcaaccataaagcagtgcctcggagagctacctttctactccgtttctgaggaagggggagcttctggtgcttctaagaaaactccacaggcatactccattactgtctcctcaaggagaccagctgttcttgctgacggtacttacgcaacccagagtgctgcctctgaaactgctttctctgctcctaccgttgttcagggatcattggcttccgggaatctcagatctcttctcctcacaggcgactttttccttggggcagtt

SEQ ID NO: 193083 - DNA, 766 bp, Gossypium hirsutum
  unsure (1)..(766): unsure at all n locations
atcatgagtaccaccagatcaaattccttgttagtcaaggttgtataaagccattgtgtgatcttcttaactgccctgatccaaggattgtaacagtctgtttagaagggcttgaaaacattttgaaggtaggagaagctgataagaacctgggcactaccggaggagtgaatctctatgcacaaatgattgatgatgctgagggtctggagaagatcgagaatgtgcagtcccacgataacactgagatttatgaaaaggctgtgaaagttctcgagacatattggttggaggaggaggatgagacaatgccgccaggtgatgcctctcaaacagggtttcattttggcgggggtgagcttcctgttccttcagggggattcaatttcagctaaaggtatgtagtgctgctgtttgcatgcatttgtttttgtgttggtgcactattgggagcgtgttatgtcgtttgagatgggactgcatatctgactaccatttgtatgcttttgagctataaaagctgttagtcttccaggagttatctggtccagtattgaactccttacggagatgatgggacaatagttttgggggttggggggggccggtgccggtggaggcatctnttctttgggttgtgttccccgtcgggtgtggtccacggttccctgtgaatggtagccggctggctgtgggttaaccgcccacgcaggtgcagattgtgcgtgaagggggtgtggagacggactatacccttggcggtggt

SEQ ID NO: 193084 - DNA, 353 bp, Gossypium hirsutum
  unsure (1)..(353): unsure at all n locations
taaaggcaaggagaaagtttgtgctcgtaacagcaatttggggaagaattcggtaagctatggttgtaggggttgataaatcgagtttagtagctaaaatattatgttcttcttactaagntcggttgttagtagtgaagtaaaaatttgacaattaaatgcttagatgactgctggaaactacagcttgaaagctcattattccagtatgtaaatactgatttgaatgtgctgtaatatgtggagcaattggtctgctgcatgtatgaaataaaataaaagaaaacaatagttgttaaatattagtttttggtgctgatcggaaaggttaaattcgttgttaaaggggatgt

SEQ ID NO: 193085 - DNA, 718 bp, Gossypium hirsutum
ccttagaaattgaagtgacagaacagattttttttttccagatagaacggataaaccaaaataaatatatatactatataagaaaaacatagggcctaaccccacgtacggtgagcttgtttcagcccatagcatacttctgggtccagctccttgcagttgtctcgtacttgcttttgtcggtcttgtacatgtgagcaatctccggcaccaatggatcatcgggatttgggtccgtaagcaaagagcagattgatagcaataccttggaaattgttagtgcaggactccattgctccttcaagatgtctaggcaaatgcttccgttgctgttaatattggggtggaatacctttgtcctaaatgccaccttgggaggcttaaagggataatctggaggaaaatgaatagtcactaggaaaacacccccagaatatggactgtctggtggacccatgattgttgcctgccaatgaaacatgtcttcagcaacaggaccagcactgcatgatgtaggagggtccttctgcaaatccttcaattccttcaagatccgcttcgatgccatcgcaaaacctcaaaaaggtgtttttagttatcctttttttaatatattgcgtttttcaaaaacttgaaggagctttaggtggattagagaagagaaatattaatcgaagaagaagaaggccgtacgcctgagcccggaattccaaaccgg

SEQ ID NO: 193086 - DNA, 823 bp, Gossypium hirsutum
atcaaatatataactatgattaaggagaattgttaacattttcagagttaggacacaaattttcctgttccaaagttcacgtttatgcattcattcaacattagaaaaagcaacaattgcttcttcttttttcaaactcaagccaggttgttgacctccttttaagtcattttaggattcaaatgacagaacaaacattcatcatgcatagcccttttttaaaaaccagaatatacgaaaaaagaaaaaaaaaagggggggggtttccccttgcacacaacaatgctcgttagcccatggcgtacttctgggtccagctccttgcagttgtctcgtacttgttcttgtcggttttgtacatgtgagcaatctccggcaccaatggatcatcagggtttgggtccgtcagtaaagaacagattgataacagtaccttggatatcgttagcgcaggactccactgttcctttaagatgtctaggcaaatgctcccattgctgttaatattagggtggaatactttcgttctaaatgccaccttgggaggcttgaagggataatctggaggaaaatggatggtcaccaggaaaacacccccagcataaggactgtctggtggacccatgattgttgcctgccaatggaacatgtcttcagcaacaggaccagcgctgcaagatgtaggaggatccttctgtaaatccttcaattccttcaagatccgcttcgatgccatcgcaaaacctgaaaagatgatcctcctttggcggtaagagagctgaggattttgatcgaggaaaggggaaaatgaagaagaaaaacc

SEQ ID NO: 193087 - DNA, 810 bp, Gossypium hirsutum
  unsure (1)..(810): unsure at all n locations
acaaataaagaacatttaaaaaaatgatcaaaagcgtctattttcttgttccaaaagttacatttatccatacaacaaaaggaagcaacatttgatgtctcttcttttaaaaaaagggaatgttgatggcatcgttaaactcccccattttaggcattgaagagacagaacaaacctttcatacataaaactaaatttaaaaaaaaacaaaacaaaacaaaacaaaaaagaaagaaacattgngcatccctagcccatggcatacttctgggtccaactccttgcagttgtctcgtacttgttcctgtctgtcttgtacatgtgtgcaatctccggcaccaatggatcatccggatttggatcggtcagcaatgaacatattgatagcaataccttggaaatagttagtgcaggactccactgctctttcaagatgtctaggcaaatgcttccattgctgttaatattagggtggaatacctttgttctaaatgccaccttgggtggcttaaaaggatagtctggaggaaaatgaatggtcacttggaaaacacccccagcatacggactgtctggtggacccatgatagttgcctgccaatgaaacatgtcttcagcaacaggaccagcactgcaagatgttggaggatccttttgtaaatccttcaattccttcaagattcgcttcgatgccatagcgaaaccagaaaagataaatttgatcgggggggtcctttttgatgcctgaaggaactttggatcggcaggagaggaaagctcggatcgaagaaagaagacgaaaatgagagc

SEQ ID NO: 193088 - DNA, 875 bp, Gossypium hirsutum
  unsure (1)..(875): unsure at all n locations
gtgtccacagttcactccttcttgaagcagacgacaaaatatataatctctctcaacagcctcaagcccctctcttttttatgttttgtgcgtaaatggcatcatcccttctctctagaactcttttgggtcaccgcttaattcgattttcctcgtctctccctcagaaccccttgattttctctaatcttttcaataagagagagttccgtgtacaggctgagtcttaccataccacatataaggcctctggtcagcattctcgtttaatggcttctgcagcaattgagacaagaagtaatttttcgacacagtctctttctaccaatgatccggttgtttctgttgattggcttcatgctaatttaagggagcctgatttgaaggtattggatgcatcatggtacatgccagatgagcagaggaatccaattcaagagtaccaggttgctcacattcctggtgctcttttctttgatgttgatggaatatctgatcgaactacaaagttgccgcatatgctgccatccgaggaaggttttgcggctgctgtgtctgctcttggcatccataataaagatgggctggttgtttatgatgggaaaggaatttttagtgcagcacgtgtctggtggatgttccgaatctttgggcatgacagagtctgggtgttagatggaggcctcccaaggtggcgtgcttcaggttatgatgttgaatctantgcttctagtgatgctattttgaaagccagtgctgctagtgaggcaataaaaaaagtctatcagggacaaactgctggaccactcacatttcaaacaaaatttcagccgcatcttgtttggacacttgatcaggttaaaaaaacattgatt

SEQ ID NO: 193089 - DNA, 2164 bp, Gossypium hirsutum
tctctctatgttgttctctctttaattttacctcccattacccttttctacttaatctctcattgcttacttatattgtaagtgtgaccaagtaaaccaagtacagaagctcaatgcccaagatggaggccagcagcagcacctcccatgacccagcattgttccatgctcccttgctacaccaccctcggaggaggagcagcagacccttaaagggtttcgcagtgatatttgggtccgtcgttttcctactctcactggtcacattaatcgttaaccaaagcccggagccattagcaagtaaccccagtagtgtaacggaggcagggtcgtattcaatggcggcgcagccaagagggatagctgaaggtgtttcagccaagtcaaacccatcactttttgacaaagttgggtttaattggacaaacgctatgttttactggcaaagaactgcctaccactttcagcctcaaaagaattggatgaatgatcctgacggtccgttatatcacaagggatggtaccatcttttctatcaatacaaccctgattcagccatatggggcaacatcacttggggccacgctgtatcaaaggacctcattcactggttctatctcccactcgccatggttcctgatcaatggtacgatatcaatggttgctggacggggtcggccactctccttccagatggccgaatcgtaatgctttacaccggcagcaccaatgagtccgtgcaagtccaaaaccttgcatatcccgccaacctatctgatcccctcctccttcagtggttaaaatacccgggtaacccggttgttgttcccccaaccgggatcgaagacaatgagttccgagacccgacaacagcttggcttggacccgatggttcctggcggattactgttggtacaaggtttaataccaccataggaacagcccttgttttccaaacgacaaacttttcggactatcaattattggatggggtcttacatgctgttccgggcacgggtatgtgggaatgtgtaaatttttaccccgttgcaataaacgggtccgtcggacttgacacgacggcacttgggcctggaattaaacatgtcctgaaggctagtttggatgatacgaaagttgatcattatgcaatagggacctacgacatgataacggataaatggacacccgataacccggaagaagatgtaggcatcgggttgaaagtggattatgggagatactatgcctccaagacattttttgatcagagtaaacaaaggaggattctttatggttgggttaatgaaactgatactgaagctgatgacctcgaaaaaggatgggcttccattcagacaattcccaggagtgtgttgtatgacaacaagaccggaacccatttactacagtggcctgtggaagaagtggagagcttgagactgaatgctacagtgtttaaggatgttgtagttgaagcaggatcagttgtgcccctcgacataggcaccgctactcagttggatatattagcagagtttgaaatagagacgttggtatcgaacagcacggaggatgaagtcagtgattgcggtgatggggcggttgataggaacacttacgggccatttggggtcctggttattgctgatgattcactttctgagctcactcctatatatttccgtccacttaatatatccgatgggagtcttgaaacttacttttgcgctgatgaaacaaggtcttctaaagctcccaatgtcacgaaacgagtgtatggaggcaaagttccagtgcttgacgatgaaaactacaatatgagggtattggtggatcattcagtactggaaagctttggagaaggagggaggacggtgataacatcccaattgtttccgacggaagccatatatggagcagcacggctgttcttgttcaacaatgccagtggagtgaatgtgaaggccacactcaaaatttgggagatgaattctgcttttattcgtcctttcccctttgaagaaacattatttcaggaaatggttgcttccacatgattatcatttgggaagggtggatgcaatacatattactattagtattatgtttgcagtgcttaatttttttttattggttgggcattatccattcactttgtttt

SEQ ID NO: 193090 - DNA, 725 bp, Gossypium hirsutum
cggccgcgtcgaccaatctttagatcatctctccaaaaaaatatggcaggctccaacgttttcattttaatagcttgcttcatattgttgggtttttcaagtatggaggttagcctagcaactcgaaatattcagcacgtgtcactaattgaagtgtcaccaataacattgtcgttattcccaccattgccaccaataagatctccgttcttgccaccaataccaccaataacattgtcaccaatgacattggcaccaataacattgacaccaacaggtacaccaatcgaggaaccaacagatccaccaaccgagaaaccaacagatccaccaactgaggtaccaacactgccttgaatcccaaagctaccaacaatcccaccatcttagcctaagcctatcactgttcttccacaagttcccagcaatagcttgccttccattcctttcatgtctccatctccacctccacctccacctccatccagctattgaagacaatttgattcctaattagtatcacatatattactgagaatgaactctgtcatcacattctctatgatgttatttcatgaaataagaatgtagtttctatttacattttacatatataataaagtgtggtgttttttttacaaaaaaaaaaaaaataattctggcggccgccccccgcgggtggaactcccaattcgccctaaaattaaatccttattacccccccc

SEQ ID NO: 193091 - DNA, 655 bp, Gossypium hirsutum
tcgggattccaggcacgcgtcacgcccacgcgtagctaaaaaaaatggcagcttccaacgttttcattttattagcctgcttcatttccttgggtttttcaagcatggaggttagcctagcaacccgaaatcttcagcaagtgccacctccatttccaccaataccattgccacctccattgtcgccaataccattgtcaccagtaccattgctacctccattgtcgccaataccattgccacctccatttttaccagtaccattgccatctgcatatttaccggtaccattgccacctccgatgtcaccacttcctttaatcccagaaccaccaccatttccttcaatcccagaacttagaactaccaccacttcgtaagttgcccaacatacttccattgccttcaatcctagatctaccatcattctcagctcaaccctgcatacctccattgccttgaatcccgaagctaccaacaatcccaccatcttagcctaagcctatcactgttcttccaccacttcccagtagcagcttgccttccattcctttcatgtctccacctccacctccacctccatccagccattgaagacagtttgattcctaattagtatcacatatattactgagaatgaactctgccatcacat

SEQ ID NO: 193092 - DNA, 529 bp, Gossypium hirsutum
tttttacgcgtccgcccacgcgtccgggggttccaagaagtgactagaagctcttcggcttgatacaaaaggcagcatatacagttggaggctactccttcagcgcagctgcaatcgaatatgtaattttgaagatgaaaccaccattgcatagaccgcaaattgctttgcttcttgcccttcacaaactgaaggtgtcagatgagcaacgcaagtctgcaatcgatacatacgaaccactcgtaacttttgcactcagctctgggatgtactcatcacctgcggtgagaatttacactgctaagaatgttagggaagagcttgaagaagcacaacgcgattttatacgagcttcggttggggttagcagcaaagggaagctattagttccgaagttactgcactgcttcgctaagggctttgtggatgattccaatttggcagtatggatatctcattacctgccaccaaatcaagctgcctttgtggagcaatgcatatcacaaaggaggcaaagccttcttggatc

SEQ ID NO: 193093 - DNA, 833 bp, Gossypium hirsutum
gaagaattcgcggccgcagaatttttttttttttttttttttttttttttttttttaaggttttcgtttctctcttcctctctctctccgctccgggaactactgaaatccctgcctataatcaatctcttagcaaagggccaagctatagacaatggcagaaggcgaagaggatctgccgagggatgctaagattgtcaagtcactgcttaaatcaatgggcgtggaggactatgaacctcgcgttatccatcaatttctcgagctttggtatcgctatgtcgtggatgtgctgacggatgcgcaggtgtactctgaacatgccggcaagcaaaccatcgattgcgatgatgtcaagcttgctattcaatctaaagtcaatttcagcttctcgcaacccccatccagagaggtgcttttggaattggcaagaaataggaataaagttccattgccaaaggcaataccagggcctgggattccccttcctcctgagcaggatacattgataagtacaaactaccaactggctatccctaagaagcaaccggcacaggcgatggaagagacggaagaggatgaagaaagtgttgaacctaattcctcgcaagagcataagaccgatgcaccgcacccaacgtctcaaagagtatcgttccctctcactaagcgctctaagtgaggtttctgcttttgtaagatgtttcaataatccatttaggtagggtaatatatatgcttgaagattctatcatattcatcagaatgaagggttgatttttcttatgattggatgtaatgaatcgttgtcatagaatcaagtttctgcttct

SEQ ID NO: 193094 - DNA, 585 bp, Gossypium hirsutum
caaagttcctggatgaaaagctccgtgctggtaataagggtacttcggaagaggaattagagggtacactggataaagctttggttttatttaggttcatccagggcaaggatgtctttgaagcattttataagaaagatcttgcaaaaaggctgcttctaggaaagagtgcttctattgacgcagagaaatctatgattactaagctgaagactgagtgtggcagtcaatttacaaacaaacttgaaggaatgttcaaggatattgaactatcaaaggagataaatgaatcattcaagcagtcatcccaagccaggacaaagcttccatctggaattgagatgagcgtccatgtcttgacaactgggtactggccaacatatccacctatggatgttaggattccacatgaattgaatgtctatcaggacatcttcaaggagttctacttgagtaagtacagtgggagacgcctaatgtggcaaaattcattgggtcattgtgtgttgaaagcagattttcccaaaggtaaaaaggagctggcagtttccctgttccagactgtagttctgatgttgttcaacg

SEQ ID NO: 193095 - DNA, 361 bp, Gossypium hirsutum
aaaaaatttaaaacaccatcctccgacagtcactttacccaaagcaaatgttggtactacagtcaatgaaacagcaaaacacttggaaatagtttaaaaccagaacaagaagaactaccaactctggtttctctaacgattacttttggcttttttggtggtttctttttttcattttgaatcattttccatactccttttctgctttccaatggcttttcttcttcgggttctctgctaactcccaccatattcgcattcagtggaagatcccaatcttggatttcatcccactattacacagaagattcaataatggatgatcaaggtggtagcaagccgaccgggatccggcagattg

SEQ ID NO: 193096 - DNA, 775 bp, Gossypium hirsutum
ttccttaaaagcggggcccgcccgtcttagtagataagatcaccaagtcgggcgaggagaactggatcagttgggttcgcctcatgcgttataaaagcttgcgggagggcttgtgcatcgtttttttcttgttcttggtcttcacataaaacgagaataatctatccattcgttcattattttggactccacattctcagatagtagtatttcaaatcattctccattcagccctaactagtagaacaattagtttcggcagtgaatgcagggtggggatcggcaagtcaattacagcatggatgaagaggaatcgaaactcatagtaaaccaaaaattaagataattgataacaatatcacataatatctagcaaacaaaatggtagttcaatccaatccttgaaaccagtatcataaaaacattatcaaaagaaaacaaagacttaaaatccatcaaagctttcaacaaggcttcttgccttcttcacctacatagatctcttacttctcagatgagttaggtcccctctttttgccaaatccaaccactgcggtgacgaagcggcggttgtattgcatccgcttgtaagcgcggccacggggcttcttcttcttgtcttgcttggccactttaggagtttggcctctcaccttaccagcacgagctagagatccgtgaaccttacccatggcgaataattgtcaaacgactgctcttttagctgcagcgctgctggcttttgatttcgcttatggcggtgcccacgcgtccg

SEQ ID NO: 193097 - DNA, 461 bp, Gossypium hirsutum
gtaatgaaccaagaattaagcttaatatcgaaatcacataatatttagctaacaaaacttccaagttcaacttgaaccttaataccagtggataaaaataagtatcataaaacattacaaaaaaaaagggggggaaaacacagactaaacccataaaagcttcaaacaagaccttttttcaattgcatagctcttacttctcggatgagttaggtcccctctttttgccgaatcccaccactgcagtgacgaaacgacggttgtattgcatcctcttgtaagcgcggccacggggcttcttcttcttgtcttgcttagccactttaggtgtttggcctcttaccttaccggcacgagctaaagatccatgaaccttacccatggcggacttgtcgaatgagtgctccttggttgctgaactgcggattttttggctccttggttcgcctcggacgcgtggg

SEQ ID NO: 193098 - DNA, 551 bp, Gossypium hirsutum
gttctattcgtgaggaagccgggaaggttttgactgctaacttgaaaggaaggccggcgtttgaagccgatgaccagtcagctttgatttacttgttgctttctcaaaaggaaatgtggatggataaagtgtttctcgagaatcagtattatttgcatggttattgggcaggtttggttgataggtacgaggagatgatggagaaatatcatccaggtttgggagatgagaggtggccgtttgtgactcatttcgttggttgcaaaccctgtgggagttacggagattaccctgtcgagaggtgtttgcgcagtatgcaaagggcattcaactttgccgataaccaggtgcttaagctgtacgggtttagacatagaggattgttaggccccaatattaagaggatcaggaacgagacggtgactcctttggaaatcgttgatgagcttgatattcgacgatcaacgcacgagaaagccgaaacacggagctagtgatggaaaagatatataatgtgccataatgtgtaggtaatggtcattccttttgat

SEQ ID NO: 193099 - DNA, 796 bp, Gossypium hirsutum
aagaagaaggataaggtagaagaagctgaagaattagaagagggaaagaaagaaaagaagaaagacaaagaggcgaaggagaagaagaaagaaaagaagaagaaggatgaggtagaagaagctgaagaattagaagagggaaagaaagaaaagaagaaagacaaagaggcaaaggagaagaagaaagaaaaaaagaaggatgaggtagaagaagatgaagaattagaagagggaaagaaagaaaagaagagagacaaagaggcaaaggagaagaagaaagaaatgaagaaggatgaggtagaaggtgaagagaaagaagagaagaaggagaagaagaaagacgaagaggataaagatactaagtacaaggatgaagagaaagaaatcgacgaggaggaaaagaagaaagtcaaagtggaaaagaatgttgtgaagggtgacagtggcataacctccagggaaattgtaatagaagatactgggaaagaaccagaaggtgaaggagaccaagagaagcaaaagggtaaagcaaaagaagagaaagatgataacaataaatgtgagaagaagagaaaatttgaggggaaggacaaaagcaaagatattagcaagctgaaacagaaggtagagaaaattaatagcaaaatatatgccctacttgagaaaaaggcagacatcctaaggcagattaatgaagctgagaacacgaccaatgaagttgctgtgtaattgcatacatggactgactgtggtatagcactatgcactagtgtgttttacacacgcattttttttt

SEQ ID NO: 193100 - DNA, 1180 bp, Gossypium hirsutum
  unsure (1)..(1180): unsure at all n locations
nnnnnnnnnnnnnnnnnnnnnnnnnncccctcccccttggaaagagagcacatttatattggactttacttaaatttggagcaatatattacagattcttacatccaaatacaaaaggcatgcaaacaaaaaaaaatggaaaaacaaactgaaagggtgcatgagtggaatttttcattttcttgagatcatatgatcatggaccgttgattttgatcattttgatttgaaaggaatggctctgatcacaacaacgtggtagagtgctgctagtgctgctccaatgaatggacccacccagaaaatccaatggtcatcccagcccttgtccttgttgaaaatgatggccgcaccaaggctacgagctgggttaataccggttcctgtgattgggatggtggctaagtgcaccaagaacactgcgaacccaattggcaatggtgccagaatagggacgtgagagtctctggcactgcgcttggcatcagtggctgagaacacagtgtaaacaagcacaaaggtgccaacaatttcagcaccaagcccatctcccttggtgtagccatgattcacagagttagctccaccacccaaagcaccataccttgtcttccccatgaaccctttaaccacaccagccccacatatggctcccaagcactgcatcaccatgtagtatattgcccttgtcaacgacaatttccttcccaagaacagcccaaatgtcaccgctggattgatatgaccacctgagataccagcagtgcagtaaacaagagcaaagatcataccaccaaaagcccaagcaatcccttgaatcccaacagttgtacacttggttttgtccttaaggactcccatcacagtcaacaccgagatgtacaagaataggaaagtagcaacgaactcagcgattccagctcggtaaaacgaccatgaagtcaactcactaggctcaaacaagggtgctgggggtggctcagtgtaatccttatcatcttgggactgagctgctgtcccaataggttgcctctctgagaacttgttagctcccaatctaacatcttcttctttcccttccattggtttcccttctttttttgctcttcactactgaaaaacaatggaagctgtaagctaaaagcggacgcgtgggcggacgcgtgggcggacgcgaagg

SEQ ID NO: 193101 - DNA, 423 bp, Gossypium hirsutum
  unsure (1)..(423): unsure at all n locations
gccaaatgtcccgctggatgatatgaccactgagatacagcagtgcagtaaacaagtgcanagatcataccaccaaaagcccaagcaatcccttgaatcccaacagttgtacacttggttttgtccttaacaactcccatcacagtcaataccgagatatacaagaaaaggaaagtagcaacgaactcagcgattccggctcggtaaaaagaccatgaggtcaactcactaggctcaaacaagggtgctggtggtggctcagtgtaatccttatcatcttgggactgagctgctgtcccaataggttgcctctctgggaacttgttggctcccaatctaacatcttcttctttcccctccattgatttcccttcttttttagctctgcactactgaaaccggacgcgtgggcggacgcatggg

SEQ ID NO: 193102 - DNA, 585 bp, Gossypium hirsutum
tctcaattattaccatataattatatctttgtcacacctcagtgcagcaaatataatacaaggaacacaaaaatcatgccaagtcaaatccataatttacaacaaaaagccattgaaagtaggtattggtcggtgttattatgaaaatgacatgttttttttcacaaatcatagccatacaaattacaaatgggtccaatatttgccatcagcaccctctcctttttttagcttaaaaaaaaaaagcaagtaaaaaaaggacacaaaggctctccccccattgaagtaaataatatatattacacacattcttacatatacaaaaacaaaaggatcaaatgggaaatacacaaactgaaagggtgcatgggtgaaatttttcatttttttgagatcatatgatcatttggaccgtcgattttgatcattttgacttgaaaggaatggccctgataacaacaacgtggtagagtgctgctagtgctgctccaatgaatggacccacccagaaaatccaatggtcatcccagcccttgtccttgttgaaaatgatggctgcaccaagactacgagctgggttaatac

SEQ ID NO: 193103 - DNA, 667 bp, Gossypium hirsutum
aataaataaaaaacataggcataagaataattttcttacaatagaaaacacaagcatcaaacaaatcaaagaaacttaatagggttgtagggattctcttcttccatgttttagatttggtttaacttgagctcataatcatgcaatcgtgactcttgatcttgacctcatcactttgatttgaaaggaatggctctgatcacaacaacgtggtagagtgctgctagtgctgcaccaatgaatggtcccacccagacaatccaatggtcatcccagcccttgtccttgttgaagatgatggctgcaccaagactcccccccgggttaatgccagttccagtgattgggatggtggctaaatgtaccaagaacactgcgaacccaattggcaatggtgccagaatagggacgtgagagtctcgggcgctgcgcttggcgtcagtggctgagaacacagtgtaaacaagcacaaaggtgcatctatttcagcaccacgtccatctccaattgtgtagccatgattcgtagagttagctcccccacccatagcaccatactatgtattccccatgaaccctttcactactcccaatccgacatattgatcgcaagcgttgctcacgcgtgaaggaacgagtggtagtacgcgtggatccgtccgtcaatt

SEQ ID NO: 193104 - DNA, 655 bp, Gossypium hirsutum
gctgaatctcacaatcaaaatccatcgttagttcatcgacgcagcctcgttcagattcaactatagaagcgaaatggctggttccagggttgctcatgctaccttgaaaggaccaagtgttgttaaggagatagttatcggaataacacttggcctttgtgctggtgggctttggaagatgcatcactggaatgagcagaggaaagtgagagcattctacgacatgctcgagaaaggtgaaatcagtgtcattgcagaagaataaatgttcttttagtcttgtgaaagtgtggacagcttcagctgtgtttcgttatatgcattctcttcatttggctcttagatagaagatgagcaaaacacaatttggagcttctaagaataatgtcatcattttgggatcttgatttcatatttgcatagcaaatccaagcgatttttcaatctagtgcctttgttggtttccatttgacattgttgtttgatttggagatgtttgaaagctctttatatttcttctcaattgttatttgtcacagttacgccggtttaggcttaataatggaaatcggctgaacatgaaagatttattaaataaactaaaaaaaaaaaaaaaataataaacaaaacaaaaaacatacataaaaaaattatg

SEQ ID NO: 193105 - DNA, 858 bp, Gossypium hirsutum
  unsure (1)..(858): unsure at all n locations
ctttttcctttcttctccagcgtccgattttcccttgaaaatccaatctctttcactcccgcccttttccatttttcgttttaatcaatttcaattttttccccactttctggattctttacatggcgacgtcggcaccggttccggcgagtccaggtggcggtggaagtcatgagagcggcggcgagcaaagcccgagatccaacgtgcgagaacaagagaggtttccccctatcgctaacattagccgtatcatgaagaaagctctccctgctaacgctaagatcgctaaagatgctaaggagaccgtacaagagtgcgtttcggagttcatcagcttcatcactagcgaagccagcgacaagtgccagaaggagaagaggaagacaattaacggggacgatcttctctgggctatggcaactttagggtttgaagattacatcgatccgcttaagatttaccttaccaaatatagagagatggagggtgatacaaagggttcggttaaaggtggagatacatttgctaagaaagatgtccaaccaggtccaaatgcccagcttgttcatcaaggttcgttctcgcaaggtgtttattatgggaattctcaatctcagtcacaagcccatatgatggcttctgatgccagacactgagaacgagaccaaatcctacttgagccaatttcatcatctanatctcaatatcatgtttcaatggtggaagaaacaggtgtgataaactgacattttggatggttcaaatcatccttcacatgtaagctgttaatatcantatgtttggagtaaattgagttgtgtgaaaaaaatggtgtanatgttaagaagggtgttg

SEQ ID NO: 193106 - DNA, 396 bp, Gossypium hirsutum
cgtatatttggaaacatcttctgtctgtgatttggcaaagaaaaaaaaagatcccacactaatgccaatctcggctctacttctcttctccctctccacacattcaacaaaccaaagggctcttctgaaattcccttcttccattcgcttggcactagaaaaaaggatccatcacagcacacataataaaaccttaaaccatgggtccaataaagattgcattcggggatatgttgattactttcatgcgggttttctgttcatcaatgtttggtttatttacctcttggatagccaccgccattcgggtccaaaccatttcttgggctcctattggtatcatcaccttcattattttcgctttcgttctcatctttaatattattggcggatttc

SEQ ID NO: 193107 - DNA, 457 bp, Gossypium hirsutum
ttccagtcaagtgctaatccctatggccagccaacacaaccaaatgctgatccttatggtcaatctgcacaaccaaatgctaatccgtatagtcaaccagcacaaacaaatgctaatccatacagccaacctgtacaggtacatgctaatccatatggccaacctgctcagccaagtgctaatccatacaaccaacctgctcagccgaatgctaatccatacagccagcctacacagcctaatgctaatccatatggccaacctgttcagccaagtgctaatccatatgcccaacccacacagtctgtgtctgcagcccctcaaattccaggatctgctgctcagagcagcaatgggagcttaatgataggttctaatggctctgtcagttcacaaatggctgctcaacctccaactcctgctgcaccagctactcagtttaacactggaaacttta

SEQ ID NO: 193108 - DNA, 914 bp, Gossypium hirsutum
tcccccctgttttccagatttgtcatcacttgagaatgcaaacactttgggatcattacgactggggaagtatacagagtggtttaatgatgtgcattcaactgatatctcggatgtctgtgaagatgttcttaagcttttgtcaaaaagccatggatgcgaaacaatagagatagtaataccagaactacatgagatgcgcactgctcatgttgtttcaattggatcggaaacacaatgctcgttaaatccggattgtgaagacgggaaaggtgtgaaattgacgtatgatactcgcataagtatggcactttttcgatcattcactgcatcggattatgtagctgcccaatgtcttagacgaaggataatgcaccatcacatggagatcttcaagaaggttgatgtcatagtgaccccaacaactggcatgacagcaccaaaaataccatctagtgctttgaaagatggagagacagatatgcaggttacagcttatctcatgaggttcattattgccggtaatcttcttggtcttcctgccattaccgtccctgttggttatgacaaacaaggccttccgataggcttgcagctcataggccgtccgtggggtgaagcgacaattttacatttggcttctgcagttgaggaactttgtgctaaatccaggaagaaacctgcatccttctatgacattttaaatatcaaataaaaagccttttacagcttcaagatgcatggactacattttacagaagaccctcaacaaccctcaaccggctgctcaagaatgtagtatgatctaatcctgaaatgatgtttcttaatacatgtatgaataagctttgctctctgaactgatgttccaatcgattttactatagctttttccctatatttttttttatttt

SEQ ID NO: 193109 - DNA, 1173 bp, Gossypium hirsutum
acagcaccttggaccctccgaccgtctgtctgtaatagcattctcttccacagcccgtcgcctctttcctcttcgtcggatgactgagactggacggcaggaagcgttgcaagctgttaactctcttacttcaaatggtgggacaaatattgctgaagggcttaggaaaggtgcgaagttgatagtggatcggaaatggaagaacccggttggaagcatcatactgttatcggatgggcaggatacttatactgtctcaagtcctagcggatctcattcccggactgattataaatcacttattcctccctcaattcagcgcaatggtgggacgggtctccgtgtccctgtgcacaccttcgggtttggtgcagatcatgatgctgcttcaatgcattcgatttctgaaatatctgggggtaccttttctttcatagaagctgagggtgtcatccaagatgcttttgctcaatgcattggggggcttttaagtgtggtagtgcaggaggcatgcgttaaactggagtgtgctcacccaaacttgctaatcaattcgataaaggctgggagttatcgaaccagtgtgatggctgatgctaaagcaggttctattgatgtaggagacttgtatgctgaagaagaaagagactttttggtgacggtcaatgttccagttgatgaatcctgtgatgagatgtcattgctgaaggttcaatgtatttacagagaccccatatcaaaagaaatggtgtccttggaagaagccaatgaagtaaagatccagaggcccacaataattggacaaacagtagtgtcaatggaagtagacaggcaacgaaacaggctccgcgctgctgaggctatggctgaggctagatctgctgctgaacatggtgatctaactgctgctgtctcactactagagagttgccgcagggctttatcggaaaccatttctgcacaagctggtgacaggttatgcattgcactatgtgctgaactaaaggagatgcaagaaaggatggcaaaccgtcgagtttacgagtcatctggtagggcttatgtgttgtcgggtttgagctcgcattcctggcaaagagcaactgcacgtggtgattccaccaatagtacaagccttgttcaagcatatcagacccctacaatgacagacat

SEQ ID NO: 193110 - DNA, 1255 bp, Gossypium hirsutum
  unsure (1)..(1255): unsure at all n locations
aaaaaagagaagaaattgctctctcattgcactcttttgatcgtcgtcgtcgttattattgagttaaaatcgtttttttttaaaaccatacgaatttgccttgatttatgccctgcaattgactcttttttttttttctctcttgttgtttgttttttgattgtttcgatcaaaagtaagatacggttttactaactttccgtgccgcatccaccgatgccagataatcggcaaattcagaacaatgttgtttcgaatcaatccgctgatagcattgaagaagcaattttgcgtttgaaaattaatgataataatcaagaggtgggtgtttctaaatcagtctcgtatcctgatcgtcctggtgaaccggattgttcttattatttaaggaccggatcatgtggttatgggagtaactgtcgttttaaccatccggcttatgatgctcggggcggccaatatcgagaagaactccctgaaagagttggacagccagactgtgggtactttctaaagacaggaacttgcaaatatggatccacatgtaaatatcatcatccaaaggacaggaatggagctggacctgttacatttaacattcttggtctccctatgcgtcaggaagaaaaatcatgtccttattacatgcggactggatcatgcaagtttggagttgcgtgcaagttccatcatccccagcctgcatcacctggggctggcttacctgcaaatgctgtgggatcatcgattttgccaccatcaggtgtgccatatgttggtggattaccctcatggtcactaccgaggccacctcatgtctctggaccacgtgtacaaacccaaagctacatgcctgttgttttttctccttctcaaaacacaattcctgctcatggttggagcacctacatgggaaatatgagtcctgtatcttctgctggtattcttggatcgaatttcgcttacaacttgatgaatcccgctgagtcaggttctactgagcagatgcctttggtcttcaacgtctgcttcagattttcctgaaagacctgatcaacccaaatgtcggtactatatgaacacaggcacttgcaaatatggatctgattgcaagtaccatcatccanaggaaaggattgcaaattcaccagtaaacagcattggcccactccggcttccctctaaacctgggcaagccatatgttctanctatgctatgtatggtctctgcaaatatgggccaacttgcagattc

SEQ ID NO: 193111 - DNA, 465 bp, Gossypium hirsutum
gcagtgcacctactgccaaggctcaggttgttggttggcctccaataagatcatttaggactaaaacactgaccacttcttcaaagaacaatgatgaagttgatggaaaaccgggacctggtactctttttgtcaaggtcagtatggatggagctccttatctgaggaaggtagatttgagaatgtattcaacttaccaggaactgtcttctgctcttgagaagatgttcagctgtttcacccttggtcaatgtggggctcatggtactcctgggaaggaaatcttgagtgagagcaagttgaaggatcttttgcatggatcggaatatgtgcttacatatgaagataaagatggtgactggatgctggttggggatgttccatgggagatgtttattgaaacatgcaggaggttgaaaataatgaagagtgctgatgcaatcggattagctcctaaagcaatgg

SEQ ID NO: 193112 - DNA, 418 bp, Gossypium hirsutum
ctcccaaacatcctaaatctcgtcttcgtcgccgacgccgaaacgccgctctctgcagccgcttgcccgggaacgcacccaatttcaaaaaacggcttccgtttctcatcccttggcctaaccaaactcctcgattccccgttctcgtctctccttcactgattccatcctcgaaaatggctttcatttgcttttagggtttgtaaaatcaaacccattagtttccgaacccaatctgtaccatttattgttctactttatccaattcatcaatatggctatccgtttcaccgtcagtttctcgggctacgtcgcccaaaacttagcctccaccgccggttcccgtctcggttcttgcccttcccggtcagtccacgaatgctggctccggtctcgtttcctttccgccaaacaaaaa

SEQ ID NO: 193113 - DNA, 478 bp, Gossypium hirsutum
tcggtttaccaagaagtgaataccatgcaggacaggggcatctgctaacgttggtatcttaaggcagtggaggggggccctttatatgctgcgattgtgaagagcagggatctggttgggcttaccaatgtctggagtgtgggtacgaggtgcacccaaggtgcatcagagctgtcacccctcaaagctcaattgaagacaggtgactgtcacctcaccttacctcacctcaactggcctttatgctaattgaattctgatcaatccatcatgccatcacctcttactatctataattctctctctatatcacttgatatgtgggttttctactgagaatactatgttattgtagctaaagccgtcaacaccatgtgagtgtaacaaataaaatgtgtgttccaaccttttttttttaaaatttatcaggccacctttttaccaaatggtcttactttaattcttctcctgggggggc

SEQ ID NO: 193114 - DNA, 895 bp, Gossypium hirsutum
ttttccttttttattattacagatcatttatgggcataggtcacaagcttggagtaaaacaagtcccttcttatctttgcagggagaatagagaaagaatatccaatggaaggctacaagaatgcttctaaacacatagcagtgttggctttccctttcggcacccatgctgcccctcttctcaacattatccgtcaactatcagacgcttgccccgacaccatgttttccttccttagcacccaacaatcaaacaactcaacttttcccaaaaaccttgataaaattaagccttttaatgtatgggatggattacctgaggggtatagctttagagggaatcctcatgagcccgtcgattatttccttaaggcagttcctgggagttttataaaggctatagatgctgttgtgtctgaaactggtaaaccagttgattgtttgataacagatgcattttatgcatttggggctgatatcgcggacgagctgaatattccttgggtggcggtttggatgtctggccctagggcactcttccttcatctccagaccgatgttattcgccagcatgtaggaattaacaatccggaagacaaaccacttgattttcctgaattttctggctttcgtgttactgacttacctaatggaatagcctctggagacattgatgcccccatgccagcattgttgcataaaatcggagtgtcactgtcacgcgccacggcaattgtcgcaaattcatacgaagagttagataatacagtggtgaacatgctgaaattaagattcagtatgttcctcaacgttggtccctttcactctggtatcagtttctagttccaccgtggatgactcgcatgggtgcttggattgggtaagcaagcatgat

SEQ ID NO: 193115 - DNA, 396 bp, Gossypium hirsutum
ctacatgctactcttgtgattcttgttggtcaattgagtaaagaaactggtgtgctcgctctaaacagaacccttgccaagccttgtttatcagatattgagcaagtcttggctggccagggtgctggtgacggtctcaatcaagtttgttcgattcattcatcaaaccttactgaagcatcttgtcccgtaaaagatgttgatgaatttgagaacatggtaaactcttctgagcttcttgcttcatgtgaaaagattgatcctgttaaagaatgttgtgaccaagtctgtcaaggtgcaatatctgatgctgcaacaagacttgcattgaaagcttctgatcctctaagcatggatggacctcatgttttacctgagcacacaacaaggataaat

SEQ ID NO: 193116 - DNA, 617 bp, Gossypium hirsutum
cccacgcgtccgcccacgcgtccgggaaaaaattataaactcccctccctttttttctgcatctgcttttatttctttacagctcaaaattaataattataaatcaaatcaaatcaaatctctttcttccttatcctttcgatctgctaatcaagtcatttcaagatttttttttctgaacaagaaaaagaaaaatagtaggacaatgccgtccttggaggatgagctgtttccgtcgacgccagggaagttcaaggtcgacagagcacacaatatgaaccgtcaattccatcgttgcttcgcttcaaccagcaccatgtttttatgggctcttttcttgatcgcattgacggcgtcgtatttgagcttccagagtttcgttgattctggtagccgatatttcagtgcttcatggggtggtatccaatgggaaaaacaagtccgtaactccgctcagatccatcgttccggaggcatgtccgtcctggtgactggagcggctggtttcgtcggtacacacgtttcccttgccctcaaaaaacgcggagatggagtcgttgggcttgacaatttcaacaactattacgacccttcgttgaaaaaagcgaggaaatcgc

SEQ ID NO: 193117 - DNA, 916 bp, Gossypium hirsutum
cttaaaagacagaaaactaagatagctaaaaactatatagctctaccttcggtgtagtttttaatttctatatgatttcctttcaagcccccctctccccttcagatatgatcggaaagacaatcccagagttcgacaattcctccaagaagagaaagttggaagaagattcacaaggtgatcatgaagaaacttctgagaagcgatctaaagctaaaagcataaaatcggtgttcgatatggagctacacctcgagactccattacctttggagtggcaaagatgtttagacattcagtcagggcagatacacttttacaatacaaggacccatacgagaacatcaaaggatccaaggagaagccctgaacccccaagccccgttcacatgagcttagaccttgagctaaacctaccatgcgattcatcagtaaggaaagttgatgcaacagatcaccaattattcaacaagcacaactccatcggccccacgagggccggttcagttgataagaagatcaactcatcgggaggattaactcgcaacctttcgtggttggcagtggaggagaatgatcagcaagagcaagagatggtagcaacagtgtgcatgagatgccacatgttggtgatgctttgcaagtcatcacctgcatgccctaactgcaaattcatgcacccaccagaccaaggccctccgaaactattcaagcaggggcttagcctcttgtgctagtaaggacaatcaagttttttatgtttaggataacaaattcaccccaacgtgtgttgattaaatctgtatttcttaattcgtcttggaaagctaaatagtggtgctctaaaggttttagctgatttatatatatatacatacattctatatttaagcccaccaaaaaaaaaaaaactcga

SEQ ID NO: 193118 - DNA, 472 bp, Gossypium hirsutum
tcaaaactggcttttatgatcttcaaactgcgagggatgagtataggttctcttgtggcagtgggggcatgaaccgtgaccttgtatggcgttttatggatgtgcagactaggcttatcactccagtctgccctcactatgcggagtttgtttggagagagcttctgaagaaggatggctttgtgataaaagctggctggccatcagctggttctccagatcttaaactcaagagtgccaataagtatctgcaggattccattgtgttgatgagaaagctgctgaataagcagattttgggctcaaagaaatctaataagaaaggggctccagttacatcactatctgaggacaagttaaaaggcctaatctatgtgaatgagaaattcgaaggatggcaagcagagtgtttgcagattctccaaagcaagtttgacagtaatgcccgaacttttgcatcagatggggagat

SEQ ID NO: 193119 - DNA, 688 bp, Gossypium hirsutum
aagcattaagtatcaggtttttcatttacgttttgtgtgttgttattatttcgtctaagggtttttctatgttagttctcctttttctgttgattgcaaataagggtcattcatttaagctaaaacaacacttcttcgaaaaatccacaacaccttttattctcttaaaaaacacacctcatccaagtgcaaaaccaacacaaatttgcatcacagtcagcagaaagaaagggcaaaacttggtattgattgaataagacttagttcttctattttttttattttttagtttcagcataaagcaagagtgaagcctcactttgggtcagtgaagaagctgttgatactgggcatgatttctggcgtcttgttgcggacatattttctcaagaaatgttcagaatatttttctccctcagcaaagttgtccaaaaccccagcagccctgttctccttggttaccctgacttcagggttgatgcagatattgcgcaccaactgaaacccgcagattccgacagcaacacctacggccgcaaacagcggatacacctcaggcctcaaccatcgatttgccatcgagtgcacagcaaggatgcgaaatcaaagcgatagataagccaaagagaatagagagagagagctttgaaattaagggaaaaaaggaagacaacggcggacgcgtggg

SEQ ID NO: 193120 - DNA, 407 bp, Gossypium hirsutum
atagctttgtttcatctcggttatcatctgcccacttaccaaaatcatgttattgcaaataagggtcattcatttaagctaaaacaacacttcttcgaaaaatccacaccaccttttattctcttaaagaacacacctcatccaagtgcaaaaccaacacaaatttgcatcacagtcagcagaaagaaagggcataacttggtattgattgaataagacttagttcttctatttttttattttagtttcagcataaggcaagagtgaagcctcactttgggtcagtgaagaagctgttgatactgggcatgatttctggcgtcttgttgcggacatattttctcaagaaatgttcagaatatttgaccattgatgtcagctttggtggaccagcaggtggttgcgat

SEQ ID NO: 193121 - DNA, 460 bp, Gossypium hirsutum
tgggcatgttttggtagcgatcgaagaagtcttaggtccacggttcttgttagctcctagcctcagcataaagcaagagtcaagcctcaccttgggtcagtgaaaaaggtgtcgatactgggcatgatttctggcgtcatgtcgcggacatattttctcaaggcatgttcagtacatttttcatccctcagcacagttgtccgacaccccagcagtcgctgttctccttggtccccctgcattcagggtttatgaagatattttgcttcatgtgaaaccatcagatttgtctagcgacactgacgcccccgagcaacgaatacacgtcaggcctcaaccatcgatttgccatcgagtgcacagtaaggacgcgaaatcgaagcgatacataagccacagcgcatagagaaagagagctttgacattaacggaagcaaggaagccgacgggaaagctcgac

SEQ ID NO: 193122 - DNA, 1098 bp, Gossypium hirsutum
aaaaaaatggaataccgcaatgtttttcccatttttgttattttttcctttttcatcgttggcgtgatttgtacggagactttctcggcggagggatttgaagttgatccgttgatcgaacaagtaacggacggtcacgaaggagccgagccgcagctgctgacggcggagcatcacttctcgctgttcaagaagcggttcaagaaatcgtacggatcacaagaggagcacgattataggttcaagatttttcaggttaacctgagacgagcggcgcgtcatcagaagcttgacccttctgcgactcacggggtgactcagttctccgatttgactccaggcgagttcagaaaggcatatttgggattaaggagactgagattgcctaaagatgcaactgaggctccgattttgcctaccgataatttgcctcaagattttgactggagagaaaaaggagctgttacacccgtcaaaaatcagggttcatgcggatcatgctggtcttttagtacaacaggagccttggaaggagctaactttttggcaactgggaaacttgtgagcctcagcgagcaacagctcgtggattgtgatcacgagtgtgatccagaagaagcaggttcatgtgattctggatgcaatggggggttaatgaatagtgcttttgagtataccctcaaagctggtggacttatgcgtgaggaagactacccttacaccggcactgatcgagggacctgcaaatttgacaacaccaaggttgctgccaaggtggccaacttcagtgttgtttctttagatgaagatcaaatcgctgctaatcttttcaagaatggtcctcttgcagtggctatcaatgcggtgttcatgcagacctacattgggggagtttctcgcccatatatctgctctaaacgccttgaccatggagtattgttggtggggtatggttcagctggttatgctccagttcgcatgaaagataaaccgtcctggattatcaagaattcatggggtgaaaactggggagagaatgggttctataagatctgcacgggtcgtaatattcgtcgagtatattccatggtttcaact

SEQ ID NO: 193123 - DNA, 461 bp, Gossypium hirsutum
gcaccttcgttttttttcctttttcacttccaaaaaggaaaaagaaaagcaaaaaaatggctcatcgtatagcgttttctgtgtgtgtcgtttcgtattttttattcatcggtttgatatcgtcggaggctttctcggtcgtcggatcagaagttgatccgttgatcaggcaagtaacggacggtcaagatgatggagtggagacacagcctttgaccgctgagcatcacttctcgctgttcaaggctcggttcaagaaatcgtacggctcggaggaggagcatgattaccggttcaaggttttccgggcgaacttgagacgagcggcgcgtcatcagaagcttgacccgtccgcgactcacggtgtgactcagttctccgatttgactcccggtgagttcaggaagaggtttttggggttaaggaggttgagactgcctaaagatgcgaaccaggcaccg

SEQ ID NO: 193124 - DNA, 681 bp, Gossypium hirsutum
  unsure (1)..(681): unsure at all n locations
ggcgaccaagagctccggtggaggaccggtgatcgagatggttagtacttcgttgctccatccaaatcgttcttatactcctctaagtaccgaggatcctggaaattcaagtaagggtgcagttacagtgggtctaccaccagcttgggtagatgtgtctgaagaaatancagcaaatgtgcaacgtgcacggacaaaaatggctgagttggctaaggctcatgcaaaggctttaatgccttcatttggtgatggtaaagaagatcaacgcattattgagtctcttacccatgagataactaatctgttgaggaaatcagagaagagattacaaaaactctctgcatctggaccttctgaggatgcaaatgttaggaaaaatgtccagcgtcaacttgctactgcccttcagaacctatcaatggagctcccgaagaagcaatcaacttatttgaagcgcctcaggcagcaaacagagggccaggatggagttgatctacagatgaatataaatggagataggtcttatgcagaaaatgatcacttggatgatatgatatttagtgagcatcagatggcaaagttaaaacaaaatgacgcactcacacttgagagggaaagggagattcaacatgttgcggagtcccgaaatgagcttgctcagattatgaaagatttgtc

SEQ ID NO: 193125 - DNA, 717 bp, Gossypium hirsutum
cctactcgtccgctttcccctgtataattatattaggttttcatggatttgtggcttttatctgattccagtttagtgtcagattctaacattttagaatgatgtcatttagatatttagtgagcatcagatggcaaagttaaaacaaaatgaggcactcacagttgagagggaaagggagattcaacaggttgcggagtccgtaaatgagcttgctcagattatgaaagatttgtcagttcttgtgattgatcagggtaccattgtggataggatagactacaacattcaaaatgttgcaactacagttgaagaaggcctcagacaactacagaaggcggaaagaacacagaaacagggaggcatggtgatgtgtgctacagtgctcgttataatgtgctttgtcatgttggtcctcctaatcctcaaggagataatcttttgattcgcatgcatgtttttttcgttgatgatttccagtttgaccagcggtgagagcccattactttagaatcagcaatttccttggtcagcagcatgagcatgggggattttgaatacccccatacgcatacgacttaaccggcatgaatacttatttttttactctttaattcttgggttgttgttctttcaagaaaaaggaaaaggcgggtgtttgaatcgcgtttaaaagattgatctataatagagttaataagttatgtatttcttttt

SEQ ID NO: 193126 - DNA, 925 bp, Gossypium hirsutum
gttatccatatttttcaagccaggtgaacgattctctgagatcgttggaagtccatattatgtggctcctgaggtgctcaaacggaattatgggccagaaattgatatatggagtgctggagtcattctctatattttgttgtgcggggttcctcctttttgggctgagtctgaacaaggcgttgcacaggcaattcttcgtgggttaatagatttcaaacgggacccatggccaaatatttcagagagtgctaagagtctagtccgacaaatgttggaaccagacccaaagctccggcttactgcaaagcaagtgcttgagcatccttggctccaaaacgctaaaaaagctcccaatgtgcctcttggtgatgttgttaagtcaaggcttaaacaattttcaatgatgaacagattcaaaagaaaagccctagcgggttattgctgagttcttatctgttgaagaagttgaagatatcaaagttatgttcaataaaatggacactgacaatgatggcattgtttcggtcgaagagctgaaagccggatttaaaaattatggttcacagcttgcagagcctgaagtgcagatgctcattgaagctgttgatgctaatgggaagggaacattggactatggggaatttcttgctgtttctctccatctgcaaagaatggccaatgatgagcatcttcggaaggccttttcttactttgataaagatggcaatggttttattgagcccgatgagcttcgggatgcattgatggaggatggagcagatgattgtacaaatgttgcaaatgacatcttccaagaagtggacactgacaaggatgggcgcatcagctatgatgaatttgcagccatgatgaaaactggtacggattggagaaaggcatctcgacattactcgagagggag

SEQ ID NO: 193127 - DNA, 784 bp, Gossypium hirsutum
tcgagttttttttttttttttttaatctaaacctactgatttcggcctctaatcccaatattttggatttctttttaaagaagaaggatacaaattgaaaatagtaggaagaggcgacagatgttgggaattctctcatgctgctcctctcactaagtttgctcctcattggcagattttttcaaccgatcagctgccttttcgacttctttgttccaattggttgtggcagtgagaacaacaagagttgctgtttgtaggaggactccaataatcataccccaccaaattcctgctactcctaaactagttttgaagccaagaacacatccaattgggagaccaataatgtaatatgttgccaggtttacataagccacaattgcttgccatccactccctattgccacacctgagagtataggctgaatgccatttaggaaaacagagatggcaagcagtggagtcaagtctgaaactgcttctataacctcagaatcacttgtaaatgctttgctcaatccaactcggaatatcaaaacaattgcactgaatacaatacttatcaatatgcttgtcccattcaccacaaacactgaaaattttgctacccttggatggcctgcccctagctcattactcactcgaacactggcagctgcactcaggcctagcataaattgcatgtcccagttcaaataattcatgcaaattgaaatggagtccaatgcaatggttggattagaaagtagtcccgatataagcactaatctttggttgtacc

SEQ ID NO: 193128 - DNA, 734 bp, Gossypium hirsutum
gaaatgcttaaaaatgatgctgttaaactctgccaggataacaatttcaatacaggatttttcgagggtagtgataataacagtgtcgtagatgcttatgaattgaaggttaggcttgagcatattcttgacaggatagcattgatatccgaggccgctaacacagagaaaccatctttaattacgagttgcttgttcattggtggagcactggctgcgagatctgcttacacactgcagcattttggaattactcatatattgtgtttgtgctccaatgaaattggacaggcagatgcgcaggaccatgacctattcaagtacaaaaacttttccatatatgacaatgaagattcaaacatcagcagtatctttgaagaagtttgtgattttattgatcacgtcgggcatacaggtggaagagtcttagttcattgctttgaagggaaaagtcggagtgccacagtagtgatcgcatacctgatgctacggaagaacttaactttattagaagcatggaactccctcaagcgagctcatcgtcgggcccaaccaaatgatgggtttgcaaggatactattggatcttgatcggaaactgcatggaaaggtttcaatggaatggcatcagcgaaaaccaatgatgaaagtatgtccaatttgcgggaagaatgcttgtttgagcagcagctcacttcaatctttatttgcagaaagcacacattaagctatctt

SEQ ID NO: 193129 - DNA, 753 bp, Gossypium hirsutum
agcatccataaagacagtcctgctgcaaaattcctacttgaccgtggggtggagcgcaaggacttcaactcttatggaagtcgtcgcggtaacgatgaagtgatggctcggggaactttcgctaacattcgccttgtgaacaagctgctgaatggggaagttggcccgaagacggtacatgtccctacaggagagaaactctatgtatttgatgcagcaatgaggtacaaggatgcagggcatgacaccattgtcttggctggagctgaatatggaagtggtagctcccgggactgggctgcgaaaggtccaatgctgttgggagttaaagcagtaattgccaaaagcttcgagagaatccatcgcagtaatgtggtatgaatgggcattattccactttgtttcaaggccggtgaaggtgccgacactttaaggtttactggttaccagccttatacccttggatcccccaacaaaatattctgcctaaaacctgggctagatgtaccgtttccaattgccattggaagtctttccattcccttgtcgccttgacccttaggttaaatgggttacttaacattgtggcttccttccttggtttttgaacctggttaccataattccttgttggtgccttctaattttattatgtaacgtgatgcattaaggtttaatacggatattctcgaatgggctccagttcctttttatgattggctgccttcctttgttatacaattccttcgaatt

SEQ ID NO: 193130 - DNA, 595 bp, Gossypium hirsutum
cggccgcgtcgacacttgaccgtggggtggagcgcaaggacttcaactcttatggaagtcgtcgcggtaacgatgaagtgatggctcggggaacttttgctaacattcgccttgtgaacaagctgttgaatggggaagttggccctaagacggtacatgtccccacaggagagaaactctatgtatttgatgcagcaatgaggtacaaggatgcaggacacgacaccattgttttggctggagctgaatatggaagtggtagctcccgagattgggctgcgaaaggtccaatgctattgggagtaaaagcagtaattgccaaaagttttgagagaatccatcgaagtaatttggtaggaatgggcatcattccactttgttttaagtctggggaggacgccgacacactaggtttaaccggtcatgagcgttataccatagatctcccaagcaaaataaccgatataagacccggtcaagatgtgactgtcacgacggataatgggaagtctttcacctgcactgtccgcttcgacactgaggttgaattggcctacttcaacaatggcggcatacttccatatgttattagaaa

SEQ ID NO: 193131 - DNA, 956 bp, Gossypium hirsutum
cctacgcgtccccccgcgtcccaaaaaaagttatctcatttttagcaaagttacagtcgtcctcatcgaacaactatggcagccatcaaagtccacggaagccctctgtccactgctacacaaagggttcttgcatgccttcacgagaaaggcactgattttcagtttgttcccataaacatggctgctggtgaacataaatccgaaaactacctttccctcaatccattcggtcaagttccagcttttgaagacggggacttgaagctcttcgagtcaagagcagtcacccattacattgctcatgaatacagcgacaaggggacccaactcttaattcctggctctaacaaggatatggctgtcttagaattatggaaggaagtggaagcccaccagttcgattctccatcttcaaaaatagcctgggaggcgttttacaagccattaatgggcatggttaccgactccgcggtcgtggaagaaaatgaaggtaagcttgccaaagttcttgacgtgtacgaggctcgattgacacggtcaaaatacttggcaagtgactgcttcaccttggccgacctgcatcaccttcccaccattcaatacttgttggctacaccttcgaagaagctgattgattctcgtccccatgtctgtgcttgggtgaaggagatcactgctaggcctgcttggtctaaggtcctcgctatgcaaaaacagtgaaaggcttcggccatttggcgcccacccgagctgatatcagtagtccaatgttgaataagtccttcgcatgtttatttcggtgtttaaagtctaattcgcatagactttttttgagtgtggtctgcattcttggggccctcttcttatgttttttggccttttatgtgtcgattgactttgtgcttgtggttggttcatcgctcatctacgactaatatactacaataatttac

SEQ ID NO: 193132 - DNA, 1428 bp, Gossypium hirsutum
cccacgcgtccggaagagttggaaaagaaggctaggcctgttaaaggccgtgatgatatcgaagctggggcttccatttctgctggaaatgatgaccttattggaacaatggtagctgatgctattgacaaagtcggccccgatggtgttttgtcaatcgagtcatcgtcttcatttgagaccaccgttgatgttgaggaaggaatggagattgacagaggttacatctcaccgcaattcgtaacaaatcccgagaaattaatttgtgaattcgagaatgcgagggtgctagtaaccgatcaaaagattacagctattaaggacataattcccctcttggagaagactactcagttaagagctccattgcttataattgctgaggatgttaccggagaggctcttgctacacttgtagtgaacaaactccgaggtatccttaatgttgcagccattaaagctccgagtttcggcgaaagaagaaaagctgtccttcaagatattgccattcttactggtgccgagttccaagcaaatgatctgggtttgttaatcgagaacacctctgttgagcagcttggtatagccaggaaagttatcatcaccaaggattcaacccaaataattgctgatgccgcttcgaaggatgaaatacaagctagggtgcaacaattaaagaaagaactagccgagacagattctgtttacgacacagaaaaactggcagaaaggattgccaaactatctggtggtgttgcagtcattaaggttggggctgcaactgagactgaactcgaggatcgcaagctacgtattgaagatgccaagaatgctacctttgctgccatagaggaaggtattgtacctggtggtggtgctgcattagttcatctctcgacttgcgtccctgcaattaaggataagcttgaagaccctgaagagcgcataggagccgacattgtgcagaaggctttggtagcaccggcctcgttgatagctcaaaatgcaggaatggaaggtgaggtagtggtggagaaagtaaagaacagcgagtgggagatcggttacaatgcaatgacagacacgtatgagaacttgctggcagctggagttattgacccggcaaaggtgacaagatgtgcgttgcagaacgcggcttcggttgcgggaatggtgcttacgactcaagctattgtcgttgagaaagccaagccaaaggctcctgcagctgctgctcctgaaggtcttaccatttaatcactaggattttaagaaatttcagggattgaatgagcaatgatgtaggtttggtgccctatttttgtattggatttaataaaagaatggtttgtggatgcaatgtaaggttagggattgtgaacaatgtttgattagacattgcagtaaaaaaaaaaaaaattctttgcc

SEQ ID NO: 193133 - DNA, 444 bp, Gossypium hirsutum
gaaagaagtcaaatcaaaaactctaataaaaatgtcttccattgttcttagatctcgaacaatttcaaataatttcagttcaaagagtatttctcaaaggggtttatgttcaggagtggtttcttcttcttcggatccttctaaaggaacaacaccttcttcacaatccattctctccgatcagtcgacacctcctcctccggcgccggaagttgccccacaggtttcgggagggaaaatttggagctttgtcaagtacggactcattgcaggtgttactggaactactggctatgctggttatctctcttataagtgttcatgtgaggaagtagatcataaagcaaaggcattgcgggcggcagcgagttatgctcctagggaagatgcctctgctattgataaatatggaggcttgctctactctgctgcaatgacagttcc

SEQ ID NO: 193134 - DNA, 661 bp, Gossypium hirsutum
gacaaaaaccaaaaccatgaaatcatcagaaagcagaaaagtgaaattaattatgatttttttaatccacctcttccatcttgcttccctcagcttcatcttcctcaagagtaggcatgtccgcatcatcaccaccggtcccgtcctcatcaatactcagacccagcttcagcattctatggattctacctgcgaatgtgttcggatcatccaagctgaacccagaggtcaatagagcagtctcgaacagcaacagtacgagatccttaacggacttatcattcttatcggcttcagctctcttccttagctcttccattattccattatcgggattaatctccattgttttcttgctggacatgtaagaactcatgctattatctctcaaagcttgcgctttcatgatcctttccatgttagcagtccatcccccctctccggtgaccagacagcaaggtgagtcgacaatcctgtcggagacaacaactttcccccccccgtcacctaagatatctttgattgtctgacagagatcttcaaaagacttctttttttcctcctttttctttttctcctcctccgtctcgtcctcgagctttaaaccttcctttgtggcagagacaagcatcttgccgtcgtattccttcaactgccagac

SEQ ID NO: 193135 - DNA, 630 bp, Gossypium hirsutum
gatattggtttaggttttagggtttcttcgcttcttgtggtgaaccagttgtagctgccgctgtcacttccccgcttccatcttaccgaagctctcccgtcgacgacaatggttgccgccaagaaaaccaagaagactcatgagagcattaacaacagattggctctcgttatgaagagtgggaaatacactttgggttacaaaactgttctcaagtctcttagaagctccaaaggtaagttgattatcattgccaacaactgccctcctcttaggaagtcggagattgagtattatgccatgttgtgcaaggttggagttcaccactacaatggaaacaacgtagacttgggcactgcttgcggcaaatactttagagtgtgctgcctcagcattattgaccctggtgactctgatattataaagagcatgcccggtgatcactaagctatggggggataacttcctaggtgctgatttagtttcaatttttgggtgtctaaaaacattgctgatgttaaagacaaacttattctgaaattcataactttctttgtagcgtttgtgggacagagatggtattggcccatgtattaatgaatttttggagtggatttagcttaaaaatct

SEQ ID NO: 193136 - DNA, 594 bp, Gossypium hirsutum
  unsure (1)..(594): unsure at all n locations
gaaaaaaccggggggaccaacgctttcgaccatttgtagctgctgttgtctctcccccgccgcctccatcccgaagccgtccccatcctccgacgacaatggtggccgctaagaagaccaagaagacccatgagagcattaacaacagattggctctcgttatgaagagtggtaaatacactttgggttacaaaactgttcttaaatctctcagaaactccaaaggtaagttgattataattgccaacaactgccctcctcttaggaagtcagagattgaatattatgccatgttgtgcaaggttggagttcaccactataatggaaacaatgttgacttgggcactgcctgcggcaaatatttcagagtgtgctgcctcagcattatcgacccgggcgactctgatattattaagagcatgcccggagatcactgagcaacagcggacgacacatcatactaggttttgttccaatttagtttatatttcttttgggtttctggaaacattgatgttaaaggcatcttattccgaaatttggaacttcctttgttatttgacttgtgtactangaaatttgtgaagtaatttc

SEQ ID NO: 193137 - DNA, 528 bp, Gossypium hirsutum
atcccgtctttgggttctcagatttaagcagtttacgaagctccaagatcgaattttctgaaagttaagattcgtaagatttgggtttttctcgcggtttttaagaagatggatatcatttcccaattacaagaacaagtaaattctatagcagccctaactttcaacacatttgggacactgcaacgagatgctccacccgttaggctctcccctaattacccagaaccccctcccaaccccaccgaggactctgccaatttcgccgaccaacctaagctcatgagtgctgctcttgttaaggctgctaaacagttcgatgcattggttgctgcacttccaccttcagagggcggtgaagaagctcaacttagaaggattgctgaactccaagctgaaaatgatgctgtaggccaagaacttcagaaacaactggaggctgctgagaaggaactgaaacaggttcaggagttattcagtcaagcagcagataattgtctcaacctgaagaaaccagattgaattcat

SEQ ID NO: 193138 - DNA, 967 bp, Gossypium hirsutum
catagaggaggaaaaaaaaatcaaatccccactattttgtctatataaatgtctcgaatttcaacttggttgatcaccagttccatccgggaactcataactcctcaaaagtcttcttcaatggcagctcgagttcttgttttggcttcaattcttattttctcttgttttgcagagacatgctatggggcgatctcattctcatcccttcaaagaacacttgttgttactgcttctcatagacaaggacttttgaaagccggggaagacaagatcacagtgagatggggattgaaccagagtttcccggccgggaccgactcgtcttataagaccatcaaggtccagctttgctatgcacccatcagccaagtcgaccgtgcatggcggaaaaccgaggaccatcttaacaaagacaagacatgccagttcaagatcgtcaagaaaccctacaccaacgtcaacgaaacccttgaatggaccatcgaacgagacgtgccgacggcgacgttctttatccgagcctacgctttggactccgacgaccacgaggtggcgtacggtcaaaacaccgacgccgagaagaaaaccaatctgtttgaaatccaagccatcaccggccgccatgtttcgctcgatatagcgtcggtttgtttcagtgctttctccgttgtgtcgttgatggggttcttctttatggagaaaagaaaggcaaggaaatctcagcagtagtgtgatatattatggttttaagaaccctaattaaacctttgaaaaggatttttatagtaatgggtttgatttgcaagtcttatttactttctttgtgtttttaatcctagatgatgagttaagttgaatggttgtgttttagtgggaatggggtgaataaaagagttgggattatctatgatcatctccttgttatatattaaagttgaaaattgcctatttgatattagtgttt

SEQ ID NO: 193139 - DNA, 942 bp, Gossypium hirsutum
  unsure (1)..(942): unsure at all n locations
cttttatctcattcctccgtcgcttgtgagaatagaggcagcagtggcttgacgttcccctttgctcccttcttccagaagccaaaagtttgagttaagaacaatggcttatgctgcaatgaagccgaccaaacctggtttggaggagtcccaggagcagattcacaagatcaggatcactctctcctccaagaatgtgaaaaaccttgagaaagtttgtgctgatttggttcgtggtgccaaggataagagactgagggttaaggggccagtgagaatgcccaccaaggttcttcacatcacaacaaggaagtctccctgtggtgaaggaacaaacacatgggatagatttgagctccgtgttcacaagcgagttattgatcttttcagctcccctgatgtggtcaagcagatcacatctatcaccattgaacctggtgttgaggtggaggttaccattgcagattcttaaatatgcctcacttatatgctttttggcaacctctagttttagtcaattagaagacttccatctgatatagccctcgatgtcctaaacaatcttttaagcttgagtggttggttacagggcttttgtagtttttgattttcccatgctagtattaaagttaaggttctattttgccctgtggctctggattctctttcctttttgttacctaaaaagatcatgtctggatgattttgtttattgcattatttgacattaaatatcacgagactagctgcttcattttcattttgcttaatggagggtcgattatgggaannnnnnnnnnnnnnnnnnnnnnnnnnnnnnnnnnnnnnnnnnnnnnnnnnnnnnnnnnnnnnnnnnnnnnnnnnnnnnnnnnnnnnnnnnnnnnnnnnnnnnnnnnnnnnnnnnnnnnnnnnnnnnnnnnnnnnnnnnnnnnnnnnnnnnnn

SEQ ID NO: 193140 - DNA, 797 bp, Gossypium hirsutum
tcttccacgcgtccgcgcctccacgtatataaatcttttacagagctttctttctcgtttcgccattcgattttttgagcaaagcggcagcacagaacatagcttgaaactcgccatctctcacttctctagaaactaagagtcgaaaacagatggcgtatgctgcaatgaaaccgaccaagcctggtttggaggagtcccaagagcagattcacaaaatcaggatcactctctcctccaagaatgtgaaaaacctcgagaaagtttgtgctgacttggttcgtggtgccaaggataagagactgagggttaagggaccagtgagaatgcccaccaaggttcttcacatcaccacaaggaagtctccctgtggtgaaggaactaacacatgggatcggtttgaactccgtgttcacaagcgagttattgaccttttcagctcccctgacgtggtgaagcagatcacatctatcaccattgaacccggtgttgaggtagaagtcaccattgcagattcttaaatgtgccttactgttgctttttggcctcacaaggtttttagtttatttgaaagagacttttgattgatgtgaccttatttgcttggatcaatctcaagcttggatgaatgttgtagggtttctatagttggtgtttttcccataatggaagtaaaattctaatctgttgggtggctttatagtttctttcctttttgtaacctaaagattatgttgcgatattttgattttatgcattatttggcattaaggaatgaaatgagttgctttatgttc

SEQ ID NO: 193141 - DNA, 410 bp, Gossypium hirsutum
tttcatttcgagaaaaaaagcagcagaggccgcggcggctttcactcttcccttctctcacctcttacagaagccagaagtcagtttagttgccaatggcgtatgctgcgatgaagcctaccaagccgggtttggaggagccccaagagcagattcacaagatccggatcactctctcctctaagaatgtgaaaaacctagaaaaagtttgtgctgatttggttcgcggtgcaaaggataagagactgagggttaagggaccagtaagaatgcccaccaaggttcttcacatcacgaccaggaagtctccctgtggtgaaggaacaaacacatgggatcggtttgagctccgtgttcacaagcgagttattgacctattcagctcccctgacgtggtgaagcagatcaca

SEQ ID NO: 193142 - DNA, 1148 bp, Gossypium hirsutum
aaatagagaaaaaaaagtatcattaaacaccttcaccaacaagaacaaaaaaaacaggtgaaaccccgttttcttttggtctcaaaacgattcaaaagggcaagattcttggttttagggtttgggttttcattgatttttagtgaaaaaattataaaaaaattatgggaagaggtagggttgaacttaagaggattgaaaacaagatcaacaggcaagtcacttttgcaaagagaagaaatggtcttttgaagaaagcttatgagctttctgttctttgtgatgctgaagttgctctcatcatcttctccaatagaggaaagttgtacgaattttgcagcagctcaagcatgatcaaaacattggagaggtaccaaaaatgcaactatggagctcctgagccaaatgtgtcatctagggaggctgctttggaattaagcagtcgacaggaatatttgaagcttaaagcacgttacgatgccttacaaaggtcccaaaggaatttactaggagaagatttgggacctttgagcagcaaggagctcgagtcacttgagaaacaacttgattcatcattgaagctaatcagatcaacacggacccaatacatgcttgatcagctcaatgatctccaaagaaaggaacatcttcttaatgaagccaataagaccctaaaacaaaggttggtggaagggtatcaagtaaattcgttacaattgaatccaaatgcaacggaagacgtcggctatggccgtcaacaggttcatcatcagcctcatggcgatgccttcttccatccactggactgtgagccgactttacaaatcggatatcagcatgatccaatgtcagtggtgactgcagggccaagtgtgaataattatatgacaggttggttaccatagcatatatggctctatatatctatatgaagaagaagaaaccatgggtatggatttcttcataagaaacttattttatgttattgtatgaaacaaaagaaatgtgtagtgccatggatttattattattattattattattggaactttgtgtttttaattaggatgcactataacaaactccatctgtgtgagctataaagtgcatctttctttgaacaagttaatttgttgttaagagactaa

SEQ ID NO: 193143 - DNA, 686 bp, Gossypium hirsutum
gaagaatcaagggaatgagcttcataagcaagggaagttcaaaaacgcctctgagaaatatttgcttgcaaagaaaaacctgaaaggaattccatctgcaaaaggaaaaacacttttgctggcatgctcacttaatctcatgtcatgttatttgaaaacaaggcaatatgacgagtgtgtaaaagaaggttctgaggttttgtcttatgatgcaaagaacgttaaagctctttaccgaagaggtcaagcttataaagaactaggtcaatttgatgatgctgtctcggacttgagtattgcacatgaagtttcacctgatgatgaaacaatcgcagatgtcttgagagatgctgaggaaagattggctagagaaggcagtcatcaagcaccccggggagtggtaattgaagaaataactgaagaaactgtaaccacctctcctgctactcttcgaaggtcatctactgaacattcatcgaaacagccacgagaaagtactggaatcgctaagagtgagaatgaggaataaagttgcggacttgagaaccaattctgagtgtttacaggcttttaaggaggatccagaggcactcaggtttgttccattatcacaaaatcacctgttaggtgatattcatttgcttagtctggtaatatcatattctatcttccatgagtggattatg

SEQ ID NO: 193144 - DNA, 368 bp, Gossypium hirsutum
ctggaatctctaagagtgagaatgtgtgaataaagttgcggacttgagaaccaatgctgagtgtttacaggcttttaaggaggatccagaggcactcaggtcatttcagaatttcatttccagtgccgatcccgacactcttgctgcaatgagtggcggtaaagttggagaggtgtcacccggcatgtttaaaactgcatcaagtatgatcagcaagatgtcacctgaagagctacaaaaaatggttcaattagcttcttcatttcaaggggaaaacccatatacaggtggatttggaactggacctgttcctccgaatgtgactcctgacatgcttaaaaccgcaaccgatatgatgaccaagatgc

SEQ ID NO: 193145 - DNA, 939 bp, Gossypium hirsutum
tcctcacgcgtccgcccacgcgtccgtttatcctgacttttgttctctctctctctctctagaacccttcaattttcaatttcatttttccaaatttctcccctttttttttctaaaaatagagaaaattttgggaaaaaaagaaaaaaaattcccagcgtgggagtgagtgtttatgttttttttttttatgaattttgtactgtggggggttttgaatgagaactgaaatacttttgggaaattgaaaatcttcaatcggcggactagatggccaccacggagttgcagatgagtcctcagttggagcagatccatggcgaaatccgcgatcttttccgtgctctttcaaatggcttccagagactggataagatgaaagattccaataggcaaagcaaacagctggaagagcttactggcaagatgagggaatgtaaaagattaatcaaggagtttgatcgtgaaattaaagatgaggaaagcaaaaatcctcccgaagtgaacaagcaactcaatgatgagaagcagtctatgatcaaagaactgaattcgtatgtagctatgaggaaaacatacatgaatacccttggtaacaagaaaattgaactctttgatatgggagctggagtcagtgaacctacagctgatgaaaatgttaaaatggcatcatcaatgtcaaaccaagagcttgttgatcatgggatgaagacaatggatgagactgatcaggccattgaacgctcaaaaaaggttgttgaacaaacaattgaagtaggaactcaaactgctggtactctaaaaggacaaactgatcaaatgggccgtattgtaaatgagctggatacaattctagtttcatttaagaaggccttccaactggtgaatgagattggtaggcaggtagtcatgataaatgcatcatgctatttctttttt

SEQ ID NO: 193146 - DNA, 457 bp, Gossypium hirsutum
cccacgcgtccgcccacgcgtccgcccacgcgtccgcccacgcgtccgcccacgcgtccgctcagttggagcagatccacggcgaaatccgggatcttttccgtgctctttcaaatggcttccagagactggataagatgaaagattccaataggcaaagcatacagctggaagagcttactggcaagatgagggaatgtaaaagattaatcaaggagtttgatcgtgaaattaaagatgaggaaagcaaaaatcctcccgaagtgaacaagcaactcaatgatgagaagcagtctatgatcaaagaactgaattcgtatgtagctatgaggaaaacatacatgaatacccttggtaacaagaaaattgaactctttgatatgggagctggagtcaagtgaacctacagctgatgaaaatgttaaaatggcatcatcaatgtcaaaccaagagcttg

SEQ ID NO: 193147 - DNA, 629 bp, Gossypium hirsutum
ctcagattgggaaggcattgaccggatcacttatccacctcatgctaactatacctactcgattcaagcagcaatcggatctggcattgacatggtcatggttccatacaactattcctcgttcatccacgggctaactttccttgtcaaaagcaatttcatccccatgagccgcattgatgatgcagtgaagagaattttgagagttaaatttgcaatgggtctatttgagaacccattagcagataacagcttagttgaccaacttggcagtcaggaacatagagagttggctagagaagcagtgagaaaatcacttgttttgctaaagaatgggcactctgccgatcagccattgcttcccttacctaagaagacatcaaaaatacttgttgctggtagtcatgcagacaatttgggttatcaatgtggtggatggactattgagtggcaagggttcagtggcaacgaccttacaaatggtacaacagtcctaaaagccatcaaaaacacagttgattcaagcacgaatgttgtgtatgaggagaatccggatcccaaattcgtcaagtccaacaacttctcctgtgccattgtggtagtaggggaagcatccatatgtcgaaact

SEQ ID NO: 193148 - DNA, 505 bp, Gossypium hirsutum
ccacttttaactcatcttagttacaaggaaacgaactttttagagagcatcatgttgttgtacagttttcgcgaaaactgataagcttggtgatcccatttgggttcttaatataagggataaagtccagacatttggtccgagaaaggccaacttatccatataagattagtcggattgggtagaaccaagaggaataattcatgtcttttgtcatattggatttcaaatgctttggagcttaccagatgattgtagaaattggtgtattgtgggtttctctagtttattattttatttttaggagggaaattaaggagcatggatgatggatcgtctctgacgtttccgaggcagctagcttggggaaggtcggttgtttcgttcatgagcttgttgtataaatactaaaatttcatttttatatttatttttcaccgtcgtcatgggcatgttaggaactcatcccttgggtgggtctgccgacatgtggcccatatttggt

SEQ ID NO: 193149 - DNA, 399 bp, Gossypium hirsutum
attaaacactaacgggtaaaataatttcaaagactttcacacccactctcatatatatattttgaaaagaaaaaagaaactaataatccggtcaacatagcagttcaacagcaatgcttaaaaaatacctgaaagacaaaatattaaagtagaaaccatatactactgaaaaataccttactcatagtagaggagattttattgatcatccaaagacactcacaagcttgaaatctggagatttggagaagcaaagtttaggaattcatgatctttttgtagtgcagacattctggtttcatctaaggttatccaagcttctattcctttcccacatttgggttcaaggagaatagttaagtttccaaattgccctatttttccaagtattgcccatga

SEQ ID NO: 193150 - DNA, 865 bp, Gossypium hirsutum
aaaaaagaaaggaaaaaaaattcaaaaaagaactagaaatttattatcgctcacagtctctttgagaaagcccaataattccctctctcatttttaattttggatatttttgttgccctagattttctctctgtaagctctacctagagaagaagccatggctaatgcagcgtctggaatggctgtgcatgatgactgcaaactgaagttccttgagttaaaggccaaaagaacataccgctacatagtattcaagattgaggagaaacagaagcaggttgttgtggaaaagcttggtgagccaagtcaaagctatgatgatttcacttcaagcctccctgctgatgaatgtcggtatgctgtctatgattttgactttgtgactgctgagaattgccaaaaaagcaggattttcttcattgcatggtctcctgacacctcaagggtgagaagcaagatgatttatgcaagctcaaaggacaggttcaagagagagttggacggtattcaaatagagctgcaggcaactgacccgactgagatgggacttgatgttattcgaagccgtgccaactaaattggcatctccaaatggcaggaataatggagatggtaaaatgctttctgcttttgtttcaagtgaaatgttaatagtttggcggggtggtatgattttggtttgttgtttagatgttatatccaagtctttgtctagaacaagtttagcaatttccatttgaatcttatgattctgttatgcatgtctcaaagttatcggacggagtgtcttacagctgagtcgataaacataagtctcatcttcttcaagggtatatgaagcactcttttttgaggggttttttcc

SEQ ID NO: 193151 - DNA, 698 bp, Gossypium hirsutum
gaaaatagattccatttattatcattattattttcttcgagttttgccttcagattcttcctctttgtaagttcaaatctaaaaagccatggcaaatgctgcttctggaatggccgtgcatgatgactgcaagctgaagtttctagagctaaaggctaaaaggacataccgcttcatagtattcaagatcgaggagaaacaaaagcaggttgtcgtggaaaagcttggtgagccaagtcaaagctatgacgatttcactgctagcctccctgccgatgagtgtcgatatgctgtatacgatttcgactttgtgactgctgagaattgccagaaaagcaggattttcttcattgcatggtctccggacacatcaagggtgagaagcaagatgatttacgcgagctcaaaggacaggttcaagagagagttagacggtattcaagtaaagctgcaggcaaccgatcccaccgagatgggactcgatgtcataagaagccgtgccaactaaatcggagtctccgagaggcatgggtatttgaattcttttctgcttttgcttttagtgaaatgttaatacggttgcgggaggcggtaatatcgacctgactgaactttgatattggtttgttgggtaagttttttttatataaaattcttcagtctcgaacaaattatatgggtttgttatgcgcaaaggt

SEQ ID NO: 193152 - DNA, 716 bp, Gossypium hirsutum
gtttttcccgtaagaagggttaatccttcagatgttataattttggaagggatacttattttccatgatcctcgcgtccgagagttgatgaacatgaaaatatttgttgatacagatgctgatgtgcgactggcaagaagaataacgcgtgatactgttgggaagagcagagatattggtgctgtccttgatcagtattcaaaatttgtgaagccagcttttgatgactttatacttccaacaaagaaatatgcagatatcatcattccccgaggaggagataatcatgtagcaattgatttgattgtacaacatattaggacgaagcttggccagcatgatctctgtaaaatctacccgaatttatatgtcattcaatcaacttttcagatacgaggcatgcatacccttattcgtgactctcaaacaacgaaacatgactttgttttttacgctgatcgattgattcgtctggttgctgaacatgggctgggacatctgccatttacagagaagcaggtgatcactcctacagggtctgtatatacaggtgtggatttctgtaagagattatgtggagtctctattattcggagtggtgagagtatggagaatgctttgcgagcatgttgcaaaggtatcaagattggcaagattcttatccatagggaaggtgacaacggtcaacagcttatctatgaaaaattaccacaaga

SEQ ID NO: 193153 - DNA, 489 bp, Gossypium hirsutum
gaaaaaaccaaagggccaaaaccttgtcttgttccattgcagtttctcttacacattatcatgaggttgcccgttttctggtggtctagggtttttcaatctatacctcttctcactaatcatgagtcgtcatccagaggtaaagtgggctgaaagagctgacaaggtttacattacggtgctattaccggattcgaagaatgcgaaggtcaatcttgaacccgagggagtgtttactctttcggctaatgccggagctgacaacaacctttatgaattgaagttggatctttatgataaggtcaatgtggaggaaagcaaaattagtataggagtccggaacatagtttgtgtgttggagaaagccgagaaagtgtggtggaaaaaactattgcgcagcgaaggaaaggccccccattatattaaagtggattgggacaaatgggtcgatgaagacgaaaacaatggtcctggtgatattgacttggg

SEQ ID NO: 193154 - DNA, 396 bp, Gossypium hirsutum
gttggttgttcgtgaagtatatcgggccataacgggttacatgaaaatgatgaagagtgcctctgggaaagagcaaacagtgtttgatgctgacaactcgatgaataatatgaaacttccactcatctacctgatggattgcacattgaacgactgcagtttaatcctaaaatcagtaaaccagagggaagtttatcctgctctgatgttattccctgctgaaactgaagcagttatctcttacaatggagatgtgtcagtagctaatataatcaagtttatagctcatcatggaagtaattcccatcatctctatggtgagaaaggaattttattgacgaccgctgaagctgtgaagaatcaggctatactcaaggattcttctggagtttcagc

SEQ ID NO: 193155 - DNA, 840 bp, Gossypium hirsutum
  unsure (1)..(840): unsure at all n locations
cccacgcgtccgcccacgcgtccgcggacgcgctctctttaatgaatctccaaatcgaaatttaaggccaaaaagacacaagggttactaattaaattaatcttcagcgaatatgttggtttatcaggatcttcttacaggtgatgagctcctctcggactctttcccatacaaagaaatcgagaatggaatgttatgggaagtcgagggaaagtgggttgttcaaggagctgtcaatgtagatattggggctaacccttctgcagaaggtggtgatgatgatgaaggtgttgacgatcaagccgtcaaggttgtggacatcgtcgacactttcagacttcaggagcaacctgcttttgacaagaagcagtttgtgaccttcatgaagaggtacatcaagaacttgacacccaaattagagcctgaaaagcaagagtctttcaagaagaacatcgagggggctactaaatttttgatgtcgaagcttaaagatctccaattttttgtgggtgagagcatgcatgatgatggtagcctagtgtttgcatactacaaggacggtgccaccgatccaaccttcctctactttgcctatggcttgaaggaaatcaagtgctaaatggagttttcacccgataccggaccggctttgttatacctaaagacttagttttaattctagatataaggagttcttaactatctattttagtcttttttatctcttttaggtcatatttataatgtttggtttttgagggttatgaactattggttaaaggatatgcttgaggaataaaatttactgttttcngagctaaaaaaaaaaaaaaaaataaa

SEQ ID NO: 193156 - DNA, 409 bp, Gossypium hirsutum
cgacgcctgggggtggtcttaagttccaaccaaaagcaaacagcaaaagagagagggcgaggcggctaccgcatttaacgcttatccccttctaatttagaaaagaaatggagactttcaacatcccggcgacgccgtcattgatgaaggagttcctccgccagatgggaggcaccgctgttatcgacggtggactggcgaccgagctggaactccacggtgctgacctaaacgatcccctctggagtgccaaatgcctcctcacttctcctcaccttattcgctccgtacaccttgattaccttgaagctggtgcagatattattatcacagcatcctatcaggccacaattcaggggtttgaagcaaaaggcttttctagagaacaaagtgaaaacttgcttaaaaa

SEQ ID NO: 193157 - DNA, 705 bp, Gossypium hirsutum
  unsure (1)..(705): unsure at all n locations
aaatcgggcgagagctctcgcgtcaatttgtacttctttcaatccgatttgactcagttaccttgttttaaggcgtttttggctcgctttccggtcgttcgtttcgatggcgtcgacctcaaaccgaaccggtggcggttcctcctacggcggtgcggctccttaccgatcaagagatggtttaagcacgagaccggtggctagctccgatgagatacaattgcgtattgatccgatgcatgctgatttggacgatgagatctctggtctccgtagccaagttaaacaattgagaaacgttgctcaagagataggatcagaagcaaaatttcagaaggactttttagatcagctgcaaatgaccatgattaaagctcaagcaggggtgaagaacaacatcaggaaactgaacaagagtataatcaagcatgggtcaaaccatattgttcatgtggttctttttgcactgttttgcttctttgttgtctacatgtggtccaaagtatccaggagatgaagttcgcaagactgccggatacattgttgaacggggattgaaaattattcaccanagttggttgtgtataactttgtttgttcatgactttatcanctgtataattgaaaaaaacatcaatgtttctaggtttaatgctatggtaaaaacgctagttctttcatcctaaagagatgttttgcgtttat

SEQ ID NO: 193158 - DNA, 459 bp, Gossypium hirsutum
cccacgcgtccgcccacgcgtccgtgaaaattagctttttcctggccaaaagataactcagcaagtgctgttattgcttgccctggtgtctgtgccatggatgctattaccaaagccttttcttctaaagagacaacacgaaaataggcaccaaggccaatcctacgcaccactcgaaagcacagatgaaactctcctttcagtcgcaaatcatgattcccatggtcatgaccatgaggaatttgagtttagtgaagtctttgtgcatcaactgatccataccatagagtttgtgcttggtgcagtttcaaatacagcttcataccttcgtttatgggccctcagtcttgctcactcagagttgtcagttgtgttctacgagaaggttcttcttcttgcttgggggtataacaatataatcatcctcattgtcggcataatcgtctttattttcgcaac

SEQ ID NO: 193159 - DNA, 963 bp, Gossypium hirsutum
gaagcttgcttcagttgaagcacgcattctacctgcaccatggcttaaatatcatgatacgggtatagagaagaactgccttcctcaagttgggcaatggaatatgatgaataagaaaatggttaatggtgggactgtaaacaactggatctgcataaatttttctcggcaagtccaagatagtgtggcactaaggttttgttatgaactttcacaaatgtgtgcttccgctggcatgtgcctttactctctgaaccagtgcttctctccaattagtgctcgtcctgagcgtgtggagagggtcttgaaaacacggtatcatgatgccatgactaaactccagccccagcgcaaagagcttgacctgcttattgttattcttccagacaataatggctctctttatggtgatttgaaaaggatttgtgagactgatcttggtattgtttcccagtgctgcttgactaaacatgtatttagaatgagcaaacaatatttggccaatgtggcattgaaaattaatgtcaaggttgggggaagaaatactgttcttgttgatgcaatatcacgaaggatacctcttgtcagtgaccgtccaactataatttttggcgctgatgttacccatcctcaccctggggaggattcaagcccttctattgcagctgttgttgcctctcaagattggccagaggttacaaagtatgctggcctggtttgtgctcaagctcatcgtcaggagctcatccaagatttattcaagacatggcaggatcccgtaagggggactgtttctggtggcatgattaaggagctcctaatatctttccgacgagccactggacagaagccacagcgcattatattctacagggatggtgtcagcgaatgccagttctatcaagttctgttatatgaacttgatgctattcgtaaggcatgtgcctcgttggagccaaatta

SEQ ID NO: 193160 - DNA, 739 bp, Gossypium hirsutum
  unsure (1)..(739): unsure at all n locations
ctacgcagtgcacggttctaaatccggacctcagggagttgccacaataagggcaaaccttttaaattttattcattcggttaaatggaagcaactcaatccacattggggtcaacatttnatctccatcagtctcaagacccaattacatattaacnagatacgctctntaacatgagcaacgacgnggtccaatacacctcacacttgtctatcctaacccctgttcctctattgactgaccaccaacaattgaaacaaccttaatacctaaataatgtgcaaacttcatggtttcatcctcaatttgttgagcaagttcacgagtcggagccattacaacagcataggcccctcagcttcattctcttcactcataggaggtaatctagatatataagctaacataggcaaaacaaaagcagcagtcttacctgatcctgtctctgcaatcccaattacatccctttgttgcaaccccaaaggaatagccgccatttgtataggtgaaggcttcttatacccaactctttccactgctttcaataactcggcagtcaatttactctcactccaactcctcattgggcgtggtattttcgaccctttataggaaatattaaaatcttccctgaaaatcctccaatctctttcagtcatttcctcaagcttcttatcagaccaatgcttatcgaccctcatatcaaaagtatcataagtattcgctgcttcttctttt

SEQ ID NO: 193161 - DNA, 464 bp, Gossypium hirsutum
aacttggggttcaaaacccatatctatcatcctatcagcttcatcaagaaccacataattacactgattcaacaccgcataccgcctctctaaacaatcgagcaaacgaccgggggtcgcaataacgacctcacaaccttgtctaatcctaaacccttgttcctctattgactgaccaccaacaattgaaacaaccttaatacctaaataatgtgcaaacttcatggtttcatcctcaatttgttgagcaagttcacgagtcggagccattacaacagcataaggcccctcagcttcattctcttcactcataggaggtaatctagatatataagctaacataggccaaaccaaaagcagcagtcttacctgatcctgtctctgcaatcccaattacatccctctgttgcaaccccaaaggaatagccaccatttgtataggtgaaggccttcttatacccaac

SEQ ID NO: 193162 - DNA, 828 bp, Gossypium hirsutum
acagaaaacatggacatttttaaatttctgcaattagtacacccaatgtgtgttctaatagcacagcaatatgcatccacacacttaatggtttgattttctttcgaaagcaaagcactaactcgagttccctgcactcttcattgtgttacacttccatgaaagtattccgttacaaattcggctatgtagagcccagcttgtctcacctttcagttctctggctgattgttgagtcagcagggtggtacggtccgataggcggtagggcgagatagttgttcatatatttgcagcacttaaggccattactttgcattgttcattcatggccaaaagttgagcttctttcttgtcgagaagtgcggtcaacctcacattctcttccataagcttctgaacttcagtctctttctgctttttctcgccctcgagctgcgttgtctttgcaactagtcgttcaaagagccgctcgatggtttgaaactgcttctccgatgaaagaagagtttctcttacactaatgagactactaacataagatttcaaggactcgaaatcctgcttcacacgagtaagctcctgttcgttttcagcagctcgttgcctctgtctcgaagtttcttcgaccaagtcctcaaccctctgtctcatttcgttaagaatactattcgtaccgagagcaaacctttccatctcttctaacttcacagacatattctctatttggaccccgtttccgtttaatttcttcttgacctaccctcacgttttctttctcaagagcagtaagagattcagccataatgcccctcttaacaataactt

SEQ ID NO: 193163 - DNA, 576 bp, Gossypium hirsutum
  unsure (1)..(576): unsure at all n locations
aaaaaaacaaaaaacatatttccagaaacaaagaggacacgacaaatcccctccgttcttcagtttcttcctgacaaactaagaagaaaaaaatggctgtctcttcggccacattttccacttttgtctcgccccaaacggtgtcgttctcgggcaaaccctcttctctccgtcttcttcatccaactaacgtgcccttggtccgaaccctgactcaaggccacggcttcaaagacggacagcggtccccggaagccgcgtggcatattgaagccccgccctgtgtcgcctgagatgcaagctctcgtgggagtcccggaaatccctcgaactgaagttcttaagcagatttgggcttatattaaagagcacaatcttcaggaccccaataactagaggtttataatttgcgatgaacagctgaacaagatattcggaggcaaagatcgtgtcgaatttcttgaaatcgccgggttgattaatcctcactttctttgatggattctagagaaggcgagagagagcanaatcagtttgcgaaataggcaaataacctttgtctattggagcctatct

SEQ ID NO: 193164 - DNA, 588 bp, Gossypium hirsutum
ttctctcacaaatccccttcgctcttcagtttcttccccacaaactaagaagaaaaagtgaagaggaacaaaaatggctgtctcttcggccacattttctacttttgtctcggccccatacggtgtcgttcttgggcaaaccctcttctttccgccttcttcatcctactatacgtgcgcatggtacgaaccctgactcgagccacggcttcaaagactgacaccggtccccggaagccgcgtggcataatgaagccccgccctgtgtcgcctgagatgcaagctctcgtgggagtcccggaaatccctcgaactgaagttcttaagcagatttgggcttatattaaagagcacaatcttcaggacccctataacaagagggttataatttgcgttgacaagctgaagaagatattcggaggcatatgatcgggtcgaatttcttgaatatcgccgggtttgattattcctcactttctttgatggattttatagtatgctatagtgtgtaattttatgtttcgatttatgtcatattacttttgttttattgtatcctattttttttatgttgttattttttttttt

SEQ ID NO: 193165 - DNA, 742 bp, Gossypium hirsutum
  unsure (1)..(742): unsure at all n locations
gtctcgagttcatttgaccctcgcgtccgaaaatttctgaatctttatttggtccaaattcgtgttcacagttgagttcgcagcgatgtcgaacgagtacgagttcgccgataagggggacaagattatctatgaaaccgaagccaaagggttcaacccgggattgattgtattgctggttattggtggactactgataacattccttgtggggaactacatactttactcgtacgcgcagaagactcttcctcctaggaaaaagaagcccgtatccaagaagaagatgaaacgagagaggctgaagcaaggagtctcagcaccaggggaataggaattcaaggtccgacttttctcttttttcgacattgttaaaaactgttttgttcacaatttctgtccagtttcgagagttaaaaacttcaacatctgaattagaagtaaaccccatactcgggtaagactagagagtaaaatactgttcctttgttcgtcggatgcagtttatgtgtcacattttcattgcatgtttccattgatctcggtacttgtctcgtttcggtcagccgtcaacatgcaaccaaggtaatggctatacttgggtgatgtttacttgatagagatatatctctaagtattcaccanaagaagccattggtgcttcatagggttactttttttttgttagtagcgtcagatattagtgttcaaactttggattatttgaatgcatgccatgttg

SEQ ID NO: 193166 - DNA, 400 bp, Gossypium hirsutum
ttgttcgtaacctctaacttaacccgacccgcgatcgctttttccgcgaaccttcttgaatcttccgtcgattccgataaccctagaaggagcacttcattcttcaagtttagcaatggagatgaagtcgaagacactactcatactatacgcaactcagacgggaaacgcattagatgtagccgagcgtattgcacgagaagctgagcgaagagcctgcaccgtcgttattcgttcaaccgacgattatgaggctaattcgttgcctgctgaagacactgtcatttttgttgtttctaccacaggccaaggggatactccagattctatgaaggtattttggaggtttcttctgcaaagaaatcttggcagccattggttggaaagaattcactatgca

SEQ ID NO: 193167 - DNA, 790 bp, Gossypium hirsutum
attctaatggctgaacctgaccatgtatttgtaaatcccgggcctgacttggctcgtggaaggcatccagcagggtttcctttcttttacattaagccgtctgaccacgagcatgttattaggaagtattatcctgaggagaagggtcctgtgaagaatatcgatccaattggcaattctccagtgattattagaacgtctgtgctggagaaaattgcacctacatggatgaatatttctttgaggatgaaagatgacccagtgactgacaaagcatttggatgggtgctagaaatgtatgcatatgctgtggcatctgcactgcatgacgtgcaccacatacttcataaagacttcatgctccagccaccatgggatacggaagtagggaagaagtttataatccattatacttacggatgtgactacaatttgaagggagaattaacgtatggaaagattggagaatggcgtttcgataagagatcgtaccttagtgggcctcctccaaggaacctctctttgccccctccaggtgttcctgaaagtgtggtgagacttgtgaagatggtgaacgaagctacagagaatattcccaattgggatacactaaatcgtggctgagatctgatcttactaatctgcgcatccattttgacgctggtatcaatctgctttccaactagagttatggacatgaaatacagaggtagctgagacagcagtatacatagagaaaagggtatgtttacaagttaaaggagggatatatcatttttttacacttata

SEQ ID NO: 193168 - DNA, 611 bp, Gossypium hirsutum
ctttctttaatcattgtttgtttttcttaggtgcgttaatagtttcaaccccacaagatgttgcactgagtgatgctcgtagaggagttagaatgttctctaaagttcaagttcctattttgggattaatagagaacatgagctgcttcaagtgtccacactgtggtgaaccttcgtgcatctttggtgctggtggagcccgtaaaacagcagctgagatggggttgcaacttgttggtgagatacccattgaattggacattaggaaaggctgtgacaaaggcatgccgatagtggtatcagcacctgattccgctgtctccaaggcttaccatgatgtagctcaaactgttgtcatgagacttgaggatctggcaaaggcatgaaaatactcttgaggttggtcagtgaagtttgcttgtgccaaccatcttcattcccgtgttttcgtggtggtgctttgttcatcctgatataaataatttttaagtttgagcatttttggtcatgcgatgacaatattaagcatttgggaccatagtgattaagaaacttatttgatgaattacacactcagaccagtttagctaggagcatacgatttacagtct

SEQ ID NO: 193169 - DNA, 1142 bp, Gossypium hirsutum
  unsure (1)..(1142): unsure at all n locations
gatttatctagagatccgtcgacaatggtaggaggggtcgaagtaggcgccgttccgtttaatcctgacggctggggtccgcccgactccaccaccgccaccgcgccgtccaccaccaccactctccctcttcacgttcctttcgctcccttctcccgctctgaaaaactcggccgaatcgccgacttcacccgatcttttgcaaatgccaatccatctaaccgcccttcttcagggaagcctggcgcagcctcctcagagtcccccttcgatttctcgctcgacctcgatactttccctcttgcaaaccccgaagacgattcttcctttcgtttagtcgacgcaaagccgcctactcgacctaaatttggccccaagtggcgcttcaaccaacaccgacctcaacttcctcaacggcgagatgaagaagttgaggcccggaaaagagaagctgaaaaagaacgagcccgacgcgaccgtctttataatctcaaccggtccaatcagaaccagcaacgtcgtgaagctgccatcttcaaatcctccgttgatatccaaccggaatggaacatgctcgaacaaattcccttctcaacattcaccaaattatccttctccgtctccgaccccgaagatttacttctctgtggtgctttggagtattacgataggtcctttgatcgaatcaccccgaagaacgaacggagactcgagaggttcaagaacagaaacttctttaaagtcaccacgaccgacgacccggtcatccgaagattggccaatgaggataaagcaactgtttttgcgactgatacgattctggcaactttaatgtgtgctcccaggtctgtttattcctgggacatcgttggttctacgttgttgggaataaactgttcttcgacaaaagagatgggtcgcagttagatttgctgtccgtccacgagacctctcaggagccattgcctgaagctttagatgatattaactcctgcttattcactgagtggtgaagcggcttacttaaatcagaattttcacagcaagttctgatataggatgtgatnatgtgagtntgatgacgcatatccgtcgcaatgaagggataagtagctctgtgcatataggttgaaggtgaagct

SEQ ID NO: 193170 - DNA, 605 bp, Gossypium hirsutum
  unsure (1)..(605): unsure at all n locations
aataatacaggtaatggcttatctggggttgtcaaaaaggatgcaaagagcagtggtaaaggtaagaaaaacttgtcatttttccggacgggggccgangtgttcnatctggacaatttgttgagagcttcancaaaggtgttagggaagggaacatttgggacaacctataaggccacattggagatggggttggttgttgcantgaaaaaaattaaggatgtggcggtgccagagaaggaacgcgaggcaaaaatggtggctgtcggagccatggatcaccacaacttggtcccgttaagggcgtattacttcagtggggatgagaagcttcttgtttatgattacatgcccatgggaagcttgtctgcacttttgcatggcaacaaaggagctggtaggacaccattgaattgggacacacggtcaagcattgcacttgaagcagctagaggcattacatacctccattccaagggaccattaatctcacatggaaacatcaaatcctcaaatatcctactcactacatcctacgaagctcgtgtatccgatttcggtcttgctcagtttgctggccccacatctaatcccaaccgtgttga

SEQ ID NO: 193171 - DNA, 1004 bp, Gossypium hirsutum
cccacgcgtccggcaagtttgttgcaccaattacccgaaattcaagacgaatgttggggtggaggatgagttcctacctcggcaaagtggtgatcttacaattatgggtgatgtgacgagaacgtacgactcgaactattgggcacaggttactatctcaaaccataacccccttgggcggcttgataattggaaattgagttttgattggatgagggatgaatttatatatacgatgaaaggggcttatccgtatgtcgttgattcatcagactgcatatttggtccgcaaggacaacactatagggatctagactttggcaatgtgttgaactgtgagaggaggccgacgattattgacctgcctctgacaaaggcaaacgatacaaccatggggatgatcccaaaatgttgccggaatggtactattttgccaccaacaatggaccctagcaagtcaagttcagtattccaaatgcaggtctttaaaatgccaccggatctcaaccgctctgagctctctcctcctcagaattggaagatcaatggcacgttgaaccctaattacaaatgtggtcccccagtccgtgtaagccctagtcagttcccagacccaagtggcttgccgtcgaatacaaccgttgttgctagctggcaggtggtttgcaatattacacggcccaagaacgcaagcccaaagtgctgcgtatccttttctgcatacttcaatgaatcagttgtcccatgcccgacttgtgcctgtgggtgccctcgcaactcagccaacacttgtagagcaaatgctacagctgttcttgttccacctgaggcacttcttgttccatttgagaaccgaactgctataaccagagcttgggctgatcttaaacactttacggtgccaaatccaatgccgtgtggtgacaattgtggggtcagcataaactggcatctttattcagacttctttcgaggatggtgtgctaggatcacaatattcaact

SEQ ID NO: 193172 - DNA, 394 bp, Gossypium hirsutum
gttgggggaggaatatatacgaaagcagccgatgttggtgctgatcttgtcggtaaagtcgagcggaatatccccgaagatgatccacgaaatccagctgttattgccgataatgtgggtgataatgtaggagacattgctggaatgggatctgatctatttggatcttatgctgaatcatcatgtgctgctctttttgtggcgtccatatcatcctttggtatcagccatgagtttacagcaatgtcttatcccttgctcattagctcaatgggaattgtggtatgtttgataactacactttttgcaactgatctgtttctgatcaagaaaagtacgtgtcatcctaccgtcattcaaaccacaactgcttatctccaccggtctcatgaat

SEQ ID NO: 193173 - DNA, 804 bp, Gossypium hirsutum
  unsure (1)..(804): unsure at all n locations
taagtaacaagttaacaaaatgggacctggaaggccgggaggagggcccggaggaccttgtggacccggaggattgggaggaagaccttgtggttggggtccttgcccccgaggaacttgcggatttgggcctggaagtcctggtttgggtcccggacctggaaggtccttgggcccttgatttggaaggccttggttttggcctggtggggtctttggcggctttgcaaatggtttgtgcaatatgatatcttccctgctctactgtctttgctggtgttggctactacaagactgctttggtcgacgccctggctatggtcctcgccctttctaatcatctgctggctgctgttgctatacatgtgttttctgtagtgccttgtaataaatttaataatctagttttaagctttttttcgttgctcttgcttccgccactattttcatctattaccatccaaactttatcnaaagtatnaatgtgactgatttctanggggaagttcattntctttttctagaaaaaaaaaaaaaaaaaaaaaaaaaaaggggggggagccgaattaagcccgaagggcaagcgcctaatttggttgcttgctgaaattntcagtatccataatgtttacccactgttttaggcgaaactaattggggnattattctcctttattcctttaacttgataatttatacttctttaaaaaaanaaaactcagggggccccgtccaatcgctatgggtcgatacattactgccggtttcacgcggatggaaactggtaccaatatcgctgagcat

SEQ ID NO: 193174 - DNA, 472 bp, Gossypium hirsutum
atttttctcagcatacgatcacttgctttcggttaaatttggcaatgattcctaccatctttggcgacaacaggcgcagcagcctcttcgacccgttttcgttggacttgtgggatccctccaaggagttcgatttcccaacagtcacatcgtttccttcactttcccgagaaaactccgctttcgtcaacacgcgcgtggactggaaggagacaccggaggcacacgtgttcaaggcggacctcccggggatggagaaagaggaggtgaaggtggagatcgaagacgatagggttctccaaatcagcggagagaggcacgtggagaaggaagacaggaacgacacgtggcatcgagtggagcggagcagcgggaagttctcgcggaggttcacgttgccggagaatgtgagaatgggcgacgtgaaagctttcatggaaaatggggttcttactattacttgtcctaaaag

SEQ ID NO: 193175 - DNA, 1169 bp, Gossypium hirsutum
  unsure (1)..(1169): unsure at all n locations
cggaaatccaaggtctccaaggggtgcattaggagtatcaaatctgaagacgggtgaaaatgctgctgggagcagtaatcttgaagaatctggaggatcgagttcccgaaggaagcaaaataaaggcttctccaagcaacagtcattccataagcagagatttttctccggcaattcaaagaatcatggagctagtcgtaattccattgcaataatatcagaaagtccaccaagtaattcagttggatatttctttggttctactcccccagatagtcacggccctaggccgccttcgaagttgagctgttctccgcatgggactctttccagcagtccaccagtcggttccctgccaaagtcattcccgccttttcagcatccaagtcatcagctgttagaagaaaatggttttaagcaacagaagtacctaaagtttcacaagcgctgcctgaatgacaggaagaagccgggaattggttgcagtgaggaaatgaattcgctgtacaggttttggtcgtatttcctcagggacatgtttgtttcccccttctatgtacaatgagttccggaaacttgctcttgaagatgctgctgcaaattacaattatgggatagagtgtcttttcagattttatagttatggtctagagaggaaatatcgagatgatctttataacgattttgaacaacttacccttgatttctatcataagggcaatctttatggccttgaaaaatactgggcattccatcacttccgagatcagaaagaaccgataaagaaacatcccgaactggataggttactgagggaagaataccggcgattggaagatttccgtaccaaagagaagaatactagtagcacaagagaggagcgccattgatgagtgacgtaattgatccctagtgttattgaaccccaattttgacaagcaactctgatgactggatcagagagtaggaaggagttcaaggtctatatgaattatgatttggtttatgaatgcagagggaagatgagttgtgggtaatgtatattggaagggggtcagataaattctggtgcggctgncgattctggaggctatccatttttggggttcctgatatttgtgtaggctttttttggctcgaggggtatatctttttttcttgagtgatct

SEQ ID NO: 193176 - DNA, 644 bp, Gossypium hirsutum
cttacgctaccggcgcctctcccgatttcttcttcttcactttgaggtttgagcagatcggatggcaccaaagaaagataaggcccctccaccttcttccaagccagcaaagtctggtggtggcaagcaaaagaagaagaagtggagcaagggaaagcaaaaggagaaggtgaacaacatggtgttgtttgaccaggctacttatgataagcttttatctgaggctcctaaatataagctcatcactccctcaattttgtctgatcgtatgaggattaatggatcccttgctaggaaggctataagggaattgatggcaagaggatcgattcgtttggtgtctgcccattcaagccagcagatttacactagggcaaccaacacctagatgttttgttatagttttgcttaaattagttctatgtagtatttgcctttcttgactttctgtgaacgatttttccttttgctaaagacctccatctataatgtgtgagctacagtttcttgttgttctggtttaatggataattttttgttcctcacaatgagattgatatgtggtttattttgttcaatcgcatattggattgtcatacatatatgtgtgtattgtgtgtaaagtttatgggatatttgtgatg

SEQ ID NO: 193177 - DNA, 723 bp, Gossypium hirsutum
gacctatgcatgagatggcacacattgccaaaggccaattcatggcaattgcgtttccctcctgcgtgccagtgccatgaacgcaaatcagagcagcatgctgatattgcaggaaacatgcatagacgcagcagggtcgcttgtagtgtacgcgccagttgatattccagccatgcacgttgtcatgaacggtggtgattccgcttacgtcgcacttttaccttcgggattcgccattgtcccggacggtcctgggtctcatggacctatctctaacggacatgttagcggaaacaccggcggagggtcgtcaagagtcggtggatcgcttctcacggtagcttttcaaatattggcaaacagtttaccaacggctaaactgaccgtcgaatcggttgaaacggttaataatctgatttcgtgtactgtccaaaagatcaaagctgcccttcaatgcgaaagttgatgactcagtgagttgggtaattttagttattaatataggttgtggttgtggttaaagagtgtgcgactcagttagttgggacgagtggggggtattgagtcaagaacgaaccgcgcgtggagaatcatggtatgggggcgatcgaagggacaagggtggtggctcgggtattgactcaggtcaaccctttgagttggctcgccggggaccaaaaaagaaagtcaaaactcaaacagcgtcgtatttggtgtactaat

SEQ ID NO: 193178 - DNA, 783 bp, Gossypium hirsutum
  unsure (1)..(783): unsure at all n locations
gcttctattctcaactttttttttcttttaatccttcaaattggccaagttgctggaaaagaaagactgagaagaagaacaataataaaagaggaaaaagaagacttaaaaaggcatcatcagtgaaaattttcgagcaactagagacgctgaataaaacaaagaaaacccaaattgacacaggaaatcagattccattgaattgcagatctcttttagcttttgctagttcttgttttgtatatatgggtggttgtctaggatgctgtgcgaggcccattttcaatcccttggtgaatgagtcatcaaaaggattaaaatttcaaggacagacagtgagtaaacccagcatatcagaaggtttctggaccactagcacttgtgatatggataacagtgctgtgcagtcacagggaagcatctcctcaatcagcacaagcaaccagacacttgatccgcatggcagtgctgcaactgctaatgcccccgccgaatttgtaaatcatggccttcttctctggaatcaaattaggcagagctgggtgggaaacaggaggtctcaaaatcggaagcaattggttcaagaacccaagctaaattggaatgcaacttatgaaaatttacttggaagcaacaagccattccctcagcctattcctctttctgaaatgatagattttctcgtggatgtttgggagcangaagggttgtatgactgaacaacaacagtacaactacatttgagagatggtgagatatcnatatttatcggacttgtggtac

SEQ ID NO: 193179 - DNA, 615 bp, Gossypium hirsutum
gcggccacgcgtccgttctcgctctctagggttttcgtggtcaagtaaaaaaaatgaaggtggtagctgcctacttgcttgccgtcttgggagggaacctttccccttctgccgatgatttgaaggatattctcggatctgttggagctgaggctgatgatgataggatagagttgctattgtccgaagtcaaaggcaaagatatcaccgagctaattgcatctggaagggagaagttggcttcagtcccttcaggtgggggtgctgttgctgctgctcctaccgcaggtggcggtggtgccagtgctgcaccagctgctgaggccaagaaagaggagaaggtcgaagagaaggaagagtccgatgatgatatgggtttcagcctcttcgattaagccaagtaatgcaaatgtcaaggtttttcttatgcggttagtgcttttatttcaagcggtatatgattttgtatgtttgttactctctggtcgaaagttgtttctttatcaacctttaggttcgagttttctttggaaaatgtagttaaagataatccattcaagttgtaactttaattttggattaaaacaaattattatctatgttttatgtgtttgg

SEQ ID NO: 193180 - DNA, 373 bp, Gossypium hirsutum
gcaaaccctagcttcttcgttttcctccgcggctccatttccactctcgttccctcaatatcgaagtaaaaatgaaggtggtcgccgcttacttgctcgccgtactcggaggaaacgcttccccttccgccgatgacttgaaggtgtggaaccaaagcaaagagaaaaggagtaggggaattaaattttataataatggaagcagcctcgtgctgtctcgagctttgtgaggaattgagaaggaaagaggatgcaatagcacgaggtatgatcatgggtgcagcagcttcaactgaaaagtacttgtacaggaattaaattgacaattgtagtatgcttgtagttaaagtttcttatagtgaacatcatgttg

SEQ ID NO: 193181 - DNA, 446 bp, Gossypium hirsutum
aaaccctagcaacacactatttcatcctttcttatatcaaagtgcaagccctagcttcttctttttcctccgcggctccatttctcgttccctcgatatcaaagtaaaaatgaaggtggtcgccgcctacttgctcgccgtactcggaggaaacgcttccccttccgccgatgacttgaaggttattctcggatcagttggagctgaggctgatgatgataggatagagttgctattatccgaagttaaaggcaaagatattaccgagctaattgctagtggaagggagaagttggcttccgttccttctggtggtggtgctgttgcggttgccgctcctgcaggtggtggtggcagtgctgctgcacctgccgccgaggccaataaagaagagaaggtcgaggagaaagaagattccgactatgatatggggtttaggccttttg

SEQ ID NO: 193182 - DNA, 831 bp, Gossypium hirsutum
cccacgcgtccgatgagttatcaagtattaagaaacaaattcttgaaggcttttcaccggatggtgcatacccattcggtgctccattgtttatggagaccccaagaccatgttccccacttgcgcagatggagtttctggcatttgaagagattatgccacttgctgcaataactgatgatgaagcctttcctgaaggcaatggaagtcaatcaggtcgcaaagcatcactatcgctcagtacactagatgtgctaagtgtcaatgagcttttggattcggttctggaaacagcgcgacaagtagcaagcttttcagtttcgcctacacccattccttatgaacaaatgaggagtcagtgtgaagctcttataataggtaaacagcagaagatgtcggtgattcatagcttcaagcatcaacaggaagccaaggcaacctttgaggaaaatggaaaggaggtcctctgtttaccgaatgtgaaagttgagttttcagaagatctcaagttgattagcaacgagcaagttcatgcaaggggacaacttgccctctgttcattggagtatggacaacattcattcaaattaccgccatcaagtccctatgacaagttcttgaaagcagctggatgctaaaaaggaagtggagttttcagtagatctgaagttaattagtaagcaacattttttcaggttactaccatcaagcccatatgataagttccttgaaagcagctggatgctagaagttggagacgtttcatacatgcatatacacatattttatgtaataatccagacaattgtcaattccttcaatttttttttt

SEQ ID NO: 193183 - DNA, 662 bp, Gossypium hirsutum
tcgaaatgtcattttggataacaaagtgcagcaattggaaaacaagataaagatgcttgaaggagagttgagagaagctgctgccactgaggctgctttgtactcggtagttgccgagcatggaagctccatgagtaaggtgcatgctccagcccgtcgcctttctaggttgtatcttcatgcttgtaaggaaggttcccaattaaggagagggagtgctgctaaaagcgctgtttctggacttgctttggttgcgaaagcatgtggaaatgatgttccaaggttgatgttctggtggtcaaactgtgtcgttttgagagcaattataagtgaaagtactgttggatgcacggaaagaaatggagttgagaaggggaagaaactggcatcatctccattgaaatggagagaatcctctcctggtagaaaggaaaataaaagttttagcgactgggacaacccgcttgcctttacttcggccttagaaagggttgaaacatgggtcttttctagaatcatcgagtctgtctggtggcaggcactcactccgcatatgcagtcggagggcaaaaaggaaatttatgaaggcaagggctctggttcaagtaaaagctatgggaggatacctagttcaagtaatcaagaccaagtgaacttttcat

SEQ ID NO: 193184 - DNA, 728 bp, Gossypium hirsutum
cccatttttccgcccacgcgtccgtcgcggcgcctcccccaactttacaccagcaaagcaaaagcttcaccaatggggatcgatttagtcgcaggaggtaagagcaagaagacgaagaggacagcccccaaatccgatgatatttacctcaaactcctcgtcaagctttaccgtttccttgtaagaagaactgggagcaaattcaatgctgtgatattgaaacgcttgtttatgagcaaagttaacaagcctccactatctctctctaggcttattgaattcatgaagggaaaggaggataagattgctgtggtagtggggacagtgacagatgatattagggtttatgaggttcctgctttgaaggttactgctcttaggtttactgagactgctagagctaggattgagaaagctggtggagaatgcttgacttttgatcagcttgctttgagggctcctttgggtcaaaacacggttctcctcagaggtccaaagaattcccgtgaggcagttaaacactttggtcctgctcccggtgttcctcacagccacaccaagccatatgtgcgctcgaagggaaggaagtatgagagggctagaggaagaaggaacagcaagggatttagagtttaatattacttcactacttgattttgaggcctgtttgttatttaggttttctctttcagttgttcacttgcttatgtttgcatcttattcatgga

SEQ ID NO: 193185 - DNA, 643 bp, Gossypium hirsutum
ccctcgcgtccggtagtagcaaatattcacatggaacctttcccctcttcggccttcaaagcccacgcgtccgttgaaacgcttgtttatgagcaaagttaacaagcctccgctatctctctctaggcttattgagttcatggaaggaaaggaggaaaagattgctgtggtagtggggactgtgacagatgatataagggtttatgacgttccagctttgaaggttacagctcttaggtttactgagactgctagagctaggattgagaaggctggtggagaatgtttaacttttgaccaacttgctttgagggctcctttgggtcagaacacggttctcctcagaggtccgaagaatgcacgtgaagcagtcaaacactttgggccggctcctggtgtgcctcacagccacactaagccatatgtgcgctcaaggggccggaagtttgagagggccagaggacgaaggaacagcaaggggtttagggtttaagatgacttcagtgtttgttctgaggcttgtttttcatttattactgcaaacaaaattttgctatgcattaggtttctctggcatttgtttacttcatgttggattttgtttacttatggagtagttttctggttgacattgactatctta

SEQ ID NO: 193186 - DNA, 931 bp, Gossypium hirsutum
catatggggaatttcatggctggttctcctttttcagctggtgtaattgcagctgatggtttggcagttcattctcgtagccatggtggaggatttgctgttcagactgacccttgcatgggccgtgtctgttcgcgtacatggatgctctgaggccgcagaatccaccatcagtctcaagatgcagaacaaaaccttgatgtcgtcaaggatgcagccactgatatttcccaaaccgtttcaagacgagacatggccacccaaatgagcccacagagtagcacccactcgtctcccaaaggaaggccttccttctctccctcttccccttcagctctacctatcatggaactgcagagcatccatggctctaaatcagtactgagagatgtgccagtagatgaaagagtgaccctgactaggtggtcgaagaagcatagagctcgaaacactgggaagagctcagaaattgttgatgattggagaaagaaagttgtagatacttgtacatcaacatgggatgttacagagacaggaaagagcatttccaagatgaaaagagaagaagccaaaatcactgcctgggaaaatctgcagaaggctaaagccgaggcagccataaggaaactagagatgaagctggaaaagaagagatcgtcatcaatggataaaataatgaataaactaagatcagctcagaagagagcccaagatatgagaagtttgatgctggccaaccaggcccaccaggttacaaagacctcgcatatggctatatctttcagaagaacccgccagatgagttcattgagtggttgcttcacctgccaagctttctaatgcatttgcttatctatctgttactggttgaatcaggcctgaaatgcaggtttgaagaacagagacctctggagacgatgaatattgcaca

SEQ ID NO: 193187 - DNA, 693 bp, Gossypium hirsutum
ttttatttctcgcaagcagcttccgccgcagggaaaataataatggaggcagcgagaactgtgaaggacgtttctccccacgagttcgtgaaggcctacgccgcccacctcaagcgctccggcaagattgagcttcctccatggaccgatattgtcaagggtggtaaattgaaggagcttccaccgtacgaccctgattggtactatataagagctgcttccatggcaaggaaaatctacttgaggggaggtcttggtgttggtgccttcaggaggatatatggaggagccaagaggaacggtagccgcccacgccatttctgcaagagcagtgggtctattgctcgtcatattctccagcaattgcagaatgtgaacatcgtcgatcttgataccgaaggtggtaggaaaatcacatcgaatggccaacgggatctcgatcaagttgctggaaggattgcagttaccctctgagaaatttcactatatggattgagttaagaaaaattagtttgtttgcaagattactgttttatgagatggtgttaaaatcagttctgtttgtgtccatgtctggtatcttccattctatatctagaatttttgttttcaagttcattatggcttttttgttgactatgaccttaaaagttttgaaacttgcttttagaaaaatttactagtgaaatgatc

SEQ ID NO: 193188 - DNA, 639 bp, Gossypium hirsutum
ctcgcaagccgcacacggagtgatagtcgcagcacgcgataaaaatggaggcagccagaaccgttaaagacgtttccccacacgagttcgtcaaggcttatgccgcccatctcaagcgctccggcaagattgagcttcctccatggactgatattgtcaagaccggtaaactgaaggagcttccaccctatgaccctgattggtactatgtcagagctgcttccatggctaggaaaatatacttgaggggaggtcttggtgttggtgcctttaggaggatctacggaggagctaagagaaatggaagtcgcccacgccatttctgcaagagcagtggatctgttgctcgtcacatacttcagcaattgcaggatgtcaacatcattgatattgatcctaaaggtggtaggagaatcacatcaaacggccaacgggatctggaccaagtagctggaaggattgcggttgctatctaagaaattttaactttctgtttttcatgttcctgagatttagtcgtttgaaaattgggttttcataggaagctgttttaaacattttccgttttggtatattaagttctgaatttattttgattttgatttttattgaaaactgatgtatgctatattttctttc

SEQ ID NO: 193189 - DNA, 702 bp, Gossypium hirsutum
cggccgcgtcgacaaaagacggagcagacagtcagataagcagagaaaatggaggctgccagaactgttaaggacgtttcccctcatgacttcgtcaaggcttacgccgcccatctcaagcgttccggcaagatcgagcttccttcatggactgatattgtgaagactggtaaactcaaggaacttcctccctacgatccagattggtactatatcagagctgcttccatggcaaggaagatatacttgaggggaggtcttggtgttggtgcctttaggaggatttatggaggggctaagagaaatggaagtcgccctcgccatttctgcaagagtagtggatctgttgcccgtcacattcttcagcaattgcagaatgtgaacatcattgatattgatcctaaaggtggaaggagaatcacatcaaacggtcagcgtgatctggaccaagtagctggaaggattgcggttgccatctgagaaattttaagagagctgttgccgaaggctgtgttaatcaattttcgtgttggtccatccgctacgtgggaattttttttttttaaattttaattttagaaaccaatgtggttggtgtttaactatgaccatgaattttgaattctaatggaagattgaatggtgaagttgcccttctgcatgtttacagctttcattctcaaaaagaaaaaatataaaaag

SEQ ID NO: 193190 - DNA, 696 bp, Gossypium hirsutum
  unsure (1)..(696): unsure at all n locations
cccacgcgtccggccgcccaaagaatcaaatctctgctactgcatagtaaaagagagaaagagcgacaatggaggcagcaagaacagttaaggacgtttcccctcacgatttcgtcaaggcttacgccgcccatctcaagcgctccggcaagattgagcttccttcatggactgatattgtcaagaccggcaaactcaaggaacttcctccatatgatcctgattggtactatatcagagccgcttccatggcgaggaaaatatacctgaggggaggtcttggtgttggtgcctttagaaggatttacggtggggctaagagaaatggaagccgtcctcgccatttctgtaagagcagtggatctgttgctcgccacattcttcaacaattgcagaacgttaacatcattgatattgatcctaaaggtggtaggagaatcacatcgaacggccaacgcgacctggaccaagtagccggaaggattgcggttgccatctgagtaacttttaatacccaaatttgcttgtttttgctgttaagcaattttcattttaggtaccgagagagtgaagacatggaatatttttattttagggtttgttgacttgttctctctttatcaccgtcgatcttgaaccttgttgatgaaaactcgaatctttanaatttgcctttntttattgtctaaaannaaa

SEQ ID NO: 193191 - DNA, 652 bp, Gossypium hirsutum
gcattgaagaatcatagaagagcaagttttacttttacatggcaaccttgacttattagttccaaaaagtcaaactgaagtggtaaccgaatacaagcatcaaaaggaaactcacatttttcctgcagcaatagcagcttgcacaaaatcctcacaccgggaaaatccacccgataaaacatcacccaaggcaccaatgatgtcgaaagcctcttgcaaatcacttgcagaagtcatgtcatcgagccatgagagcaactctttggagaaccctatcatttccttcacattcaacaacctctctttcatcaccacctcccaaccttccaacccttctccttcggttccggttgaggttccttcagatttgcctttggtggctgccaaacttgatgatttcttaaccttgaatatttgctgcaactgctcaatcaagcctgtatacaccagcatgggtcgaacaattgacagcagctcatcaccaccggtttctgaggtggaggtgggacttttgctgctacttgctgattctatcttagctgttgaccggccatgagtatgctgcatgtaggcatgatatattccacgctgcaagaagtcacgtcgctgttgcaaccatgactcataggactctgaaagcagtgaatttacc

SEQ ID NO: 193192 - DNA, 670 bp, Gossypium hirsutum
acagaaccaccgagaagcatcatcccccaacaatagaaagagacagactgtgttccaaattctaaaaaccaaagcgaaaatttagaaagaaaatcactcctcccatgttttaacttcaacgctttaacaacaccaattacataaacaaagcaaaacccaattatttttctccttttcttcccatttctggtcatccatttttcttttaagccactcttcttttgagttcatataaacttcaactcaatacccccaagaaaacccagaaaaaaagatcacaacttcggttattaaagagtcttcgtttattaaagagtccaaaagggagggactttttgggttttgaaggagaaatggcaagtggggatcttgaaagaggaggaggaagttatgtgaagaaccgggggatatctttacccaaaatatttttttttgactactgtggggaaaatgtggaaaaatggggtttttgggggtttcccacaatttagtgggggatattaatgctgttttgtgggggagatgttgtaaaaacgggccaacaaacatggggtttagaaggtggtgggtgaaaggttctggaggctttttaaacctttgaaagaactcttttgggccttttaaaccggggaaaatgggcccttcgcgaaaaggtctctgggaacagggg

SEQ ID NO: 193193 - DNA, 437 bp, Gossypium hirsutum
gaaaagcattcgactttgcaaacagaaggggcgtcaaagaaccgtcttctctgcctctacggtaaccgtatattactcatacaaattgcaaagcaaaaccaagaaatccctcacatacaaaaatgggtgattcaaaggtcgaaaccatctccagattagctcaatggaggatcgacaactttagtccttgttcttacaaaaaatccgaccccttcaaggtcggtctttggaactggcacttgtctatagagaagaatcgatatatgtatattcgattatttcccgagccatctcgtgtgtctaaggagcagcctccttatgctaaatttatactcaggatctctaatgttggtgctaatcgtagactttatatctccccagttcatgatagaccgctgcgaacatgccatgaactttattggcctgttgattctaca

SEQ ID NO: 193194 - DNA, 920 bp, Gossypium hirsutum
ttcttcatcctccagcaatgaatggcgtacaaattgggagattttgatttggatttccctattcgggattcttgatacattgtccattgagagtggattctaagcaaagtctcgtctcacattatattcaaagaaaaaaaagttacctcgattcttgttcatccaacagttcgacaacaacagcgacaacgacaaccaaaaagttatggattaaaccaagcactgaactgaattgaattgaattgtgctctgtgttggagttgaagatggatagaaggagttggctatggagaagaaagtcgacagagaagagtccaggcgaaactgagagttcaggaggttccatttcatctttttctgaaagattctctgatgagcaggctagcgccaccattagttctcaatcactggaagttacatcaaaagctgtacctgttgatgaagaaaacaacaatgtgagatctctaacagagaaattatctactgctcttatgaacatcagtgccaaagaagagttggttaagcagcatgctaaagttgcagaagaagctgtctcaggctgggagaaagctgaaaaggatgtagtagctttgaagcaacagcttgatgctgctatgaagaaaaatgcagcacttgaagatcgagttggtcatctggatggggcactcaaggaatgcgttagacaacttaggcaagcaagggaagagcaagagcggaaaatccatgaagctgtttccaagaaatgtcatgagtgggaatcttccaagtctgagcttgagagtcagcttctgaatctcaaggcccaacttgaaaccgccaaaagtgacgctgctgcctcagttgatcctgaccttcaactgaagcttgatgcatgtgagaaagaaaattcaagccttaaacttcagcttcattctcgagct

SEQ ID NO: 193195 - DNA, 1127 bp, Gossypium hirsutum
cggacgcgtgggctttttggacaccgtgagaattggagaccgagaatccgtctttttagggtttggttcggattttaatttttgtagcaatggcggaggaatcggagagtaagcagtcggcggtggagtcggtgatggagaagatcagcgagaagattcacggccatgattcatcgtcatcttcggattcggattcggatcatgagaaaccggcttctccttcttccgttaaggctaagatttatcggttgtttggaagagagagaccagttcatcatgtgcttggtggtggaaaacctgctgatgtgttcttgtggaggaacaagaagatttcagctggtgtccttggtggagcaaccgcaatttgggtcctttttgagttgattgaataccacctacttgctttaatctgtcacatttcgatactctgtcttgcactactgtttttgtggtccaatgctcataccttcatccacaagtccccacctcgcatccccgaaattcatttgccagaggagccattcctccaagttgcctctgcattggcaattgaacttaaccagggattgaaacttctgcgagatattgcatctggaagaaatctgaaggagttccttatggttatagctgcattctgggttctgtcaattgtgggaagttggtgcaacttcttgaccttgttctatatatgtttcgtattgctgcacacggtacctgtattatacgagaagtacgaggataaggtagatccatttgcagagaaggctgcaatcgaggttaaaaaacaatatgcagtttttgacgccaaggttcttagtaaaattccaatgggccctttgaaggccaagaaggtttaacaaggaaaggggggttcagtctccacctctccggcaacatttggctagttctgggatgtggttttatgtgctgaattcacattagctagaggcatttcgtcctcaaatcaaattgttcacaaatgttttggtttgcaattcacaatatcatatatgagtaagaggcaatatcagttgttagggataggccaagcttacagatggcaccactatcaggtgatgattttattatgacattttgtttcatttggataaaaaaaaaaaaaaaaa

SEQ ID NO: 193196 - DNA, 375 bp, Gossypium hirsutum
ccaccatcaccacctaaacacccctacaagtacggggccccacccccaccatcaccacccaagcacccttacaagtacaagtctccacccccaccacctccagtttacaagtataagtctccaccacctccacctccatcatcacccaagcacccctacaagtacaagtctccacccccaccacctccagtttacaagtataagtctccaccacctgcacctccatcaccacccaagcacccttacaagtacaagtccccaccacctgcaccaacatcaccaccaaagcatccttacaaatacaagtctccaccaccaccaccatccccacctaagcatccctacatgtacaagtccccaccatcaccaccacca

SEQ ID NO: 193197 - DNA, 751 bp, Gossypium hirsutum
agaagattaaggatgaagaaggtgaggggtgtaatatatatggctttttagaagttaataaggtggcagggaactttcattttgcacctgggaaaagctttcagcaatcgaatgttcatgtacatgacttgctagcttttcaaaaggacagttttaatctaagtcacaagatcaatagattagctttcggagattacttccccggggtcgtgaatcctcttgatagtgttcattggactcaagaacagccaagtgggatgtaccagtactttctcaaggttgtccctaccgtgtacacagatgtgagtgggcacactatccaatcaaatcagttttctgtaacggagcattttaagggtgcagaagtaggccggcttcaatccctccctggagttttcttcttttatgacctttctcctatcaaggtgacttttacagagcagcatgtctcgttcttgcactttctaacaaatgtttgtgctatagttggaggtgtttttactgtttcgggaatattaaactcttttatataccatggtcaaaaagcaatcaagaaaaagatggaaattggtaaacttagttgaagattggggctgctgcttcatgttccagtaagaggtgcttggggaaaaatcaaactaagcgagaagaccacgcagcaatgtaccgtacgtattcctgttcagtcagatttcttggtaatcatgaatatggttggaatgatttcatatttcatttacgagtcttcgtt

SEQ ID NO: 193198 - DNA, 676 bp, Gossypium hirsutum
  unsure (1)..(676): unsure at all n locations
ttcctttgttcatattctccctttctgcttcttatttattttctttcaccttttcctttcaaggtacttctctttctcacccttttattttgtatttcgctgttcctctagtttgattcttttttttttatgatttgaattttagattgtagatctgatctttaagaaaattaaaatttaacagatcgagagaaaaaagaatggcagaggagcatagatgccaagcgccagaaggccatcgtctttgcgtcaataactgcggctttttcggaagttcggcgacgatgaacctttgctccaaatgttacagagatctctgtctcaaggaacaggaagcttcttcgatcaaatccgctctttcctcttccccttcgtcttcatcaacggtcgtcgaatccatttctcaggttcctcttttggctctccatgaagtcaacagagaatcggcggttccggagattgcatcggcggccgaacagcgatcgcagcaacaaccgaatcggtgcatggtttgcaggaagcgggtcgggttgaccggattcagatgcaagtgcggtgttacgttttgcgggtcccacaggtaccctgagaatcacgggtgtacgttcgatttcaaaaaggtcggcagagangagatancacgcgctaatcccctcgtcnaagcagagaagctcga

SEQ ID NO: 193199 - DNA, 446 bp, Gossypium hirsutum
cccacgcgtccgaaaaaaaaaaaaaaaaaaaaaagcacccccgaaaatgcgaagctctagattctcgatgttcctcgcgatttgcgcaatcctggccatccacgtggcggttacaacttcttctccgacgtttgatttcgccggcgaccatttcctccagatcaaatcggaatgcagcggatccaccgctgagtgcctgatgcaaggcggggaggactcgtcggacttcgatgccgagttcgccatgggatccgagatcagcaggcgcattttagcggcgagacggtacatcagctacggtgcactgaggagaaacactgtgccgtgctcgcgacgcggcgcatcttattataactgccgacctggagctcaggcgaatccctactcacgcggatgcagtagaattacacgctgtcggcggtagatttatttttacaagtcttttt

SEQ ID NO: 193200 - DNA, 793 bp, Gossypium hirsutum
caaatcctaagacaagaggaaggtacaatttactttttggcctgacatctggcggaccatataactacaatgggactcagaagtggcttcggagttttgatcaacgtttacgtgagagtatcgactatgctatttgcttaaatagtattggttcttgggataatgaattgtggattcatgtgtccaagcctccagagaatgcctacatcaagcaaatttttgagggtttatctaatgtagcagaggagttggacctcaaagttggcctaaagcacaagaaaataaacatttccaatccccgagtagcatgggagcatgaacagttctcaaggctgagagtcactgctgccactctttctgaactttctgtcacaccagaactcctagaaagcactggtggtctgtttgataccagacaatacgtaaatgaaactgctattgttagaggtgtgaagctagttgctgaaagtcttgcgaggcatatctatggccatcagggaaaaaatatccaaatttttgcagatgagagcagtttggctgtcaatcctgcctatatacgatcttggctggatgttttatcacaaacacctcgagtagctccatttctttcaaaggatgacccttttgtcatggcattgaaaaaggagttagctggtcatgttgatgaagtgaatgtgcaacatgagactcttgaagggatttttactgtctgtgtttcgactagcgctaggcttaacatatatcaggttgctagtgtaacctttgacttgctgttactccttgtgttgggatc

SEQ ID NO: 193201 - DNA, 409 bp, Gossypium hirsutum
tttgactttacaacatgacacacatgaaggtgcactagatatatttatgaggacattctgtgcataaatataaaaatgctctgtgtgctttgcatttctgctgtttataataggtaataaagcagttgagctgctgtaggtagcatgggagcatgaacagttctcaaggctgagagtcactgctgccactctttctgaactttctgtcacaccagaactcctagaaagcactggtggtctgtttgataccagacaatacgtaaatgaaactgctattgttagaggtgtgaagctagttgctgaaagtcttgcgaggcatatctatggccatcagggaaaaaatatccaaatttttgcagatgagagcagtttggctgtcaatcctgcctatatacgatcttggctggat

SEQ ID NO: 193202 - DNA, 470 bp, Gossypium hirsutum
tttttcgacccgtccatctttttctcttcttcccagcagaaataataatagcactaatcatggagtccaaacatgggagttggagactctcattaatgttgcttctggttatgcttgggttggcaaaagctgatatcaatcaagacaaaacagaatgtagtaatgagctagtagggctggctccatgtctcccttatgttggtggagacgcaaaaacccctaccatagattgttgcagtgggctgaaacaggtgctggataagagccggaaatgcctgtgtgtactgcttaaagatagagatgaccccagccttggcctcaacatcaacgctactctcgcggcaacacttcctaccacttgtcgtgcccctgtcaacatgaccgactgcatctctcttctgcacttgactcccgattcccaggaagctaagttatttcaaggatatcagaagctgacacacactggcaac

SEQ ID NO: 193203 - DNA, 1571 bp, Gossypium hirsutum
acggtccggtaattcctggctgcgccgacccatcgttttatttatttcactacccaacaacccaaaagataaaaggaatcgtttacttgttcgtagcaatttatcgtcatttcaagctcaattctctgaaaatttttgtgctgaacttcttttttctctttgtaccaccatgtgtggaggtgctattatctccgatttcataccgccgtcgcggtcgcgacgattgacggccgatttcttgtggcccgatctgaaaaaatccgggttgaagaaggggtcgggtaagagatactcgaagcccgtgatcgacttgggcgatgatttcgagactgactttcaggagttcaaagatgaagaatctgatatagatgattatgatgttgatgatgttttggctgatgtaaagccctttgcttttaacgctacaaagaaacctgcttctgctgtatctcatggttcgaactctgaaaaatccatgcaattcaatggtcaagctgagaaatgtgcgaaaagaaagaggaagaaccagtatcgtggaatccggcagcgcccatggggtaaatgggctgctgagatccgtgacccaaggaaaggggttagggtctggttaggaactttcaatactgctgaagaagctgcgagagcttatgatgctgaggcacggagaattcgtggtaagaaagctaaggtgaacttccctaacgagactccgcgtacctctccaaagcgtgcggtcaagacaaattctcagaaaccactttccaagtcgaatttgagccctgttcagctaaatctcaaccagaattacaattacttgagccagcctgagcaggaatacttcgataccatgggtttcgtagaagagaagccactggtcaatcagtttgcatatgtggaccctgttcctacgtctatagatgctggatttaatcaatcagataatgcccccttgtacttcaattcagaccagggaagtaactcgatcaattgttccgactatggctggggagaacagggtgccaaaactcctgaaatatcatccattcttgaagcttctgtagagggtgatgagtttcttgaggatgctaaccctagcaagaagctgaaaccaagttccgacaatgttatgcctgccgaagacaactccgcgaagaccttgtcggacgagctgttggctttggacaaccagatgaaatacttccaaatgccgccatttattgaaggaaactgggacgccactattgatgccttcctcaatggagatgcaacacaggatggtggaaacccgatggatctttggaactttgatgatttccctgccatggcggagggtgttttctgaacgaactttccataataactagtgtttgtaaataaagcaacatgaatttggtcaaaatctgttgtgaagttgaagtaaaaaccaagctatgcatgcataagccttgcctgcactgctttcagaggttcttagtatgtaccctttttttatgtgttttttttggggactttggactaaattttaaatttgagtgacttgaaaagtgattgtgtctgaatttgttatgttt

SEQ ID NO: 193204 - DNA, 519 bp, Gossypium hirsutum
  unsure (1)..(519): unsure at all n locations
cccacgcgtccgtccacgcgttcgcccacgctttcgcccacgcgtccggaactttcaatactgctgaagaagctgcgagagcttatgatgctgaggcgcggagaattcgtggtaagaaagcgaaggtgaacttccctgacgagacgccgcgcacctctccaaagcgtgcggtcaagacaaatgctcagaaaccacttcccatgtcgaatttgagccctgttcagccaaatctctaccagaatttcaattgcttgagccagcctgagcaggtcttctttgataccgtgggtttcgttgaagagaaggcaccaatggatccatttgcttatgtggacactgttggattgaaaccctttggccaatctgacaatacccccttgtatttcagctcagacaggggaagtacttcctttgactgttctgacttcggctggggagaacatggtgcanagactccnganatatcatctgctcttgaagctactatggagggtgatgatttttggaagatgcaaccct

SEQ ID NO: 193205 - DNA, 1425 bp, Gossypium hirsutum
cccacgcgtccgcccacgcgtccggagaacaacaagcttttcttaatactaaaattttaacgctttcctttccttcgtctttcctttgctttcctctgtgtgatttttaataaaagggaaacgagaaggaaaaatgcaggcaatttctcaagtgcaaaatcttaattcgtaccttataattcgccggtcgaagcctcggtttgataagccggttcggttagctgtacctgtacgttgtgtgtatcactctgattcagttccattccccaatggagtccgttcaagccgggtggattggcaaagctcgtgtgctattttgtctagcaaagtcttctctcaggatcaagattccggtgagaaatcgaacacttcctccgcctccgatcacctggcggcggcagttaacggccataaaacttccttggatctgaacttagttccgctagataagaagaacaagcctcagccacctgctaaacagcctccacagaagccgttaactattaccgatttgtctcctgctccgaagcacggttctcagttgcgtgtggcttatcaaggagttcccggtgcttactcggaagctgcggcggggaaagcttatccaaattgtgaagctattccttgtgaccagtttgaagttgcgtttcaagcggttgagctttggattgctgatcgagctgttttaccggtggaaaattcactcggcggttcgattcatcggaactatgatcttctcctccgtcaccgactccatatcgtcggtgaagttcaattacctgtccatcactgtcttttagctctcccgggagttaggaaagagtatttgacgcgcgtcatttctcatccacaagctctgtcacagtgtgaaaacactgtcaccaaactcggcctcaacgtcacgcgcgaagcagtcgatgatacagccggagccgccgaatatatcgcgacaaacaacctccgtgacacagcagccatagcgagcgcacgcgccgccgaactctacggactcaacgtcctcgctgacgggatccaagacgattcaagcaatgtcacgcgcttcgttatgttagctcgtgatccgatcattccacgcacggaccggccgttcaaaacgagcatcgtcttcgcacacgaagaaggaaccagcgtgcttttcaaagtgttgtcggcgttcgcgtttaggaacatcagtttgacgaagatcgagtcacggccacaccgtaaccggccgatccggttagtcgacgacgccaatgtaggaacggcgaagcatttcgaatacatgttttacgtggatttcgaagcgtcaatggcggaggtcagagctcaaaacgcgttggcggaggttcaagaattcacctctttcttgagggtattaggcagttacccaatggatatgacgccttggtgcccatccagggg

SEQ ID NO: 193206 - DNA, 1571 bp, Gossypium hirsutum
tatggggatgcatagtttaccctatctaattgtgttgtttttgaatttaggagcattgctcacttcactaggctgccctgaatgttaccgccacccatctccgccgccgaaatgtcctccgccagactatccgcctaaacatcatcatcctcccattgtaaagccaccctatcaccctaaaccaccaaaacatcatcctccaaagccacctaagcctcccgtggtaaacccaccatatcaccctaaaccaccgaagccaccggtggtgaagccaccgtatcaccctaaaccacctaagcctccgatggtgaaacccccatatcaccctaaaccaccaaaacatccaccgcatcctcccaagccacctgttgtaaagcctccctatgtacctaagccacctattgtaaagcctccaccgtatacacccaaaccgccggttgtgaagcctccgccatatacacccaaaccgccggttgtgaagcctccgccatatacacccaaaccgccggttgtgaagcctccgccatatacacccaaaccgccggttgtgaagcctccgccatatgcacccaaactgccggttgtgaagcctccgccatatacacccaagccaccttactatccaataccgccggtcatctcaccaccaacactgcctccaaagccaccagtctaccccagtccaccaatagtgaaccctccaccatatacacccaaaccgccggttgtgaagcctccgccatatacacccaagccaccttactatccaataccgccggtcatatcaccaccaacactgcctccaaagccaccagtctaccccagtccaccaatagtgaacccaccaacaccgccgattctgccacctcctattgtgaatccaccaacaccgccgattctaccaccaccatcaccacctattgtgaacccaccaacgcctcctatcgtgaagccaccttcaccgggaacaccgtgtcctccaccaccacctccggcacaacaaacatgccccatagacactctcaagctaggtgcatgtgtggacgtgttgggtggcttagtacacatcggcataggtagcagcgccaaagacacttgctgccctgtactacaagggctgttggatttagacgctgccatttgtctctgtactacgatcaaagccaaccttttgaatatcaatattataatccccatagctcttcaggtcctcatcgactgtggcaaaactccacctccagggttccaatgtccagcacaatgatgaaaaacataaaaaccccatgtttttttttctttcgaagtaacaaatattttcatgtcttattatatgtttcttttaataatttatggtgttttgctggttgatgaagatcataaagacgtgtctgaggttagatcgttttaatagatgtcgatgaatccacgaacggatcaatgtagtacgatgttgtgattttagttagttcataggatcatattaattgtgcgtgtgtgtgttatttttcttatttcaaagctaagcttgttttgtagtgaacattgctttatttttattttgtataatttct

SEQ ID NO: 193207 - DNA, 469 bp, Gossypium hirsutum
tttcacgcgtccgcaagctccctaagctaaaatatggggatgcatagtttaccctatctaattgtgttgtttttgaatttaggagcattgctcacttcactaggctgccctgaatgttaccgccacccatctccgccgccgaaatgtcctccgccagactatccgcctaaacatcatcatcctcccattgtaaagccaccctatcaccctaaaccaccaaaacatcatcctccaaagccacctaagcctccggtggtaaacccaccatatcaccctaaaccaccgaagccaccggtggtgaagccaccgtatcaccctaaaccacctccggcacaacaaacatgccccatagacactctcaagctaggtgcatgtgtggacgtgttgggtggcttagtacacatcggcataggtagcagcgccaaagacacttgctgccctgtactacaagggctgttggatttagacg

SEQ ID NO: 193208 - DNA, 1030 bp, Gossypium hirsutum
aaccgaagccaccggtggtgaagccactttatcaccctaaaccacctaagcctccgggggtgtaacccccatatcaccctaaaccaccaaaacatccaccgcatcatcccaagccacctgttgtgaagcctccatatatacccaagccacctattgtaaagcctccaccgtatacacccaaacccccggttgtgaagcctccatatatacccaaaccaccggttgtgaagcctccgccatatacacccaaaccgccggttgtgaagcctccgccatatacacccaagccaccttactatccaataccgccggtcatatcaccaccaatactgcctccaaagccaccagtccaccccagtccaccaatagtgaacccaccaacaccgccgattctaccaccaccatcaccacctattgtgaagccaccaacgcctcctatcgtgaagccaccttcaccggaaacaccgtgtcctccaccaccacctccggcacaacaaacatgccccatagacactctcaagctaggtgcatgtgtggacgtgttgggtggcttagtacacatcggcataggtagcagcgccaaagacacttgctgccctgtactacaagggctgtggccgcccgcccccgccatttgtctctgtactacgatcaaggccaaacttttgaatatcaatattataatccccatagctcttcaggtcctcatcgactgtggcaaaactccacctccagggttccaatgtccagcacaatgatgaaaaacataaaaaccccctgttttttttctttcgaaataacaaatattttcatgtcttattatatgtttcttttaataatttatggtgttttgctggttgatgaagatcataaagacgtgtctgaggttagatcgttttaatagatgttgatgaatccacgaacggatcaatgtagtacgatgttgtgattttagttagttcataggatcatattaattgtgtgtgtgtgtgttatttttcttatttcaaagctaagcttgttttggagt

SEQ ID NO: 193209 - DNA, 715 bp, Gossypium hirsutum
cccacgcgtccgcccacgcgtccgttcaaattcccaataaattgggatgtttgatttcatgctattagctctcaatacttgcaaattatttttgatttgttcaactttacccaatttcaattctatctaaagagcagaaaagaaaattgggttgccgtgagatgaagatcgaggatttggatgacgtggagaatgaagacggcgattacggcgcgaagcagttgcagatagtcagagtggacgacgccaaacgactcctagtcggagccggtgctcgtatcctcttttaccccacccttttgtataatgtcttcagaaacaaaatccaatccgaattcagatggtgggacgaagttgaccagtttcttttgctgggggcagttccatttcccaaggatgttcgacgattgaagcagttgggcgttggcggggtcatcactctcaatgagccctttgaaactctggtttccacttccttatatcatgcttatggaattgatcaccttgtaattccaacaagagattatttgtttgctcctacagtttcagatattagtagagctgtggacttcattcataacaatgcatcttgcggtagaaccacctatgtacattgtaaagctggacgaggaaggagtagcaccattgtgctttgctacttagtagagcataagcagatgacacctgctggtgccctcgaatatgttcggtctcg

SEQ ID NO: 193210 - DNA, 410 bp, Gossypium hirsutum
aaagatgctcccaatgtagctgagaaagtttgtggggcaatctattaccttgttcaaggctatgacgatgcagggcctagtgcctctcttttgtcaccatatctcactgacatatttagttgtctgatttcaactgctgatcggactgatgggggtgtctccatgcttaggtcttctgcttatgaaaccttgaatgaagttgtgagatgttctaacattgctgaaacatcttccgttatagcacagctactaccagtcatcatgaataagttgggccagactatggatattcagattgtgtcatcagatgacagggaaaagcaaggggacttgcaagcctctctttgtggtgttttgcaggttatcatccaaaaacttagcagcacagatgaaaccaaaacaatcatact

SEQ ID NO: 193211 - DNA, 514 bp, Gossypium hirsutum
agaaaaataaaaagtccgagtaatagattttatcccaataaaaaattacagtatcatatatcctagaaaaagctccatgttttcagcaaggaaccaatcaatttctctatcaaacaatgttttcttctccacctcacaaaaatagtaccaagatattgtctaccttcccacattttcaacaacaaaaaatttgattcttctgcccccctttttttcttatagatgtttttgctttctgtttacctgcttatctgttcttaaacagggcagggtgggacttcaatggttgttccagcttggatttggccccaaccgattagacgccaatgcttttcaacacgccgactaagtgcaattttctctcccttggtggtgcaaacaggggacgtgagttgcagctttgccaaatcattctttacagctatgactcgagcaccggtcgacatagacccaatattcaacattaggatctctcccttggccaactttgacacttttccttgcctctccgaac

SEQ ID NO: 193212 - DNA, 441 bp, Gossypium hirsutum
cacacattcccccaaatcaaccaaattcactcgttccatatctccaatctatctctctgtgctctttcgttttgttttcttcacttcctgcatcaaacatcttccgctgtctggcataactgaatccttgccgggaaaaatgatatcccggcggcaaccgggtgcagaggacctggtctcctctgacaatcccaatgcttggatttttgatgattatggtttgttagaagacattcctgtccctggtggtgatcttccctcacttgacccttcagccccaatctggtcatctccttcccttacttgctctactcctctcagtgttgaattcactgaatcggttgggaattcagacaatcttaatgaaacaagctcccgaaaacggatgaggtctggatcatccagtgcatctgggtccaaagcttgcagagaaaagatgcg

SEQ ID NO: 193213 - DNA, 446 bp, Gossypium hirsutum
cccctttcctcccatattcctcttttttcaattccttttcacccttgctaataaaaccaccttattaacatacctaaccatgtcgtggcaaacctacgttgatgagcacttgatgtgtgacatcgatggcactggtcatcacctttctgccgctgctatcgttggtcatgatggcagtatctgggctcagagctctaactttcccaagtgtcagcccaaggagatcactggcatcatgaaagatttcgacgaaccaggtcaccttgcccctacaggctggcaccttgggggccccaaagtttttggtcattcagggggagcccggggcctgtcattcgtggaaaaaagggatccggacgggtgactattaagaaaacagcacaagcacttgtgtttgggatatatgaagaaccagtgactccggggcaatgcaacatggttgtgga

SEQ ID NO: 193214 - DNA, 611 bp, Gossypium hirsutum
  unsure (1)..(611): unsure at all n locations
aattcgcggccgcaaattcttccagctttttttggtggtgtttttaaaaaatgccgccacatcgatccaagtcggagaaaaacgacggaatggcgaagcagcttcgtcgagatccctatgaggtacttggagtctcgaggaactctacggatcaggaaatcaagagcgcgtatcgaaaaatggctctcaagtaccatcctgataagaatggaaatgatcctgttgcagctgatatgttcaaggaggtcacattttcttacaatatattgtctgatccagataaaagacaccagtatgatacagctggttttgaggctgttgaagctgaaaaccaagaattggaactagatctttcaagcttgggggctgtgaacaccatgtttgctgcactttttagtaaactcggtgtgcctattaagaccactgtatctgccactgtcttggaggaggcacttaatggtgtgtgtcaccatccagacacctctgctggggccacctgtttccaggaagggtgaaaaaacatgtctcccctcctctccgttcanaataccnaaaaaggaaccnaaaatggtttgtttggccnattcaatctctgaataaaacaagttcaa

SEQ ID NO: 193215 - DNA, 727 bp, Gossypium hirsutum
gagaagtacagatttttcagaccgttagctgttagatagaaatcagttcaggaaaaaaaatcggaattctaaaacagatggagaagagatggggaaagaagtgggctttgatttgtttgtttctttttaattgggcgagaaacgtttcctccctttcggtgaccgtaagtgacatggaatgcgtttatgaatacgtgctttacgaaggcgacacaatttcgggcaactttgtcgtcgtcgaccacgatattttctggagttctgatcatcctggcattgatttcaccgtaacttcgcctgggggtaatacagttcacagtttgaaggggacatctggggacaagattgaattcaaggccccgcgaagtggaatgtacaagttttgttttcacaatccatactcaacaccagagaccattgctttctatattcatgtcggccatattcccactgatcatgaccttgccaaagatgaacatttgaacccaattaatgttaaaattgctgagctgagagaggctttggagtctgttacagcagaacaaaagtacttgaaagctcgtgatactcggcatcgtcacacgaatgagagcaccagaaagcgtgttataggttacacagttggagaataccttctgcttgttgctgcaagtgtacttcaagttatctatattcggcgtctcttcagcaaatcagttgcctacaatcgagtttgaacaatttcatc

SEQ ID NO: 193216 - DNA, 455 bp, Gossypium hirsutum
gttttcttagaagaagacaaggcatggatcgaacagatcaagcaaaaacttcccagtttggaatcgtaccatgttgagtatgtaaccaaagtccaccaagcagatgatctgctagagacgggaatgaaggaggagtgcaaagtggtgggtgatcctagattctccaaatgtgacttagcactcaaagggttcccaaacgagatatatgacatagaatgggatctgatcatggttgatgccccaactgggttccatgatgaagcccctgggagaatgaatgccatctacactgcagggctgatggctaggaatagagaagaaggggagactgatgtgtttgtgcatgatgtgaacagagttgttgaagataagttctcaatggcttttctttgtgaaggctatttgagggagcaacaaggattactaagacatttcaccattcccagtcacaggtc

SEQ ID NO: 193217 - DNA, 547 bp, Gossypium hirsutum
caaacacagaaaaaagggatttgattctcctattctgaagaaccatgaatcctcgaagggacatgcgtaacagcagagttgcactctttgatggcatcgaggaaggtggcataagggcctcatcttcttactcacatgaaatcgatgaacatgaaaatgaaagagcaatggaaggattgcaagatagagtcaatctactgaagagactgtcaggtgatatacatgaggaggtcgatagccacaatcgcatgctggatcggatgggaaatgatatggatgcatctaggggaatactctcaggaactatggacaagtttaagatggtatttgagaccaaatcaagcagaagaatgtttacactggtggcatcttttgtggttgttttccttatcatatactatcttactaagtaactggtctacggtgtttttgatacagctgagaactttatgtgacaatttgtaagaccctttttatatatggttactgaaatgtgcttccgacatgtaagatattttcgtatgtttatatgaagatttcttggtat

SEQ ID NO: 193218 - DNA, 801 bp, Gossypium hirsutum
ttctgatgcactgcgtctcgcctgctgcatagcattgcactgcgagggtggcattacgttgctttctcttatctcattttttgcgtctacatcatatctttcagtgcctgagccaagcgccgatcacctcttttccctgccatcaatccattccattgccttccatcctaaaacaaaacaaaaataaatggagtcttgtccttctataaaaaatatcctcctcctggattccgaggggaaccgtgttgctgtcaaatattattccgatgagtggcccaataacagtgttaaggaagcctttgagaagtctttattttcaaagactcaaaagaccaatgctcgaactgaagcggagatagcaatgttcgagagtcatatcattgtgtacaagtttgttcaagaccttcacttttttgttactggggctgaaaatgaaaatgagctcattctggtaactgttcttcaggggttttttgatgcagttggccttcttctaagagggactgtggacaagaaagaggcactggagaacttagatctcattttgttatgccttgatgagattgtcgacggcggcatcatcctagaaaccgatgcgaatgtcattgcggggaaggttgctagtcatagcatagatgcggctgctcctttatctgagcagacaataagtcaagcattggcaactgctcgggaacatttagcaagatctctcctcaagtgatgattacaaggggaaggagcaaagcaaagagtttcgaattgttattatttctagctttttattattcttgtatttgtata

SEQ ID NO: 193219 - DNA, 853 bp, Gossypium hirsutum
aatcaggcgtcatcggcgcgcccgaatactgccacgccaacttcaccaagtatttcacggacgggttctggtccgacccagttctttcccgggttttccattcgaggaggccgtgctatttcaacacgggggttatggtgatggatttggttcggtggagagaagggaattacaggaaaagaatcgagaattggatggaaatacagaggaaacgaaggatttacgaattgggttcgttgcctccgtttctgctagtatttgctgggaatgtggaagcgattgatcataaatggaaccaacatggacttggtggggacaatgtaagaggttcatgtcgttcgttgcatacgggtccggtgagtttgttgcattggagtgggaaagggaaaccctgggttcgactcgatgccagaaacccttgtccgcttgatcatctttggaaaccctacgatctttacaagggcagttcaatcaaagatcggtcttcttttccttcttcaattttcttgggattttccagttttttgtcatgattatcattttttctttgttttaaaatattacattgttacagaaatgatgactgattcttttgatagaaaagctcagctgtatacgaactgaatatatattttttgggttattaatttgtgctctgcatatgagtaccaaatatcaattcgtttcattcatcagataagggtggaacaatttttggttgggttgattcctttgtatgtaattatggagagaggaataacgttgagttgttcattgattcattttccatttcccttgtgctctacatttttttttggtgggttctcttttagaaaatgaaatgggaattagt

SEQ ID NO: 193220 - DNA, 1180 bp, Gossypium hirsutum
gcctgatgcaagaggtccagtgctgtgctttgttggcccaccaggtgtggggaaaacatcattagcgtcatcaattgctgctgctttgggtagaaaatttatacgtatatccctcggaggtgtcaaggatgaggctgatatccgaggacataggagaacatacattggaagtatgccagcgccgcttattgatgggttaaagagagtagctgtttgcaacccagtcatgctattggacgagattgacaagacaggttctgatgtgcgtggtgatccagcttcagctctactggaggttcttgatccggagcagaataattctttcaacgaccactatttgaatgtgccatatgacctttcaaaggtgatttttgtggctactgcaaatagggtgcagcctattcctcctccactcttggacaggatggaagtcattgagctgcctggatataccgctgaagaaaagctaagaatagccatgcaacatttgattccacgagttttggatcagcatggattgaattctgagtaccttcaaattccggaggccatggttaaacttgttattcagaggtacaccagggaagctggtgttcggaatctcgagaggaacttggctgctttggctcgcgctgctgctgtaagagttgctgagcaagaccaggctgtctcagttagcaaagatgttcataagctagcttctcctctgctggataacaggcttgctgagggagctgagatggaaatggaagtccttccaatgggtgtgaataataatgagatatcaactgcattcaaaatttcctcacgtttagttgttgatgaggctatgctggaaaaaatattggggcctcctaggtttgatgaccgagaagctgcagatcgtgttgccactcccggagtatctgttgggcttgtttggaccgctttcggaggagaggttcagtttgtggaggctacgtcagtggttggaaatggtgaattgcatcttactgggcaacttggtgatgttattaaagaatctgctcatatagctctgacatgggtgagagccagggcggcggatcttaagttggcacctgctgaggaaactgatctgctgcagggcatagatattcatatacattttcctgctggggctgtacccaaggatgggccatcagccggtgtgacgcttgtg

SEQ ID NO: 193221 - DNA, 1181 bp, Gossypium hirsutum
  unsure (1)..(1181): unsure at all n locations
cccacgcgttccggtaaagggactgtttctttttaattcagncgctgggggatgtgaaacagcgtctcatctactacannagagtacnnaatgtttggttcttaatagtaacaaactctcagnttcaaatacctcctgcnntgctgtttctgcaatctcctggccccctcagnccaaagtttcacaaattcaaatgttgtgacannagcaaaatccaagccgagtgaaaaggtatcacnagtcttttgcatttctttaaaacctgttgaaagatttgtcatcnttcagtattcaagttcctcaaactccatcattatcatcaccattttcaactatgacagcctcatcactcacatcagttaatgtctcatctactgaaactagtccaacatcggcaccaaaattttccttttcaacttcattttctgcggtgcctacttcacctgcaacacaatctagtgaaccaagttctgtagttgcagtagatgctaatagaaaagcttcttcttcctcaccatcatcagttcctttctctgcttttgtttcctcttctgattccttgtcttttcagcctctcgaaatgcctatacccttgcctgctgatttatctcccgtgagttcttctgagattttaaaagttgaggcccaaccacataacgaaatacatgacttaaaaaaagatggggatccgattatacgagcaccacctctgcaacatgaacttccagcaacagaattgagcttgaagcctaagtttgctgtctcatcaccaaagaaaagtgaaactcctactggagtgttatctggaagccaaacccgcatcattgatcttgcaagtcctgcaactaatttggcatcaaatcctcagccgctgcagccttctactggagatagtctttcagctccttcgtcaattagtattaatactgccaatggaaaaagcggaaatttggatctcacacaagaggatgagatggaggaggaggctcctgagacaaaccaaatgactgaacatggcttgggaagcttaagtagctttgggattggctcaaaccctaacccaactgctcctaagccaaacccatttggtgctccattcggagttgtggctacaagtgcagctacctcttcattcacctcaactgttaatcctggagagttgtttaggcctgcatctttta

SEQ ID NO: 193222 - DNA, 558 bp, Gossypium hirsutum
ctaatttctttttcccttttttcttaattctagaatctccgccatgagcaacaacggtaacaatagcaacagttccgatcccgatcgccctgtccgtgtttacgccgatgggatctacgatctcttccacttcggccacgctcgctccctcgaacaagccaagaaatcgtttcccaatacgtatttgctggttggatgttgcaatgatgaaacaacacacaagtacaagggcaaaactgttatgaccgaatcagaacgttatgaatcccttcgccattgcaagtgggttgatgaagtcattcctgatgctccatgggtgatcgatcaagaatttctggataaacacaatattgactacgtggctcatgattcacttccctatgctgatgccagtggagctgcgaacgatgtgtacgaatttgttaaagctgctgggaagttcaaggaaacaaaacgaactgatgggatttctacgtcagatatcataatgagaattgttaaagattataaccaatacgtgctgcgtaacttggaccgtgggtattctaggaaagagct

SEQ ID NO: 193223 - DNA, 649 bp, Gossypium hirsutum
  unsure (1)..(649): unsure at all n locations
caacatttcttctccttttcttttcactccccactccccacattggctctctctgcatcttaaagattcttagtttctgctgtgaaatatcacttcttgagaatggcagctacagcagcttctggccttcaactagcttcagcaagaccctgcattgcatcttctcgcagggtatttaaggctggtgctgccagtctagatgtcaattccaaagctgtgtcatggactaagctagctagtgcttgccatttatcacaatctttggagcctttccggcgcagttttgcatcgtcttcggtaaattttaacaaagttgtgacaaaggcaatgtctgaatctagtgaaaataagccggtttctgggttgccaattgacttgaaaagtaagagggcatttattgctggtgtagctgatgacaatggatatggctgggcaatagcgaaatctcttgctgctgcaggtgctgaaattctagttgggacctgngtgcctgctttgacatatttgaaaccaactgccacgttgaagttcgatgaatctcgattattgccaatggctctntattgagattaccaagttaatccctgatgcagcttgacaaccctgtgagtcctgagatttaaacaaatacgattgcagactgcaatgg

SEQ ID NO: 193224 - DNA, 424 bp, Gossypium hirsutum
ttaacataaaaatcagagaatcaggaaaaagaaagaggaaaggaagaaaatggggaaatcaactcctgtgaaacaagcggcggtggttttgggagcgctagctttcgggtggatggctatagagatggcgtttaaacctttactggacaaggctcgctccgccatggacaactccgaccctgatcgggagcccgacgacatcgactccgctcgcaaggacgactccgactccgactccgatcggaagcctatctcttatgctgatgccgtcgccaagaacatagcgggtgcaagttaggggcgagattcttgtgtttggtccagtccaagtaatcatgaaagtagggttcctttttatgataaatggaattatggtgttatcttattttagatttcttgctgctgcttttctaggttagcctta

SEQ ID NO: 193225 - DNA, 545 bp, Gossypium hirsutum
  unsure (1)..(545): unsure at all n locations
cttttaaggatttaagaactcaggctactcagcagaatcaaacagtggaaactgagttgttttcttgccctgtgtgctatgaaccactgatcagaaaaggccctcctggtttaaacttggatgctatctaccggtctggattcaagccgaagaaatgcaacaagtcatactcaagtaaagatgtatgtctggacctgactgtcactactggattgagaaactacactgaagtcaaacctgttaggacagagctattccggagtcctcttgtatcgtttctctatgaaagaggctggcgtcaaaattttaatctcagtggcttccctggagctgatgaagagttcagaatggctcangagtactttaaacccgcagaaggtggcactttagtggatgttagctgtggaagtggtttgttttcccgaaaatttgctaaatcagggacatattctggtgttattgcactcgatttttctgaaaacatgctccggcaatgtaatgatttcattgagcaagatgcatctcttttagctagcaatattgct

SEQ ID NO: 193226 - DNA, 372 bp, Gossypium hirsutum
agaaccagaggaacccccgggctgcatgaatttggcacgatttcctatcagtcagcatagtgaagatcagctgcaagaaaattacaatggaatttcacaggaacttaatccaacaggtgaaagtgttacatgtcaagggcagctcaatccttcagtgtggtgatttggctgaatctattcaaaggcatgaagggttattaactcaaacgttttctttgaacaatgcaccagatgagcatgataacatggaaattggagatgggaattgcacaacagctgctgatcaagtagagcaaatttctgaaatggttaacttgcctgaggggggttctgttgtgcctgaaaacctttcaccacagagcatgggtgatg

SEQ ID NO: 193227 - DNA, 1433 bp, Gossypium hirsutum
  unsure (1)..(1433): unsure at all n locations
ccgaatctccgattttcccaagcatcgcgcatacgatcaggtcttttttctctgcactaagactcagagctactctcgtcctagttattttccatggcgattgagaaaattcttaaagatgatgctagtgaagagaagggggagcgtgccagaatggcatcatttgttggggcaattgcaattactgacttggttaagacaacccttgggccaaagggaatggataaaattttacagtcaactggcaggggaaatgaagtcactgttacaaatgatggagctaccatcttaaagtccctgcacattgacaacccagcggcaaaagttttgattgacatctccaaagttcaagatgatgaagttggagacgggacaacctctgttgtggttttggctggggagcctttaagggaggcagaaaagctagtggcagccaagattcaccctatgacaataatatcaggttatagaatggcagccgaatgtgctcgtaatgctttgttgcagagggttgtggataacaaagagaatgcagagaaattcaagtcagacttgatgaaaattgcaatgaccactttgagctccaaaattctctctcaggataaggagcattttgcacaactagctgtggatgctgttatgaggttaaaggggagcacaaatttagaggccatccaaattatcaagaaccctggaggatctttgaaggattcctttttaaatgaaggattcattcttgacaagaaaatagggctcggacagccaaaacggatagagaacgctaagattttggtggcaaatactgcaatggatactgacaaagtgaagatatatggtgcacgtgttcgcgttgattcaatgtctaaggttgctgagattgaaggggctgaaaaggaaaagatgagagagaaggtgaaaaagatcttagcacatgggattaactgcttcgttaacaggcagttgatctacaatttccctgaagaactctttgccgatgcaggcatacttgcaatcgagcatgctgattttgatgggatagagcgtctggctttggtaacaggtggggaaattgcttcaacctttgacaacccagagtctgttaagcttggacattgcaagcttattgaagagattatgattggtgaggacaagttaattcacttttctggtgttgaaatgggtcaggcttgtactgttgtgttgagaggtgcaagccatcatgtgctagacgaagctgaaaggtctctgcatgatgccttgtgcgtactgtctcagacagttaatgaccctacggtattgcttggacgtggatggcctgacatcgttatgcgcaaaggaagtggatgaactacacccaaactccgngaagaatccatgctcatgaacctctccagggcctgtaaccatcccaacatattgctgacatgcggtcc

SEQ ID NO: 193228 - DNA, 955 bp, Gossypium hirsutum
cccacgcgtccgcccacgcgtccggacccacgcgtccgattcttgacaagaaaataggtcttggacaaccaaaacgaatagagaacgcaaagattttggtggcaaatactgcaatggatacagataaagtgaagatatatggtgcacgtgttcgcgttgactcgatgtctaaggttgctgagattgaagggggtgaaaaggaaaagatgagagagaaagtgaaaaagatcttaggacatgggattaactgctttgttaacaggcagttgatttacaatttccccgaagaactctttgcagatgcaggcatacttgctattgagcatgctgattttgatgggatagaacgtctggctttggtaacaggtggtgaaattgcttcaacctttgacaacccagagtctgttaagcttggacattgcaagcttattgaagaaattatgattggtgaggacaagttgatccacttttccggtgttgaaatgggtcaggcttgtactattgtgttgagaggggcaagccatcatgtgctggatgaagctgaaaggtctctgcatgatgccttgtgcgtgctgtctcagacagtcaatgatactagggtattgcttggaggtggatggcctgagatggtaatggcaaaggaagtggatgaatctgcacggaagactcctgggaagaagtctcatgctattgaagctttctcgcgtgcgcttgtgaccatcccgacaattattgctgacaatgcgggtctggacagtgcacacttggtggcccagcttcgtgcggagcaccacaaggagggatgcattgcagggattgatgtcatctctggatctgtaggagatatggctgagctaggaatctctgaatccttcaaagtcaagcaagctgtattgctctctgcaactgaggctgctgagatgatacttagggtcgatgaaatcattacatgtgc

SEQ ID NO: 193229 - DNA, 563 bp, Gossypium hirsutum
tgagttgctacatattacaattcaacagggtatggagatgagctcttatgggcagcaagctggctctatcatgcaacaggcgatcgatcgtaccttgactatgcgactggcgaaaatgggaaactgtttgcttcatggggaagtccaacctggtttagctgggataataaaaatgcaggaacccaggtcttgctttccaggttaagcttgtttggtgccaaaggagtctctgggaactctggcctcggaaactataggagctctgctgaaggtgttatgtgtggtcttttgccaaagtctccctcagccacatccagcagaacagatggtggtcttgtatggatcagtgaatggaatgctctgcagcaccctgttgcctctgcatttttagctgctctttacagtgattacctgcctacctcacaaaactgaaaaaataacctgtggtgaccattcattcaaaccgtcggatcttagaaagtttgccaaatcacaggctgattatgtattgggcaaaacccctttgaaaatgagctttttgttggggtatgggggataagtac

SEQ ID NO: 193230 - DNA, 747 bp, Gossypium hirsutum
tccctcgcgtccgcccacgcgtccggccaaccccaaaaaagaaaaaaagagaaaaaaaaaactcttaagtccatcaattatcactacaatctctttccccttattttctctccaaagaagccctaaattttctcagcctttcttgctctttccctcgctttctcgggaaaaaaaatggcaaacgcggcttcaggaatggctgtgcatgatgattgcaagctgaagtttttagaactgaaggctaaaaggacttaccgcttcatagttttcaagattgaagaaaaacaaaagcaagttgttgtggaaaaggttggtgaacctactgatagctatgaggctttcactgctagccttccagccgatgagtgtcgatacgctgtgtatgactttgattttgtgaccgatgagaactgccagaagagcagaatttttttcattgcctggtctcctgatacatcaaaagtaagaagcaagatgatctatgcgagctcaaaggacaggttcaaaagggaattggatggcatccaggtagagttgcaagctaccgatccttccgagatggatctcgatgtcataaggagccgtgccaattgaaatgtatgtaccatttcttcattgaaatggaactttatactatgtggttcacataaatgtaatgtctatatcaactttggatcttggaacttgctttgatattgggttatatctgtggattcttatggggtatgtgtgtgttccccctttggg

SEQ ID NO: 193231 - DNA, 1140 bp, Gossypium hirsutum
  unsure (1)..(1140): unsure at all n locations
ctaaacattaccaaaatatggggtttgctgtaatagtactagtagttaaagctgctttgcttgtgcagctttcactgttgttactgagcaccttcactgtctctgctcccatttggcctcaggcttctcctcctcattaccatgctgtttcacctgtagtcccgcctagtcacccaccaacccaccaccatcaccaccaccctcaccctcaccctcacccccatcctcatccacccactaagcccccaacccccactcctcctccagttcatccaccacccaaggcgccagtgcaaccaccaaccaagccaccagttcacccaccacccaagccaccagttcaacctccaactaagccaccaaccaaacctccaactcaacccccgactaagccaccaactcagcccccgactaagccaccaaccaagcctccaactcagcccccgacgaagccaccaacacacccaccatctcatcctccggccaagccacctaaatcgagccaggtggcagtgcagggcgttgtttattgcaagtcatgcaagtacgccggagtcgacacccttttgggagctaaaccaattcttagtgccaccgtaaggctgacatgcaaagacgctaaaaacgaattaacggtccagttcaagactgacaagaatggttatttcttcctgcaagcaccaattaccatctacaattttgatctccacaattgcagcgtctccctcgtatcttcaccattgagagcatgcagcaagccatctaatctaaacggtggattgaagggcgcccccttgaagcctgagaaaccatctacttcaaagaagctcccatatgttctctacagcgttgggcccttcgctttcgaacccacatgtcacaagaactagagtagaaatctataatcccactgttgagctcgtactctttttaccatttttcttttatgtgcttaaactactacgtacaagtctcttagcttattgtgatggcatcttgttcggtgtggtaagctttgggttgcaataagttattgtaatgtatggaaatagattagtgatgaataatcaataaattatcgggtgtcttatttccagaaaaaccctntttttnttattttttttttttatatttaatatt

SEQ ID NO: 193232 - DNA, 687 bp, Gossypium hirsutum
cccacgcgtccgcccacgcgtacgcatcctcagattctctttcctaccttaaaaccacaggctctctttgtctctctgtttctactttcactttgcatttttcttgattccttccttcacgacctcaatctctaggagtgtttgtaataaatggctttggtgacaactgctgaagtctgtgatgcaaatccacagctaattgtgagcggtgaacttcgggcccttcaaccaatattccaaatatatggtcgtcgcccagtattctccggacctatagtcacacttaaagtgtttgaggacaatgtattgatccgtgagttccttgaggagaaaggtaatggcagagttctggttgtagatgggggtggtagtttaaggtgtgccatacttggaggcaaccctgtagttcaagctcaaaacaatgggtgggctggaatagtggttaatggctgcgtaagggatgttgatgagataaacggttgtgacattggggtgagagcgcttcattctcatccaatgaaagccaataagaagggaattggggagaaacatgtccctataaccattgccgggactagaatctgtgatggggagtggctttatgcagacactgatggtatcctcgtctccaaaactgagttatctgtttgagttcccttttctccctaaagattaaaatctgcaaga

SEQ ID NO: 193233 - DNA, 451 bp, Gossypium hirsutum
cccacgcgtccgcttgcttttcttgttttgaacttttccttcttttttttttcttttttgttaacggggttttcagcatacatgcaaaagagatcgaagggcacaaaacgtaaaacccgacaggcaaaagcacttgaaaatgctaggaaggctcccagatcatttcttgagctcttacatgaggcaaacttagagtccttgcctcctcatgttccatcttatttgagggcagcagtgggacctccaagttctacctcccgccggcatttttgcagcgtttgcggctttagtgcaaagtatacatgtgtgacatgtgggatgcgcttttgttcgtgccgatgccaaaatatacataacgatactcgtgcatgaaatttgttgcatgagtggtaatattaggaacccaaaaggattttgttgacattagcagacattcatcatatgccaaaaa

SEQ ID NO: 193234 - DNA, 889 bp, Gossypium hirsutum
ggcgtggacaaattattcattaaccgaattaaaaaataaaagatctgactaagagaacaaacacaatcaaaaatcaaatacaaaaaattctaattataaaagacaagaaaaacgaatttctaactcaagaaataaatagtagttctaacaaaataaggtatcaggataaaatattagaatcatcaaaaaaattttggcaaatagtaaaaagaagaaatattcgattaatccggaaattctatttttttataaattttttcattgaaaagatatacatggatattcttctatatatcattaatattccaagaaccaatacccaactttttcttgaatcaacaaaaaaaatgattgagaacttcattcacaataatgaagcaaatcaagaaagaattaataaaacaactaaaaatacaactcattttatttcaactataaaaacctcactttcttcactttctaatattagtattagaaataaaaatgaaaaagctttttgtgacttatcctccctctcacaagcatatgtattttacaaattatcacaaacccaagttattagtttttataaattcaaacctatccttcaatatcatggaacatctctttttcttaaaaatgaaataaaagattattttgaagaacggggagtatctcattccagattaagacatcattatgggttaagacagaaaattgtttggcattctggaatgaatgaatggaaaaactggttaaggagtcgttatcaatacgatttagttcagaatagatggctaaaattaggaccaggacaatggcgaaatagagtcaatcaacactatctggctcaaaataaacatttaacaaaatgggattcagatgaaaaaaaaaaaaaaagggcgggcgc

SEQ ID NO: 193235 - DNA, 420 bp, Gossypium hirsutum
atttattggagtttgaatcccctctcgttaatcaaattagggtttcttgaagccaaatcgaccagacatgggaggaggcaatgcccaaaaatccaagatggctcgtgaaaagaatctcgagaaggctaaaaacgcagctaaaggcagccagctggaaacaaacaagaaagctatgacgattcagtgcaaggtatgtatgcaaacgtttatatgcacaacatcagaggtaaagtgcagggaacacgcagaagcaaagcatccgaaatccgatgtgtatgcttgcttccctcatctcaagaagtgatgtatttgaagcaagaaaatgccatatatatattatagaattgtttggaatatcttttcccttatcatgtaaaacctcagctatgatttttaaacccaggttgatgtgtgtggaac

SEQ ID NO: 193236 - DNA, 764 bp, Gossypium hirsutum
tcggccacgcgttcggggacccctggggtgtaaatctcgttccccatcgacgcctctgcttatcgcatcatcagccatgtcgaggagaaaggttagggagccaaaggaagagactacgaacccttgggcctgctgtacgagacggagagcatgttttcggtgttgcccacatttttgcatcttttaatgacactttcattcatgtgactgatttgtctggaagagagactatggttcgtattacaggtggtatgaaggtgaaagccgacagggatgaatcttcaccttatgctgctatgcttgcagcacaagatgtttcccagagatgcaaggaacttggaatcacggccctccacatcaaattacgtgctacaggaggtaacaaaaccaagacccctggtccgggtgctcagtcagctctcagggctcttgctcgctccgggatgaaaattggccgtatcgaggatgttacacccattccgactgatagcacccgaagaaagggtggtagaagagggagaaggctataaactagcacattatgttttagcaaatctatcattttaagtgtttttttggtggcattggcatttggttaattggtaataactgttctttatgagccctttttcatagttttatattggtatattttatattggagttgtagatcataatgaaccgtgaatctagtatggtgatatttttattaaaaatttgtgggttttatcattgctgttcatatcataggtagtccctaaaca

SEQ ID NO: 193237 - DNA, 589 bp, Gossypium hirsutum
cccacgcgtccgcccacgcgtccgtgttgaccatcttaacgaggaagtattacatccattacttcaggatcttgttaaaactccattttttcggtatttcaaggttaaattgtggtgtaactgtccattttggcctgatgatggtatgtgccgtttgcgggattgtagtgtttgtgaatgtccagaaaatgaattccctgaattatttaagaagccctaccatcatggccttccatcagatgaccttaagtgccaagaaggaaagccgcaggctgctgttgaccgcacactagatagtaaggcttttagggggtggacagaaacagataacccctggacatatgatgatgagactgataattctgagatgacatatgtgaaccttcaactgaacccggagcgctacactggctacactggtccatcagccagaagaatatgggatgctgtgtactcggagaactgtcccaaatatccagctgaagaattgtgccaagaggaaaaaatactttacaaattgatttctggacttcactcatctatttcgatccatatagcttctgattatctacttgatgaagccacaaac

SEQ ID NO: 193238 - DNA, 373 bp, Gossypium hirsutum
tttgagacataaggcaataaaaaaaaaggaagacagtgtgggatttttagtttggttttgagagggcgttctgctctatgattgggggtgcgaaaggcgtcgatcggaaagagaagggaaagcagcagccgacatggaggatattttcattgaaagaattacattcagctaccaataattttaattatgacaacaagcttggagaagggggatttggcagtgtatattggggtcagctatgggatggatcacagatcgcagttaagaggttgaaggtgtggagcaataaagcagaagtgcagttttcggttgaggttgagatattggcaagagttagacacaagaatctactgagtttacgaggatactgtgc

SEQ ID NO: 193239 - DNA, 542 bp, Gossypium hirsutum
attggaaatggatggaaaacaaatcccagataatgaaaacgttgaaaaaaatgaattagagcaattattaccatctccagaggagttggcatatcaaattgaagcagaactctttaaattatttggaggtgtgaataaaaagtataaggagaagggtaggtctctattgtttaatttaaaggatcgtaacaaccctgaactcagggaaagagttgtgtctggcgaaattcccccagagcgattatgttcaatgagtgctgaggagctggcttctaaagagctttcacagtggcgacaagccaaagctgaagagcttgctcaaatggtaattttgccctgtggtagaagttgatattaggcggcctggtgaggaaaacacataagggtgaatttcaagtagaggttgaacaaactgacagttcttcagtggaagtttctgctggaacttcagttactcggcgacctaaaactgatgcaaaacaagctcctaggaataataaaactgttgcaaaggaacatgaatcaaatgccgtaggtgaaaa

SEQ ID NO: 193240 - DNA, 395 bp, Gossypium hirsutum
tccgccaacgcgtccgaaaaagtagaggtaaagagaaacaacgaataaaaattcgtcttcttatccgaaaaccaacaaaagaaactgtgtcaatcacataaaaactgagaagccattcacacacacacacggagtaacgccatggctaccatactaggaccatcctccgccgcaatctcagcatcttgtgggtcactcatttacccttcctcaaagcttgtcatcccttctatctccattaacgccgggtcttgttattggaagaagttttatggagggattgggattcaaggaaagaagggaaagccgcaatttcatatcgcagttactaatgttgccactgaaattaactctgttcaacaggctcagaagcttggtgctaaagagagtcaaag

SEQ ID NO: 193241 - DNA, 571 bp, Gossypium hirsutum
  unsure (1)..(571): unsure at all n locations
gcgtccgatcattatttacttcaaaaaaaaaaagaacaagaaaaagaaaaaaaaagttagggttttaatttgaaatcggattcggtagagattaagcaatggctggagaaagggccttgttcaagttccttaagcctgggcaacgtctacagcccgccgacgttcaagctgccgccatgtggggcgtcgctgccactaccggcgctctttggctcattcagccttttgattggttgaagaagacctttctggagaaaccagagtcggattagaagcaaatgggacatcttgcaactcattgcggttttgtttatcgggtttgctgatgaacaaatcatggaaagaataaaaataataatgtagtaagtgtaattttttgtggtttattgttaagagaacaagcctctttgcttttggtatcaattactgggaagttttgaacctttcaccttcagtttgaactgttgtctcatttctacttgagtttatgaattcatgcattcataaagaggtttagttgagattctgannnnnnnnnnnnnnnnnnnnnnnnnnnnnnnnnnnnnnnnnn

SEQ ID NO: 193242 - DNA, 627 bp, Gossypium hirsutum
  unsure (1)..(627): unsure at all n locations
cccacgcgtccgaatacctttagttttttttaagctttaaaatctataattgtttacctttttgcttcacttgattgttaaatctccatggctgccaaggtttttgcatattttgtcgctttggttgctgtcttcagcgtcgccaaatctgaccctgatctcctccaagatatctgcgtagccgatacatcttcaggggtgaaggtgaatggatttgcatgcaagaaggatgccgatgtaacggaaaatgatttcttctttagtggcttagccaagccggcggtggtcaacaactcggtgggatcggtggtgaccggagccaatgttgagaaaatcccagggttgaacacccttggggtgtcgctttctcgtattgactatcaacctggcggacttaacccaccttacactcacccacgcgccaccgagatcatctttgttctcgatggtgaattggatgtggggttcatcaccactgccaacaagttgatctccaaatccttaaaaaaaggagacattttcgtgttccctaaaggtttggttcatttccagcaaaacaacggcaaagaaacggcatcggtcatcgccggcttcaacagccaattgccgggaactcantcgattgcc

SEQ ID NO: 193243 - DNA, 546 bp, Gossypium hirsutum
cccacgcttccgcccacgcgtccgcccacgcgtccgcccacgcgtccgcccacgcgtccgaaagaaagagaaaaggttgatttcaggaatcatgtaattcagtggtttgaagttctggatggattgttggggaaacattggagaaacataggtctatttttcaactgcacttttctgctgttctggatcagtgattcagttaattgcctgtgctagcaacatctactatataaatgacaaccttgataagagaacttggacgtacatttttggagcctgctgtgcaacaactgtgtttattccttcattccataactacagagtttggtcatttcttggccttatgatgacttcttacactgcatggtacctgacaattgcctcccttctccatggacagattgatggagtgaagcactcaggtccaaacaagatggttctctacttcactggagccaccaacattctttacacctttggtggtcatgctgtcactgtggagatcatgcatgctatgtggaagccacaaaagttcaaaatgatata

SEQ ID NO: 193244 - DNA, 528 bp, Gossypium hirsutum
cagctttatcagcaaatttaaaaataataaaaataaagtatgaatttggattggaacgaacaaaataagattttcatttcatttcatttctgagatcgtattgtgttgaaacaaattgcgaacaagctttaaaaaatatctgttgaaacaggaaatcacgatcatcagctgattaaaactgtatcgaactttgaaagcagtatctagagattcggatatttgtttctctttcttttcttcgccgttatggaagctgatgtatctatttcctcctaaggccctcatcacaatcaaatctctttcgttccacagagagctagggttttctttttcaatcgaatttcttttgggtttttaatttttcagttttcggatgaagatgaatcgagttgtggttttattattgttatcatggtttctctgtttctcgagttcgtgaatttcatggaatgagccggcgtttagtaaaagcaatgcctagcttgatattcactgctgtcttggaagataattgtacttcaataacct

SEQ ID NO: 193245 - DNA, 709 bp, Gossypium hirsutum
gaaaaaaaaaagaaagaaaggaaaagcatttctccaagacctccaaaaatcaaccccaatacaaccccatttgcggattcctcttcttcttctttgttctttgttcttcatcttcttcatcattttctgtgtttaacccacaaatttgctgctccttcagctaataacagaagcttaacaatctctctctctctctctctcttttttaacaccatgttcacttgttattagaaagctttcaactcctctgtcccttttctctgctttgctcttcacacacatttttttgaggctacattattctaaaaccacaacacaacctagctaattgacctaaagatgacaaagataagtcccgatattgacgaaacaatgctgaaagagtcgattgtggctgtttcagctgatgtgagttttgcttcggaccactttccgaagtataaattaggacctgataatcagattttggaggagccaagaggggataacaacggtccgtcgctgaaggaggttcttgaaagggaaacaacacaattgtccgagcagcacaagcgactctcagttcgtgaccttgctagtaaatttgacaagaacttaaccgctgctgcaaaatttgccgatgaggccaagcttaaagaggttgcttctttggaggggcatgttcttttgaagaaacttagagacgccttagaatctttgagaggtcgaa

SEQ ID NO: 193246 - DNA, 771 bp, Gossypium hirsutum
cgagttttgttatggtgttttgaaaagattcttgcccgaggaaaatgttcagtcagtgcaaggtctgacccttaccgctgatggaatgggtgcagtttttgatgttgcacaagatgatgtggaagcatttcttactggtgctgaaaatgcagctaatgttaacttagaggtgttgaagaatgcgttgccacccttgcaacagagggacatgtcaagaggaagatttggtggtggacggggtggttttggtgatagaaatggtggtggtagcaggttctctggcggcagaggtggtggccgaggtggattttccgatagaaggaatggaggtgggcgaggtcattataatattaagagatggtgagtgaactcttgactagagccaatgtaataagggtactcgagggaaatggcaccacctgaagatgatgaagaagataatgcttaatatcaacccatgcaacatttaatctacttgtgttaatctgtatttttttaatttattttttcgtttttaaattatatgataatccctgggggttttgccttcctccccagttttatttcttatgttttgctagaaatgtaagaaaaatacatttaatatgtaatccttgcctgcgaccaaaaacattagcaggagaaaagaattataaaaaatatttaagcaaaatataaaattaaaaaaaataaattaaaaattaaaaggttttgtgtctatctgtttatatttttctatctcacgttctccttctatctaatccttttttt

SEQ ID NO: 193247 - DNA, 595 bp, Gossypium hirsutum
gaattcttaaggggtaatcaatgtgaattcttgaaatgcaattgatcttttcgttgaagtgaagatccaaggagaaaagattccaaattacctttcaaccgaaaatttcaattgccaaagcattctaatctgaataagagccacattaatcatggccaaaagatcaaatagttgttctctacgatacaaaaaggatcagttgggctgtatgtggggcttgattagtatgcttgacttccgccatagccgatcaacgcgcagactgctggctgataggaggtgcggggacagaaatgcagttggtgctccaaatgcaagaaataaacctgaaatgttgactagttccgctgaagattgtcccagaccacttgatggtgaagaggaaagaacagctattgatgcgtgtaagccaagtgtgaagaaactcctagaagaggaaatgtctggagaggttgcaaagaaagaagcaagtaatactgaagttgaagtgaaacagttctattctggggatggagacgaatggaaggaagaattggaacagaaaaaacaaaacttgcaagaaaagttccagtagcagtcttcatatggatgtggt

SEQ ID NO: 193248 - DNA, 580 bp, Gossypium hirsutum
  unsure (1)..(580): unsure at all n locations
ctggaagaaggcctttctccaccgttacagcctctctctcagtttctgtagctttcttttttaaaactccctctatttatataaacctttcaataatataagagcaaaatttctgggctgggtttcgaatttggggatctgggtttttggtctttctgggcttgagacagagagagagagacagagggggagagagagaggggtgggggagagtgatngannanngganattcctcnnntnnggttttttcnaatctcttctancgattctccaatggtggggtttcaatgttactgttataatcatgaacaaatggatctttcagaaattggatttcaagtttcccctttcagtatcatgcgttcacttcatatgctcgtcgatcggagcatatctggtaatcaaagtgctaaagctcaaacctctaatacccgttgatcctcaagatcgctggaaacggatatttcctatgtctttcgtgttctgtatcaacatagtgttgggaaattttagcttacgctatatcccggtttctttcttgcagagtatcggatcattcactccagcaaccgcggtttt

SEQ ID NO: 193249 - DNA, 932 bp, Gossypium hirsutum
  unsure (1)..(932): unsure at all n locations
gggacgcgtgggcgcttaacttcgcgcgattgctagcttcatcttctctgttcgaccttcccaaaaaaaaaaaaaaaaggaaaagaaaaattcaggttgggagtattacacagctttgttttggttaactccttttcgtccaccatatttgcccccaatatgaagatcttgttctcgaaagttctaacgaacaccgatatacagaaaagattggcggttcccaacaattcactgaagcatttcgagcttgaaaatggtaattgctccaaatcatttgaagttaaagatgaaaacggattcacatggccttttcgttgctatgttcgtaacgacggtgcctacaagaagcctgttttatccagcggttggcgtcaatttgtccttaataaaggagttcaccagggggatttgattacactctataaggatgttgaagcagaagcttcgtataagatcgaagttcagagaaaaatcaagttattaggcaaggagtgctggtataatctggaaccagaccaacctacaggcgcatcagcacaagataagagaaaaatcctgttatttggcaaggagtgcggctattttctggaaccagaacaaccaacagacgcaacaggagaagttattcaagactagtagtcctgccggatgtttaacaatatatgattgttaggtatgggatgatgtttctggagctgattcatgactagcagtttgtgaaacatatcttagcagtctgaaatgaataaattacttcagtaatatctgtcatccccatatgttatatttaaattgtgcacaatttgttcaaatgtaagtgaaagtctgttcttcatanaaaaataaaataaataaaaaataaagggggtgggcccggtcccaattcgcctatgtgagtcgttacaatcactggcgtgtttacacgtgtgatn

SEQ ID NO: 193250 - DNA, 277 bp, Gossypium hirsutum
tgcacatggtgctgtaatacctgtggtaggtcttcttgatgggaagaattacatgcttcatgaggctgtttcaagagctcttgtgaagttagggaaagacaggcctgcttgtaagatggaaatggtgaaagctggggtaattgaaagcgtacttgatatccttcatgaagcgccagatttcttatgtgctgcttttgtggaattgcttcggatactgacaaataatgctactatagctaaaggaccgtctgctgcaaaagtggttgagccccttttt

SEQ ID NO: 193251 - DNA, 472 bp, Gossypium hirsutum
ataaaataaagttgcagaaactgagtgcaaatcttactaagccccagctcgaactcctctgtcccattaactgtatgagagagaggaaatctgattttcaatttcatcactgcatcttctctttgcttttggcctcaccttcagaaaggtaagtcaagttctttagattgcttgccgctttttgagtttcaagatctatgaaccccagatctgtagagccttgatcttattgctgaattcttgaattttagtagtttgggttcttttgctttttccttaataactagatttagtttattgtaaggtcattttagctcattcaggatgttgggtcgtcctgggttatctagaactggaagctttaggcctgagaatctaggacaaaatgctctgcatatgattggcaatctttgtttcactatatttgtaattggtgtcctagttttcaccattatagctgctacttatgagc

SEQ ID NO: 193252 - DNA, 604 bp, Gossypium hirsutum
ggcccctctcctccatctccaataaagcctcctactgtttgcgataattattacagctgtcccgaaagcaatacctgctgctgtgtctacgagtactatggctactgctttgcttgggggtgctgcccacttgaggctgccacttgctgtgacgaccactacagctgctgtcctcatgactatcctatctgcaacttaaatgaaggcacctgcttgatgagcaagggtaacccaatggcagtgaaggcactgaggcgcactcctgctacgcctttctgggcccatggaagtgttggcgtaaagaacaatgcttaaggagaagcctgggattttatgcagaaaatgatactacagggagaagggaacagtgcttgaccgatctcctctgttttgtcatactgcaatcctttctttcattctcatttcagcagatggatggtttataaatgttgcgcacatgccaactatgtatatagcttcctaattaatccatgctgcatttctgaaacagacggaacattgtcaatttctattgttttctgtatatcatgtcattcagcaataacctgcaagaattgatctgtcaatcttatcctgatctcat

SEQ ID NO: 193253 - DNA, 718 bp, Gossypium hirsutum
  unsure (1)..(718): unsure at all n locations
cccacgcgtccgtcgagttatccctcttttccctcaccaaaaaatattcaaacgacgaccaccgtccaccgccgccgaagaggaaagagccctttaaataaaataatggacacaattctccataccgaacctctatctctcactcgcttacgcgccacttcgaattccaccgcttccattcaccatatgccttgccagctcatcttccgtcctttccaccgcctttcctttcctttatccaccgtcaacgccggctccagttctcgcaggtcatccacttttgttgtcgccgcttgcggcactctcaccgccaattccgtctcgccaagaggtggagtatatacagttggggatttcatgacgagaaaagaggatttgcatgttgtaaagccaacaacaactgttgatgaagcactggaagctcttgttgaacacagaatcaccggttttcctgttatcgatgatgattggaaattggttggacttgtttctgattatgacttgctagcattggactccatatctgggcgacggactgagaatgacctgtttcctgaagttgatancacttggaaaactttcaacgaagtacagaagttactcaacaagacgaatggccaggtcgttggtgatttaatgacaccagctccattagttgtacgtgaaacaactaatctcgaagatgctgctagattattgctcgagaacaaataccgct

SEQ ID NO: 193254 - DNA, 442 bp, Gossypium hirsutum
  unsure (1)..(442): unsure at all n locations
cggttatttcttcgtcgcagtcacacagnttcataaagagcattttgtcaaaagaaaaaatcccgatggttttcccgagaaaatctttgccgaacaaagaaaaaaaaaggaaaaatggagttatgccctacaattaagaacatccttcttttggattccgaagggaaacgtatagctgttaagtattactcagatgactggccaacgaatgctgctaaggaagcttttgagaaagctgtgtttaccaaaacccagaagactaatgctcgaactgaagctgagataacaatgtttgacaactatattgttgtatacaagttcgttcaagaccttcactttttcgttactggaggtgaaaatgaaaacgagatcatcttggccacagtgctccagggattttttgatgctgttggactcctccttagaggcactgaggacaaaa

SEQ ID NO: 193255 - DNA, 389 bp, Gossypium hirsutum
tagaatagcaataaaagaatatgcgtctgctgttggccttagacattactttttatgtttcctccaaccaaaacataattgcgatgtgaagtggtatacaaaaaaagataatctaagacacaaaggggaaagagcaaaaacatagcaaaacatattcaacaaacataatactatgtttgtcattacaagatacacacacacacatacataacaatgataatccgcaactgcagtgaaattactctgctctgaaggcgccttcaatgtatttacagtgttccatgcgaactgataaggaatctgcgaattcacagatcttatttcctccaaaatgggaagcaacagccctttgcactgttgttagtgggtttccgattgcggccagtgtt

SEQ ID NO: 193256 - DNA, 446 bp, Gossypium hirsutum
gtttgagaagatattggaactgagttatgccatggcggaggaggggttttggaccgagcaggatctcaagtttactgctgcttggcttcaagacttggttgccgtaggttatcagcagccaaggttgatgacattggaactggacaggccaagggcaaatatcggtcacggggatcgaaaagaatttatccctcagaaattgccatctgttcatttagcagtggaggaaacaggggtggttagctctgagattgggaatttgatacgatggaggaagaattttggaaatatcgtgctaatcatgttctgcaatggtcctgtggaacgtactgccctggagtggagactgctttacgggcggatatttaaaactgtggttatcttttctgcgcagaagaattcggatcttgccattgaagaaggtcaattagatcaaatttacaagc

SEQ ID NO: 193257 - DNA, 803 bp, Gossypium hirsutum
gtcgtctcgagtccagaagcaagcagctagcagtttgctttgaattatactactataactccaccactttccaccagatttacattgcagatggcttcatcaatgctgtgggcttcaagggcggcttcttatctcaggatctctgtcttccacagaggcttttccactgttctaaaggatctgaaatatgcggattctcatgagtgggtgaaggttgagggtgactctgccactattggtattactgatcatgctcaagatcatttaggtgatgttgtgtatgttgaattacccgaagtgggagctgctgtaaagcaaggtgaaagttttggagcagttgaaagtgtcaaggctacaagtgatgttaattctcctgtttcaggaaaagtggttgaagttaatgatgagctcagtggctctcctgctaaggttaactcaagtccatatgaggatggatggattataaaggttgagatgaaagatgctggggagttgaggaacttgatggactcagaagaatactctaagttctgcgaggaagaagattcacagcactgagagcggatgccctggcgatgttggatgtccggttctatgcaaacagagataaccgggaagccgactggttgagaattgtagctttctgctcgatgtttccaaactattatcagactatgtagtttaatgtccccgtatctgggttttgatttggtgtcatgtgttctcggaataaatgattggtttggggtttggaattaactgatttactatcactattgttccaaatttgggtttcgataagc

SEQ ID NO: 193258 - DNA, 511 bp, Gossypium hirsutum
tttcttcgtccgaagagagcgcaaaatatgggcagagagagctccgtggcttgcaatggataccgtcgattcttagatctcttaaccctagccatttttattttttatcattctgatcgagcattgtttctaacgaagaaatcaacttttaggtttcatttgattcagttctggctggttttctgattttacctgcatttcgcgttctatttcgtcgtggttgctttgctgattgtttcgcctaaccaaacattgtatctgacgaagatatcaacgtttctgttccgtttgattcagttctggcttgtttcgatccggtttccttctgattttacctgcatttcacgttctgttttgaattttggagaagtctagaagttgtctgttagggtttccaagaagaaaggaagaggatggaaatgatgaagtgtatgtgaaagctgagaaggagataggagaaacgaggcgtgataatggacgattgaggaggtttatttgttgctgttaggag

SEQ ID NO: 193259 - DNA, 414 bp, Gossypium hirsutum
cccactcgtttgccacacccaagatctgccccccaaaaaaggaaaaatttagaaaaccaaacacctaaagtaacagatgcaagagagcgcaaaataagggcagagagagctccgtggcttgcaatggataccgtcgattcttagatctcttaaccctagccatttttcttttttatcatgtatagattctcaagatttttttctcccgagattctttcttattttctttttttttttttttttcaagaatcttggtagccactgatcggagcttcactatgctttacttttcgaaactctattggctttatttttttttgtctgcaatctgattgagcattgtttctaacgaagatatcaacgtttaggtttcatttgattcagttctggctggttttctgattttacctgcat

SEQ ID NO: 193260 - DNA, 349 bp, Gossypium hirsutum
gtctcgaattttttttttttttgtttgatgtgtttatattgctgacaatttaaaaaaatacgaaaatacaatacacaattttttatattctatattctagttctaaccttctagaacatgtcgggagttaaatttttaacgataataacgacctttattacaatatcatgggtaaaaaaaattaggacgtaaaaaaaaaaattaaacttgtaggccagctaagaaagcaactccggttgagggtaaccatgaagttccatagatgaattttgcaacggtgaatttacttgcttcaacttctgaagtgatgactcgatacccaggacatcttactcgttgtccgaccgcc

SEQ ID NO: 193261 - DNA, 648 bp, Gossypium hirsutum
  unsure (1)..(648): unsure at all n locations
aaaaaagaaaggaattttttgttttattttgaataatttgggctaaaatgggaaagagaaagagggcgagggcttcacgcgatgaagatgaggaggatgaantagttcaagaagaagagggcaatcattcttcttcaaacgaaaagagcttatatgagattcttggagtcgaaaaagcagcatctcagcaagagattaagaaagcatattataagttggcactgagacttcatcctgataagaaccctggtgatgaggaagccaaagagaaatttcagcagttgcaaaaggtcatatcgattctcggtgacgaagagaaacgggctgtctatgaccaaacaggttgcgttgatgacactgatcttgctggggatgttgttgagaatttgaaaagctttttcaggactatgtacaaaaaggtcaccgatgctgatattgaagagtttgaagcaaattatagggggtctgattcagagaagaaagatttgattgatctttacaggaagttcaagggcaatatgaataagctcttctgttctatgctttgttcagatcccaagcttgattcacaccgtttctaagacatgcttgatgagggagtagcagccagagaactgtaggaatccgccgcctatgagagatgggcgt

SEQ ID NO: 193262 - DNA, 363 bp, Gossypium hirsutum
ccttactcgataacccggatctcggccctttttggctcgggttggcccgagacaccatggcttctggagagggtcccactaaagctttggactatgcgattcgagcagcgaagtctttcgagagatgcgccgtggaaggcgagcccagtttggatctggcgatgagcttgcacgtgctggcggcgatttattgcagcttggggaggttcgatgaggcggttccggtgctggagcaggcgattcaagtaccggatgtggaacggggcccggatcacgcgttggctgccttttcggggcatatgcagctgggggatacgtactcaatgctgggtcaagcggagaagtcaattgggtgctatgagc

SEQ ID NO: 193263 - DNA, 800 bp, Gossypium hirsutum
gatcagagccgtagtttccttgtcactttcttggaaggtggcgtcggagaaatccacgtcccccaaaattacacccgcgacgtcgtattaaaggaagtcacagttgtcaaagactctgacttgaccgggaatgcttccctcggcctcgcccttgaccgtcctcgaaaccggctgcttggcgccgttgccgacatgttcggcaaccgatatagtgcactcgcggcttatgatttgtccacgtggaaacgactctttctaaccaagctcagtggctctggtgatgagaaatccttggcggatgatgttgcagtagatgcagatggtaatgcgtacgtgaccgatgtgaaaggcagtaagctttggaaggtaggtgtggtgggtgagttcttgtctaccctcacaaacccactcttcactccaaaagagtggtacaaaagcttgcttggattaaacggaattgtctaccacccagatggctacttaattgtaattcatactctcagcggaaatttgtttaagattgatctagccaagggagatgaagtgaagttgattgaagttgccggtggtccactagcatttggcgatggtttagagctgatttctcctactaagcttgtagttgccgccggaaacccttctgggagattggtggagagcaccgatggatgggagacggcttccgtcgtggcaaagtttaagggtcctatgcatcgtttagccacggcggcgactgtgaaagatgggaaggtttatctcaaccatatgtttggaatggggtaccccaggaagacacatgc

SEQ ID NO: 193264 - DNA, 602 bp, Gossypium hirsutum
gaaacatctatgttttgggtgtgtctctattcctcgggttatcgattcctcaatactttgtaatgaacacaaccggtgacggtcatggacccgtgagaacaaatgccggatggtttaacagtatattgaacaccttcttttcatcgcctgcaaccgtggccaccgtcgttgggaccgtgctcgataacacattagaagcaaaacaggtggacgatagaggaatcccgtggtggaaaccgttccaacacagcaaaggcgatgctcgaaccgaggaattctacagctatccgttaagaataaatgaatatattccgacccggtttctctaaagcattatcactaaattgtttttatattacctgcaaagtacagggcatattttgtgttccatatgcatgaggctcaggttaaatcggttcttgtaaaccggtggtcggcaccggtgaatgtcgtgtcggtttttcaaggtatgtaaagtactgaatgtacatgaaaattggctgagaaaaggaaacagggaactggttaaagctatatttatccttactgaactctttaagcaaataatattggtcaaattttataaaaaaaaaaaaaaaaaa

SEQ ID NO: 193265 - DNA, 475 bp, Gossypium hirsutum
ttttcacgcgtccggagcgatgttcaaacatgggttagtgcggcactgacagatgaggatacttgtatggatggatttgctgggaacaacatgaatggatatgcaaagacaatggcgaggaaacgtattattaaagttgcacatttgacaagcaatgccttggctctcattaataattatgcctcaactcaaggttactatttaccttaatttctcatgaaaacttcaaagagaaaaatgatcaatatgtatataggtatatcttaggatcgaattcgggattggtgtcaaccaaagattagatatcaactgtgattcggtcgactaggctgcttttatgtttattttgctttgcgtgttgtatgcttatcatcaaacaatcagggcaattagaaaaatgttgtcccaaactaagatggtaggagattgcagattgtgttgtgaactgtatttatttcttaatttctgcactata

SEQ ID NO: 193266 - DNA, 420 bp, Gossypium hirsutum
tggatgcacagagtattgcatgatataaaaccattatacaagtaccttcatgcaactcatcacatctacaacaagcagaatacactctctccatttgctggtttggcttttcacccagtggacggaatactgcaggcagtacctcatgtgatagcactctccattataccaactcattttacaacacatgtcggactgctgttcctcgaggccgtctggacggcaaacattcacgattgcatccatggcaaactatggcctgtgatgggtgctgggtaccacactattcaccacactacgtatcgccataactatggccattacaccatttggatggattggatgcttggaaccctacgtgaccctagtgacgaagaaggcaagaaggtcatgtaattccctttgtgctcatcttgacat

SEQ ID NO: 193267 - DNA, 414 bp, Gossypium hirsutum
cccacgcgtccgcccacgcgtccgcccacgcgttcgcccacgcgtccgctttactggctgttttcgccgagggaaaatcgggcatggccgagactgagagccaagcacttcccacgaaacgacatcaccatcaccaaaacgacgattctgaaggacaagaggatgatgatgatgaagaagaagaagaagaggacgggttggagaatgaagaggaagaagaaggagcgagtcgagtcagtgagtcacagggtgctggcgccgcgcctccgagtgatgatgctggatggaaacactctcaattggataccctacccaatgatgatcctcccgaggggttgcaggtaaattctacttcggaatccaaggaaggagctgaattttaggagaaagttaacatagctgacccaggaagtt

SEQ ID NO: 193268 - DNA, 666 bp, Gossypium hirsutum
  unsure (1)..(666): unsure at all n locations
atctccaactacatctacttactgttttgctcacataagataaaatgcgacatatcggaacgtaacttcttggtacataatganataaatgtagcaagtggagaccatcctggttgttctagtatggcctattcaaatgctatgcaagatggtgtggatgtgcttgactgtccatgttcacatgacgagcgatggaatacctatttgcttgggctctatcaatcttatggagagcaccgacattggtccgaacacgctttagcaatcttacaacaactgtgccagagattatgcagagcagtggaatatttacctacaacctgtcatggagtgatattaaaagtttgaaacctgtaatatcaagcccacagtcacagtacaaattgtttcgaaatccaaagttccaaaatgctgggaagtacttacagttatctgaatttttaagaatggcaaacaccactagctctctaaatggtgtcttaatcagcatagagaatgctgcttaccttgcaaagcagggatttggtgtgactgatgcantgcttaaggccttgaacnaaactggctacgataaacaaacaactcaaaaagttatgatacagtccagtagtagctctgtgttaatgaaattcaagggttggaccnactatcaacttgtctacaacc

SEQ ID NO: 193269 - DNA, 841 bp, Gossypium hirsutum
atttcaacctgccatatcaatctttttcaccttacaagcttgccaaaaatcctagatgtaatcttaaaatctttatccaagacataatatgatagtaagggtgaaaacaactggggaaaaaaaagagtaacgccatacgcagttacctaagcagatctgcagtgctatattacaagatagaaactaataataataagcatgaaaaagacaataaaaagacaaatttctttgcatctcttgaagcagactatagttaagtttactgagtaagatccctgtgggtgtaaataacccctttgtcaccatccaccacctgcccactccccctcaagatccatcgagttgttaacagtccttcaaccccgactgggcctcgggcgtggatcctgctagtacttattccaacctcagcaccaagtccaaatcgggctccatcacaaaatcgagtgcttgcattatgaaatactgcagcactgtcaactccatgtaagaaaatttcagcaacttcatgattttcagtgacaatgcaatcagtgtgagaacttccatgttgatgtatatggtcaatagcagcctgcacatcatccacaatttcaactgtgcaggccattgaactgtactcatgatgaaatgaatgtgcctcaggaatatttaacaaggaactcgctcttggtccaccataaagggtcacaccttcatgttggagttccttggtaagtgtattgagcaaaccattactagacagatccttgtgtacaagaagcgtttccatagcgttacatgctgcaggatagtctatctttgcatccagaacaatgcgcttggccgtatcccccttagc

SEQ ID NO: 193270 - DNA, 895 bp, Gossypium hirsutum
gcgtacgcaaatatggaaaactgtatgagaatcctggcttcggtgctttcggagaatccagattttcatttggactttttctttcggctattatcaaggatgattcactttgtacttttaattagtcgacaagggaaagttaggttgacaaaatggtattctccttattctcagaaggaaagaacaaaggttatccgtgagctcggtggggtgattctcaatagagggccaaaactctgtaattttgtggattggagaggatttaaagttgtttataaaagatatgctagtctttacttctgcatgtgcattgatcaggatgacaacgaattagaggttctagaaatcattcatcactttgttgagatacttgatcgatactttggcagtgtctgtgaattggatttaatcttcaacttccataaggcctattatatattggatgaactcttacttgctggtgaacttcaagagtcgagcaagaaaactgttgcacgtttaatagctgcacaggattcactggtggagaccgcgaaagagcaggccagttccattagcaatataattgcacaggccacaaagtaggttatgaccgagagtggttgcggattgccatttgtattggggttggttttggtgtctcatctgttgtgagaactctttctggattttagtttgagaacttaattgtatgtttatgaatgtagattcgggagccttttgtagaaatgatcacatataatcatcatattaattatgtatacagtcatgcatttgggtttcagccgttcatttgttggctgtaacatgcaaccggcattgttaattttcttcattgtgaagttaatatttttattggtaaaaaaaaaaaaaaaaaaaaaagtcgacgcggccg

SEQ ID NO: 193271 - DNA, 1136 bp, Gossypium hirsutum
cccacgcgtccgcccacgcgtccgcccacgcgtccgaaatgagaaggttcaggatctattgcttttggatgtcactcctttgtcccttggactcgaaactgctggcggtgttatgactgttttgattccgagaaacactaccattcccaccaagaaggagcaggtgttttcaacttactctgataaccaacccggtgtcttgatccaagtttatgagggtgagagagctcgaacccgggacaacaatttgttgggtaaattcgagctctctggcattccaccagcacccagaggcgttccccaaattacagtttgcttcgacattgatgctaatggtatcttgaatgtctctgctgaggacaagactactggccagaagaacaagattacgatcacaaacgacaagggtcggttgtctaaggaagaaatcgagaagatggttcaagaagcggagaagtacaagtccgaggatgaggagcacaagaagaaggttgaagccgaagaataagaaggatattagtgggaaccccagagcattgaggaggttgaggactgcttgtgagagagcaaagaggactctttcatcgacagctcaaactaccatcgagatcgattcattgtacgagggtattgacttttacaccacgataactcgtgcaaggtttgaggagctcaacatggatctttttaggaagtgtatggagccagttgagaagtgtttgagggatgctaagatggataagagcagtgtccatgatgttgttcttgttggtggttccactcgtattcctaaagtgcagcagttgttgcaagacttcttcaacgggaaggagctctgcaagagcattaatcctgatgaggccgttgcttatggtgctgcggttcaggctgctatcttgagtggtgaaggaaatgagaaggttcaggatctattgcttttggatgtcactcctttgtcccttggactcgaaactgctggcggtgttatgactgttttgattccgagaaacactaccattcccaccaagaaggagcaggtgttttcaacttactctgataaccaacccggtgtcttgatccaagttatgagggtgagagagctcgaacccggacaacaattttgtggtaaatcgagc

SEQ ID NO: 193272 - DNA, 591 bp, Gossypium hirsutum
  unsure (1)..(591): unsure at all n locations
agtttatgagggtgagagagctcctccccccggccaataatttgttgggtaaattcgagctctctggcattccaccagcacccagaggcgttccccaaattacagtttgcttcgacattgatgctaatggcatcttgaatgtctctgctgaggacaagactactggccagaagaacaagattacgatcacaaacgacaagggtcggttgtctaaggaagaaatcgagaagatggttcaagaagcggagaagtacaagtccgaggatgaggagcacaagaagaaggttgaagccaagaacgcattggagaattatgcctacaacatgaggaacactgtcaaggatgagaagattggttcaaagcttgacccggccgacacgaagaagattgaagatgccattgatggagcaatccaatgctggatggaaccagttaccaggccatgaattcagttaaattagggactcggagctttgaatctattattgcagaagtccagtgcgggcttacatgtgnggctgccagatgcccactacggggacgggtggacctaaataaaaggctcaataattagaagtttttcgtgtaaag

SEQ ID NO: 193273 - DNA, 786 bp, Gossypium hirsutum
atttgttgggtaaattcgagctctctggcattccaccagcacccagaggcgttccccaaattacagtttgcttcgacattgatgctaatggcatcttgaatgtctctgccgaggacaagactactggccagaagaacaagattaccataacaaatgataagggtcggttgtcgaaggaagaaatcgagaagatggttcaagaagccgagaagtacaagtccgaggatgaggagcacaagaagaaggttgaagccaagaattcattggagaactatgcctacaacatgaggaatactatcaaggatgagaagattggttcaaagcttgacccggctgacaagaagaagattgaagatgccattgatggagcaatccaatggttggatggcaaccagctagccgaggctgatgaattcgaggataagatgaaggagctcgagagcatctgcaatcctatcattgccaagatgtaccaaggtgcaggggctgacatgggtggtggcatggacgaggatgccccacctaccggtggcagcggtgctggacctaagatagaagaagtcgactaaatcaaatattaagatagtattttgccgatgtttaacagcttctgctggtgctatattttatgttttcagcaacctatgttttgatgtattgaaaaaatctggtttatttttgggaacattaccatcttaggtaactaatgttccccgttttaagcattatttcagcgtcgctgatataattcttaaaacggggaacattagttacctaagatggtaa

SEQ ID NO: 193274 - DNA, 574 bp, Gossypium hirsutum
ctactttctaacaccaaaaatagatcaaacccgaaatttatcgtgcctactcttaggcctttacaggaagaaaggttgagaaatctacagcaaagactgggagtcccgtttgatggatctcgggtggatcatcaagatgctcttaagctgttatggagattggcttatcctaacagggagcttccacctcttaaatcagagctttggagggacatgggttggcaagggccagatccttccacagattttcggggtggggggttcatatcattggagagtctcatattttttgctaagaaatatccggaatcttttcaaaggttgttgcacaaacaagatggaaaccgagctgattgggaatatccatttgctgtagctggtatcaacatttcatttatgttaacacagatgttggatctgcaatcaggaaaaccatcttccctggctggaattcgattcttaaaactactgggggaagacgaaatggcattcgatgatctttattgtgtagcctttcagatgatggatgcacaatggcttgtgaaacgggcttcgtacatggaattcaacgatg

SEQ ID NO: 193275 - DNA, 437 bp, Gossypium hirsutum
cccacgcgtccgttagaagagagtgtgagaatggggttgaccggtgacagctcaatgggacactacgctgattggggaagcaacaaatacaaaggaagccagaatgggtatgcagtggcttacaccgaaagtgaatgttataaccaaatccgcaagcccacccataggatgatcaaaccccagaaagcttatgggatggctgaaacctgggatgaggagaatgctcaatcttacgccacctacaagtcccaaactggacctccaatgttcaaaactcaagttcatggtccttctcggaatggcttcggctcccactccaatactgcaactgcccacatgcaatcctatggctttagtagccccggaaaacgcgaaggtcgtgtttatggatatgggggccccaccgcagccgctagacaccaaaaaagtaatggcgg

SEQ ID NO: 193276 - DNA, 461 bp, Gossypium hirsutum
gcattcagcaattgtcggaatattgcttcaaatcagaacctgagtctcgccattgctacaagtccatagagatgaagtttttcatctcagttttgtttctttttgtcctcttttcttatgcagctgcatatgatcctttggatccaaatggaaatgtaacaatcaaatgggatattgtgtcttggacgcctgatggctatgtggcagtggttacaatgaacaattttcaaatgtatcggcacatcatgagtcctggttggaccttggggtggacatgggctaagaaagaagtaatatggtccatggtaggggctcaaactactgagcaaggtgattgctcaaagttcaaaggaaatatacctcactgctgcaagaaaacccccacggttgtagacttgctccctggggttccctacaattaacaattcaccaattgctgcaaaggtggagtgcttgcagca

SEQ ID NO: 193277 - DNA, 568 bp, Gossypium hirsutum
tattatatctaaaaggaaaaacaagatgatgtttatcatgagtaagctattggcttttgaaatattctttggcccggagctagtatagccgaggggtcataagtggattttctcctaatgaaagcttcccaatgtgggccaaaatgggatttccattctccctgtgctgtcacagttggtgtcgtgggtgatatttgcagggcattaaaggaaaaagttgtgccttactgtgatgggatcatgacacaacttctcaagaatttgtcgagcaaccagttgcatcgctctgtgaagcctcccatattttcatgctttggtgacattgcattggcagtgggagagtatttcgaaaagtacctgatgtgggccatgtctgcccttcagagcgctgcagagttgtctacccatacagcaggtgatgatgaattggttgagtacacaaactcccttagaaacggaatcctggaggcatattccgggattttccaagggtttaagaactctcccaagacccagctgctgattccttatgcacctgacatccttcagtttttggatgcatatacat

SEQ ID NO: 193278 - DNA, 652 bp, Gossypium hirsutum
ttgacatctactatgtgtgataagagaacatttgtctctgcggtcaagtatttccgcgagaaatacaatgtggtgcttaaatatccagccttgcctgcacttcaaagtggaagccaagctagacctgtctacctgccaatggagctttgtagtatcgttgagggtcagagattcacaaaataactaaatgaacaacaagttagatctctgctgagagcaacttgtcaacgtccgaacattagggaggggaatattacaaagatggtccaggtcaataattttgaggtggaggagcttgttactaaagaatttggaatgcatgttcgcaaagaacttgcattgattaatgcacgagttctgaatcctccagcgctaaagtatcacgatagtggacgtgacaaaattgttaatcctagctgtgggcaatggaacatgatcaacaagaaaatggtcaatgggggtaaagttgatttcgggtcttgtgtgaacttctcctctgaatattggaatatgtcagaagacttctgtgcggggctggtgaatatgtgtaacagcaaaggaatggtgtttcgccaaactccttcaattgcaatgcgatcagctcgtgctgatcgaattgatcagactctcatggatgtatacaaagagtctg

SEQ ID NO: 193279 - DNA, 415 bp, Gossypium hirsutum
agaagtaaaaaggcgatctgcacccaacttatggagctagagttattcctgtctttgtgctatcattggctgatgttgatccacaacttatgatggaagatgaaagctttgtttggactggaaatgatgttgtcatagtacttgagcaccaaagtccaaatatacctctgagttatgtttctgagactgagagaaggcatgctattccatcacaagcacagcgccatattgtagcagggcttgcttctgctgtgggtgggttgagtgcaccatatgaaaaagcttcccatgtacatgaaaggcctgttgtgaattggctctgggctgcgggttgtcacccgtttggaccattctcgaatacatctcgaattagtcaaatgcttcaggatgttgcactgagaaatacgatttatgc

SEQ ID NO: 193280 - DNA, 1246 bp, Gossypium hirsutum
cggacgcgtgggcggacgcgtgggcggacgcgtgggcggacgcgtgggccgtcgcgtgggttcgtccactacttcgaccgcagatcagctgctcttgccatattgtctctaaatggaaggcatttgtttggacagcctatcaaggtcaattgggcatatgctagtggtcagagagaggatacatcaggacactttaacatttttgttggggatctcagtcctgaggttactgatgcaatgctgtttgcgtgcttttctgtctatcctagttgttcggatgcgagggtaatgtgggatcagaaaactgggcgttcaagaggatttgggtttgtttcatttcgcaaccagcaggatgcacaaagtgcaattaacgacttaagtggaaaatggcttggcagtcgacaaattcgttgtaactgggcgacaaagggtgtcagtagcagtgatgacaagcagagctctgatgccaaaagcgtggtagaactaaccaatggctcatcagaggatggtaaagagacgaccaataatgaggctcctgagagtaatcctcaatatactacggtttatgtcggcaatcttgctccagaggtcactcaagtagaactccactatcacttccatgctcttggtgctggggtgattgaggaggtccgggtccagcgtgataaaggctttggctttgtgagatacagtactcatgctgaggcagctttggctattcagatggggaacgctcagtcatatctatgtggcaagcaaataaagtgttcttggggcagcaagcctacaccaccagggacaagctccaatccacttccccctcctgcagcaccattacccggtttttcagccactgaccttttagcttacgaacgacaacttgccatgagcaagatgggtggagttcatgctctaatgcacccacagggacagcatcctctgaagcaggcagcaatgggggtgggtgctgctggagcaagccaggctatatatgatggtggatacccgaatgttgctgctgcccagcagctaatgtactatcagtaacatataaagaaataagtggttgcgtggtaatatccttatttcctgcatttgcaggtttttaatttgagttctaaataggaggaggctttttaaatgtattttcccttggatagcagtgagcctgcatgccatcctgctttttatcgttatatagcatatgtttgtcgattgtatcaatcttacgtatttccagatttta

SEQ ID NO: 193281 - DNA, 596 bp, Gossypium hirsutum
cccacgcgtccgggcctcttctctttttccagttttcttcttcttttttctttttttttttttttcctttttttttcttctctcactttctcgaggcctccatttttgaaccctagctggagaaaaaaaacgtaattttcttggaaaccaaacacttcgattaatttatctccagtcaatcgccaagaaaaaaaatgcagcaccagaggctgaagcaacagcaacaagccttgatgcaacaagctcttcttcaacagcagtctctctatcatcccggcatattagctcctcctcagatagagccaattcccagtggaaatctgcctgctggttttgatccaagcacttgccgcagtgtgtatgtgggaaatatccatacacaagtgactgaaccactacttcaagaggtttttgcaagtactggccctgttgaaggttgcaagcttgtcagaaaggaaaagtcatcgtatggattcgtccactacttcgatcgcagatcagctgctcttgctatattgtctctaaatggaaggcatttgtttggacagcctatcaaggtcaattgggcatatgctagtggtcagagagaggataca

SEQ ID NO: 193282 - DNA, 354 bp, Gossypium hirsutum
  unsure (1)..(354): unsure at all n locations
tggaagcatgggattggagaagagagagaaagtaatgcgaaattggttaaagcacgggtttctatttactcccataagggctgctttcatctacttgaaagtcttctgccttttcgtttacttctctcgggtaatcattcaatgctacctcttccctttaatcttctttctactttcatcctttccctaaggattagggttactacataatatatttgtaccgataaaagtatgagacccctatattaaaaatttgattgtattttacttattctattcaaataatactaaattagttccttttttaaaaaaaaaaaaaacaaaaaaaaaaaaaaaaaaaanccctcgaggggg

SEQ ID NO: 193283 - DNA, 584 bp, Gossypium hirsutum
tggaattcagtcctggaaagtattaatggaggtgtgcctatgatctgcaggccattttttggagaccaacaattgaacactcgtactgtggaggttgtatggggatttgcgttgggcttagaaggtggaacattgacaaaaggaggagcaaagaaagcattgaagttgatattgtgcagccaagaagggaagaaaatgagagagaaaattagagttcaaaaagagctggtttgcaaggctgttaaacccaatggtagttctattgaaaatttcaaaacactggtgaaacttctccaacacttaccaccaagttgattgaaccaagtacacaaaacaagtaaacacaagtgctaggatgataaagttgttagggatttatgtcatgtcgagaattaaagatgaacatcatttgaggttctctcccaaagcacatttggcttcctatttgtgttttttcttttcggtgtagttttggtatcgtttgccaatttgttgtcctcgtctttatctaatttaaataaaattgtcaaatggtttgagcaaaaaccacaaggttggtaattgcggaccaagccttatccccc

SEQ ID NO: 193284 - DNA, 508 bp, Gossypium hirsutum
gcagtttttaagaggaatttgtttagtcgagtttcagcattgctgctaagcgagaggagagaagacagaattgatgattttgctcaacagatggaaattaatgggttttggccggttgacaagagagaagccattgtacaaacgttgctgaaaaatgtcgatgttaagaatgaatatcactgtagcatgaaattcgagactgcagaagaactttctctgcatatgccaacttgcagctttagggtaatgactggtgacaatgaagggtgcgacgatagattttcggctaataaatcagagaagcacgattccacttgccctttcaagataattccatgtgaacaaaagtgcccagatttcatcatgagacgtgatatggacagacactgcataaccgtctgtcctatgaagctcgtaaactgccctttcttttcagtgggatgcaaagcagccgtaccccattgtaagatcgatgaacatcaatctgaagaactccattatcacattc

SEQ ID NO: 193285 - DNA, 727 bp, Gossypium hirsutum
tggccccctttggatctgtttcagaacaattttatggttcacaagatacttctcctgctggagataatagataccgtgttataaggcccttgcagcatgacaagtggtccaaagggaaggatggttttcttatcactgatatttggggtgtggatgttggtggctcagatgtaaccactccaatagtttggctacagcatacggaggagaggatgtatctatgtgcttatcagtacaaaagccttacgttgatccttcttatccctctttcttctatacttaatggggagcaaggtgtttcagctgtgaaacagcaacttcttgaaaatgcctcactgaagattttgaaagttgaagaaaagttgtcaaagggatggggtggagagaatgcctatcatgtcagtgggtatcgctacttgatagtggatggtaacatagacatatccagtgcttcacccccatcaaaggttacaacatttactaaggaatctttacttgccttaaataggcttagagataaagttaatcttaaaagagttcattctaatgggataatccagtcgtgactaagattgcgattgtcccatttttagcgaataaattgtttgggctttgattgattctgtacgaatgatcttatagagttttaaatattcaattaacattcttttagctatttatttgtgagatatattacctcattgtatggactattctatgtacataa

SEQ ID NO: 193286 - DNA, 764 bp, Gossypium hirsutum
gtcaggttatggctcttgctaatgttaaaattgttcaggcagctattggtgggtggcattgtttggctgttgatgatgaaggcagagcttatgcctggggtgggaatgaatatgggcagtgtggtgaagagcctgagcggaaagatgatactggtaggcctttgagaagggacattgtgattcctcagcgctgtgcgccaaagcttgtagttcgccaggtagctgctgggggtactcattctgtagtgctgacacatgaaggatatgtttggacctggggtcaaccttggccacccggagacataaaacaaatatctgttcctgtgagagtacaaggtctcgaaaatgtgaggcttatcacagtgggagcatttcataatttggctctccaggaggatgggactttatgggcatggggtaataacgaatacggacaacttggaactggggacactcagccaagatcacaacctatacccgtccaaggattatctggtctcactttggttgatattgctgctggtggatggcattccactgcattgactgatgatggagaggtgtatggttggggaagaggagaacatgggaggctcgggtttggagataacgataagagcagtaaaatggtgccgcaaagggttcaacttttagctggggaagatattgttcaggtatcttgtggtggaacacattcggttgcattgacacgtgatgggcgcatgttttcgtttggacgaggtgaccatggacgactaggttat

SEQ ID NO: 193287 - DNA, 906 bp, Gossypium hirsutum
gtatacgtgttgttcaagaaccagcactataccaagacaccagaggaagcagcagccaaagttattttggcagggttggatctgaactgtgggtcatttcttgggcaacacactgaggctgcagtaaaagcagggcttttgaatgaatcggccattgacaaggccgtgacgaacaacttcgccactttaatgcgactgggattcttcgatggtgatcccagcaagcaaccttacggtaaacttggccccaaagatgtatgtacacgagagcaccaagaattggcccgtgaagctgcaagacaagggattgtgttgctcaaaaacagccccgggtcgttgcctctatctccgactgcaatcaaaaccttagccgtaattggacccaacgccaatgtcacaaaaaccatgatcggaaactatgaaggcattccatgcaaatatacgacgccattgcagggtttaacgacctcggtggcaacaaactacgtgcctggctgcaccaatgtggcttgtggcactgcccaagtagacgatgctaaaaaagtagctgcctcagctgatgcaactgtacttgttatgggcatagatcagagtcaagaaagggaaagctttgacagagttagccttcttttaccaggacaacaaccacttttaataactgaagttgcaaaagctgcaaagggacccgtgattctcgtcataatgtccggtggaggctttgacatatcgtttgcgaaaaacgatgataaaatcacaagcatcctttgcgttggttaccccggcgaagccggtggagccgccattgccgatgtgatatttgggtattataatccaagtggaaggctaccaatgacatggtacccacaatcgtatgtcgataaggtcccgatgacaaacatgaacatg

SEQ ID NO: 193288 - DNA, 562 bp, Gossypium hirsutum
gcaacgatgcaaggaggatcttctggcatcggctacggcctcaagtatcaggcaagatgcgtttcggatgtcaaagcagacacggatcataccagcttcattacgggaaccctcagtctcagggaagaaaatgcggtgcatctgattcggctctcttctggtggaaccgagctcatttgtgacggcttgttttcccaccctaacgagatctgggacctagcttcctgtcccttcgatcaacggattttctccaccgttttttcaaccggtgcatcttatggggctgcaatatggcagatacctgaattgtatgggcagttaaattcaccacagttgggaacgaattgcctcccttgtggcacatgttgctaagattaattgtgttctctggtggccatctggaggacatgataagttgctcagcattgatgatgaaaatattttcttgtggactttagattgttcaaaaaaggctgcccaggtgcaatctaaagagtcatctggtatgcttcattacttatctggtggtgcatgggatccacatgacatgaatgctgttgcc

SEQ ID NO: 193289 - DNA, 984 bp, Gossypium hirsutum
ccctcgcgtccggacccacgcgtccggacaactggtgaatcataccagatgactctttagattgttcaaaaaaggctgcccaggtgcaatctaaagagtcatctggtatgcttcattacttatctggtggtgcatgggatccacatgacatgaatgctgttgcgacaacttgtgaatcatcagtccagttttgggatctacgtacaatgaagaagacaaatgcaattgagcgtgcccacatccgcaatgctaactatgatatgaagaaaagtcatatacttgtcactgcagaagatgaatctgggatacacatatgggatcttagaaagcccaaaagtcctgccaaagagcttcctggacatacacactggacatgggctgtcacttgtaaccctgagtatgatgggctaattctgagtgctggcacagactcaactgttaacttgtggcaggctcctatatctgcagaagataaagcaacatctgaaagcataactgaaccactcaatcaacaggccgacccattgcttaattcctacagtgattatgaagacggtgtatatggcctggcttggagttctcgtgagccttggatatttgcttctctatcgtatgatggcagggtggtggtagaatcagttaagccattcctttcaagaaaatgaaaatgaaggtgttatttgttgtccctatgggcttctacggctattttttgtggaaagtttccaagtagcaacagcagtgctcgaagtgacttgaaatgaagaggggtagcattagcactcaaattaagtgttttttatgacttgttgctgccctgccagcccggccactgtattcttttggtttttttttcctgtcgagatagtatatctgcttcttataatcaggaccatctgacatctggtattttccctgaatactgaatcatgcttttgttgttttgttatgtttgtgttaataatacataacaaaagtttaata

SEQ ID NO: 193290 - DNA, 861 bp, Gossypium hirsutum
aaaagtagagcagagaagaatagaaaccgactcaacttacactgactcttcgatctcacctccagtctcaaaccctttcttaaattaaaagaaaagaatcacattaaaaaaaaaaaagcctgctgaaaaccactaaaagaatggcaactccagacgaaagtcctgcagctaagagatggcttcctctcgaagctaaccccgatgtcatgaaccagtttctttggggtctgggtcttccagagagtgaggcagagtgctgcgatgtttatggcttggatgatgaactcctatcaatggttccacagcctgttcttgctgtgctttttctttatccaataacttctcagactgaagaagagagattgcagcaagataatgagaaaagagatgttagcagtaaggtttatttcatgaaacaaactgtgggaaatgcttgtggaacgattgggcttcttcacagtgttggaaatattacttcagaaatcaagctacaagaggggtcctttttagataggttttttaaatctactgcaaccatggatccattggagcgtgctgcatttcttgagaaagatggagagatggaagttgctcacactgtggcagctacagctggtgatacagaggcttctgacaatgtggatactcattttatctgcttctcatgtgttgatgggcagctttatgagcttgatggaaggaagtcggcaccaatttcccatggggcttcctcaccaagtaccttgttgcaggatgcagccaaagtgatcaagggcatgatccaaaaaaatccagagtccctcaactttcaatgtcattgcactccctaaaatgggggcgggcacaggtacatattaactt

SEQ ID NO: 193291 - DNA, 683 bp, Gossypium hirsutum
  unsure (1)..(683): unsure at all n locations
cggagagatcaaagcctacaaacccagaatcttttactagaggctagagccaaagttcttaaacagtgagagcaaaaagaaaaaagagaggtgcgtgcggcancgatgatgtccggaggcggtgctggcggagtggagtggcacgttaggccacctaatccaaaaaatccaatcgtatttttcgatataaccataggttctatccccgccggtcgtatcaaaatggaactcttcgctgatattgcccctaaaaccgccgaaaatttccggcagctatgcactggcgaatacaggaaagctgggttgcctgttggttacaagggttgccaatttcatagggttattaaagattttatgattcaagctggagatttcctcaagggtgatggtagtggatgtacttccatttatgggctcaaatttgacgatgaaaatttcattgccaaacacactggtcctggtttgctgtcaatggcaaacagtggaccaaacaccaatggttgtcagttttttatcacatgtgcaaaatgcgagtggcttgataataagcatgttgtatttgggagggtgctcggagatagtcttcttgttgttcggaagattgagaatgtggctacaggaccgaacaatangccaaaactaccatgcattatacccgagtgcggggaaatgtaaacgtgttc

SEQ ID NO: 193292 - DNA, 738 bp, Gossypium hirsutum
  unsure (1)..(738): unsure at all n locations
anggagngcttagaaggaaccggggaaacngangccgagggtgtactcatctgcgattgggccgagttaacccacgaatgcctcctcaacatcctttccagactcactttcgagcaccgatggtccggtcctatgcttgtctgcaaaccatggctcaacgcctgcaaggatccctctctcaactccgtcttcgatctcgaaactcgcttcgattcctcctccgagtcaacccgctggtggacccccgaattcgaaagacgaatcgactccatgctccgatcggtcatcacctggagcaacggtaacctaacccagatccttacccgtcactgctccgatctctctctcaatttcgccgctcaaaggtgtccaaatctccaagttctttccataaaaagctctcctcgcgtgaccgatgcgtcgatggctcaaatagcgtatcattgtcggaaccttaaacagctcgacatcagttactgctacgaaatctcacacgaatctttatcgttaattggtcggaattgtcccaatttgaagatcctaaaacggaatttgatgaattggttggacccatcgcaacacgtgggaattgttccagatgagtatctaaatgcttgtccgcnagatggagatacagaggctgctgttattgcgaaatttatgcctcaattggaacatcttgaaatcagattctcgaaattgtcagctaaaggattaggttccatttgtgaagggtgt

SEQ ID NO: 193293 - DNA, 624 bp, Gossypium hirsutum
  unsure (1)..(624): unsure at all n locations
gcagaacgaaaaaagaaacaaaaggatatccggaactggagacaaaaaagagcgaaattttacgatgatccaactgaaagagggataaataacaatggtaagataacaaattggagatgcaagtggcaacgcgtggtggagatgctgctgagcagcgtgccgaaagccactaacgtcgggaaaacgaaagcttctcaacaagttctctgccatcgcaaccaaatgaaaatgcaatggccaatacaatctgatcccctagtgattatccattgtgatccaagaaactgacctcaactgcaacgatgctgtattagcagaagctaaggcggagcggcgacttgatcgacaacgatcagaggactttaaagaaaaagcaaggcaacttagttatccaaagatttttcttcccacctccatgcaaggtaataagttactgcaactgatgataaaactcgtgaaaggagtacaatctaatttctgtgatttggagaaccaaatttatgactaaggcgactacagagtgggatgaaaagaatttccagcttggaacaggaattaaggatacgagttggggaaaatncagactacttgaatctattgcattcaaatcgaaaagaacgggan

SEQ ID NO: 193294 - DNA, 408 bp, Gossypium hirsutum
atgggtccaggcatattttaacacgttccaactgaaagagggttaattaatagtggcgagatcacaaatgcgagatgcaagtgggaaccggtggtggagatgctgctgagcacttaaacgaaaaatgtgctgaaagccactaacatcgggaaaacgaaagcttctaaacaaattctctgccatcgcaaccaaatgaaaatgcaatggccaatacaatctgatctcctagggattatccaagtgatccaagaaactgaccgcaagtgcaaggatgctgtattagcataagccaaagcgaagtggcggctgcttctattaggagagacgattgaataacttgatccacaacgatcaaaggacttgaaagaaaaagcaaggcaacttattatacaaaggtaaaagttactg

SEQ ID NO: 193295 - DNA, 428 bp, Gossypium hirsutum
aaaatccattgtttttaaaccctttctgctagggtttcagactaaaaatgtgcagccatcagaccaccaccatacggttgccgacagcgcgcagatgatggctgattccgccaacggaggagaactccgactaagcccacggaggtttggtatggcgaacatggtttggacatggtgcgtgggtgcgtggtgcgtggtggtggagaacgtgggtagtggcggttgaatgttggcacatggcggctgaagggaggcagcaaatctaggatttccctctttgctgaaaaatttttgtgggctagggtttttttttttaaatttgggctttgttttattgtaataggttaatggctatgtttgggttctaataggctgaaattggatatttgttttttcggtttattttatttgatgcgcccgggcaaaaa

SEQ ID NO: 193296 - DNA, 696 bp, Gossypium hirsutum
  unsure (1)..(696): unsure at all n locations
cggtaacagaaagctgaggataaataagaaaatctcgtantctgttgatatggcaaaggcagaaggactcaaatataaaattattttatataacctataaaaggggaactccgattcagccgaagctattctggaatcgacccctttctttaatttagagaagaaagccatgaaactgagactgaaaaatttcgaatcgaaagaaactttaaggatacaacttctatcatcttcttcgattcttcaactccaagaagccgttttcccctgtctcccgctcaatccccttcatgttactccctcttctctccgtttctccctcaacgccaaggacctcctccacgcgccgtctccgctggtttccctcctttccctcggtgttgcttccggtgaccttatctatttttcccttaaccccaacgctttttctccacctcctcaaaccctgtttcaagaaccgatcctaatgccagagtccagcgccaatcgagagaacccagttcgagaacccatgttgatcgagccccaagtttctcaacaagctaataaaggaaggctcttggagcattatttattgaggaagttcttaggggaagaactgggtgatattcgtagcattcacaacctcatggcgatggaaatccacgtgattttattggattcgggtttcgtgttgtttgatacagtttcaggctt

SEQ ID NO: 193297 - DNA, 645 bp, Gossypium hirsutum
gagagagctttcatttgaaaaaaaaaacgaaaaaagaaagaaaagggagaaaggaaaactagaaaatgaatagaaagagaattcattcagttctgtaattccgttctaaaccgaagaccaaaaagaaagtgtgaaatttgaaatacagaggtcgttgcttccccatttccaaagatgaacggcggcccctctggtttcaataatgctccggtgaccaaaacctttgtaattgcatctgccctcttcaccgtattctttgggatccaaggtcgttctttcaagctcggtttgtcctatcaggatattttcacaaaacttagcatatggaagttaatcacatcagtctttgccttttcatctacaccagaactgatgtttggactttatctactgtactacttcagggtctttgagcgacaaattggttccaataagtactctgtttttattttgttctcagtaatggcttcattcctctttgaggttatggcagtagctatccttaaagatcccacatctaacctgctcacttctggaccttatggcctcatatttgcttcattcgtacccttttttttttgacatcccggtttcaacatggtttcgtatttttggtgttcgcttctccaataagtctttcatctc

SEQ ID NO: 193298 - DNA, 770 bp, Gossypium hirsutum
acacgaatgtgtgtatgatgagttcgtaaagaaagcaaaggctcgagcactgaaacgagtagtcggggatcctttcaagacggggatcgttcttggccctcagatggataatgaccaagtcaggaggatcctcaggtacataaggcctgccatggaaggtggacctcctctggattctggaggtgaacaatttggctccaaaggctactatattcaacccactgttttctccaatgttcaggatgacatgttgatagctaaagatgagatatttggtccagtacaatccatctcaaagttcaaggatcttgaagaggtggtacaaagggcaaatgcatcttcatatggattggctgccggagttttcactcagaatatcgaaaccgccaacaccttgactcgggcattgcgagtcgggacagtatggattaactgctacgacatatttgatgctgcagtcccatttggcgggttcaagatgagtggtcaaggaagagagaaagggatttatggcctttcaagttacttgcaagtcaaggcagttgtcactcctttgaagaacccagcatggttgtaatgtttgtttgtttgttttcttacaaattgccatgaatctaaacttgaactaataagctgccagttttttaaattttgaatgatcagcgtatggtaggatcattcctgaactgataatttgctcatatttggatgagtatggggcataatgttttaaatatatgaataagaaaaaaggcttaaaataatatttt

SEQ ID NO: 193299 - DNA, 827 bp, Gossypium hirsutum
cccacgcgtccgcccacgcgttcgtttaacagaagggaggagaaccctaattttgtctctcccaagagacgaaaggaagggaaaaatggtgttttacttcaaagcccggccagaagctggcgattacaccattttcatgggtcttgacaagtacgagaacgaggagctcatcaaatatggcttcatcgaagatatctggttccatgtggataagatgtcttctgcccatgtttatttaagacttaaaaagggtcaaaccattgatgatataagcgaaggcgttctcgaagattgtgttcagcttgttaaagctaattccatccaaggcaacaaggtgaataatattgatgttgtttacactccatggtccaatttgaagaaaactccttcaatggatgttggtcaagttggctttcacaattccaagatggttcggactgtgagagtggagaagcggataaatgagatagttaacaggttgaacaagactaaagtggaaaggaaacctgatttgaaagctgagaaagaagcagtttatgcagcggaaaaagccgagagaaagcaacagttgagggaaaaaaaacgccgagaggagatgcaaaggcttgaaaaggaaagacaagcagaaataagaagctacaagggtctgatggtctctgaaaagatgacatccaacaaacaaattgcagcaacaagcaagtctttccaggaagtagaagaggattttatgtgaaatgtactggtatttcatcgctaattacgattcttctagctgccagaaacttgctttctgtcaaagaaaggtggtttctttttacttctttttc

SEQ ID NO: 193300 - DNA, 1287 bp, Gossypium hirsutum
ttcctcgcgtccggctttctaaaggagaatccatttttaggaggagagagaagagagatatatgcaaatgctctctaaagcttcatctgctatggcctcctttccttgttcaagggtgaggagtgggctttgtgtttggccaggcttgaggcaattttgcataagaaagggtctcgagtatggcttgcgcttattatcgatgcccctcaaaaccttgcgcggggcaagtcgttctctcagggtcgcggagttttgtagtgtcaccaacgtgtcttcctcattgcaaatcgaattggtaccatgtcttagagacaactatgcatatcttttacacgacgtggacacaggcacggttggagtcgttgatccttcaatagctatgcccattatcgatgctttgagtcggaaaaactggaacttgacttatatattgaatacccatcaccatcacgatcatactggtgggaatgcagagctgaaagcaaggtatggagcaaaggttatcggttcgggaatagacaaggataggattcctggaattgatattgttctaaatgatggggacaagtggatgtttgcaggtcatgaagtgcatgtcattgaaactccaggtcatacccgaggccatatcagcttctattttcctggttctccagcaatttttactggagacactttgttcagcttatcatgtggcaagcttttagaaggcactccggagcagatgctttcttcccttcagcggatcatgtcactacctgatgatacaaatatctactgtggtcacgaatatactttgagtaattcgaaatttgctttgtcgatagatcccaagaatgatgcacttcaggcgtatgcagcccatgtagctcaccttcgcaacaaggggttgcccacggttcctagtacattaaagatggagaaggaatgcaatccattcctccggacatcaagtgcagaaatccggaaagcattaaaaattccggtgacagcgaatgaggcagaagccttgggtatcatacgcagagcaaaggataatttctaggattacttacatacatagatacatatatgatacttcattcctgtttgtgtatagctgaagtcatggttgctattccatttctgaaatgatcaaacagcaccaatgtttactacttccatgtccatatgcttcattttttccccttaatttttccaagttttttgaaaattaaatctgttaatcaaatctctacttttttgctttttggtaaaaaaaaaataaaaccccttttttattaccaa

SEQ ID NO: 193301 - DNA, 425 bp, Gossypium hirsutum
atttcttttagcgtaagaccacagaagtttgttcaagaaatagaaacaaatcgattgcaatggcaagcaagagctcgtcgtcgcattcttcaactcgggtctgccggtgcgctccgaccaatcaccctgggtctttcaggtgcagcctccataggaattcggatagagtttcaagcaaatcggcggcgacgccccatgttaatagacagagggagcgtcagtcgaaggcggcgatgatgttgatgatgtctaacgtatcatcgtcatcgtcgaaatcaagcttgatcaaaagcctttctgatgcagatcattagaccttcttccacccacatcgatcttcaaaggaggcgcaatttccaccccaaaccttcaaaggtttagttcactcaacacctctgctaatggagtgaccggttcttgatcat

SEQ ID NO: 193302 - DNA, 652 bp, Gossypium hirsutum
  unsure (1)..(652): unsure at all n locations
gcaactgagagagatgtctatgaattcttctcaaaagcaggcaaggtaagggatgttcggctgatcatggatagaaattcaagaagatcaaagggggttgggtacattgagttttatgatgtgatgtctgtgccaatggcaatcgcattgtctggtcaactgcttcttggtcaacctgtgatggttaaaccttcagaggccgaaaagaatcttgttcagtccaatacttctggtgcaggcgcaggtggtgttgctggaccatatggagctgttgatagaaaactatatgtagggaacttgcattttaatatgacagaaatgcagcttagacagatatttgaaccttttggacctgtggagcttgtgcaactaccacttgaccctgagactgggcagtgcaaaggttttggggttggccagtttgctcaacttgaacatgcaaaagcagctcaaagtgccttgaacgggaaactggagattgttggtcgaaccataaggtttcatctgttacagatcatgtngttacccaagatgctacggcaaaatctgcagactttgatgatgatgaaggtggtggcctggctttgacgcacaatcaagagcgttgctatgccaaactggatgctctgtattgcacgagcttacgagcctn

SEQ ID NO: 193303 - DNA, 458 bp, Gossypium hirsutum
gtgcacgcccacatggcagatgtcgaagaacccaagaagcttgaatccgaaatcccctccgaccctccgccgccacccaccgaagccgccgtggaaaaatccgtgactccacctcctcctactgaagaaaagcccgccgactctacggataagcctcccgaacccatcgaaaaggcggctgagtcgacggagaagaaaagcacggaggtgtctgttgatcgagatgctgtgcttgctagagttgcgactgagaagcgaatttcactaatcaacgcttgggaagaaagtgaaataagcatagctgagtacaaagcacagatgaagctttcttctattgcggcttgggagaataccaagaaagcagctatagaggctgagctaaaaaggactgaggaaaagttagacaagcagaaggccgagtatgtggaaaaaatgaaaaacaaggcagccttaatcca

SEQ ID NO: 193304 - DNA, 1556 bp, Gossypium hirsutum
  unsure (1)..(1556): unsure at all n locations
ttgacgcgtgggcggacgcgtgggcggacgcgtgggcggacgcgtgggcggacgcgtgggcggacgcgtgggtttgtttgccacagagtattgagaaaaatcgctttgtttcactcccttatttgctaatatgtcgctgcttacagatcttgttaaccttaatctctccgactgcactgacaaaatcattgctgaatacatatggatcggtggatctgggatggacctcagaagcaaagcaaggacactttctggtcctgtaagtgacccttcaaagctacccaaatggaattatgacggttccagcacaggtcaagcccctggtgaagatagtgaagtcatcctatatcctcaagctatcttcaaagacccattcaggaggggaaacaatattcttgttatgtgcgatgcttacacaccagctggtgagcccatccccacaaacaagagatgcaacgctgccaagatatttagccatcccgatgttgctgcggaagagccctggtatggaattgagcaagagtacaccctgttgcagaaagatgttaagtggccaattggatggcctcttggtggctaccctggacctcagggtccttactattgcggtgttggtgtggacaaagcctatgggcgtgacattgtagattctcattacaaagcatgtttatatgctgggattaatatcagtggcatcaatggagaagtgatgcccggacagtgggaatttcaagttggtccggcggttggcatttctgccggagatgagttgtgggttgcacgttacattttggagaggattacagagactgctggagtggtgctctcctttgatcctaagccaattcagggagactggaatggtgccggcgctcacacaaattacagtacgaagtccatgagaagtgatggaggctacgaggttatcaagaaagcaattgcaaagcttgggctaaggcacaaagaacacattgctgcctatggagaaggcaacgagcgccgtctcaccggccggcatgagactgccgacatcaacactttcttatggggtgttgcaaatcgtggggcatcaattcgtgttgggcgagacacagagaaagccggaaaagggtatttcgaagacaggaggccagcatcgaacatggatccatacgttgtcacatccatgattgcagaaaccaccatcctgtggaaaccatgaggggaagcccatgtttgggatgctgtttccatggtagaaagaaaggaaagagccaaagtgtttgttttgtcccctccagtgggatacactcatttcattgcacttagtaattaggtcatggttgcccttgcttggatttgaggtagaaagggttgtttctactgctttcttgcaattacggttaatcttgtgttaaataaatgagaatgcttttattattattaataataatgaagggctagattttgagtttcaaaaccnannanntaattttaaatttttattattaatatttaattttttttttttttttaatatttacttattttattttttttaactcttatttaatatt

SEQ ID NO: 193305 - DNA, 1499 bp, Gossypium hirsutum
  unsure (1)..(1499): unsure at all n locations
cgcagaattttttttttttttgaatgcgtgcttgcttcttgaatcttcactcactcattttttcacaaacaagcaagtcctttacagatcatctttctctctctcattttccacttgagcactttatttgccttttcgtttttttttttcccctccggagtttgctttttttgcagatcaaggaagaaagttatggcagaagaagaaactgaactgagcgacaagcaaaagaaagagatcgccaaatggttcctcctcaatgctcccgcaggcgaaatccagtacgttgccaaagatttaaaatccgttttgaataatgatgacgtctacgatgaggcggcatcggaagcatttcctgtttataacaaatctcacatgatttgcctcgaaatgcctggtagattcggagatgtgctggttacatcatatggggagcttcagggtaatgagtatctaaaccccaagactgcccaagttgctatagttgaccatgtcaaacaggtttgtacagaggttagacctgccactgatgaggaacttcccactccatatgttgaggaataccgatgtgctctggaagcagaaatgctgaagtatgttagtgaagcttatccaaaaggttcttgttcagtgtactgcattaatggaaaagatgtggagggacccggatatgatttcgaacttgttgcagtgatttctgctgctagacttagcccacagaatttctgtactggaagttggcggtcgatatggaacattgagtgcaaagatgatattcaagttctggaattaaaaggcaaattgcaggtgggtgcgcactattttgaagagggaaatgtgcaattagatgcaaaacatgaatgtagagattctacaatgtttcagtcccccgatgatggtgcaattgccatagccagtttaattcgccaccatgagacagagtacctggcatctcttgaggcatcctatttgaatttgccagatgccactttcaaggatcttcggaggaaacttccagttactcgggccttatttccatggcatagcacttcgctattcagcctgactagagagatatcaaaagagcttggaatcgggaagtgactagatcatacctgaaggcataaagtgcattcttttatgcataaaattgagttctaggaatactcattcaacggcctgcctgtatggtttgtgcagttttgagagtttacaactcttctttgcctgcctgtatcctttgtttggtgtgcaagttgtgttctcgcctaagagtgaaatatgttggtgtgctataccgcttcattctttacaagccgtgtgttacattggtttgttataattaacaacatttccaggtactattgatgtttgtggaaattttgggtacagatatatatgcctgaaattgtatgctcaggttcagtcttataaacccatggcanagtatttacatattanattgtaaattgtatcattttgctattatcaagtatttt

SEQ ID NO: 193306 - DNA, 583 bp, Gossypium hirsutum
gtctgcccaaaaccacgtcgtttgggtctcttaaacgcctctttcaacgaccagccagttcggtccctcagatggcaacttagccatcaaactgagctttgtgattcgaaagcagggagtgatattttggatatgattcttacaaagggtggttgtagagcagaacaagtagcgtcgtcgcccccatttttttgtgggtcgccgccgagtagagtagctaacccattaatacaggatgctcgatttggggatgagaagatggtcaacccgccgtctccaaatccgcctcctccttcgtctccgtcatcatcttcaaggaaaggagggtgtattcgggccaattttggtaacaaaccagcagtgagagtggaggggtttgattgttttgcactggcttagaacccatttctatcaacaaaagagtacatagataaaacaagaggagctaccaaaacagagaagggaattttgaaattgtaagtgactgaagagaaaaaagcaaagaaccctttgttagtgtaaatatatggataaagggttgtttgtatgtaatgaaaaaagaacttggtgtcttgtaagtatg

SEQ ID NO: 193307 - DNA, 1637 bp, Gossypium hirsutum
ggaagattcatgaagttctgagaaattggcctcagagggatattcaagtcatcgtcgtcactgatggggaaaggattttgggtctaggggacctcggctgtcagggaatgggaatacctatagggaagctttctttatatacggcactaggaggggtctgtccgtctgcttgcttgcctgtaaccattgatgtgggcacaaacaatgagcagttgttgaatgacgagttctatataggacttaggcgaaggagagctaccggactggaatatgccgaacttatgcacgaattcatgactgcagtcaagcagaactatggggagaaagttctcattcagtttgaagattttgcaaatcacaatgcatttgatttgcttgctaaatatggcacaactcatctggttttcaatgatgatattcagggaacagcatctgtggtccttgcagggcttgttgctgcactaaaagtagtcggtggaaccttggctgatcatagatttttattccttggtgctggagaggctggcactggcatcgcagaacttatagctcttgaaatttcaaaacagacaaacatgccacttgaagaagctcgcaagaagatttcgcttgtggactccaagggattgattgttaaatctcgcattgactcacttcagcatttcaaaaagccctgggctcacgatcatgaaccaatcaagaaacttgtcgatgctgttaatggaatcaaaccaacagtgctgattggaacatcaggagtaggaaggacatttactaaagaagtggttgaggcaatggctgcgttgaatgaaaaacctattatattctccctttctaatccaacttcacaatctgaatgtactgctgaagacgcatatacatggagtcagggccgagccatttttgccagtggaagcccatttgatcctgtagaatacaagggaagggttttcgtgcctgggcaggcaaataatgcatacatcttccctggcctcggtctcggtttgattatgtctggtgccatccgtgttcatgatgacatgcttctggcagcctcggaggctttggctgcacaggtgacgcaggagaacttcgacaagggactcatttacccaccattcagaaacatcagacagatttcagcccatattgcagccagtgttgcagctaaagcatatgaactgggtttggctactcggcagcctcagcccaaggatcttgtgaagtatgctgagcactgcatgtacaatcctgcctaccaaagctaccggtgaaggtagttagaacgcctctgcttttaccatattatttattaaaaaaaaaaggaagcccactttaaccattccttgaagtcttgtatttggtcttttttgtttgatatctttgtcattcttgaagttttgttcctcgtgttcatctttgctgtcttgtaaggtacttggtgggtaagaaggtgaatggtgggtggtgtagttagatcaaatgaagtcaaaagtagcatttttttttttttgaaaaaaaatgtggttatggactggaaaatgtttcacattacatgaaatagaaacttgaaaggtgtcagaatcagtgcgagtttgcttgccctttatttctcatctactcaaagtcttttcttt

SEQ ID NO: 193308 - DNA, 728 bp, Gossypium hirsutum
gctgcactaaaagtagtcggtggaaccttggctgatcatagatttttattccttggtgctggagagttgaaggacagggacatctctcaaaccctttctgtttaataccattacaaccttaattgttgaaggctggcactggcatcgcagaacttatagctcttgaaatttcaaaacagacaaacatgccacttgaagaagctcgcaagaagatttcgcttgtggactccaagggattgattgttaaatctcgtattgactcacttcagcatttcaaaaagccctgggctcacgatcatgaaccaatcaagaaacttgtcgtccctgttaatggaatcaaaccaacagtgctgattggaacatcaggagtaggaaggacatttactaaagaagtggttgaggcaatggctgcgttgaatgaaaaacctattatattctccctttctaatccaacttcacaatctgaatgtactgctgaagacgcatatacatggagtcagggccgagccatttttgccagtggaagcccatttgatcctgtagaatacaaggcaaataatgcatacatcttccctggcctcggtctgggtttaattatgtctggtgcaattcgtgttcatgatgatatgcttctggcagcctcggaggctttggctgcacaggtgacacaggagaactttgacaagggactcatttacccaccatttagaaatatcagaaagatttca

SEQ ID NO: 193309 - DNA, 629 bp, Gossypium hirsutum
ggaggatgttcatgaacctgctccgcctccgcaacctgtgacactagctccagaggaaaaggccccaaaaacggctgcattaaaagctactgaaaagaaaagaaaggctgttgaagtagctaaagaagagccccttgatccaggggctgataaacttcgccagcaaaggcttgtggaagaagccgattataaatcaactactgaactgtcttccaagaaaggtgatgataagactatcgataattttattcccaaatctgaaagtgactttgtggagtatgctgagcttatgtctcacaagcttcgcccatatgagaaaagttatcattatattgctctactcaaggctgggatgagactgtcattgacttctttgaaagcagctgatgtcaaagatattgcatcttcggtcaccgcaattgcaaatgaaaagctaaaagcagaaaaagaagccacaactaaaaagaagacagttgggaagaaaaagcagctccatgttcataaaccagatgatgatttggtggttaccgcttatgatgacattgatgattacgactttatgtgattcatttttgggcaaatgccacccaccttcaagtgtttgcattacggatcctggggttaccgca

SEQ ID NO: 193310 - DNA, 783 bp, Gossypium hirsutum
aaataatgtgacaaaggaataaagacagagaacggttgttaaggggagttcaaatcaaatctcttattctttaaaatttctgggaggaattgtatctctctctctctctctctcctctcagctggacgagaaagaggaaatttcggttggtataaaaatgcaggtgtttgatagaatgactattccaattcgcagagtttggaccggtgtcgccacccgcttcggcgttcgtaaaagtgctcatatgaagcttcgaaaagatataagcacttgcgaatacgaggatgtgcgagtgatgtgggaaatgctgagcagaaacgaagcagaaaccattcgatccccaacaacaagtaaaggaagatgcagaaagagaccattgtggaattgctttgaatgggcaaagcgagctccttttttttgtcgaagcttctgaataactgtcagagagtgtgtcttgttccactcagggttttcagtttatcatcctatcttagaccttcgtttggatatcatcgatccagtgataataaaagaaaaaacaaatagggagagaatggagggatttgtttgtgagattgcccctcttcttccctttggtgtttttttttctgttatgtatgtctcagttatctgtagatatcaaccgtctgtcatgtccatgcttttatctctgggtctatgtaataagctgctatatatatgtccatgttctcctccaggctctttaatcttgagggtggtacattgatgaagtttgtaaaaagatgggtgtctttcattttc

SEQ ID NO: 193311 - DNA, 988 bp, Gossypium hirsutum
  unsure (1)..(988): unsure at all n locations
cccggaccgacccacgcgtgcgaacacattccattgatttttacggcagaaaaaagagataaaaaaaaacgaagaaaatggcgtccctctctgcccaaatccctccctgcttggccttaatgatggctgcctgtttgatgataggcatcaatggaagcatagatggagctcagagggagttcgattactttgctttgtctcttcaatggcccggcaccatctgccacaagactcgccattgctgctcctccaatgcctgctgccgaggctcaaactctccaactgaatttaccattcatggtttgtggccggattataatgatggaacctggccctcctgttgttaccgatctcagtttgatgtcaaagagatttcaacattgcttgatgcacttgagaagtactggccatcgttatattgtggcaaatcatcaacttgcttcagtggaaaagggttattttgggctcatgagtgggagaagcatggaacttgctcatctccggttattccaaatgaatacagctactttataacaaccctcaatgtgtacttcaaatataatgtcacgaaaatactgaatgaagctggatatgttccttctaatattgaaaggtatcctcttggaggcattgtctctgccattgaaaattctttccgggccacaccagaaatgatttgctccaaaaaagctgttgagggaaattcctttattcctccttaagggattttcaaccctcggacctgtttggcttccaaagacctcatgttcccacgtatgttgagccttgcccccctaatgtgttcnaaggggaaagggaagcctctcgaattcttgaatatgggcctagtgtatccctgatgaatggaaancctctggtaaaggttccnccacttgaaagttttctggttctgttgaaaagaatatgttactagttatgttttcagatatccttatggcccgcattttttacgctgggctcgtctccc

SEQ ID NO: 193312 - DNA, 992 bp, Gossypium hirsutum
gttattctcacacagcaaacctcaccactcccttgcacttaagctggaaataatccataaaaaataaataaaacccaccgaaaattttgaagctttagacctgttgctttcgaacaaaccccataaaaaagatgcaagcttggttctcagggagcagtagtgtagatgatgggcagggaaaagaaggatcatcgcttttagctgattggaactcttatgccgcttcaagagaatcggaagatggctctgcgtttgggttcgatcttgagtctgctatgaggtctgccaatgatactgtctctggtaccttcaacgtcgtttcgaaaggtgtgagagatattcccggaaacttccaatctgccacgagtagtgttccttcaggaaaagcacttctctattttggtttatttctggcaagcggggtcttttttgttttcattgcttttaccatgtttctgccggtcatggtgatcatgccccaaaatttgcaatatgctttactcttggatgtggctttatcatcggatcattctttgctttaagaggcccacagaatcagttagctcacatgtcatcaaaagagaggcttccttttacactgggatttattggaagtatggtgggtacaatatatgtttccatggtgcttcacagctacattctttccgttctcttttctgtgttacacgtgcttgcacttgcttactacgctatctcttacttccctgtggatctgccgggctgaaatttctcacatcggctcttacctcttcaataactacctgttttggcaggtgacctggccaccttccacctttgtttttgacttgtatacttgttttgagtcattaaagggtcttagttacatgttttgttgcttccatgctgtcattttcttgtattttctgaagaaaaactgcaaaaagtgtaccttttatctgcatcaaaatttggatccattaatagatgaattcacttagttttggttcgtt

SEQ ID NO: 193313 - DNA, 496 bp, Gossypium hirsutum
gaggaagctccgatctaaatgagtcagatattggaataataacaccatatcgccagcaggttctcaagatcaagaaagtgctcgaaacctgggacttgctagatgtaaaaggttgggcagtgttgcacaatttcagggccaagaaaggggagtcattattgcctctaccgttagatcaacagtccaacacagtgaggtcgacagaacttactgtctgggatttctgagcaatccaaaaagggttaatgttgcgattacccgggccaaatcattgctcatcattgtcggaaatccacacatcgtttgtaaggatccttactgggaaaaactggtgtggcattgtcatgaaaataactcatatcagggctgccccccaccagaaagggtgaaccatgactttgaagagtcatgttctgagactggattaagtaacgaaatagaaggttcacgttggaatgatgggacatgggattgttaatatgaaacaaaagctggt

SEQ ID NO: 193314 - DNA, 421 bp, Gossypium hirsutum
cccacgcgtccgcccacgcgtccgtttttttttccttttcgattctttgatttgagaaaggaaacaggaaaaagatgggttctttcttttcatccgattcaacgccagaaaagccatcatcttcatctgagccttcaagcgtcctaacctttcattcatcacccagatggcaacttcacttcaactctgtcaaagaaacctcacagcttatggttatagatttctcagcttcttggtgtgggccatgtaaattcatggaacctgttttgaatggcatggctgctaagtttactgaagttcagtttgtaaaacttgatgttgatgaactgcctgatgtggcgcaggaatttggggttcaaggaatgccaactttcgtgttgctaaagaaagggaaggaagtggatagggtggttggagccca

SEQ ID NO: 193315 - DNA, 622 bp, Gossypium hirsutum
cccacgcgtccgggcaggattagcctttaattggaagtggcaacaaaagatgaaatgacagggaaaaccgtatgatggggcggacataatcaccggagcgaatgtgcaggtttgttgggagaagtttgcgaggtatttcgaggttgaattgaaggaagtgaagttgaaagagggatactatgtgatggaccctgtgaaagcggttgaaatggttgacgagaataccatatgtgttgcagcaattctcggatccaccctaacaggggagtttgagaatgtgaagctccttaatgaacttctcaccaagaagaataaggaaaccggttgggataccccaatacatgtggatgctgctagtggagggttcattgctccctttgtttacccgcaactcgaatgggatttccgcctgccgttagtaaaaagcatcaatgtcagtgggcacaagtatggccttgtatatgctggtatcggttgggtcgtgtggagaagcaaggaggatttgccagatgatcttgtgtttcacatcaactaccttggatctgatcagcccacattcaccttaaacttctctaaaagctctagtcaaatcttagctcaatattatcagcttattcggctc

SEQ ID NO: 193316 - DNA, 587 bp, Gossypium hirsutum
tttggtaatgcgatacaaccagaaacaggcgctgagaaagaaaccatgtctcaagaagatcaggaggaagaagttgggaaactggccgtccgcctagccaacgccgtggtacttccaatggtcttgaaatcagccttggagctgaacataattgacacaatctcagccgctggtgacggcgcgtttctgtcgccttcccagattgcgagtgcccttccctccaagaatcctgacgcaccggtgctacttgatcgaatgctacgcctgttggccagccattccattctcaaatgcgcagtaaaagcaaaggaaaaaggagaaattgaaagactgtacggtgcaggcccactatgcaagttccttgttaagaatcaagatggagggtcgattgcacctctccttttgttgcaccatgaccaagtcttcatgcaaagctggtaccatttaaatgatgctatactaaaaggaagggttccttttagtaaggcatacgggatgacagcatttgaatatccaggaaccgatcaacgattcaatagagtatttaaccaggcaatgtcaaatcatactgctttgataatgaggaa

SEQ ID NO: 193317 - DNA, 887 bp, Gossypium hirsutum
accacgcgtccgttaagagttcaattttgatataataaaaacaaacagaaaataactcttctccggatgggaaagccaggattgttggatcttgagaaccattttgcgttttatggggcatatcacagtaacccaattaacattttgatacatactttatttgtgtggccgatatttttcacatctcttatacttttctactttaccccagctttctatgatctttctcaatctgggattttcccttctggaattaatcatgcgttggttctcaattatggatctgctttttctattttcctaggcttgttttatgtagttttggataagaaagctgggtctttggccgctttgctgtgcttagcttgctgggttggagctagtttcatcgctgcaaaacttggctatcctctggcctggaaggttgtgctggtatctcaattgctttgttggacaggacagtttcttggccatggaatttttgagaaacgagcacccgcactgttggacaatcttgttcaagctttactaatggctcctttctttgttttgctggaggttcttcaatcattatttcgaatacgaaccatatcccggttttcagatgcgcgtaaatgcaaagatcaaagccgaaatcaaggagtggcaggacaagaaacagaaaaaggtttcttaggttacattgttgtaagttgtatgtttggtaaggagtaaatttaggtttaaatataatgtactgttgtggtataagtgttgtaaggcaacattgcatggattttaattatccatgaaagcatcgctatgaattgaacaatgttttggtgtctggagtaggaccagagatgtagtatataattataatgcatttatgtaggtgattttaaata

SEQ ID NO: 193318 - DNA, 442 bp, Gossypium hirsutum
cttaacttttctttcttcaaattatattctcaaatccaagtcctgtgctagaagaggtgctgttgtagaagctaatgatcatagaatggcagaggagaacgtagaaatcctcgaaatcgatgacaggttcgagtttgaccctgaagagtgcgatattggtaaaggtaagtgggtgttcaaccgctctatcaagccattgtacacagatacaagttgtccatacctggacaggcaattttcttgcgtcaaaaatggccggcttgattttgactaccatcactgggagtggcagcctgaggactgcaacctgcctaggtaacaatattttactctctttttttcgttcatgcatggaactgaaaccagttgtttttttagtttacttttgttgcgtgatgtttcgtctatgtagatttcatccagaacttgcacttcaaaagct

SEQ ID NO: 193319 - DNA, 609 bp, Gossypium hirsutum
ttctttcgtccgcccacgcgtccgcccttaggcgtagctctcgatccacatcataaaaaaagtaaaggagaaaatgaagggtctgcaggcacttatattggcaatggtaatggttatggcgatcgctacaactgatgctcaaagcatttgcaacatgccagcttcaggtttgatggcatgcaaaccagcagtgaccccccccaaccctccgccgcccacgtcaacttgctgctccgccctctcccacgctgacatgcgttgcctttgctcatataagaactccaagctcttgccttcccttggtattgacccaaaccttgccatgaaattgcctagcttgtgcaagcttcctcatcctgcaaattgttagttcctggttctccatatttgatctcaaatgtgagggaaaatcatgcttattataagcctctacttcacataattgtactgaccttcgggttttctttttcctttatttctttttatgtgttgtgtttcgattggtatcttatagtcgtgtgatttctcaccaataatcatatattagtattgtttccaccacgcactacgttgcttaattaattttttaatcaaatatgttctacattt

SEQ ID NO: 193320 - DNA, 452 bp, Gossypium hirsutum
cccacgcgtccgggccgcccttttttttttttttttttttaaatacaatagaatcatagggtggtgtttcataaatatcttgagagtaccaagaacaatttgtcacaaaattataaaacatgataaaaaaaaaaatagaacaggtagcagacaagctatttgttactttttgttttgcttccaaaccttgccatgaaattgcctagcttgtgcaagcttcctcatcctgcaaattgttagttcctggctctccatatttgatctcaaatgtgagggaaaatcatgcttattataagcctctacttcacattattgtactgagcttcgggttttctttttcccttatttctttttatgtgttgcgtttcgattggtatcttaatagtccgtgtaatatcacatacgtgtgatttctcaccaataatcatatattagtattgtttccacctaag

SEQ ID NO: 193321 - DNA, 388 bp, Gossypium hirsutum
gctaaccagcagtgacccctcccaaccctccgccgcccacgtcaacttgctgctccgccctctcccacgctgacatgcgttgcctttgctcatataagaactccaagctgttgccttcccttggtattgacccaaaccttgccatgaaattgcctagcttgtgcaagcttcctcatcctgcaaattgttagttcctggctctccatatttgatctcaaatgtgagggaaaatcatgcttattataagcctctacttcacattattgtactgagcttcgggttttctttttcccttaatttctttttatgtgttgggtttcgattgggatcttataggccgtgtaatatcacatacgtgtgatttctcaccaataatcatatattagta

SEQ ID NO: 193322 - DNA, 499 bp, Gossypium hirsutum
tccgaagacattattgacgtcgtgcggaaaatagaaaaggagcaaattgatgaacatggtcatgcttggctcaccaaaaatcatatcaaggcagtacttttgaacatgttcttgggcggcgttgacaccggcgcgcttatagtgatctgggcagtggcggagctggcgagaaagccaacatttatgaagaaagctcaggacgaagttcgaggggtggtggggaagaaaggaagagtaacagaaaccgatctggatcaacttcaatacctgaagatggttcaaaagagactctaagactgcatccacctgcgcccatgctgatcgccagagaagccatctcacacttcaacatcaatggttaccacatttatcccaaccctccgacgaccacgtcaacttgctgctccgccctctcccacgctgacatgcgttgcctatgctcatataagaactccaagctcttgccttcccttggtattgacccaaaccttgccatgaa

SEQ ID NO: 193323 - DNA, 487 bp, Gossypium hirsutum
acgaagttttaggggtggtggggaagaaaggaagagtaacagaaaccgatctggatcaacttcaatacctgaagatggttttaaaagagactctaagactgcatccacctgcgcccatgctgatcgccagagaagccatctcacacttcaacatcaatggttaccacatttatcccaacacacttatccaaatcaatgtatgggccattgcaagggacccaaagtactgggaaaaccctcaagaattctccccagaaaggtttatcgataacgccgttgacttcaaaggacagcattttgagctgttgccatttggaggtggcagaagagggtgtccggggctgtacatgggaaccgtcacaaccgagcttttactcgcaaatctcttgtattgtttcgattgggttttgcctgatgggatgaatgaggcagatattaacatggaggaatgggctggtaagtgccttaccctctccaagaagacacc

SEQ ID NO: 193324 - DNA, 628 bp, Gossypium hirsutum
aataaaaatagttatatccataaacatgtactatctctctgtttatttagatagtcacaatgtttagcatgaaagaaatgcaagttgtatgacattattattttgaaaatgttgaacacaacaagtgggcaatctcatgcgaccaggaggaaactagagcacatagtgaacagaaattaaaatcacaaccaaaaggctgttttatatattaatccaagattccagccttcttatagctctcaatggaatccacaagagtttcttccaatggccgataactccaccccagcctttgtaatttctctgaactaaccgtatcttcctcccctcccgcagtaaagcttttaggataattgtattgaggaaacatacttctcaacttatcaacaagatcacgtgccttgatcgtgtgagctgtgcatatgtaccttccttcagccgctggcttctcatacaccagaagcagtgcctgagctacatggcgcacatcaactatctttcgaattttgttttccagagagtcatattccccttttaaaagattaatgagaaccttgctactagcattgatggtggactgcagaagtggccccaatatcagtgtaggacaaacagtaacaacatcaag

SEQ ID NO: 193325 - DNA, 418 bp, Gossypium hirsutum
gttgcttctaagtcgcaaaatcgtcatcttttactattgtaggattgctagaagaggcggacattacaaaggctggaacttacaaagtgtaaagtacatttttttgctgtcgtgaaagcaaggcaacccgcataccgaaccgtggaagcaaaacacttgtcctgtcttttccgctaacactttactgtcctcgcgtcagcttcgttggaggcaatgggttattgcaaggctccttgtgtgtttttactatgcctcttcatcagtttctgccttccccgtcaattgttggctgatgaggttgacaaaaacctgacagctcagctgtttatagatgcttccgaacagtcaagccgtccaatacctcaaacactgtttggaatattctttgaggagatcaaccatgctggtgctggtgggc

SEQ ID NO: 193326 - DNA, 675 bp, Gossypium hirsutum
gtagagaatgctgatgaatgcatggttcttgataatgaggcactttatgatatttgcttccgaactctgaagctcactactccaagctttggagatctaaaccacttgatttctgctactatgagcggtgtaacatgctgcctaaggttccccggacagctgaactctgacctccgaaagttggctgtgaacctgatcccgttcccacgtcttcacttctttatggttggttttgcaccacttacatctcgtggttctcagcagtacgtttctctcactgtcccagagctaactcagcagatgtgggatgcgaagaacatgatgtgtgctgctgaccctcgccatggtcgctacctgacagcgtcagccatgttccgaggcaagatgagcaccaaagaggttgatgaacagatgatgaatgtccagaacaagaattcatcttacttcgtggagtggattcccaataatgtgaaatccagtgtttgtgatatcccaccaaagggtctgaagatgtcctctactttcatagggaactccacgtcaatccaggagatgtttaggagggtaagcgagcaattcacagcgatgttccgtcgcaaggcctttttgcattggtatactggtgagggaatggatgagatggagttcacagaagcagagagcaacatgaatgac

SEQ ID NO: 193327 - DNA, 472 bp, Gossypium hirsutum
cggacgcgtgggtcttcaccgagactttgatcaccaaaccaaaaatcgaacacgaaattcctctttttcgccagatctgggcacgtcgccggtcttagcaacctccgatccaatcatttcacctattcatttcaattcattaaacgtgtgacgcgacccactggatcgaagatgccggtggccgcttctgccatctacttcttgaatcttcgcggcgatgtcctcatcaatcgtctctaccgagacgatgtcgggggaaacatggtggatgccttccggatgcacattatgcaaacaaaagaactcggaacttgtcccgtcagacagattggaggttgctctttcttttacatgagaatcagcaacgtatacatcgtaattgttgtcagcagtaatgctaatgtagcttgtgctttcaagttcggcgttgaggctgttgccttgtttaaatcattttttggtggcgcttttg

SEQ ID NO: 193328 - DNA, 1130 bp, Gossypium hirsutum
aagagtgccaaggtcaggcagcaagcagctgatcttatttcaagaattgcagtggttatgaaacaatgtcaagaggaacaattgatgggccatctaggggttgttctatatgagtatctgggtgaggagtaccctgaagttttgggatctattttaggtgccctcaaggcaattgtcaatgtcattggtatgactaaaatgacccctccaatcaaggatttgcttccaaggttgacaccgattctgaaaaatagacatgagaaggtccaggagaactgtattgatcttgttggccgtatcgctgatcgaggtgcagagtttgtaccagctagggagtggatgaggatttgttttgagcttcttgagatgcttaaagctcacaagaagggtattcgaagagctactgtcaatacctttggatatattgctaaagccattggcccacaagatgtcctggcaactctattgaacaatctcaaagtgcaggaacgccagaaccgtgtttgcacaactgtggctatcgcaattgttgctgaaacatgttcaccttttacagttttgccagcattgatgaatgagtaccgcgtgccagaacttaatgtgcagaatggggtcttgaagtctctttccttcctttttgagtatattggtgaaatgggaaaggattacatctatgctgtgactccattacttgaggatgctcttatggatagagatttggttcacaggcaaactgcagcttcagctgtcaagcacatggctttgggtgttgctgggttaggttgtgaggatgctttagtccacttgatgaactatgtctggcccaacatatttgagacttcacctcacgtaatcaatgctgtaatggaagccatcgaagggatgagggtagccttaggtgctgcaattgtgctgaactactgtctccagggactcttccatcctgctcgtaaggttaggggaagtgtattggaagatttataattcactttatattggatcccaagatgctctagttgcagcgtatcctattctagaggacgagcagagtagcgagcagaacaacatatatagtaggcccgagttaatgatgttcgtataaattgctgctatgataggcagatatcact

SEQ ID NO: 193329 - DNA, 577 bp, Gossypium hirsutum
agatggggtggaagaagggagtgccagagttcgaagagaccgggccagatgacttcgacccggccaatccctacaaagacccggttgccatgctggaaatgagggagcatatagttcgagagaaatggatcgacatagagaaggcgaagatcctacgagacaaagtcaggtggtgttaccgcatcgaaggagtcaaccatctccagaagtgccgccacctcgttcgcctgtaccttgacgccacccgcggcattggctggggcaaggatggccgccacccgtccctccacggtccgaaggttgaggaggttgagtcagaatgagtggctgctttcagctaaggaagggactgagtttggcctgcagacgtgagggacctgaataactgctcaatgatatggctgttattgctgtttttattgtaagagtgtttagaatccaaaatcttgctatccataaccgtacatcaggtaatgaaataagtttgtcgtcatttccctgttggattgctgatgtgataagatttagaagacaatacatattttttctgctatatttgagtgactattagaatttg

SEQ ID NO: 193330 - DNA, 592 bp, Gossypium hirsutum
  unsure (1)..(592): unsure at all n locations
ctcgttgcaatactcacactttagagagaggagactttgatttttctcttcattgattttattcattacaaaacaaattaacacagatcactctctactcaccggggagaagacagtttcccaaaaccttaaaatccacgaaaaaacataaaaaacagacaccatgtatagagttgctctttcacgtttcagggctctcaagggccgttccggtaatttagcagctgcacgttatgctacttcgagtgccgttgctcctctggacacaccatcagacagcgtttcccttccgccaccactacctgattacgtagcacctagtgaaactaagattaaaaccctatccaatggtgtgagaatagcctcagagcaattaccgactcctgctgcctcgatcggcttattcattaattgtggttccatttacgagacaccaatatcatctggtgcctcccacttgctaaagcgaatggcattcaagagcacgacgaaccgtanccacttgcgtgttgttagggaagtcgaagcaattggaggtaacacattancctcggccactanggagtgcatgacgtacacctttgatgccctt

SEQ ID NO: 193331 - DNA, 391 bp, Gossypium hirsutum
aaattacttgtaaaacaaaatgcagacaaagatacgaaggataacgacggcaactctggagtcaacctatgtgactcaggttggccttggttgcaacgtgcaggcaaagcggaatgacctgtgttttattcccaagtttggtttcagttaaaaagtacttgaaaaaatttctcatggatgtatatgggtataagtaaccttttgcacttctttccttagttatatgctaatgtggggtactctgatgttcattggcctcacctccttaagtactgctttctttaccaccataagtagatggaaaagaattggaagggggctttagccggtgaaatggaattctgataccatcatttgtttggatagagtctagaggtatgtagccggacat

SEQ ID NO: 193332 - DNA, 1058 bp, Gossypium hirsutum
gtttttctcgtccttaaaactctcttctaatttggtgccatctttggatctctcacttttctacctttcagatttcgtgaaacggagaggagatatctttattcttctgaacttgcaactggaagaggaaaatttcattacagcaactggtccaggccttttcgttcgtctttacggtacttccctccgtttgaacacttccagatctgaagaaaaatgcctcccgccgctcctcgatccggagatgcgatcttcgccagcgtagaacgcgtgaatgcagaactattcactttgacttatggagcaatagtgcgtcaattgcttactgacttggaggaggttgaggaggttaacaaacagcttgatcaaatgggctataatataggaattagactaattgatgagtttctagcaaaatcaaatgtgtccagatgtgttgactttaaggagacagcggaaatgattgccaaggtgggtttcaaaatgttccttggggtcactgcatctgtcatgaactgggatgctgatggcacttgttgcagcattgttttggaggataatccccttgtggactttgtagagcttcctgatacttgtcaaggcctctactatcgcaacattttaagtggtgtcaataggaggagccctagagatggtggcaatgaagacggaagtcaacctggattcgtgatatgcttagaggagatgatgcatatgagttgcaggttaaacttttgaagcaagttccagaagagtatccttacaaggatgatgagtaacatgccttacttacctctattaatggccttgcgcacttgccgatgttctatttccattgtttttctgtttctgaagaacattaatatacgttttgtatgtcatcttgaccacaatgtatcttccattttcatttagggtttatatgatctatactccgaagttattaatgttattaatcctgcacatcagtagtgatggcaaatggggggattggattggattttggtatggaccctttgggtcaggtattctaaggttgagcattttgatgttgaatt

SEQ ID NO: 193333 - DNA, 534 bp, Gossypium hirsutum
gtttttctcgtccttaaagctcatcttctaatttggtgccatctttggatctctcacttttctacctttcagatttcgtgacggagaggagatatctttatttttctgaacttgcaactgagtaatcccggtttatttggtcttttgatccaacggctaagagggctctttttagaattttccctaatacgacgactgcaatttctttttaatagaagaggaaattttcattacagcaactggtccaggccttttcgttcgtctttacaatacttccctccgtttgagcacttccagatctgaagaaaaatgcctcccgccgctcctcgatccggagatgcgatcttcgccagcgtagaacgcgtgaatgcagaactattcactttgacttatggagcaatagtgcgtcaattgcttactgacttggaggaggttgaggaggttaacaaacagcttgatcaaatgggctataatataggaattagactaattgatgagtttctagcaaaatcaaatgtgtccagatgtgttgac

SEQ ID NO: 193334 - DNA, 497 bp, Gossypium hirsutum
actcgtccgcccacgcgtccgcccacgcgcgcaaaaaagaaaagaacgctcaaaggatttgcaacaatgggtctctcaaaggcttctctaatccttgttctcgtcgctgtttgtgctcttatgggttcagccgtagctgctgaagccccagcaccgagtcccacctcaggaaccgcctccatctccccctcattcgtctctgttttctttgccgctgtcacggctctgcttttcggctctactctcaggatctgaagggtgttggctattgatggtgtagagagggtgtttgatttctcatttatatagatttaatttttgggaggggtgaattttatatggagttttagtatatctaggagtccctatatatataaatatgcgagagtcgagagaggtagttttgttatctaccgcacagattattcatggtggatgatgtttggacttatttgtttcagtttttttatggattgatatcattttcattagtacgt

SEQ ID NO: 193335 - DNA, 1062 bp, Gossypium hirsutum
  unsure (1)..(1062): unsure at all n locations
gtagctttagtgatatgagcatttctagcagtggaagtggctttggaagtagttctgggttgggattaacaactgatgttgattccttctctaccaagtctaaaggccgccaactgtcatctgcaaccgcccctcctaaaggtcttggcatgcagcttggtaaatcacaaaaaacaaaccagttcttggaatctctgaaagcagaaggtgaactgatagttgaagatgtgcagccaagggcaggccangccaaagtggctgcagctgcacctactgatcccatcactttgactgctgaggagaaactcaatgtcactttgaaaagagatggtgggataagtaactttgatgttcaaggaactttgtctcttcaaattcttaaccaggaagatgccctcatccaagttcagactgaaactgggggtaatcctggcattcttttcaagacgcatcccaacatgaacaaggagttattttccaatgagaacattctagggttgaaggaccctaataggcctttccccactggttctgctggggatgcatgctggtgttggtctcttgaaatggagaatgcaaagtgcagatgagtcaatggttccattgaccatcaactgttggccttcggtttctgggaatgaaacttatgtcagcattgaatatgaagcttctgccatgtttgatctgcgaaacgttgtgatttatgtacctctcccagctcttcgggaggccccaaatgttaggcagattgatggtgaatggagatatgactccagaaattctgtcttagaatggtccatacttctcattgataactctaaccgcagtggatcaatggagtttgttgtgcctccagcagattcatctgtgttcttccccatttctgtccgtttttcagcaacgagtacatacagtgaccctgaaggttgtgaacatcattcccctgagaggcggtggagcctctcccccgaagttctcccagcgaacaaatttgatttacagagaattatcaagtggtgtgaacactgacttatagtgcagttntactggtccccgcagtcc

SEQ ID NO: 193336 - DNA, 506 bp, Gossypium hirsutum
gaaatgttgtgatctctgtacctcttccagctcttcgggaggcaccaaatgtcaggcagattgatggtgaatggaggtatgatcccagaaattccatcttagaatggtccatacttctgattgataactctaaccgcagtggatctatggagtttgtggtgcctccagcagactcatcagtgttcttcccaatatctgttagattttcagccactagtttatacagtgacctgaaggttgtgaacattattcccctgagaggtggagctactcccaagttctcgcagaggacaaatttgagtacagagaattaccaagttgtgtgaatgttaatatcaatattccaagtgtactaataataggttgcgacactttttggtgaactttgagagcaagttcaagtattcaaacaacggctattgtttttctggaagttcatagttcattgatgttgtacttcaattttaggttcggtttgatttatgaatatatttttattgtcattt

SEQ ID NO: 193337 - DNA, 487 bp, Gossypium hirsutum
ctaatagcagatcccagcaagagccactctctctaccttaagaatcgccatggactacgcttctcgaagaagtcaaggaggcctattcgaaggtctctacagagtcatcatgcgccgtaactctgtctacgtcacatttgtcatcgccggcgctttcctcggagaacgggctgtggattatggagttcataagctctgggaatacaacaatgttgggaaacgatacaaagacatttctgtgctaggacagaggcaatcagaggaatgaactcatccttttctttctctttgtggatgttttgaagttttttatttgaggaatgggtatgagcatatatctatgatgtagcaatgctcattgttgcaataaaatgtcacttttttttttttgggggggggaggggaaacgtacatctttattaacaatgagtcgattgattgtctttgaaaatattgaatgattcagaatcgcggattatatgcaatg

SEQ ID NO: 193338 - DNA, 416 bp, Gossypium hirsutum
ttagaaatccctatttctgcaaaccctagggggagatccccagtaagtgagactccatttacctttatccaatcgccatggattctgcaactcgaagaagaagtcaaggaggcctcttcgaaggtctctacagagtcatcatgcgacgtaactctgtatacgtcacctttgtcatcgccggcgcttttctcggagaacgcgctgtggattatggagttcataggctctgggaatacaacaatgtcgggaaacgatatgaagacattccagtgctaggacagcggcaatcagaggaatgaaatcattatgccctttctggatgttttgaagaagtcattgaggattgggccagagcatatatctaattaggtagctatgctcattgttgcaataaactgttaattgtttttggttct

SEQ ID NO: 193339 - DNA, 651 bp, Gossypium hirsutum
gattttaaaagaaaaagaaaaaagcaattcaattagcagggaaaatggcaaccgaaacctcagtggattacgatagaaccaaagagttgaagcaattcgacgacacaaaagctggtgttaaaggactcgtcgacgccggaatacttaacatccccaagattttcgttcgaccagccgaggaccttgccgccgacgaactgaattccggccacaaaaccgtcgaagtcccgatcatagatgtaagcaacgtcggagacagtatccggcgacaggagatcgtaaacgaagttaagattgcatcaggggaatggggtttcttccaagtgataaaccatgggatcccattaagtgttttggatgaaatgattgaaggcatacgtttgtttaatgaacaagatttggagttgaagatggaactgttatccgtgaacgggcaagaaagggaaatcctctttactttgatattatactttaaagctctgatggaatgacactttgcactcttttgctgatttgatccgacccttgaatgcacctgttggagaaaatacatggagtttttagctttgaaaatgggaaacttgtttagtatatcaagcctttgtttaacaaaactttactatggtggtgtaggggggcctaggccattag

SEQ ID NO: 193340 - DNA, 510 bp, Gossypium hirsutum
ggaatgggtagtatcgagacattgtacgacagtttatcaagggtacagatgggctttctggggcttttgctgaatgcctttgtggaagcccaaacttatatcaggaaggaggagggaaaccatggaacagtgtcaactttatatgtgcacatgatggttttactttggctgatctagttacctataacaacaaacacaacttagcaaatggggaagacaacaatgatggagaaagtcataactatagctggaactgtggacacgtatatgaaattggcacggaggatagaatttgtccagcttgatggcttgaattggaaacactaccattgtcagtatccattagatacatgttatgatttacaaaccactcccccccccccccgccccccagggctgcggaaatggaacaaaaaaaaagaaatataatgcaaatgtctgtttcagtaccttttcatttcaagttttagctgaccaaattcagaatttaaagaagtgcccatttgcttt

SEQ ID NO: 193341 - DNA, 521 bp, Gossypium hirsutum
gggacctgaagatcatttacatctagagggctttgcattgaatgtctttggaaaggcagacaaacaagatcgtgctggacgagcagacctgccgacggcaaagacgttttacgctgccagcattttcttcgagattattagccagttcggtcctcttcagcctgatcttgagcagaaacagaagtatgccgcctggaaagctgctgatattaggaaagctttgaaagaaggaaggaagcccatcccgtggccctcctaatggtgatgaagatttgtctgttctatcaagtacacatagcggttcatatgatcatggacctggtgaacttccagttaccagtcccaggcaagattctgatccgtcaccacagttccatgatgaaataaataaccagcaccaagctaatattccaccgtcaactcagttccatgataagattgaccggcagcattctttcgatattttagcatcacatccttcatttcctcctcgcagttacccttctcatggacaatccttt

SEQ ID NO: 193342 - DNA, 761 bp, Gossypium hirsutum
aactccgttccaagtccgatccaaatccgggacaaattgatgcatgcgagcgctgttattgatggaaaagtttacgctatggctgatagaaacggggtttgctacgaagtgaaaagcgggaattgggaaacggtggacagtgatttggataatgggtggcgagggagagcttgcgtgatcgatggggttttgttttgctatgattatttggggaatataagggggtatgatgtgaaggaagggacttggaacgaattgaaagggttggaaaaagggttgccgaggtttctatgcggtgctacgatggcgaatttgggagggaagttgatggtggtctgggaatcaaagaatggaggtgggaaagaaacggaaattcgatgcgctgagattgaggtgaagacaaatgaagctggggagttatgggggaacattgagtggtctgatgttgttcttttggttcccagagaagcttccattgttcattgcttggcagttgctttgtgatactcaatggaaacgcttggctggaggaatgtgccatgccagaagcagcaaagctttggattgagccatcccactaaagcgatgtgctgttaaactccatggaaatggcattgcaatctcatggtcgaggtggttcacattctcttctaaggttactttgcttagaaaagcctatttgcatttcggaaataacagttataatcaatgtatttatgtggccgttgaaaataaaggagttttattaacttcagtactgt

SEQ ID NO: 193343 - DNA, 1300 bp, Gossypium hirsutum
  unsure (1)..(1300): unsure at all n locations
gtgatttcaaagccaaagatgcgcttcgtaatgatcaaaaacacgatcaggtggaggaaggagtttgggatcgatgagcttttggatgaagatcttggtgatgatatggagaaagttgtgttcatgcatggacaagataaggaaggccatcccgtttgttacaacgtttatggcgagttccagaataaagaatcgtaccagaaagcgttttcggatgaccgggaaaagcgaatgaagttcctgcgatggcgaattcagctcttggagaagagtataaggaagcttgatttcagtcctggtggtgtttccaccattttccaggttagtgatctcaaaaactcgcctggacctggaaaaaaggagcttagattggcaacaaaacaggctcttcaggttcttcaagataattatccagagtttgttgcaaaacaggtgtttattaatgttccttggtggtatctggcattctatacaatgattagtccatttatgacccaaagaactaagagcaagtttgtcattgcactgccatctaaatctgctgaaacacttttcaaatacataccacctgagcaagtgccaattcaatatggtggtttgagtgtggattattgtgattgcaatccagaattcagtgatgctgatcctgccactgagatgactgtgaaaccagggacaaagcaaactgtcgaaataacaatctttgagaaatgtattcttgtttgggaaatcagggtanttggatgggaggtgagctatggagctgaatttgtgcctgatgctaaagatagctacgcggtcatcattcaaaaaccgaccaagatgactgcaaaagatgaaccagttgtgtctcaaagcttcaaagttggtgaactgggtaaagtattgctaactgttgacaacccaacttcaaaaaagaagaagcttctctacaggtttaaggttaaacccttctgcgactgagggtattactcgtactatgatttaatttattcttgtctaaattttgggcaaatcacttgttcatttttctttgtttttgcatctttgtgaggagcatagttgacagcaagttgctcatggttttgaaatttgttcttggcatgttgggttaccctggtgttgtgcattgtacatttctctggtgtatcatgtctatattgtgggaccttttacactgttatagatttggaagaacacgagggatttgtttggtttatgtaatctatttttcaggggccataattgcaatttgatattaatttttgcaaaaaaaaaaaaaaagggcggcgatccggta

SEQ ID NO: 193344 - DNA, 641 bp, Gossypium hirsutum
gggaattctgccaattgcaaggaaaaagtatgcccctgacttgcttattgtaatctctcctctttatatatggctggcatttatgtctctgcagccgcacaaagaagaaagattcctttatcccatataccctcttgtttgtgttgctgcttctgctgtcattgagagttttcctgatcttttccgagacaaatataatccctacgataattctattatagttatgatggccaaatttctgagacctgtggccctcagcctcatattatgtgcctcacattcacgtacattctcattgatcaatggctatgctgctccaatggaggtttacaagatcttggagcaccatgatgatgcaggatctggttctgtactttgtgttggaagtgagtggcaccgttacccgtcatcattttttgttcctgattatattggtgaagtgagatggattgatgatggattccgaggtcttcttccattccctttcaatgatactctgggagggactgcggcagcaccaccatactttaacaataaaaacaaggcatcaaatgagcaatatctccgaaatattgaagcttgtacattcctggtcgagctgcagcttgaacgacctttcccttatcgtggaaatgaactaa

SEQ ID NO: 193345 - DNA, 881 bp, Gossypium hirsutum
cccacgcgtccgctttgaagtgcagaatcaagggattgtgggtggagaagaagcggtgacggatctaacttggaactccgttttctcttcttaccgctattcccgacctatctctaaccccctcaatttctctcaggctccaatccaggtagatattccttgtgttcaagcgtcttcatggcttcaaagcggattttgaaagaacttaaggatttgcagaaggatccaccaacttcctgtagtgcaggtcctgtagcggaagacatgtttcattggcaagcaacaattatgggcccctccgatagcccttttgcaggaggtgtgtttttggttaatattcattttcctccggattatccattcaagcctcctaaggttgcatattgcacccctttgtgatatgtgtgaaaaaatgctgtttttagttatgatatactcttataatggataatgctggataatgctgattctgttgtctaagttgtatttatgatctatgtcttccattcaaacatcaattgtaatgagagcatttgtcttgatatcctataataacatttgagccctgcactgaccattcttaggtttgaccattcctaatatatttattggtattctatacattttacattttaaattcatgtttggctgtctatggattgttttctttcatgcatgtacttaacttttacttaattgttctgtataaaatatgttttttattcatcaatttattctatatatttattatgttatatatcttgtaatcttattttatcttaatgtgttattatacttcacatatataatcaaattatttattattattaaatatttacattttataattttttgtagataaatatgtatatatctctatt

SEQ ID NO: 193346 - DNA, 483 bp, Gossypium hirsutum
tttttctttgagtttcgagctttgaagtgcagaatcaagggattgtgggtggagaagaagcggtgacggatctaacttggaactccgttttctcttcttaccgctattcccgacctatctctaaccccctcaatttctctcaggtagatattccttgtgttcaagcgtcttcatggcttcaaagcggattttgaaagaacttaaggatttgcagaaggatccaccaacttcctgtagtgcaggtcctgtagcggaagacatgtttcattggcaagcaacaattatgggcccctccgatagcccttttgcaggaggtgtgtttttggttaatattcattttcctccggattatccattcaagcctcctaaggttgcatttaggaccaaggtcttccatccaaacatcaacagcaatgggagcatttgtcttgatatcctaaaagacagttgagccctgcactgaccattttcaaggtgtggttt

SEQ ID NO: 193347 - DNA, 1317 bp, Gossypium hirsutum
ttctacttaatagttttgttgcattgtacccaaaactgatacatgaaacttataattaaagaaaggagagtgctgcacttaaattatgaagtgaacaaaaaatagtgtttggatgccaggaaaattatgaaaaaacaaaatcaagcaacaacttcttgttgtttagtagcaagctcgttctggatatgttgagggacgacatcaaacttggccagttgcatggtgtaggatgcacgacctttcgtcatacctcggagagtgctgacgtattggaacatctctgcaagcggaacaagggcatccaccaccttgagtcctccaggcttatcaccaaagctgttaatctggcctctccttgagttgagatcaccgatcacgtcacctaaatgttcttcgggtgtgacaacctcaactttcattataggttcaagcatcctagggccagcctttctaatcccttctcggaaggctcccctggctgccagttggaatgccaagacactagaatcgccatcatggtaagaaccatctactagcacggcacgtacatcaacaacaggaaaacctgcaagtacaccattacacatacactcctccagtcctttcatcactccaggaatatattctttcggcacggctccacctttgatttcactcttgaactcgtatccgctacctgcatccatcggctcgaaacgaacagtaatatcagcaaactgcccttgtccacctgattgtttcttgtgtacgtatttcacttctgaaactttggaaatactttcccggtaattaacttgtggtgcaccgacattggcttcgaccttgaactctctcttcaaacgatcaacgataatctcgagatgtaattctcccattccttcaattacggtctggttgatctcttcatcccgtgagaagtggaaagaagggtcttcttgagcaagcttgatcaaaccattagccattttatcgacatcagctttagtcttaggttcaatagcaaccttaatcacgggatcggggaagtccattcgttcaagtacaataggatggtcagggtcgctaagagtttcacctgtaatagtatcctttagacctgcaagagcagcaatatcgccgggcaatgcaaccttaacgtcctctagactattagcgtgcatttccaatagtcgaccgattctctctttcttccctttgttagcattcaaaacataagatcccgcagctagctttcctgaatacaccctcacaaatgtccgggatcccacaaacggatcggtcataattttgaaagctaatccggaaagcggttcttca

SEQ ID NO: 193348 - DNA, 750 bp, Gossypium hirsutum
tttagactctcgagatctataaaagttcacccagattcccatattcacttctcgaaacagttaattcatcgtttctgtctccgattgatctggtgctcctaccttttagatctctccctgaagcattaaatcttgaaaatggatgataatggtgaaaaagaggaaaatatcccacgtgggattgaatgggaagttgtgtccttaactgcatctgcatatgctgccgctcctggtccaaaagaagttgaaacaaaggatgataacaagggtgatccatatgaagtaggggaagcagaaacttctcatgctttattcatgtctggtcactttgtcttcccccctagcgagcatgagaatttgccattggaacccgagaatagtagtgaacgtgtaggcaaggacgtggtccatgaattaggtgttgtacaagaaggtggtagatctacgacaaaggaagaagaagaagattggtctttgagagggttgaatgtgcatgaagaattttcacgtatgcaattttttgataaaaaacatggtacagagtttgatgaaggaacaacactgcaaggactggatttgattgacaagggccagagtttgtatagtgctgcgacatttggttctttccatggtgaggaagcacttggtggaacaaccacctttggtgaagatgccactgtttctgaacttattgaaacttctgagcaagggttaggttttccttcaaaatattccttaacccccaaagcc

SEQ ID NO: 193349 - DNA, 431 bp, Gossypium hirsutum
  unsure (1)..(431): unsure at all n locations
ccggaccggaagggccggcgtcagagcgtacgcgatacagaacacagacgtaagtctataggcacgaataagacgtacgaaacccaancttccctagaaatcgattatccgttcttcaggcaaacgccacgctattgcttttgtttgcatacacaatcaggaaagggtatggcagccgaggacaatttggacttgtcaactctgcaatctcagcttagtgaaactcatgaactgtggaagcaggagattgaaaatcgtcgaggccaagtagacgtgttacaagccaaaattatggaggtaaaggcttctatacaagggtcggaagaggagtcgaagaaggagttagatgttctttggcgaagggtagaaactaccgcgaccttattgacttacttgaaatcaaaagcaagagtaatggctgntcccgattt

SEQ ID NO: 193350 - DNA, 638 bp, Gossypium hirsutum
gtactccgatcaagcattgggtgcggcagtttactctcccacccataagtctgctgttttaaatcaattccagcagcagcaaagcatgttatcacctataaacacaaatttttctcctaaaaatattgaacatcctttgttgcaggcttctctatctggtaggatgtctccacgaaacgtagaacctatctcgccaatgagctctcgggtttcaatgttagttcaacgcgagaagcagcaacagttccgcagcctaagctctagggagcttggttctggctcctctgccaccgttggttccccagtaaattcttggtggggatccgccaatgggaaaccggactgggcagtcgatgcagatggctcaggcaagcttcgcaggtcatcttcatttgagcttggcaatggagacgagcccgatttatcatgggttcaatcccttgtaaaagaatctcccactgaggtcaaagagaaaacaggtgtgcctgtttcaggtgtaacacttaatgcttctacaggtctaggttcaagcatgaactctcgaattgatccggtcgatactgcagtgttgggagcatggattgagcaaatgaagcttgatgagctcgtggctcagcaaaactgaaaaccagtttcac

SEQ ID NO: 193351 - DNA, 1067 bp, Gossypium hirsutum
gttttggctcaaaatttcatcttcctaatctttattctgaatcaaacccagtaaaactatgccaattgctaccttatctctccattctttaggctattgctgccaaaagtctcctcctttctccctcaaatcttcttttctctcaaaacccacaaaaacccagttttcttttgccttcaaaactaccgagaagaggcctttttcgcatatagtctcaatgagcatggaagcaggcattggagtaatgggcacaaagcttggaatgatgagtttctttgaaactgatggcacagttgttccagtgactgtagttggttttagagaaggaaatatagtgacccaagttaagacatcggctactgatggctatgatgctgttcaagttgggtatcggagagttagggataagaagttgacaaagcctgagttgggtcatttggggaaagctgctggtattcctatgaagcatttgcaagaatttaggttgcaaagtgtgggggagtttgagactggtcagaaatgggctgttgaagagatttttaaggaaggtgatcttgttgatgtctctgggactaccatagggaaaggatttcaaggtggaataaagcgccataattttaaaagaggtcaaatgagccatggttccaagagtcatagagcattggggtctattggtgctggaacaacacctgggcgtgtgtacaagggaaagaaaatgcctggcaggatgggaggaagcaaaagaaagatccgaaagctcaagattgtgaaaatcgacaatgagcttcgagttgtgatgatcaaaggtgctctccctggtaagcccggaaatctgctacgtataaccccatctaagattgttggaaagaacataccaaagagctagtttcatgtattggactcatttcattttagctagtatttcagttgtgggaacttttgatatattcattggtgtatgagtttaagtcgaaatttaccttttcttttattgagttgattcctgaatttggaaatggcttctcaatttgtgaactacttaaattgatcagtcaattctacttgtc

SEQ ID NO: 193352 - DNA, 1060 bp, Gossypium hirsutum
  unsure (1)..(1060): unsure at all n locations
cccacgcgtccggtccattcacagcctatacgaaccccaagagctcctcatctctttgtttttaccttccatttgaactcaagttcgtcgtcgctttctactctttagccatcaaagatgaccaccatggaaagcttaatcggtttagttaacaggatccaacgagcatgtacggtgctcggtgattacggtggcggcgacaacactttctcttccctttgggaagctcttccttccgttgccgtcgtcggtggtcagagttcagggaagtcttcggtgcttgaaagcatagtcggacgtgattttcttcctagaggatcaggaattgtgacgagacggcctttggtgttgcaacttcataagacagacgaaggttcacaagagtatgctgagtttcttcaccttcctaagagaagattcactgattttggggcggtccggaatgaaattcaggaggaaaccgatagaattactgggaagactaaacaaatttctcctgttcctattcatctcagtatctactctccaaatgttgtcaacttaaccctgatcgatttgccgggcttgacaaaagttgctgtcgagggacagccggaaactatagttgatgacatcgaaaccatggttaggtcttacgttgagaagcctaattgtatcatactagctatatctccagctaatcaagatatagcaacttctgatgctatcaaattggccagggaggtanacccctctggtgaccggacatttggggtgttaactaagcttgaccttatggacaaagggactaatgctttggatgttcttgaaggaagatcttaccggctacagcatccttgggttggaattgtgaaccgttctcaggctgatataaacaaaaatgtggacatgattgtggcaagacgcaaggagcgtgagtattttgccactagtccagactatggccacttancaagtaaaatgggttcagagtatcttgcaaaacttctatcacagcatttggaaaatgttattaggtctnccgatacaagtatcacttctttgataaacaaaagcattc

SEQ ID NO: 193353 - DNA, 727 bp, Gossypium hirsutum
aggacagcacatgtgatgcttagatcaaagactttcacgaggtttagtaatgatctcattgttgctcgaaaacagcattctgatacatgtcatcttccatttcttaaggatttctttcaccacctgaaatctaatccccagccagacaaagttttccaattatttctccgaaattatttggtgctttcggcaagtcaatgccgatatcatccaacaaggcaccataaagtaggcatccagtaccaatgtctctagctgtgagaacttcctttataaacaagtactccagaagctttgaaacgggttcaacacaaggtgggcttttctccaaagcaatggagatcgcttctttaacaacctcagggtggtatgctggagattttagttcctccacgcactgtaatgcttcatctagtagcctaacgctgaaatattcctctaacaatgcccgtgtttttctctgaagatcatctgtattcagccttgcagcctgagttagtggtttctccaccggagcaggtttaggggaaagagaagcttgtgcaacagactcagcacctaaaattgagttgggtggcttagcaggaggggttgaactaccctgcaacagggcacttgtcctaccactcattaggccaccactaccttgaggtaatagcctttgattcattgaagtcgacttattgactactggtgaggcacgccctccagactgggtacccagtcc

SEQ ID NO: 193354 - DNA, 718 bp, Gossypium hirsutum
  unsure (1)..(718): unsure at all n locations
atccaaattatttctcggaaattatttggtgcttttggtaaatcaatgccaatataatcaaacaaggcacnatagagcagacaccccgtccntatgtctctagcggtaagaactttcttaataaacaagtattttataagctttgaaactggctcgacacaaggtgggattttctccaaggcaatggagatcgcttctttcacaacctcgggatagtaccccggagattttagttcctccacacactgcaatgcttcatccagcagcctaacactgaaatattcctccaacagtgccttcgtttttctactaggttcatcttgattcagtcttgaagctggtgtaactggtttctccaaaactggagacgcagcagccaccagaacaggtttggcaggaagagaaggttgtgccacaggaggcgatgagcttccctgcaacagggcacttgtcctaccactcattaggccaccactaccttgaggcaacaaccttggattcactgaagttggtttattgattgaaggtgaaggaacacgccctccaggtagcatacccagtccatcaccccttggcattgatcgtgttctaggaacctcccagttatcattttccattccaggcataccaggcattctccgagttcccggcattacaggcatcaaacctccagtaacagcaccagttatgggaaaaccaccaggaccggacgcgaggg

SEQ ID NO: 193355 - DNA, 288 bp, Gossypium hirsutum
ttcgagcgagtcttatcaagggggcgttgagatgataagaagggatttactcactggccattggaaaccctatcttgaacgtgcaatcacgttgaaaccatgttatgagggaggaattaatggtggtgaggtggcagcttacatcttgcaagagaccgctattggcaagaattatgcttcacacaagttgagtggggttcgaaggttacctgatgctataactcttgtgtatcaactgcaaagggtcctaggcggagatgaaactatccctgaatggtacacacatgc

SEQ ID NO: 193356 - DNA, 639 bp, Gossypium hirsutum
tagaaacaaggaatcggatgaatctattccagcatcaaatattgtttctgacaaaacttctcttcactcacaaactcctgcatctagaccacttgtaccacctggttttacgagcacagttttggaaaggaatgttggaaccaaaagttcaatgcactcccattcttcacaggttgggagttctgaaattgatggcaacctttcagagtccaaaggcagccttcttataaatgggatttctgatgatcttttgggcaaacattctaagcagtgtgaagaggaaactttgagtgagcagaggcttgaaagtaaaaacattcaccttttacacaatattaagagtgtgaaggctccaaataccccatcagctttagatatatttaatgacacaataagcaaggattcccaaatatacaagagttctagtctttcagaagcctttatagcccctgggaatggtgaagtaactgaacttgattccaagaagctcgttgctgataaaattgtgactgaaaccaaccaggatggttcaatttcaattctagactagctttttggaactgctgtaacagcaaatggaggtggctccactaatatcactgcgcctaatgacagcaacacagatgagaactgggcctc

SEQ ID NO: 193357 - DNA, 466 bp, Gossypium hirsutum
cccacgcgtccgcgagaatgtatattcttcctcaaatctttcgttgagaggtaaaggattaaatccttttaagaaataaagtttttgctcggaatatgaatcaaaccgagggaccccttaactcttagggggattaatagaacgaatcacacttttaccactaaactatacccgctacaatgcgattattgtgtttagggtatatttattggatataaatataaagggaccctttgtcaaacaggggaattgggcgtaatcaagataggattacaagataggagcctaaaaaatcctgaaaattagggccttgccaccttttgaccttttgtcagaagacttgtgttataggatttttgatagacaggattcgacaaaaggacttagtcataacataaataacataaaaatggattgtgcaaaaatccataggtctttttttattacttattctaggtattctagt

SEQ ID NO: 193358 - DNA, 1061 bp, Gossypium hirsutum
  unsure (1)..(1061): unsure at all n locations
cccacgcgtccgctgcactaacgcaattacaaaaaggaaaagagagatgttcctatgatcattgttacttggggtcagttttcatgcccaagcttcgagggaaattttttgctacagaaaatttcttctatacctcaaagttctttaggttgcgccaaagggcctttctttccgatctaattatggcgggaaagcatttctgtgaagaggattggtcaaaattgaagaagaaacaccaatcactcaatgaggaagatctattgcgctattgtttttcttcagcatattttgtggccttgcttcacgatagccttgaaattgctttggatgatgaaaggatcagctttgctaatcaggtcaacgatataccattagattgggccttgggagctttcatattgcaaagcacatccatctcagatgtgcaacaaactgactggataactattattatgagcagtgattcatccacactaatttcaatcaccgctatttctgcaatattgatgtttgcagcctggtctatatcaaaatggaggaaaccccaattgaagacggtgtatgatctagagaaaggacgatatatagtcactcgtataggtagaagttgatctatcattgtccagaggagatttgaacacgtcattatgatgttgcagccaaggaggagagtgcatgtctctagggtatttaccttttttaatgcttccttggtttctgcacccccttaagggcatctcattcatggcagtgggaaatgtaagattgtatatcaatggagttccaacatgacttattgtaaacattttcatgggcggggaactaggacaaaaaagatattaaattccccctttgtatttatggggaaccaaaatccttagtttgtaatatcactttcctatactctgggaatatgtaaggcataggagtgtgatggatgtgttgcagggnggggggggagactttccttctatgttatcctgatttattgagcgacaaaatacggtcctgtgggaatgtttaattattttttatttttatatatttgaaggaatttcttt

SEQ ID NO: 193359 - DNA, 837 bp, Gossypium hirsutum
  unsure (1)..(837): unsure at all n locations
ctttctttcacaagctctgaaaaaagtaagaaaagcagagaagagaagagaagagaagaggttttgtcaatttgaaacaatggcgacgacagggcagccaaaacgacaaggacaacagcagcagcagcagcagcaacaacaaaataaaacgacggagaagagaaagccagtgtttgtgaaagtagatcagctaaaaccagggacaaaaggccacaccttagtcgccaaggtattgtcctctaacatggtccttcaaaagggtcgagccgcttctcgaaatctccgccaaacccgcatcgctgagtgccttgtaggagacgagaccggcactgtcctcttcactgctcgtaatgaccaagttgacttgatgaagcccgatgacactgtaattcttcgtaatgcgaagatcgatatgtttaagggttctatgaggctggctgtcgacaaatggggccgcatcgaggtcactgaccctgccaactttgttgttaaagaggataacaatctatcgcttgtcgagtatgagttggctcgtgtgcttgaaaatgacgagattgctgagacctatgctgctggataccgaaagagttcttatggattggcccgatgattctggtttactcttcataatgttggcgagatgctattatggtacaattttcattgtgaacgtgttgggtttggtatacaaaatcttgctgatggttggtcttctgcatcatactttttaacatctaatggtctaggttaagtactantggaatatgtacaagactgctttctagtgaacaaattgcttctggaaatttaagtgttgatagtaagatctttctaaaa

SEQ ID NO: 193360 - DNA, 840 bp, Gossypium hirsutum
  unsure (1)..(840): unsure at all n locations
cccacttgtccgcccacgcgtccgggtgttttcaccagggtagctataggattcagcacgggggaagggtggtgccaaaaaagttgtaatttcagctccttcggcagatgcacctatgtttgtggtgggagtaaatgagaatacctacaatccgagcatggacatagtttctaatgctagttgcactaccaattgtctagctccactggccaaggtggtccatgaggaattcggtatcgtagagggtttaatgacaactgtccacgcaactacagcaactcacaagactgttgatggcccttcaatgaaggactggagaggaggtagaggagctggccaaaatattatccctagttcaactggtgctgcaaaggctgttggaaaagttcttcctgaacttaatggaaagcttactggaatggcattccgtgtccctacacccaacgtttctgttgttgatttaacttgtcgacttcagaagagtgcctcctatgaagatgtcaaagcagtcataaagtatgctgcagtgggtccacttaatggcattcttggatacacagaagacgatgttgtctcgaatgattttgttggtgattcgaggtcgagcatctttgatgcaaaagctggaatagggttgagtgattctttcatgaaacttgtttcatggtatgacaatgagtgnggtcacancaatanggttcttgacctaataaagcacatttcactggtgtcagcaacacacaactaaatatttaaagatctgtactgccatctttgtgtgggttannnaattggtttacggaatggcatgacttctacantaccccaagtgtatgttct

SEQ ID NO: 193361 - DNA, 470 bp, Gossypium hirsutum
ccacgcgtccgctttttctcccttttagcatatagacaatagcaaatacagcaatggcttccagtgggcagcttcatgtggatttcgagctcaagtctcctgcagaaaaagtgtggggaaccattagggactccaccacgattttccctcaagccttgtcccatgattacaagagcattcaagtgctagaaggcgatggcaaggcccctggatctgttcgtcttattaactatgccgaagggtctccaatcgttaaggtatcaaaagagagaatcgaatcagtggatgaagctgagaagaaatatgtttacagcatcattgatggggatctcctgaaatactacaagactttcattggcaagatcattgtggttcccaagggagagtcgagcttggttaaatggtcctgtgagtttgagaaggcaagtgaagagatccctgatccaagcgtcattaaggacattgcggtg

SEQ ID NO: 193362 - DNA, 395 bp, Gossypium hirsutum
cttctctttactctcatcgcggtggttctcgcttcctgtgtgtccatcagcctccgcctctcctcctcatcccggttcgttggcctcacctcatcatctctgcctcctcggctctatcggtcgaccgtcgtccttaccaagtctgtattttgaagtaaccctaaaaaattagcagccacagtcctattaaggttgctggttatgctgttggaggagggcatgttttacatatggtttgtgatctgaccattgctgcggataatgctattttcggtcaaactggtcccaaggtgggaagttttgatgctggttatggaagttacataatgtcccgtttggaagttggtggaaatgcgacacccatattttatggaactgaagaagggaacgagggg

SEQ ID NO: 193363 - DNA, 416 bp, Gossypium hirsutum
cacaaacaaaacattttcagtcctccaccaacccactctaaacactcttttgttgtggtccctgggaacagctgagccaagacgcgagtaatggcggtggcaatgagctttcgtagattgtcttcctccatcaagtccccaaccagacctctcttcagtggcagctccctctattatatgtcaacagctgcggcagagaaagagaaagctcgtgctaatcggatacatcagttgaatgctccgctagaggaaatcgatcctgaaattgctaccataatcgaactcgagaaagctaggcaatggaagggactagaacttataccatcagagaattttacatccctatcagtcatgcaagcagtgggctctgtcatgatcaacaagtacaagtgatggtatcctggtgctagatacta

SEQ ID NO: 193364 - DNA, 604 bp, Gossypium hirsutum
cttactcgtccgatcgaaacctcataaattagagtccgttgattccttgacggagaaagtagattcggatctatctttgagtgctccgaaagaagttcaaaatcatgttggttctggattaagtcagattggtgaacaagagaagaaagcattggaacatggaagtaattcagcttcggctaaatccagtgatggggccactggcgttgtcaaggttagtggtggtgccaaagtcggtgatcgcccggattatattgagagcggtaagagctgtgtgtgcagaggtagcacaagcagtggtgtgagcgatgaaagtacgtgtagcagcttaagtagcagtatcaacaaacctcataaggcaaatgatataaggtgggaagccatacaggccgtccgagcgaaagacggtgtgttgggtttgaaccatttcagattactgaagagattaggctgcggggatattggaagtgtctatcttgcagaattaagtggtacaaagtgttattttgcaatgaaggtgatggacaaagcatctttagctagttgtaagaaacttcttcgagctcaaacagagagagaaatactacaatccttggaccatcct

SEQ ID NO: 193365 - DNA, 525 bp, Gossypium hirsutum
cggggcggaccaaggcgtccgggttagtccaccactaataaagtcttctttactggagtctgaaccgtggcgaaagaattcgggttattgtgtacaaccagcttgcattgagccttcctgcatccagccatcatgtgtcgcccctacgacatgtttttcaccccgtttcttttcatcaaaatccaaaaaagatcgcaaacccaagaatgatatggggaaccaagtcagtccattgcccgagcttattgccgagccaacaaatgctcgctccatgtcattcgtgggaacccatgagtacttggcgcctgaaattatcaaaggtgagggacatggaagtgctgttgattggtggacattcgggatcttcttatacgagctattgtttggtaaaactcctttcaaaggatctgggaaccgagcgacactcttcaatgtcgtagggcaacccttgagatttccagaatcaccagtagtaagttttgccgcaagagatttgataggggtttgttggtaaagaaccacaca

SEQ ID NO: 193366 - DNA, 685 bp, Gossypium hirsutum
cggggcggacccacgccgtccgcccacgccgtccggattgggatggtggggatattgggaggtgtatacccttcaaaaattaaggggaccagggtgttactttgcaatgaaggtgatggacaaagcatctttagcaagtcgtaagaaactacttcgagctcaaaccgagcgagaaatactacaatccctggaccatcctttccttccaacattgtatacccatttcgagactgataaattttcatgtttagtgatggagttcttgccccggcggtgatttgcatacgctacgacagagacaaccaggaaagcattttactgagctagcagtgaagttctatgtagcagaggttctccttgctttggaatatctccacatgcttggtattgtatatcgtgatctcaagccagaaaatgttcttgttcgagaagatggacacataatgctttcagactttgatctttccctccgttgtgctttcaatccaacactagtcaagttgtccacacctgagtctgaaccattgcgaaagaattcaacttattgtgtacaaccagcttgcattgagccctcctgcatccagccatcatgtgtggtacctacaacatgtttttcacctcgcttcttttcatcaaaatccaaaaaagaccgcaagccgaagaatgaaatggggaaccaagtcag

SEQ ID NO: 193367 - DNA, 1322 bp, Gossypium hirsutum
  unsure (1)..(1322): unsure at all n locations
gcagggttccctggcacgttgaaggtgcaatttcattttcgtatttttcagtgtttagttatgtactgttatattccttttctgacatggagacacatctgaggcatatttcaggtggcaaacttctgttagagctcaaccgagtcctccgacctggtgggtacttcatttggtctgctactccagtttaccagaagcttcctgaagatgttggcatttggcaagagatgtctcgactaacaaaatcgatgtgctgggatctggtgactgtcaaaaaggacagattgaatgctgttggagctgcaatatatcaaaagccagcttccaacgactgctactacaaaaggtctaaaaatgcacctccactttgtgaagaatctgatgatcctaatgcagcctggaatgtatcccttcaggcatgcatgcataaagtgcctgaagattcaacagagcggggatccctttggcctgggcaatggccagaacggttggaacaacctccatactggttgaattctcagatcggcgtttatggtaaggctgctcaagaggatttcactgcagactacaatcactggaaaactgttatctctgagtcgtatttgaaagggatgggaatcgactggtcttctgtgagaaatgtcatggatatgaaagctgtttatggagggtttgctgcagccctgaaagacttgaaagtctgggttatgaatgtagttccaatcgacggtgccgatacacttccagtaatctatgaacgtggattgtttggaatacatcacgattggtgtgaatcatttaatacatacccgagaacgtatgatgttcttcatgcagatcatctcttctccagtattcagaacaggtgcaagttggttgcggtaattgcagaagttgatcgaatcctgaggccagaagggaagctgattgtacgagacaaagccgaaacgataagcgcagtggagagcatggctaaatctctacaatgggagatccgaatgatttattcgaaagacggtgaaggattgctttgtgttcgcaagaaattctggcgtcccaccgtggaagaacctataaagcctgccattgtttgaacacgatgctaaacattactcgtgtgttttccacaattaggcataatattttacagattctttttcgattcacaagcatgttatagtctgtaatccattttcgcaagtgtaaaattatgtagtcgactacgttagactgaatcacaattttggtttcaatggtccttgatggaataaaagtagctagtttcattaccannnaaaaaaaaaaaaaaaagaaaaaaccac

SEQ ID NO: 193368 - DNA, 630 bp, Gossypium hirsutum
ttcacggtcgaccacgcattcacgggctaccatagctcgagactcaacgggcgcacctactacgccattaaaaaccactggagctcggcgttaaagcgaaaatgcttgtcgatgaccgaatgttttaacgacgattcccctcagccgcttaaacgatccgccagtgtcggaaccggcaatccaagtagtccgtccgcatccgatttgagtgactcgagtttaccagctccctcaccggttttcaaaactggttctgtagtcccttcgagtcaacatgttgaaacagcttcatcggcaaccgacccacctactttactcagcctctcggtacccggttctgacttttccgaacctgtttctccacccggattcaacccgacccaagtgaccccacaggctccggcaccgttcccagctccggtggagaagcaatttttcagtgccgagtgttttgcagttatgaaagagatgataagaaaagaagtgaggagtttcatggcggggattgagcaaaatgagctttgtttacaaacagaagctattagaaacgctgttgtttaacgtattggaattagcaaaaactagtttgggaagaaaaaaaaaaaaattgctttttttttctttcctttt

SEQ ID NO: 193369 - DNA, 852 bp, Gossypium hirsutum
  unsure (1)..(852): unsure at all n locations
cggccgcgtcgacgggtttaaaaggatttatttgcacgaggagggaatcccaggatctcgacgtggctctcttgtatcacttccaggtaatgatatgcccgcagaaggtgagtttatccaggcagctgcactagtgagccaacctgctctttattccaaggagcttatggatcagcatcctgttggaccagcaatggttcatccagctgaaactgcctcagaaggaccagtttggactgctctccttgacccgggagtcaaacgtgctttattanttgggattgggattcagattcttcagcagttttccggcattaatggagttctctactacactcctcaaattcttgaagaggcaggtgttgaagtgcttctttcaaacttgggccttggttcagattctgcatcatttcttattagtgcatttacaaccttgctgatgctgccctgtataggtgtagccatgaaactcatggatatatcaggcaggaggcggctgctactcaccacgatcccggtgcttatagtgtcactgatcattctagtttttagtgaacttgtggatttgggcacggttgtgaatgctgccatctcaactgcatgtgttattgtttacttctgctgctttgtgatgggctatggaccaataccaaatatcctctgctctgagatctttccaacaagggtccgggggctttgtattgcaatctgtgctttggtttattggatcggagacatcattgttacttacacactgccagtgatgctgagttctataggcctagcgggcatcttcgggatatatgctgttgtatgtctgatatcgtgggtgtttgtgttcttgaaagtacc

SEQ ID NO: 193370 - DNA, 645 bp, Gossypium hirsutum
gaacagtagatgcagaaattacagggagcaaggtcaaatgctgacattggttgagtacatgatgctactttaccgtgctttactgccaactccagtttggtaccgtttcttcttaaacaaagactatggaagcctcttttcatcactaatgacagggttgtacttaaccttcaagctgacatctgttgttgagaaggtgcaatccttctttgctgcattgaaggcattatctcgtaaagaggtacattatggtgcttatgcaacatcagagcaggtgaatgctgctggggacctgtgtgccatctgccaagagaagatgcatgctcctatactactgcgttgtaaacacatcttttgtgaagattgtgtgtctgagtggtttgagagggaaagaacatgtcctttgtgcagggcgttggttaaacctgcagatctgagatcatatggtgatggatctactagtttgttttttcagatattctaatatcattgctaagatacgaccagaatcagaatcagaatcagggaagctttactgcttggatgttcctaaaatgtatccagagcagccctatcctgaacctcatcatcatcatcatcctctagaggggtaaattggattgtttggttttgccatgtcttgtc

SEQ ID NO: 193371 - DNA, 814 bp, Gossypium hirsutum
ataatatatatagcctcggagatcggacccttgagtcgccggataatcatcgacgactgcccgagactccgccggagccaccagaaaagtacttcttaccgtttctacggcgagagagtggatttgaatatattggccgtgttttggttttcgatggcttcggaggatgtgaagactagtgaatcagctgtttcgacgatcgtgaatctagctgaagaagcgaagctcgcttgagaaggcgttaaagctcccagttctgctgttcttagtatctgcaagtctctcgttgccggccgcgttgctggtggagtgtcacgaactgccgttgctcctttggaacgtttaaaaatcttacttcaggttcagaatccacatagtataaaatacaacggaacaattcaaggcttgaagtatatttggagaacggaaggttttcgtggattattcaagggcaatggtactaattgtgcacgcattgttccaaactctgcggtcaaattcttcagctatgagcaagcttcaaagggaatcctgtatctatatcaacagcaaactggcaatgaagatgctcaactcactcctcttctacgccttggagctggagcatgtgctggaataattgccatgtctgcaacttacccaatggacatggtacgaggcaggcttactgtacagacagacagctctccttttcagtacagaggaatgtttcatgctctgtcaactgtgttgcggcaagaaggcccacgggcattgtacaagggttggcttccttcagtcattggagttataccatatgtgggtttgaattttc

SEQ ID NO: 193372 - DNA, 687 bp, Gossypium hirsutum
gggcaactgtggaatgcggagcctctttttactgtaaatcgcttcacacatctgattttctggaccgccggataatccttctcgactttccgacatacttcgttgggcttttgtggcgagagacggactttcaaagttttctttccctgtttttgtttttccatggcttcagaggatgtgaagactagcgaatcggctgtgtccacgatcgtgaatctggccgaggaagcaaagctcgcgagagagggtgttaaggcccctagctatgctattcttagcatctgcaagtctctcgctgctggcggcgtcgccggtggagtgtcacgaactgctgttgctcctttggaacgtttaaaaatcttacttcaggttcaaaatccacatagtattaaatacaatggaacaattcaaggcttgaagtacatttggagaacagaaggttttcgcggattattcaaaggcaatggtactaattgtgcacgcattgttccaaactcggcggtcaagttcttcagctacgagcaagcttcaaagggaatcctatatctgcatcaacggcaaactggcaatggtatgatcaatattgccatcgtctttttgctgagcaaccatctcatgtttgctttacactgataacatatggaattcagttatcttttaggttcatcgattgatgcctgcatacat

SEQ ID NO: 193373 - DNA, 543 bp, Gossypium hirsutum
caaacttcaaaaccttcatttctaaattggttattggaaccccaaaataaaaaacagcttccttctgccttgggactgatagagagcatttctaacaatgtctggcgaagaggaagaaaacgcagctgagctcaaaattggagaagagtttttgaaggccaagtgtttgatgaattgcgaagtggctctaattcttgagcacaagtatgagcagcttcagcaaatgtctgacgatcccatgaatcaagtttcccaggtattcgagaagtcactgcagtatgtaaaacgcttcagccgttataaaaatccagattctgttaggcaagttcgagaaattttgagtagatatcagttagctgaattcgagctttgtgttcttggcaacctgtgtcctgaaactgtggaggaagcaatcgctatggtgccttccatcaagactaaaggacgggctcacgacgacgatgccatcgagagaatgctaaatgacttgtcccttatcaagaaatttgaatagtggccgctaaattactggctgtctatgaa

SEQ ID NO: 193374 - DNA, 372 bp, Gossypium hirsutum
aaagggtaaagcgaatagctgagttagagctgagctgagctcacgagttggtttttttattcagtgctgaggcgctttaccaacctaacacttttttttttcgattaaatttccatgggtttctaataaacgatccctttctgcttaattatttttcttgatcgtaatcctccattcctcgcttgctgcaatatgcaagagtcttaaccaaaatgccgccggcaatatagaaatgtgtctgcaactttgcatgccctgagttggagaccataatgttttctgagagtgttagtgaggaagcgcctcggcaggaatttgagacgcttactgtgtctcaaccacttgtgaggagcgttagccagaagtttgggc

SEQ ID NO: 193375 - DNA, 427 bp, Gossypium hirsutum
cccactcgtccgatctcgtcaaatatcggtgaggtggcctccatattcctaacagcagcattgggtatacccgagggcctgattccagttcaacttctctgggttaatcttgttacggatggaccccctgcaacagctttgggattcaatcctccggacaaggatatcatgaagaagcctcctcggagaagtgatgattcactcatcactgcttggattttattccgctatctggtaattggactttatgttggagtagcaactgttggcgtcttcatcatttggtatacacacagttccttcttgtgcattgatcttagcggggacggccacacccttgtcacatacccccagctcgccaactgggcccagtgctcatcctggaaaaatttcactgtttcacctttcacagccgggaaccaagtct

SEQ ID NO: 193376 - DNA, 425 bp, Gossypium hirsutum
gttttcaggtcgggtcggtcgggtcacaagaacttatatataatggatgcaatcgaaggggagacgagttggattgaaagactaacagatggtccgtggacggacacaatgtgtaattggtcaccagatggtgattggattgcattttcttcggatcgacatgatccagggtcaggtagtttcgagttatatatgattcacccgaacggtaccgggttaagaaggttgcttaggagcggttcatccggacgggtcaaccacccgtcatttcgtctcggatgggaagttattggtattcactacggattacggtggaatatcagcagagccaatctcaaacccacatcactaccaaccatatggtgagatattcacgatgaaattggacggttctgatttgaagaggacgacccacaattcttatg

SEQ ID NO: 193377 - DNA, 657 bp, Gossypium hirsutum
  unsure (1)..(657): unsure at all n locations
ctcacttttagcactctaataaataacttggcccttcatcacgtcacgtttccgagggttctgcctttctctttcccactgtattttcctggtcttgctgcccggatgctcatttcaacgccagaaaaaatgagtaacgatgacgcatccgatctcggcgtcgccctccccgccgccgctgccgctttgagtgctgaggaacgcgccggcctggttaatgagcttaagaataagcttcaaaatttagcgggagaacatgctgatgtgctagaaacactatcaccaaatgtcagaaaacgtgttgaggttctcagggagattcagagtgaacatgatgaactggagaagaagttttttgaggagagagctgcattggaggccaagtatcagaaactttatgaaccactttatactaagaggtatgaaattgtgaatggtatagtgaacgttgaangagaaacaaatgaaactgtgatggacgaagatagggataaatgtgtacaacaaaaangagtgcctgacttttggcaaactgcgatgaaaatgaatgaaattttggccgaggagatttcagagcgagatgaaagggctctcaagtatcttaaagatatcaagtggagcagaaacgatgatcctaagggtgtcaagctaaaattt

SEQ ID NO: 193378 - DNA, 439 bp, Gossypium hirsutum
  unsure (1)..(439): unsure at all n locations
ttcactcgtccgatcttctccaaatgtgaggatgcatggaattttgttggacacattggggtcgagttcagtaggcaaaggtgttgaattaaaacagatgattgtttcctcttataacgttttatgtcttgctacaaatttattgaagaaggatgattctttctgtatatacataaaaaggcaagttttgccgagaatcagatggtattatggcaaaagagaagggtgaaaagatatatataataggtaatgttgttttggtgtgaaaaataaagctgctaagtgctaagttaaatattggtggtcactgcttgccatttctagccagagaaggagagacgggtgataggagtggtgtagatctattccctgctggtaatggtacatctgcccccactcaaactgaaatccttatccttcccttnccctttcccttccc

SEQ ID NO: 193379 - DNA, 570 bp, Gossypium hirsutum
  unsure (1)..(570): unsure at all n locations
gaactctgaaaaggttttgaagcaccagaagcagtatgagtagaagataaaatatttaacacttgaagataaagtgtcatactaaatctaaattaggttgtgaaactctcggagtgcgaaatttatagttataatcctcactctgatgcagatccctttctggagaaatgatcaatgttagaagggagaaaatcagtgaaagaatgaagtatctgcaagatttagtaccacggtgtaacaaaatcacaggcaaagctggtatgctggatgaaatcatcaattatgttcaatctcttcaacggcaagtagaggtaaaaaaataatggagaaagaacatatggatttgtgtatgaacacaaaaattctttttcatttctagtaattacttaactgctttaagattttgtcctccatgtgaggacatatttatttgttgttattttcttagctaataacaagatgagaacaatatgagaaagaaaaatagaaactactttgatacaattnaacaacttcaatagcttataatacttgtgaggagtaaaaacaagggcactcttagaattgaac

SEQ ID NO: 193380 - DNA, 428 bp, Gossypium hirsutum
tgtccttgaggagtacataacaaacgggagaaaagctagagaaataataaatcacaaatccgttgccgttgcagtgaatgaaaatcgttaaaacatctgctaaattggaagaaataaaaataaaaacgaatgaatgttgaagctcttatcatcatctccattctttcttaagctttgcttgtaggacctcatgcgttgtgaagaactagaagcacttcctgtgcacaatagatgggccagattcatcatactctgccttagcaatccacatctgctggaaagtactgagggatgctaagatagagcctccaatccagacactgtatttcctttcaggtggagccaccaccttaattttcatgctgctcggggccaatgcagtgatttccttgctcattctatctgcaataccggggcggacgcgtggg

SEQ ID NO: 193381 - DNA, 566 bp, Gossypium hirsutum
gttgttttcaataacttcttttgattccactgagcgtcaacaaatcttcagaatttcgaattgaatccttttttttcttttataatgcaccgaatcgtacggtgaaaaggagagaatatctgcgaaatggaatccactgtaacgaatccattgccgaactcgaattccgaccctgtcagaaggaagaagaaaaagaaaacatcagcagcggcggcgacggcgacgttgaagacgaatcagcagcggcagaaccaaaaccagagctacaatcacaccagatggaaatccgaggcgcagcaacaaatctattcttcgaagctgattcaagctttgagtcaagtcaatctcaacggtaaccattcttctccttcggctccgcgtcgtggacgagccgttcgtgaagctgctgatagagctttggctgtagcggctaaagggaggacgaggtggagccgtgctattttgacgagccgtgttaagctgaagtttaggaaggagaagggacagagaagtggatctatttctgctgcgacggtgactggcgttatcggtagaaaccggtcgag

SEQ ID NO: 193382 - DNA, 514 bp, Gossypium hirsutum
tttgggggccccataaaaaaattttttttttccaaacccggggaataaaaattggaccccttaaaagggccccccctttttttttttttttttttttttttgttaacaaaacctttttttgttgtttgaataatgtttttctattatttttattttttttgcatttttttctagttcttgtttatgctttttttttttctttgctcttcttttttttttcagaataaaatatatcccccaaggacatgggaaaattataaggaattcacttcagaaatgacttatttctaaccctacaataatcttcaaagttcatcattcaaataattcaactgctcccataaaatttacaaagacaacaaacaccaccaaccgtatatgcacatctcaggcaagaatcaatcatataaaatcgaaaagcgaaaaacagtcacatccctcaaacaccaacttcccaatactccccactcctgtctctattcaagcataagcagaacaaaccactcacttattt

SEQ ID NO: 193383 - DNA, 727 bp, Gossypium hirsutum
cccacgcgtgcgtaaaactcaggttctcactctacattctccacgattaaaaagaatatatatttcttatataaatctgctcaaaactaccctctactctctcaaattttctctaattcttcgtcaaggtttaaagtgttcggataatgccacagggcaatctggaaaccctcgtttccgcctgtgcttgcggctcttgcgacaacaaaattgtctgcgagactttaacaaccaccgaaggcgactacgacgactgcctccacacggcggagaaacttctcgaagaagaaacccctccggattttccgccagaatcgtttttgttgtccaaagacgctgagctcgtctggttccatagcgacgcttttctagaacggagagattcgcagaaacggaactccgtttcgaactctacaaatcttaatcctagcctcagctcagttccgaattctcaacgcttttctttgagaagatctaaggcttcgatcctcggattagcgagaccgcagaaatcttgctttggttgagacggagaggcggaagcctggaaacaccggattgtttcctagacggatccggtgcggttaaatcggatccgcccgtcagtgagccttcttcgcctagagtttcttgcgtgggaggagtcggatcgaggcgagacgggggtcgccgagttaggggaagacgccaagagtcggctggagtcgaggcggtgtgggggagggct

SEQ ID NO: 193384 - DNA, 411 bp, Gossypium hirsutum
tcgacctttcatctgcttcttcttctagggaaagggggagaaagacgcctcttcttagctcgaatccctccaaatctaaatctaaatccaagttcctctcctcaatctaattgcataccatactgaagttagagtaaccatgtacgttgaacatgccttctcgatatctgacgaggatatcatgatggacactccccacgccattaacaatcggcctccgtacaaggagatcggcctcgctgtcgctcttctcgcctttggcacccttgggatcatcctgggtattttcatggccgtcaacaaagtcggcggtgaccgcgcccatgggcttttctttgcaatactcggatccattttgttcattccaggcttctattatacaaggattgcatattatgcatttaagggata

SEQ ID NO: 193385 - DNA, 374 bp, Gossypium hirsutum
tttaaaagtgtcttacaagttcaatctcttgaaatcaagatgtccaaggaggacggtttgctcagtgaaatgcgctttgccagaagaaagggctgacaagcatttagatgagctccaaagcgaaaatagctgagggagctgcacctggtcttgcaattttgaagaacaaagctccaagatggcatgaacatttacagtgctggtgtttgaatttccacggtcgggttacagttgcatctgtgaaaaactttcagctggctgcaactgtagatccaagtcaaccaggagggaaaggagatgaagaaaaggttctcctccagtttgggaaagttggggatgatacattcaccatggattacaggtcacccttgtcc

SEQ ID NO: 193386 - DNA, 989 bp, Gossypium hirsutum
cccacgcgcccaataccctaataatatgaatcaattccaccaatattttgcttgaggttgtctgttattatcaatctctctattaacccaaatccatctaaatttctcctttatatgcccccttcttattgtaattctttgcagtgtgacaaggaacaaggaagatggcggcaggaatgaatgcaggagcaccggagagagaggcacggagagcccatgcctccatggcgttggttcaactcatcaatggagggtatcatgtaattaccaaagtagccctcaatgttggtgtcaaccagcttgtcttctgcgtcttccgtgatcttcttgccctctctcttcttgcccccctcggctatgttcgtgaaaaaaggattcgaccacctatgactaaacgcctccttctctccttcttctttcttgggttaactgggatatttggcaaccaacttttatttctcattggtctgagctacacaaatcctacatatgctgctgccatacaaccttcaattccagtctttacctttctcttggctgtaatgatgggtacagaaagagtgaatttgctcaaaactgaaggtcaagcaaaggttggaggtaccctgatatgtgtttctggtgcgatattaatggttctgtttcgtggtccagctttgattggacagaaagatgcagactttgctctaaatgacataagtgccaggggtcaaccagaaccttctggatggctcgtgtctactcttctgggatttggactggaacattggcatattggggttctatgcttgatagggaactgtatgtgcatggccactttcctagctattcaggctccagtgttagccaagtatcctgcaaacatttctgtcacagcattttcctatttttttggtgccatattgatggtaacaacatccttttttatgaccaatgagtcaacagactggaagttgacgcggtctgagctttttgctgtcttatatgct

SEQ ID NO: 193387 - DNA, 1443 bp, Gossypium hirsutum
  unsure (1)..(1443): unsure at all n locations
gacggagttttgtccaggcggcgaccttcatgtcctccgtcaacgtcaacctctcaaacgtttccccgattcctccgtcaggttctatgcatcagaggtggtggtggctttagagtacctacatatgatggggattgtttaccgtgatctaaagcctgaaaacgtgttggttcgatcagatggtcacattatgctcacggatttcgacctttcattgaaatgcgatgagtccacatcaacgccccacattgtttccgatcaaaaaccgccggtaccaggtctgcggaatgactatcctaaagatcatcctcctttcacatcgtcttcttgcatcatcccaaattgtattgtacctgctgtttcatgtttccacccaaaacgcaaacgcaaaaagaagtctgcccatcgtggtgggcctgagtttgtggcagagcccattgatgtccggtccatgtctttcgtagggacacatgaatatttggcaccggaaattgtgtccggtgagggccacggtanccctgtggattggtggacattggggatctttatgtatgaactgttttatggggtaacaccgttcaagggcgtggaccatgagctaaccttagccaacattgtggctcgagcccttgagttccctaaagaacccatgattccagcagcggctaaagatcttatttcccagctgttggtgaaggatcctccaaggcgtttagggtccacaatgggtgcatcagccatcaagcaccacccattcttccaaggggtcaattgggcattgctaaaatgcacgaccccaccatatgtacctccaccttttagtaaagaagttgtatcagatgaaagctgtccagagaccccagtagagtattattagggtgaagtaaagaaatgatcagtaaattaaaaaagaatcaagcgtcccctacagcaatcatgtaacttgtgattatactttttggaatctatattgcaacgagtattcatttatctttaaatatcggcatatattattgtaagcctccagttggaggttaatgtgttggttcattggattccgacaatgcatttgtaaaaaacaatcgatatggacacgggaagaggaaagccggtggcatcgaacgtgataggctgtccaccgatcaccgaaggtatgagaatacaccaaggaaacgaaattggtgccttttaagatgattgcccctaccatgtggtttgtttactacatagggaaaatgttgggacttttgccatgattcctttaaatcggctcacatgatcactgcgtacttccatgttgatgccatccaatggtttaatttttatttctttggcatctactgcaaatccaaacaacaatgttatatgtaaatgaagttatcgtatatgtaaaagaatgtcataatggtatatttttggctctactactctaatgtactaaat

SEQ ID NO: 193388 - DNA, 454 bp, Gossypium hirsutum
gcgaaaaaaaataagaaagagaatgaaatcaaatctttagattgattcatttaattttctctcttttgctctcatttcctgcaactccgatctataaaattccatcgtttgttggaaagagcaagagaggaaaattaaatcaaagataaaacgattattagcaataaaggacgacaatgaagaactgtgaaagactcgctaatttagctttagcagggttgacgttggcaccacttgttgtgaaggtggaccctaacttgaatgttattttgactgcatgcctcgcagtatatgtgggctgctatcgttctgtcaagccaactccaccattggagacaatgtctaaagagcatgctatgcgttttccgttcattgggagtgcgatgctgttatcacttttcttactgttcaagttcttatcaaaagacttggttaatgcagtattgacatgcta

SEQ ID NO: 193389 - DNA, 833 bp, Gossypium hirsutum
tcttctttgagattttgcttcagcactctaaagcccctgccaagccaaaatgggtatttctcgtgattccatgcacaagaggcgtgccactggtggcaaaaagaaggcttggaggaagaagagaaagtatgagcttggaaggcaacctgcaaacacaaagctatcaagcaacaagacagtcaggaggattagggtccgaggtggaaatgtgaagtggcgtgccttgaggcttgacacaggaaactactcctggggaagtgaggctgtgactcgtaagaccagaattttggatgtggtgtacaatgcgtctaacaatgagttggttcgtacacaaactctggtgaagagtgctattgttcaagtcgatgctgctccattcaagcaatggtatctccagcactatggtgttgacattggtcgcaagaagaaagcagcagcagcagccaagaaagaaggagaggaaggtgaaactgctactgaggaagtgaagaagagcaaccatgtcttgaggaagctggagaaacgtcagcagaatcgcacacttgacccccatattgaggagcaatttggtagtggtcgtttactggcttgcatctcttcacggcctggtcaatgtggccgtgctgatggatatatcttggagggcaaagagctggagttttacatgaagaagatccagagaaagaaggggaagggagctgcctaaaattttgttgcttttgagtatttcatcattaagatcaaaatgtccttttttttttgcctttcaccatttgagaacatttgaaattgtgttagttttgagctttttttttgtttgaatgttaattagt

SEQ ID NO: 193390 - DNA, 967 bp, Gossypium hirsutum
cccacgcgtccgcccacgcgtccgcttgttgcttccctttttttaaaaaaataaaaaataaaaatcccattaaggcttgaactgttcttcagccaaaatgggtatttctcgtgattcaatgcacaagaggcgtgccactggtggcaaaaagaaggcttggaggaagaagagaaagtatgagcttggaaggcaacctgctaacacaaagctgtcaagcaacaagacagtcaggaggattagggttcgtggtgggaatgtgaagtggcgtgctctgaggctcgacaccggaaactactcatggggaagtgaggctgtgactcgtaagaccaggattttggatgtggtgtacaatgcatccaacaatgagctggttcgcactcaaactctggtgaagagtgctattgttcaagttgatgctgctccattcaagcagtggtatctccagcactatggcattgacattggtcgcaagaagaaatcacgctgcagccaaaaaagaaagaaaagaaggtgaaactgctactcaagaagtgaagaaaagcaaccatgtattgaggaagctggagaagcgtcaacaaaatcgcgctcttgacccacatattgaggaacaatttggcagtggtcgtctgttggcttgtatctcttcacggcctggtcaatgtggccgtgcagatggttacatcttggagggcaaagagctggagttctacatgaagaagatccagagaaagaaggggaagggagctgcttaaaaaattattgcatagttttcagcattcatatcagaatgccgcccttagggtttgcctttcacatttccagaacatttaaagttgtgttagcattgaacttttaatctggatccctgagagttattatttttgtattggaatttagattatctttgaactttataaatgcagcttattttggttggtaaagatgcagatcttctgcttttattttt

SEQ ID NO: 193391 - DNA, 929 bp, Gossypium hirsutum
ctttttttttcttcttcacagatttgcttcaaccccctcccgctcttccccctgctaaaaggcttgagctttcagccaaaatgggtatttctcgtgattcgatgcacaagaggcgtgccacaggtggcaaaaagaaggcttggaggaagaagagaaagtatgagcttggaaggcaaccagcaaacacaaagttgtcaagcaacaagacagtcaggaggattagggttcgtggtggaaatgtgaagtggcgcgctctgaggctcgacactggaaactactcatggggaagtgaagctgtgactcgtaaaaccagaatattggatgtggtctacaatgcatctaacaatgagcttgttcgtactcaaactttggtgaagagtgctattgttcaagttgatgctgctccattcaagcaatggtatctccagcactatggtgtcgaccttggtcgcaagaagaaaacacttgcagcagctgccaagaaagatggagaggaaggtgaaactggcgctgaagaggcgaagaagagcaaccatgtcttgaggaagatggagaaacgtcaacagaatcgcaagctagatccacatatcgaggatcaattcgcaagtggtcgtttgttggcttgtatctcttcaaggcctggtcagtgtggccgcgctgatgggtatatcttggaaggcaaagagctggaattctacatgaagaagatccagagaaagaaggggaagggagctgcctaaaaattttgttatgtgagcttttatcatatcatgtcagaatctcctctctgctacttcttatctttttacaggacattcaagattgtattagtttttgaactttttagtttgaatgtcaactagtggggtggtgtgtaatgttgaacaatataatatttgtgtttgaattttgatattcttgaactttat

SEQ ID NO: 193392 - DNA, 500 bp, Gossypium hirsutum
agcgcccgcaccgcagttccggaatcgccggacgccgtccggggatttgcttcaacagacaacccccccccaaaaaaaacccttgaactttttccgcagtcaaaatgggtatctctcgtggttcgatgcacaagaggcgtgccactggaggtaaaaagaaggcttggaggaagaagagaaagtatgagcttggaaggcaaccagcaaacacaaagctttcaagcaacaagacagttaggaggattagggttcgtggtggaaatgtcaagtggcgtgctctcaggctcgacactggaaactactcgtggggaagtgaggctatgactcgtaagacccgaattttggatgtggtgtacaatgcatccaacaatgagttggttcgtactcaaactctggttaagagtgctattgttcaagttgatgctgcaccattcaagcagtggtatctccagcactatggggtcgacattggtcgcaagaaataaacagcagccaagaaa

SEQ ID NO: 193393 - DNA, 581 bp, Gossypium hirsutum
gtggaggttcctagtgcagtttatcaagcttcttcacctgttgaaacgaataaaggaaacttgagcactgtagcaagtggtaatagtggatccgggtcattaaaatcaactttgaagagctcttctctaaatccgaatgctttctataaaggagggggattgtcatcaggtaatctatctcaaggttatccggatccgagatttagctatgatggggttcagtcaccgattccttggttagatatgtcaatgtcttgtaatggacaatccgaacatgctgcaaatggtgggttttcatattcaagcaacctttcatctggcaggaatcagaaccttcatcccttccctcatgtcatgaatttgcacaatgtaagaccatcatcgggtgtaggccaaggatatggatacatgtaccctaacaacatggcctacagtcattacagaggtggttcgggttttggatcatatggctatggtgctcgaaagaaaggactaggttggtataatgttggcagcaacaacaagtataggttccaaggttatggaaaagagaatatggatggtttgaatgagctaaacag

SEQ ID NO: 193394 - DNA, 570 bp, Gossypium hirsutum
ttctttttgtagcttctcataacttagctttttgaagggttcttgcagagggtggaagtttgaagctctctcttaaagataggaccgtcgttttggcccttgcacgagtggatttgctggctttttttggttattctgtttcttcacatgcttagaccaacaaagtaatgctggcagtatgggaaagaaaggaagttggttttctgcaattaaaagggttttcataccacactccaaggaaaagctaagtaatgaatcggataaacgaagtggtaaagaaaagaagaagaaaggcctaggaaaattaaggcatggagaaaccaattcctttattcccctctttagagaacccagcagtattgagaaaattcttggggaggctgaaagagagcataaactagtattcaggcctccaacacctccagagcagccaacgacaccaccttttgtgcctcataaagatgcttctccaagagttccttcacagaggattgcctctcctaggattgcttccccgagggctgcttctccaagaaccgtttcccctccacgagctgcttctccaagagc

SEQ ID NO: 193395 - DNA, 396 bp, Gossypium hirsutum
gagaaaaggcgtaaagtggccgactccgactcgccgctcggacatttacgcaacgcaacgcctcattgaacaacgaaagcggcggtggtttagggttttagtagagctaaatcatagaaaagaaggaagtaggtcggcatggggaagctcacggccgacttgatttgcaagtgtcctcacttcttcaatgccctcaaagagcgagaattggatcttcgaggtaacaaaattgctgtaatcgaaaacttgggtgctaccgaggaccaattcgataccatagatttatctgacaatgagattgtgaagctggacaacttcccttatcttaaacgcttgggtactttacttataaacaacaaccgagttactcgtatcaatcccaatattggggagttc

SEQ ID NO: 193396 - DNA, 535 bp, Gossypium hirsutum
ctttccgagcctgcaccttcctcggaggatgtttactcttctcttgatggccagccaagcctgaaaattgatatgaatgttgattcccaagaacagcatgctactatggatttggaaacaggtggaaacatatctggtaatgtgcctttggttgtggaagacaacggagataatatcacaaagacaccggctcaggatgctggaacaagttctgaggttgctgcagaatctgtaaatcctgacacagtctctaccaaaccggaaagcatcgaagaagcgcttgaaggtgaaggttttaccgatcatgccaagattgacagtacatgtgtcttgggtggagataccgctgaaaaccaaactgcaatggaggaatagctgttttaggcttttagctcttaagaaggtaaaagttttttcgaattatgagaaactaggtcaggaaattctctcattcaaccagtaatattggggggactgatggatccacatctgcctctgtattttaattttccatggcaattagcaattttggagc

SEQ ID NO: 193397 - DNA, 462 bp, Gossypium hirsutum
aattccttttaagtaccccttttattgttcatcttcatgagtgtaaattaagtttccttttagcttccaaaaaaaaaaatctcaccatctttccatcaaaagcccatacttttctcttccatccagacaagatattcatcaatgaagaagataaatctcctacttacgaaatgcaagagcttgtcgagacaactaggaaggtcatcttcatatagtagcttaagatcgaaatcaactcgagaagatcatcaccgttatatatgggatcatttaagaagaagaacgaggcggaaccaagatggagacaattatgataatgatgatgaacatcaatgttacgaaacggtttatgtcgcgagtacgacgaaacgatacgtggttagttcgaagtaccttaaacatccattgttgcatgctttaatagagaggcctaaacaaaagcatggaggggaagatcacata

SEQ ID NO: 193398 - DNA, 442 bp, Gossypium hirsutum
ccctcgcgtccggaaactttgaagtttttgtgtggagaaaaacaagtgttttttttagattatcctctgcgtagccagggcagctcgtagaatctctgcgttacttactcgttcactctctgtttcatcttcatctgtttctactttgttttcatctctagggaaaaacagtggcagaaatggaattgggaaaaggttcagcacagctgcagctcttgaggatctgattgttccaccggttcaaatagcttacactcagaatttaattgatgggaaatttgtagatgccgcatctgggaaaacatttccaacttatgaccctcgtacaggggatgtgattgccaatgttgctgaaagtgatgccgaggatattgaccgagcggttgccgccgctcgcaaggcattcgatgagggaccgtggccgaaaatgactccctatgaa

SEQ ID NO: 193399 - DNA, 2131 bp, Gossypium hirsutum
cccacgcgtccgctcttaaccaaccacaaacccatttaagtttctgttgctggcactgagagtcccagatccaattaaaaaaaatgaaggtgatagataagatccagtctttctcacaggaccaagggaaagtggttttttcctttgagttcttccctccaaagactgaggatggagtggacaacctgtttgagagaatggatcgaatggtggctcataatccatctttttgtgacattacatggggtgctggtggttccactgcggatctcactttggacattgctaacaagatgcaaaacatgatatgtgtggaaacaatgatgcatctcacttgcaccaacatgcctgttgagaaaattgaccatgctcttgagaccattaagtctaatggcattcaaaatgttctcgccctccgaggtgatccccctcacggccaggacaagtttgtccaggtcgaaggcggcttctcctgtgccctcgatctggtgaaacatatcagatctaaatatggtgactactttggcatcacagttgccggttatccagaggcacatcccgatgccataggaaatgacggtgtagccacacctgaagcttatcagaatgaacttgcctacttaaagagaaaggttgatgcaggagctgatctgattgttactcaactgttttatgataccgatatctttctcaaattggtcaatgactgtcgccaaattggaattaattgtcctatcgtgccgggtattatgcccattaataactacaagggtttcttgcgaatgactggcttttgcaaaactaaaataccagctgagattactgctgccttagagcgcgggcgggggcaacaaagaacctgtcaaagcctatggagttcaccttggaacagaaatgtgccgcaagattttagctcatggggttaagacattgcacctttatacattaaacatggagaaatctgcattagctatcctaatgaatcttggattgattgaagagtccaaaatttctaggtccttaccttggagacgccctgcaaatgtttttcgtgttaaagaagatgttcgtccaatattttggtctaaccgtcctaagagttacttatccaggactattggttgggatcagtacccacaggggcgatggggtgattctcgaaatccatcgtatggtgcactatccgactatcagttcatgaggccccgtgcacgtgacaagaaacttcaggaagaatgggctactcctttgaaaagcattgatgacattcaagagaaatttaaaaaccattgtctgggtaagttgagaagtagcccttggtccgagttggatggtcttcagccagagacaaagatcatacatgaacagctaggaaagatcaatttgaagggcttccttaccatcaatagccaaccagctgtcaatggggaacgctctgattctccatctgtcggttggggtggcccaggagggtacgtttaccagaaggcttacctcgagtttttctgctcactggataaattagatgcactagtgaaaaagtgcaattccttttcatcattgacctatgttgctgtcaacaaaaaggggaatttgttatcaaacattggcctcacagatgtgaatgcagtaacttggggagccttccctgctaaagaaataatccaaccaactgtggtggatcctgccagttttgtggtgtggaaggacgaagcatttgaaatctggtctcgatcatggtccaccttgtacccagatggtgatccttctaagaatttgctcgaagagattcagagcagctactatttggtgagcttggtagataacaattacatggatggtaatatttttggtgtttttgaagatctttgaagatgagatttgagatattattatgctgcagtgcagtgttccacttatgcttatgatttaatgtttatggtgtctttctcctttattattgtctcttcgtggttgaattttcaattgtaactttatttgtaataatgactatataaagagaatttatatcttcagatagagatcgtaaattttgctgtacattaaatgtttatgtttattttcgacattttagatttaaaaaaaaaaaaaaaaaatgtcgacgcgcccg

SEQ ID NO: 193400 - DNA, 446 bp, Gossypium hirsutum
gcgggagctgatctgattgttactcaactgttttatgatactgatatctttctcaaatttgtcaatgattgtcgccaaattggaattacatgtcccatcgtgcctggtattatgcccattaataactacaagggtttcgtgcgaatgactggcttttgcaaaactaatataccggatgaggtcactgctgccttagagcctatcaaggacaatgatgaagcagtcaaatcctatggaatccacctcggaacagaaatgtgccgcaagattttagctcatgggattaagacgttgcacctttatacattaaacatggagaaatctgcattagctatactaatgaaccttggactgattgaagagtccaaaatttctaggtctttaccttggagacgccctgcaaatgtctttcgtgttaaggaagatgttcgcccaatattttgggc

SEQ ID NO: 193401 - DNA, 612 bp, Gossypium hirsutum
cccacgtgaccgcccacgcgtccgctggttagagctttgagaacaggtacttcaacggttaaagaaaacgcagcttgtgctttgcttcggctatcgcaggtagaagaaaacaaggtagcgatcggacggtcaggagctattccactgctagttaatcttctcgaaaacggtggatttcgcgggaaaaaggacgcatcaacggcgctttattctctatgcacggttaaagagaacaaaatcagggccgttgaagcagggatcatgagacctctagtggaattaatggccgactgcgggtcaaacatggttgacaagtcggctttcgttatgagcgtgttggtacccgtaccggaagctaaaacggcattagtcgaagaaggagggattcccgttttagtggaaatcatcgaagtcggatcgcaaaggcaaaaggaaatcgccgtagcaatcttattacagatttgcgaatatagtgtgctgttccgtactatggtggcccgcgaaggagccattcctcccttagtcgctttgtctcagtccggcaccaatcgcgccaagcaaaaggcggagacattgatagagcttctacggcaaccaagatccggcaacgcc

SEQ ID NO: 193402 - DNA, 404 bp, Gossypium hirsutum
cccacacgttcggctttttttccccttggatttgatcttccatggcttccaatggcgcttctactgaacagggagttagggatgtgacggagaacagtttggaaaagatcaaacggcagctggcctctggctctggtaggaacttgctacaaggtccacttctcaagcgatctgaaaccttgaggaaatggaatgaacgttgggtgatattagaccccacaacagggaaaatggtatacaagactaggaggaatgagccaactgttaagggaatcatgactgttcaatgaatacagcaccattgccatatctcctggtaactttcatggccttccaaagttcgaaggctgctgtttctatattgggactccccagaaaaatgactactttctttgtgcggagac

SEQ ID NO: 193403 - DNA, 537 bp, Gossypium hirsutum
gaatttatatcccgagcgggagaccgagcaagaatcctgcgacgaggaagtatagtcaaaggtggagaacaccgaagctgaaggctttgatcaaataaacggttctacggaaaatgctgacgacggcaaaatctccccatcaaagcagcagcagcagcaacaacaacaaaaaaagaagaagcctctactccgtaaattcgggagcctactgaagaagaaaggaagtaacaacccgaaatagataacgaaaaacccgaaacccgaaatccgtaatggcatgacttttagccttaccagcaagcaggtatagcagataatgtcttgcaagctgaatgtgttttgcttcacttattttgtttgttttttcttctaaaaatgtcctcaaatagaatttaaaattgaagagggttgtattcatgtttagtttcttcttcttattttttttttttatttgattctccatattggatagtatcttgtatgtgatggagataattcttttttttttttttttttaattttcttgtacttcatttt

SEQ ID NO: 193404 - DNA, 697 bp, Gossypium hirsutum
attttttttttttttttttttagaaaagaagaataaccttcctatattacttgcattgcacgctatcaatttaaagtgtatcatatttgttttcctccaaacacagtatattttaataaagagaataaaaccacaaaccaaatatgtttcaattttcaaaattaaaaaaaatatttatatatatatttaaattttctccttcactgtttgatggttttttattgatgacaaagaatttttttttcaattgtttacactcgagactggctttaaaccaagtttgagagcagcttcccatacaagatcaatcctatccacatcaattgctccaacttcatggtgactccaaccttctagctgatgaactacacctcctgcatggcatgcatgcaccactcctcgctccattgtatactcacaagaaccaaggccttcaacatcaggtggcaacctcatggcagctagatcaccgtaggtgcagtctcttctgataggcaaaatgggcggtacaacaaattgatggaaatgggttcctgatggagcccagctttgctcccatggtgttatccacttccccactatccatgtcttacaattttgagcagcttggtgcttggtcacttgcactaaatagttttggcaatccacgggggcttcctttagtattttttgaaacctttcggtcgatgaagtcaac

SEQ ID NO: 193405 - DNA, 696 bp, Gossypium hirsutum
cggccgcgtcgacccttcttttctgtttgtaatcagaaaaaagggaaaaaaaaatgggaagaggaaaattcaagggcaagcccactggccaccgccacttctctactccagaagagctccgtgctggtacctcagctcggccccgtacatttaggaaggaagaagctgaagtagaggaagaagaagaacgagaagagtctgaagaggaaatagaagaagagcccgagaaacgaaaagggacccaagggcttattgagattgagaatccaaatttggctaaacaaaagaatgtcaaagccaaagatgttgatatggggaaaacaactgaactatcaaggcgtgaaagagaggagatagaaaagcaaaaagcacatgaacgatatatgaagctccaggagcaagggaaaactgagcaatcaagaaaagatttagagcgcttagccatgattaggcaacaaagggcagaggctgctaagaagagagaagaggagaaggctgcaaaagaacagaagaaagttgaagctcgcaaataaaaataggttgaggaacgattatgatcggttaaccatttggttcttttcgctgttttatatatactgaagtttctattcatcccattaaaagaagggttttcaaattgatagttactatgaaattttctgaacttaattgtacttatgatctgcttttggatct

SEQ ID NO: 193406 - DNA, 707 bp, Gossypium hirsutum
atctgccctcacaggcctcaggtctcaccttcaccttctgctgcttcttcatttctatttttaatcagaaaatatatattaatactaaaattaaaatgggaagaggaaaattcaagggcaagcccaccggtcaccgccatttctccactcctgaagagctccgtgctggtacctctgctcgtccccgtacttttaagaaggaagaagctgaagtggaggaggaagaagaagagtctgaagaggaagtagaagaagaacccgagaaacgaaagggtactcaagggcttattgagattgagaatccaaatttggccaaacaaaagaatgtcaaagctaaagatgttgatatgggaagaacaactgaactatcaaggcgtgaaagagaggaaatagaaaagcaaaaagcacatgaacgatatatgaagctgcaggaacaagggaaaactgaacaagcaagaaaagatttagagcgcttagccctgatacgacaacaaagggcagaagctgctaagaagagagaggaagagaaggctgcgagagaacagaagaaaactgaagctcgcaaataatccaggttgagaaaaatctgtgacagtttctctctttatcttctatattgacttctgcatctgtatacttgagctcttatcccataaaaaaaaagagtttggaatctgattgttggatattctaaaacataaatatat

SEQ ID NO: 193407 - DNA, 471 bp, Gossypium hirsutum
attaaaaaaaaagaaaaaaagccgttgctaattaaattaaaaaccttcatttttttttactatttatatgctgattttgttcctctcttggcttcaaatcgtttactttggttccattgtttgagttgaagttagcaaatttctgggtttaaaaaagaaagaaagaaattcaccattttcttttaatctatttcttaatgattattactattccattttcacatgctttggattctactttaaccgtgtagaaatcatcatcatcacaagaatttgcattcttcaccctattgggcctttgctttttatcatttctctctggtcggcgagtgaaaaaaaaaagcagggtcttcaagaagtattcaactaagcaaagaagtgagcttggaagcagaggattttgaggattttaaaaacgagcttaaaaaccatagatgtaaaagaaggggagccgtgaaagtagcagaaaca

SEQ ID NO: 193408 - DNA, 798 bp, Gossypium hirsutum
tttcacgcgtccgcccacgcgtccgcccacgcgtccgctgctgcaaatctctctcgtgggaaacagtacctccggttccaacttcagctcaaaaatatgtcaggggaagaagttgcggttgcccaacccgaggcggcgcctgcactcggtgagccaatggacatcaacacagccttgccccttgtggttaggaagtcacgagctcacggtgggctcgcacggggcttgcatgaagctgccaaggcaattgaaaagcacaatgcgcatctttgcgttatagctgatgactgcgaccagccggattatgttaagctggtcaaggcactttgtgctgatcataatgttaaagtgctacgtgccccgagcgcaaaatcacttggcgagtgggctggtttgtgtaagatagactctgagggtaaagcacgaaaggtagttggttgttcctgcgtagttgtgaaggattatggtgaacaacatgaggccgtcgaagttgttcagcagcacaaggactaggtgaccggaggatggtttctttggtaaaatcatagctatttttctgggccatttatatttgtttgatagtgaactgtggattaatatgcctcagaatttcgttttctttttccgaagttgttgcaatgctgaactgttcggtgtttcttaaatatgctaggcattttttccctttactaaattatgcgtttagcaggagcaaaccatttggaaatccaacaattttatcacatgctgcggctgctatttgtgaacaacccaaacaattaataagttcccataaag

SEQ ID NO: 193409 - DNA, 645 bp, Gossypium hirsutum
  unsure (1)..(645): unsure at all n locations
cgagccctcctctgctttttttaaacgagnncttttgcaaccaaaaagtgcgtgtgttctcttaaaagcgaaagaagaacgcgcccatcgtttcaacaattttcttccaccccatctcgagaagtgctttttcggctgatggagacagttaaacaatttctccatttcttcagccaaaagtccgtttggctgataatttcccattttaacctgccttctcccccaaaaaagtttcttttctctggttctttagaggagctctatacccattttttcacattttcactttcaaaattttggcttactgctttcgattagaattttcagggaaaattctggattactgctttgctttaccctactcggcggctgtggtttggggattgagaatcgagataaaagaaatggagaagggaaacaggcaagtagttgtttcagcattgcaattcgcttgcaccgacgatgtgcccaccaatctcgccactgccgaaaggcagtggtaaatgaagatgcatctggagatgttgttgctatgagactgcaaattcaacagctgaaggtagaagtatctcgtctacgagctttcgttaatggcaaaagtgaaaatctggataatgagataggaacttgctgatgcacagcatg

SEQ ID NO: 193410 - DNA, 428 bp, Gossypium hirsutum
cttagaagctttgggaaagaaatcggaagatgttgatgcaaacctcagcaatattttcatcaaagcctgcgtgggtgaaagcagtacaccgcacatcctccaccgattccaattccatggctgctaccgtccccgcccccaagtgggctcagaagaccgtaactcttcctccccttcggcggggctgccatctcgttacgtctcagatattgaaggaaattaggccagatttatcagaatttaagtgtggccttgctcatctattcctgcaacacacgagtgcttctcttactatcaatgaaaattatgactcggacgttcgtgacgacaccgagacgttcctcaacaaaatagttcctgagggaagatctgcgccttggaagcatacgcttgaaggccctgatgacatgccagcccatatcaaatca

SEQ ID NO: 193411 - DNA, 455 bp, Gossypium hirsutum
gggttgagccatcaagttccgtattatgattatgcacttgatttgattttggacattgaatcttctcatggcgatatgttcaccgaagaacaaaatgaattggttgaatcagctgctgagatgttgtatggtcttatacatgtccgttacatattaactagcaagggaatgtctgctatgttggagaagtacaaaagctacgactttgggagatgcccgagagtttgctgctgtggacaaccttgtcttccagttggtcagtcagatattcctcgcgccagtaccgtgaaaatctactgcccaaagtgtgaagatgtatattaccctcggtccaagtatcaaggcaatatcgacggagcatacttcggggcgacatttccacatctatttctgatgacgtatgggcacctaaagcctcaaaagccaacgcaaaactacatccccagagtatttgg

SEQ ID NO: 193412 - DNA, 674 bp, Gossypium hirsutum
  unsure (1)..(674): unsure at all n locations
gcgccaaatatcgagggtcgagggccatcacggtctttttgtcataagtttatgtgaccggggctacttcacttctccaataggaaaagaaaaaaccctagcggctacactcttccctcactttctaaactaacagaagaaatcaatcacggaaatggagttttctcaagccgacttcgatcgccttttagtcgccgaacacacccgtaaaacctctgaagtcaactacgccaaggaccctcttgatgctgagaatttaaccaaatggggaggggctttactcgaattagctcaatttcagactgtttcagatgcaaagcagatgataaatgatgcaatttcgaaattggatgaggcgttgatgataaatccatccaagcacgaaacttttgtggtgcatgggaaacgctctttccactactgcatttatggctaccgattctgacgaggcaaaagtttcttttgataaggcagctcagtttttccaaagagctgttgatgcggatccaggcaatgagctttatcaaaagtctttggaagttgcagctaaggctccaaaactacatatggacttccaaaaggctgcagctanccaacagggtatgggtggggcatcttctgcttcttcaacttcaactgctgccaagaagaaaaaatcagtgatttanagtatc

SEQ ID NO: 193413 - DNA, 897 bp, Gossypium hirsutum
  unsure (1)..(897): unsure at all n locations
atgggctcctaatgttcccaccttacttttggcaagacttttggatggattagggattggattggctgtaactctgatcccgatttatatatccgagacagcaccaccagaaataaggggattcttgaatacccttccgctgttttctggttgccttgggatgtttctttcatattgcatggtttttggaatgtcgttaacgacattaccaaattggagattgatgcttggagttctttctattccttccctcgcatattttgggttaactgtattctacttgcctgaatcaccaagatggctagtaagtaaagggcgaatgaatgaggcgaaggcagttttgcaaaggctacgtggcagggaagacgttgctggtgagatggctttgttagttgagggactgggtgttggaggtgaaacatcaatagaggagtacataattggcccagcaaatgacgacattgaagacgaagatatatctgctgataaagatagaatcaagttatatggacctgaagcaggtcagtcctgggtggccagaccagtcactggacatggtagcagtataggccttgcgtctcggcatggaagtgtagttagccagagtgctcagcgtcttgtggatcctcttgtcactctctttggaagtatccatgagaaggtccctgaacaaggaagcacactttttccacactttggcagcatgttcagcgtgggaggcaatcaacctcgacatgaagaatgggatgaagaaggtggtgctaccatgggangganangactatgcanctgatggccccggtaatgaatccgatgacaacttgcatagtcctttgatctcaaggcangcaaccagcatggataaggacattgttccaaatgcccatggaagccttc

SEQ ID NO: 193414 - DNA, 612 bp, Gossypium hirsutum
  unsure (1)..(612): unsure at all n locations
atacactaagtccggcagctggataatccagttttggtttttgatttgatcatctatctcggccgcgagacaaggatgaatttagtggaaggtttactgactcaaatccaggggctatcaagcaccgcctccgatgttttatccctacaaaatgtgcttaatcaagctgatgagtcgctccatgccgagtccactcggttgttgccttttctcgaccaactcgacccttccaaacactctctcggttacctctatttcctagaggcttgcactgctggtccagttacaacagaatcagctagttcatttgtgttagtcattgccagatttatcagttcatgtgttgctgagcaaatacgcttggctcctgataagtttatatctgtttgtaagaggttcaaggaccaagttctgttgctcgaggaaaccttgcgtggcgtggctccaatgctgactgctgttcggaagcttcagtcttcgactgaacatntgactactttacatcccgagtttctnttactttgtttgttagcaaagtgttacaaaaccggtctctccattctggaagaaaatatttcgaggttgatcagccaagggaactttatctctagg

SEQ ID NO: 193415 - DNA, 720 bp, Gossypium hirsutum
  unsure (1)..(720): unsure at all n locations
gggcccggaatcccgggtccgccccacccgtccgaatttatggggaggnnttttaaaatagggccctgttaacccagttaaggggtcctgctgtagcaataccttctgatgaaaaaatagctttgctgggggccatccagtctctgtttgaaggctcaatgtacacctttgtgttcctttggactcctgctttgagccccaatgatgaggagatccctcacgggtgtatctttgccacgttcatgttggcttctatgctgtgaagctcccttgcctctcgattgatggctcgctcatcacccagggtagaaagctacatgcagattgttttcgtgatttcctctgcctctctcctgcttcccattataaccaatttcttggtcgcaccttcaaaggtgaaaggcggaagcatctcatttgcaggttgtctccagcttctcggcttctgtactttcgaggcttgtgtagggatattctggccgtccattatgaaaatgagatcccaatacatcccagaggaggctaggagcacgattatgaactttttccgtattccactcaatatctttgtctgcatcgtgctgtataatgttgacgcatttcccatcaccattatgtttggtatgtgctcgattttcctcttcgtggcatctatcttgcaaagacagctgatggcaatttccgacaaaccaaagatggaaagttggacagcaatggacc

SEQ ID NO: 193416 - DNA, 502 bp, Gossypium hirsutum
cccacgcgtccgttcttaccatttctggcattgtccaagaagctgctcaagataggaatagcattgtggcaaacttgacaacaaaaattgatttgacgaatgaaaatttagatgaattacagtacaaatacaatgagactactatgtccttaagcagaatgctcgaagagaaagacaggctgcaccttgcctttattgaagagacaaggaagatgcaaaggcttgctcgagacaatgttcgaaggattttggaagaacaggaaaagctgaatcatgaactggaaacaaagaaaaggaagatcgacaactggaccagggaactgaataaacgtgagacgctaactgagcgcgaaaggcaaaaacttgatgaagagaagaaaaagaacaatgaaagaaataattcacttcagctagcttccatggagcagaaaaaggctgatgagaatgtgttaagattggttgaagagcaaaaagagggagaaagaagaggccctgaaaaaga

SEQ ID NO: 193417 - DNA, 559 bp, Gossypium hirsutum
aagaaggtgaactatccccaaatggggattttgaggaagacaattttgctgattatggagaagctagtttggagattgctcttaaggtgaaggaaggtgcagcaaacagacaataccagagacatggagaggaggaagtgtgccgtggggaggctgggggagagaatgatgctgatgctgatgatgaaggtgatgaaagtgctcagaggacatcagaggatagtgagaatgcttctgagaatggtgaggtttttggaagtgattctggcgaaggtgaatcgagggaggagcaagaggaagatattgatcatgatgaacatgataataaagtggagagtgaaggggaggctgaagggatggctgatgcccatgatgcggaagctgatgttacattgttaccattttcagaacatttcctgctaactgtaaagccccttgcaaagtacgtcccttcaccattacatgagaacaagaaggattcacaagttttctatggaaatgactcattttacgtgctttttaggcttcaccatacattgtatgcgagaatacaatcagc

SEQ ID NO: 193418 - DNA, 1324 bp, Gossypium hirsutum
aaacagcaaagcatcgattttcttaatctctctgttctcagaaaaactaaaaagaaaagaatttagggcttagggtttctaatttttagacaatgaagagtgcattagcaaacgccttggcggtcgtagaccaaaggcaaaaaatcgagcaatacaaacacattttatcaactgttttctcgtcaaacgacatagttcaagccaataaattcattgatcatatgttatcggacgatgtcccgctgatggtttcgaggcagcttttacaaactttcgcacatgaattagagagactgaagccagatgctcaaaaggaaatttcccattatacacttgatcagattcagcctcgtgtcgtttcattcgaagaacaggtattgtttattagagagaaacttgctgagttgtatgaatctgagcagcagtgctcaaaagcagcgcagatgctaagtgggattgatttagattctggaatgagggttattgatgacacattcagattgtcaaaatgtgttcaaattgctcgtctatatcttgaggatgatgatgctgttaatgcagaagcttttattaataaagcttcattcttggttagcaacagtcagcatgaagttttgattttacaatacaaggtatgttatgcaaggattttggatttgaagaggaagttcttggaagcagcattgcgatactatgacatatctcaaattgagaagcgacaaataggagacgaaacaattgacgaggatgctctggagcaagctctatctgctgctgttacatgtacaatattagctggtgcaggtcctcagcgttctcgtgttcttgccacactttacaaagatgaacgttgctccaagctgaagatttatccgatattacaaaaggtttatttggagagaatattaagaaaacctgaaattgatgcattttctgaagaactgaaaccacatcagaaagcactgcttcctgataattatactgtgctggaccgtgccataatagagcataatcttctgagtgctagcaaactgtacacaaatatacgttttgatgagttgggtactttgctgggcattcctcctcataaggctgagaagatagcctcaagaatgatttgtgaagatagaatgaggggatcaatcgaccaggtggaagctgttatacagtttgaagatgacactgaagaactccaacaatgggatcaacagatagttggtgtgtgtcaagctcttaacgatatacttgatagcatggccaagagaggcttggaagttcccatctaatcctgaccagtcggtgcactgttcgagagcaaagaaac

SEQ ID NO: 193419 - DNA, 627 bp, Gossypium hirsutum
agctcttctcagtggtggtgattgttgtaacaatcattgtgtggttacttctaatgggattcttaacaacccaaatactcgttttcatttcatctcagctcttacttgtggcattcatgtttggtaacactgcaaagaccgtatttgaagccatcatattcgtatttgtgatgcaccctttcgatgtcggtgatcgctgtgtaattgacggaatacagatgatcgttgaagagatgaacattctgactaccgtgtttctgagatacgacaacgagaaaatattctatcctaattcagttctagcaaccaaaccgatcagtaacttctataggagtccagagatgagtgattccgtagagttcacagttgatgtttccacatcaatagagcaaattggagagttgaaagctaaaataaaagagtatctggagagcaagcctcagcattggcgacctggacatagtgtacaagtgaaggacattgaaaatgtgaataagatgaaaatgggtctttatgtgactcacaccataaactttcagaactatggagataagagcagccggagatcagaactggtgttggaactgaagagaatttttgaagctctaaatattaaataccatcttc

SEQ ID NO: 193420 - DNA, 964 bp, Gossypium hirsutum
tattatatctaagaccagcctcaagctggggccaaggggctcctccaatgcaacagcctggttatggttatatgcagcctggggcatatcctggcccatcatcgcagtacaacatgttgcagcctccttatgggggctacccttcccaaccgtcatctggtggatatgcctctggttgggaccagtcatctgtacaaccaaaccagcaaacctctgctgcaagtggttatgattactataaccaacagccttcacagcagcagcagcaaacctctggtgattcggtaactccagctgataacagtggttacaattacagtcaacctccagcttctagctatatgcaaccaggacaaggatattctcagtatggctatggtggataccattaatctggttatgggcagccatcatcatacgatcagcaacaaagttatggttctgcttcgagctacggtaatgtgacaaatccaactcaaggtggtcaaggggattcaggtcaggcacctacgtctacccaaccgtctgcaacaggccaacaagggtataatactagtcagcagcctaacccaaaccctggaagttatccacctccaggaagtactcaacctggttatggaatgccgccttcccaaactggctatgggaatcagccaccagcacagcctggttatggagctggatatggacaaccacaaacgcagaaacctttggccaatccccagatgtatgggcaggctcaacagtcgcctagcaccccaggaagttatggccagccaggatatcattcacagccgccatcttctggttatggtcaaccagagacaggttcacaacttgctcaaccaccaagttatggtgcgacatctgcccagcctggatatggagccccaacctatggagctggttatggagcaccttataacacctcttatggtggtagttactcacagccttcaacata

SEQ ID NO: 193421 - DNA, 640 bp, Gossypium hirsutum
catggccggaggaaccgaagcttttcctgatttgggtaaacattgtcaactttcaggttgtcatcaattagattttcttcctttcaaatgccaagcctgtcataaggtgttttgtgtggaacatagatcgtgtaagtctcatgaatgtccggaaccggatcataacagtaggaaggtgattatttgtgaaatctgttcgacgtcgatcgaaataacgggcaaagaagatcaagagaagatgattttggacaaacatgagaagtctgggaattgtgatccaaggaagaagaagaaaccaacttgccccgtttaaagatgcaaagaaacgttgacatgctctaatagaaccatttgcaagacatgtcgattggaggtttgtttgaaacacaggtttccagccgatcatgcttgcaagcaggcttcttcctccaccactccagcggcagccgatagaggaagctggaacgagaagttcttggtggcttttggtttaaggaatgggaaagattgtggcaagagtgggcgaccttcatcatcgactactccatctttaaaggcctattaagactttaatggtttatgagacactattgtaaatgctaattctttgaatcatctataaaacttcaatatttactta

SEQ ID NO: 193422 - DNA, 569 bp, Gossypium hirsutum
cggacgcgtgggagagaaaggaattttgcaggtcttgttggacataaggtttgctgctgatgttctttctgggggtgatttcaatgtaaatgaagagttatctagaaaaccgaagtctaaatcatcattcagaaggaaggaccaagctcagactaagtctgttgttagagatgctgttgatgggctgatctattctctttcgcaaaagttggatcccattgattggctgacgtatgagccatacttatgggagaatgagaagcagtcatacctcaggcatgctgtgctctttgggttctttgttcaacttaatcggatgtatacagatactgtacagaaactgcctactaattctgagtcgaatattatgagatgttctgtggttcctcgtttcaaataccttccaatcagtgccccagcattgtcttctagagggaataatgggaaacctattatggctgcatccaatgatgttacttcaagaagttcctggaaagcttatacaaatggagagctttcccagaaaggtgatttggatgatcaccagagttttggtgttgcaacaccat

SEQ ID NO: 193423 - DNA, 747 bp, Gossypium hirsutum
  unsure (1)..(747): unsure at all n locations
tatccgttgttatatccttcacggcgttacctcttgtggatcaaaaccttccatctttatcctctcctcctccttccgccatgacaacgcggccaacacctccgcccgtccacatcgacctctggcccatcctttccgaatctaaacgcataatcaacgcccactcccgccacttccttgctctctccgtcctcttcctcctccctctttccttctccttctccgccttccccttcatcaatcaactcttttcccaatcctccacccccaccatcgaaacccacctcagtttcctccacaccccttttcaactgcaaaaacccccaacaattcccatcaattacctgctcttcactctcctttacaccctcttcatcttcatcttctctctcttcgccaccggttccatcacttacagcgttttccacggcttttatggccgacccgtcaagctcctatccgctatcaagtcagctttcacttccttcttccccctcgtctccacttgccttgtaacggagcttatcatttctgggatccttttaattcttgctttgatcttccttggattactccaactaacccaactgttaggcttccatgttgattacacttcgccttatttcatttccctgtgtcttgttttcgtaattactttcttgtttattgtactctatttgcaagttaagtgggtatntgcttatgttgttgttgtanttgaatcaagctgggggcttgaaacattac

SEQ ID NO: 193424 - DNA, 731 bp, Gossypium hirsutum
  unsure (1)..(731): unsure at all n locations
gttgcttacaatacagtacttaatgggttgtgtaagactgggaacactggtcgagctgttaagtttctaaggatgatgaatgaaagaggtttcgaacccaatattagagcatatagcacccttattgactgtctttgtaagaatgggttactaaatgaggctgtcgacctcttctctgaagtgaacgttaagggcattagaccaaatattgttatttacaattgcttaattcatggtatgtgtaattcaggccagcagcatgaggcaaccaagcttttgaatgaaatggtgggtaacaatgtttctcctgatattttcacgtataacatattgattgatgcacattgcaaggaggggacaattttggaagctgtaagtatctttaatgcgatgagaaagcaaggcatcaagcctgatgttgtcacctataatatattggttgatgcatggtgcaaggagaggctaatttctgaatctttggatgtagttcacacaatgagaaagcaaggcattgagcctgatgttgtcacgtatagtacattagttgatgcgcattgccagganggggaggtttctnannccnanaatattgttgacacaatgagaaangaaggcattgagcccgatgttgtgacgtataatatattggttgatgtgtattgccaggagaggagtatttctagagctgtagatactattgccacaatgagaaaacaaagtgtggagcctgc

SEQ ID NO: 193425 - DNA, 387 bp, Gossypium hirsutum
ctcaaagcaagaagtttttttatttgccattaaacgagaaactgaaagttttgaggaatgaaaacatagaggctacactcccatgtttgatgaggttcttgaccctgacaatcaagtgcatgtttgcgtgcaactatagtatcaagctttttttcccctgttggggtagcaggagactacaaagaggggtattacataggcgtggacgtgcctgaaaatgatcctgaatccgagaagccgtttaatgggcctaatgtttggccggcagatggtgttttgcctggttggaggcagactatggagaaattccatcatgaggcattagaggtgggaaaggcagtttcaaggatcatagcgcttgcacttgatctagaggttgatttcttt

SEQ ID NO: 193426 - DNA, 905 bp, Gossypium hirsutum
cggatttggctgttgctgttccttaatctcaaatctcatctgcaccagccgacgacatggggaggagacctgcaaggtgttatcgccaaatcaagaataagccataccccaaatctcgatactgccgtggtgtcccagatcctaagatcagaatttatgatgttgggatgaagaaaaaaggtgttgatgagtttcctttctgtgtccatcttgtgagttgggagaaggagaacgtctcaagtgaggcattggaagctgcccgtattgcctgcaacaagtacatggccaagtttgcagggaaggatgctttccatttgagagtgcgggttcatcccttccatgttctgcgtatcaacaagatgctttcatgtgccggtgctgataggcttcagaccggaatgaggggtgcttttgggaaacctcaaggaacatgtgccagagttgacattggtcaggttctgctctctgttcgttgcaaggatagcaacagccatcatgcacaggaggccctccgtcgtgcaaagttcaagtttcctggtcgtcaaaagattattgttagcaggaagtggggatttaccaagtacaaccgtgctgattatctgaagtggaagtctgagaacaggatcatgccagacggtgtcaatgcaaagcttcttggatgtcatggtcctttggctaatcgtcaacctggaagagctttcctctctggatcagcctagactctcaactatccagcaaatttttaagttctctccaaaagctttctgttgaactcatttctggtttatcattacagttgtgttgcagatcttcctttagtggattttcaggtttaaaatatttggtttaatgaattgttagtcacaccattattatggaattttaatttatttgttagtgtttat

SEQ ID NO: 193427 - DNA, 639 bp, Gossypium hirsutum
cccactcgtcttctgaacatcagcatcagagcgtaagggtttagagaagaatatggcggccaaaaggaagacccccgtcaagtcccgaaacccagatctcattcgtggcgtcggaaagtattccaggtctaagatgtaccacaagcgtgggctttgggcaatcaaggccaaaaacggcggagttttcccccgccatgaccccaaacctaaggcccccgccgccgccgccgccgagaaaccccccaagttttaccctgctgaggatgtcaagaagccccttctcaacaagcgcaagcctaagcccaccaagctgagagctagcattacgcctgggacggtgctgattttgttggctggtagatttatggggaagagagttgttttcttaaagcaacttccttctgggcttcttttggttactggaccgttcaagattaatggcgttcctttaaggcgtgtgaaccagtcctatgtcattgcgacttccactaaggttgacatctccggagttaacgtagagaagttcgatgacaagtactttgccaaggaagtagacaagaaaaagaagaagagcaaaggggagtttttcgaagctgaaaaagaggataagaagaaactgccagaagacaagaaagaaga

SEQ ID NO: 193428 - DNA, 648 bp, Gossypium hirsutum
cttcagtttcaatgttcttcgctttgcatttacaaacaagaagatgaacagcaagacaaatggcatggtccacaaacaggcatcccaaagcttgatgccacccgaataaatgaagatgcttcctagtgttctcgcatcaaacaactttctcggctgcttgcttgtgctgctttgcaaagatgccttgagcatactcatagagctccacatcaagcttgttaagtgattgtatccgctggaggaccatttgaggaaccctattacgtgcctccttagtgaagtttgcaggtgagattctcttcaaggaagctatacgtcgacgtgtttgggtctttcgcaagccagaaatgcaaacctcataagtgtccataagtttttccacagtcatattatcttggtttacttcattgtcatctgatgatgtggtttcattccccttttcatctgagttggtattctgtcataacattttaaaaaaaaagaaatggttaagagtcctacattagtaggtatccagatattaagcatttgttagctaaaatgcagcacctgatccagctctgaatctgaaaatgaagtgccctgttctgaattattaacattggcttccttcccaatagcattagagtttaccagctgagaaatcac

SEQ ID NO: 193429 - DNA, 384 bp, Gossypium hirsutum
tcgagtttttttttttttttttttattaacatgtcattagtttaaaggttccatatcagaaaaaccaccggaagaaacagaaacagtaaagacctaaccttcccgtatatcaacacatgtattaacaatggaatcaagaaattaaacttgtattaacaatggagttcaacacggcggattagatgagaagcctattccatacggtgctttatgatttagtcactcctcttcttcttctttctctcacccttctcagctgaatttttcaacatgattatcagaatgcgaacaaatacggcaacgaaatcagtaaaaagtgtcaaagcatgctttacataatccaggtcacccaagtgtgccttctcaattatgtcttgtgtgtcc

SEQ ID NO: 193430 - DNA, 642 bp, Gossypium hirsutum
acaaaaatgacgaaagactaaatgttattcaatatttctgttcttgccaaaggcaagaggagtacacatcaaatacagaaattttagcttaaaaaagcagtagcaccaacattttattgatctttctaactcacggggacattttcacaaacacttttattgattatattaacctcagtgacatttccacaaaaacttgttaaccagctacagtttacaaggcgataatggaggtccacacaaacaatcatttcccacaaatgaagaaacaggaaatttgttcttgggaagctgcccgcacagatggttataactcacattcaatttattgaacccagtaatcgccgcaggaaccttgccgtacaccaaattccgtgatatatccaactctttcagtgttttaacgattctcaatttccccaaatcgaacttcaacttattcccggcggccttaaattccaccaagaaatccgttcgattcaataaatcaactgggctacctgttatctcattctccgataaatcaatgtagtcataaaagtaagtttccgctggcttccaagtgtctaagttcattttaatcccacactttgctagcttgagtgaatatatgatcggagatgaagtgacccattttgagga

SEQ ID NO: 193431 - DNA, 631 bp, Gossypium hirsutum
gacaaattcaaagacatgggaactgttgttatgggaaaggtagaatctggcagtgtgtgtgagggtgattccttattagttatgccaaacaaggctcaagtgaaagttgtagctgtatgttgtgatgattgtaaggtcaggcgtgctggacctggtgcaagattgacgggttaggttatctgggattgatgaggaggacatattgtcgggttttgtcctgtcaagcattgtaaaaccaatacctgcggtcgctgaatttacagcccagctgcagattcttgagttgcttgagaatgctatttttacagctggctataaggctgtcttgcatgttcattccgttgttgaggaatgcgagatagttgaactattacagcaaattgatccaaaaacaaggaaacccatgaaaaagaaagttctttttgtgaagaatggtgctgttgttgtatgtcgtgttcaggttaacaactcaatttgtgttgagaagttctcagattttcctcaacttgggaggttcactcttcgtacagaaggaaaaaccattgcagtgggaaaagtcactgatcttcctgttgcttaaaacaattttgttcttagaggcgagaatataaaggtacaaactcgtatacct

SEQ ID NO: 193432 - DNA, 910 bp, Gossypium hirsutum
atcaagtcttacagtgaagataatgttcacaagagtatcaaatacggtgtttgggctagtacacctaatgggaacaaaaggttagatgctgcctaccgtgaggccgtggagaaccaagacccttgccctgtctttctcttcttttcggtgaatgctagcgctcagttctgtggggttgctgaaatggttggacctgttgattttgacaagagtgtggattactggcagcaagataaatggagcgggcagttccctgtcaaatggcattttatcaaagatgttccaaacagtcagctccgtcacatcatactggaaaataatgataataagcctgcgactaacagtagagacactcaggaggtgagactggagcaaggaattgagatgttgaacatctttaaaagttttgaaactgatacatcaatcctggatgattttgacttctacgaggacaggcagaaagcaatgcaggagcgtaaggctagacaacaagctagtctcatgtctgtcggggttgtaggagaaactgagcataaaaataccgtctctctatccaacgacttcatgaagcagatgtcaaagagctttgctcaagttgtgtgcttggatgatggcaataaagatggcaccgccattgagagaacaagttctgcttctgatggttcgaaagttgcaagggttaaacttgaagatgctatgacggcagctgtctcttctggtcaggcaagttaagaaataagcattctgggtatttcgggcagccttgctttactgtatgtgacacaaacttcttttttgcctttttattttattttgtgagatgttggtgaaattcctttggagtgcattggaagtcgaacaaggtctattatggggctgatgtgcttcatatgtaatatttgcctgtagt

SEQ ID NO: 193433 - DNA, 870 bp, Gossypium hirsutum
taactcaatcccttgagtgattctcagaggggagaatttcatggccttgagagcgaaattatggcggatagagatcagaatgggatggttgatacttcattaggaggctctattcgaggagacattgcataagaagagaatgatccaattaaagctgttaaaaacttagtaccacgaggcttgattaattctggaaatttatgctttctgaattccactttacaggctctattggcatggtctccttttgtccagctcttgcagcaacctaaacttcgtcatataccaaaggttggctatccaatattaacttcgtttgcagagtttgtatctgacttcgatgtgccatccagtgattctaaattgaagaaaaaggatccagcagttcttgagattggaagacctttcagccctgtcatgtttgaatccgtacttaaaagttttactccggatgtgccaaatagcatatctggtaggccaaggcaggaagatgctcaggagtttttaagttttatcatggatcaaatgcatgatgaattggttaagcttcaagggcagtccggtagctcaaatggggtcagatcatcactagtttcgtatgcagaagatgatgaatgggagacagttggaccaaaaaacaaatctgcagtcactagaactcaaagcttccttccttcagagttgagtgatatttttggaggacagctaagaagtgtggttgaggcaataggaaataaagcttctgctactgttcaaccatttctattgctgcaccttgatatccatcctgaacctggtcataccattgaggatgcacttcacttggtttagcaccaagatttgaggttatcagcttgactgtggatggat

SEQ ID NO: 193434 - DNA, 977 bp, Gossypium hirsutum
cataaccaagatgtgaattctttaggcttaatctcagcaagaaaaacagctgaagctagtggacatattgaagctcatgtcttcaactttcttggttgccttatgccaggccattgatttgaggcatttggaagagaatttgaagaacactgtgaagaacacagttagccaagtggctaaaagagtcctaacaatgggatccaatggtgaactccacccgtcgagattctgcgaaaaggaccttctacgagtcgtcgatcgcgaatatctctatgcctacgccgacgacccttgcagtgcaaattaccccttaatacagaaactgagacaagtactagtagaccatgcattgatgaatggtgacagagaaaaagattccaccacttcaatcttccaaaagattggagtctttgaagaagagctgaaaacccatttgcctaaagaagtcgaaagcgcccgaaccgaattcgagaacgggagtccggctatcgcgaacaagatcgaagaatgcaggtcctacccattgtacaagtttgtgagggaagttcttgggactcatttgttaacaggtgagaaagtgatttcaccaggagaagaatgtgacaaggttttcacagcaatgtgtgcagggaagttgattgatccgttgctggattgcttgaaagactggaatggtgctcctttgcccatatgctaaaaagggtgtttcttttctcaaagtttgagagcgacaacaaagccacactgttctataagttctttaacctgtgctcatatataaagacatatatatagcttgtttaagtttttcattcgaaaaatttgtgaaaaaccagaactgctgctgtttttagtgacttgttcttttcttttcttttcttttttggggaatttaattacttgcattaaatgtttctttgtatcaagacgttgattacagcaaaatgaaatgaatatataagatactgtttctactc

SEQ ID NO: 193435 - DNA, 408 bp, Gossypium hirsutum
ccgttaccaaacagttaaattctccctcactttattttccggttgtgtttgtctttccgcctatttgttctctgcaatccaagcgagttgtcaactcagtgtctcagatcaccggcgccgattttgaaaccatggaatcgttcaggagttgaaccggaactcagcgggatcagatattggtgcgagcaacaagtcttcagacatattcaaaacgtgctacaacctgcctccgagttctcaatccttcatgttggagcttcaacgagaaaatcatgtggcgtacttaacgaaaggattaacagggctcggtccttctttctgcgtattagatgccaatcgtccttggatttgttattggatacttcattcgattgctttactggacgagtttgtagatcctgaattgga

SEQ ID NO: 193436 - DNA, 533 bp, Gossypium hirsutum
tctaaccgatgactttgattcagattcaagtcaaaagagccacgagacaagaaagaataatagatggtttaagaaatttttctcgagtttagatgcattgagaattgaggaaatcaacgacccagcaaggcagtggcactgcccagcatgccagggtggtcctggtgccattgactggtatagaggccttcagcctctgatgacacatgccaaaacaaaaggagcaaaaagggtgaaactccatcgtgaacttgctgaactcttggatgaggaattgtgtagaaggggtacttcagttattccttctggtgaagcttttggcaaatggaagggtttaaaagatgaagaaaaagatcatgaaatagtctggccacctatggttatgataatgaacacaaggctggaacaagatgagaacgataagtggattggtatgggaaaccaagagcttcttgattatttcagctcatatgctgctgtgaaggctcgacactcgtatggtccacaggggcatcgtgggatgagttgtctga

SEQ ID NO: 193437 - DNA, 1040 bp, Gossypium hirsutum
  unsure (1)..(1040): unsure at all n locations
cttacgcttccgcccacgcgtccggttttaattgggatggcaataacaacctggcgagccaatccaacaaaatacacatcgaataaatgccttggtcttcacaaaaaagaagaagaagaagaggctgagcatctggtagctttctctttgttcctccaaactgtgtgcttagatttgaagacctagtccctgtgatcaaatcttgttgttcatttctgggtttaatttctcaagaaaaagaagatgacaaaagataggcaaatcggtgtagcaatggatttctccaagggaagcaaagcagctcttaaatggacaatcgacaatctggtagacaaaggggataccctttacctcatccacgtcaaacccaatcagagcgacgagtctcgtaaccttctttggtccaccagtggctcacctttgattccattatcggagttcagagagaaggaagtgatgaaacattatgaggtggaacctgatcctgaggttttagacttggttgatacggcttcaaggcagaaagaggtgaatattgtcacaaagatttactggggtgatgccagggataaaatatgtgaatctgttgcagatttgaagcttgattgtttggtaatgggcagctcgggccttggctctcattcaaagggtactgattggaagtgtgagcaaccatgtgatggtaaatgcaacttgtccagtaacaattgttaaaggatcctagtgctcatggattttgatctcagtattctgcaaaagtaatgttctttgaaaataatcgatgttccttgtttctatttctatgtgggtgatttatgtatgtatgtatggacatcttggttctggggttgtactcagatcctgagggtgcttagttaggatcagttccagtgctgtttccataaataaacaaaactttgtatggacatggacattgttcatggttcgcatttaagtaacaatgtttcactttnnaaaattttttttaggggnnnnnnnnnnnnnnnnnnnnnnnnnnnnnnnnnnnnnnnnnnnnnnnn

SEQ ID NO: 193438 - DNA, 636 bp, Gossypium hirsutum
  unsure (1)..(636): unsure at all n locations
acccgtacttaattgctcgaccgacgcatgcgtccaccatcaccccccaagcatccttacgaagtgcaagtccccacccccaccgtcaccacccgagcacccctacaagtacaagtcacccccaccacccccaccatcaccccccaagcacccttacaagtacaagtctccaccacctcctcctccagtttacaaatacaagtctcctccaccaccaccaccccattatgtctacgcttcaccccctcctcctcaccactactaagccacggctttgaccgcgctccaatccaagtcgtttgcaggaaaagataatgctgtgatgcacataaagctacaaaaagatagtttgaaaaggatatatctcgagagataaagcaaaagattgggagcctagactagtctccgcgtttgaactgaagaacaataatgatgtagacaaattgcatttcaatgctgtattattcagtggtttcgcccgtatttatttatttccaattctgcttaataataaaaatgattagtatatataatcctgtacgtgttttccaaccattttgcatgagtttctgccccttcctaaattaatggtccacctgttttttaaaaaaaaaaaaaaagggcggnnnnnnnnnn

SEQ ID NO: 193439 - DNA, 524 bp, Gossypium hirsutum
gaactggtattttggtaacaagaagtccatgttgatccccaattgtttgtttcgcgtcgggggttccgctgttttgctttcgaataagtctaaagataggaggcgggctaagtataagcttattcatgtggttcgaacacatcgtggagcagatgatacggcatttaggtgtgtgtatcaggaacaggacgatgcagggaagacaggtgtttcactgtctaaagatttgatggccattgccggaggtgcactgaagaccaatatcactactttgggtcctctcgtgctaccaatcagcgagcagcttttgtttttcacaaccttggtggtgaagaaattgttcaatgccggtattaagccttatattccagatttcaagttggcattcgatcatgtctgtatacatgctgcggggagagctgtgattgatgagctggagaaaaacctgcagctgctaccaatacacgtggaggcttctagaatgacactccatcgttttggaaatactcattcaagttccattt

SEQ ID NO: 193440 - DNA, 472 bp, Gossypium hirsutum
ccctctcggactcctgcgcagccgctgattcatccatttcccgaagatgctgcaaccagtactggggctcccttctggtctgctccaaaacgattccctcatccacttcaagtctcaacagctgatccaagccacctgcagtttgttatggctgcttctatcctgcgtgctgaaacatttggcattcaaattcctgattgggttaagcatccacagatgttggcagacgctgttgacaaagtgacagtcccagatttccagccgaagaaagatgcgaaaatagtaacagatgagaaggctactactctgtcaactgcatctattgatgatgcagcagttatcaacgaactcatcttcaagctagaactttgcacaaaaaatttgcctcaaggattcaagatgaaacctattcagtttgaaaaggatgatgatacaaactaccacatggatctaatcgctgggcttgcaaaca

SEQ ID NO: 193441 - DNA, 493 bp, Gossypium hirsutum
aggcacgagccacgcgtgcctataatgaggggggaattcaaagatgaagggaaatggaagcattagtggcaaaaacatgatctttagagctgatcaatttgatttaaaaagcttagacatgcagctggagaagcacctgagctgagtttggtctaggaacattgagaaacaaaggccagctgaggaatgggagattgatttggctaagttggatttaaggaatgttatagctcatggcacctatgggactgtttatcgtgccacttatgataatcaagatgttgcaggctgttgttcagtttccatataaatatatatacttgtattatctatgttagttcttaagctttgtaacttgtttgcttgatgcagctttaaaaattatgttttgttaattcttaatctatctatatatatatatattgggtgtgtgtgtgtgttaattgtgattgaactttgtattgatagtttttcgagtaaaatattgattagt

SEQ ID NO: 193442 - DNA, 790 bp, Gossypium hirsutum
gcgttgctggttctgtggctcctgatatagattcatttccagataagcaggccatttttatgcatgaaaggaatgcagactcgaatactgctccagcaggtggtgacataactgagagcgtaagccttgagaagcaggtacattgtgaagtaagagggagtcttgaaccttgagatgtggggaaaccttgagatcaattgaatgtggggaagaactttgcagatttaagagccttaccaagatcaattggaaaccttgagatgcttgaagagttggacataagtgacatccagatcagagtttttacccgattctttcagattattgtcgaaattgagagttttccgagctgatgagactcccttggaagttccaccaagagaagtaatcaaattgggtgctcaggctgttgttgagttcatggctgatctcgttgccaagagggataccaaggcagcaccaccaaagaaggagaaaggtttttggttcaggatttgctcgatttgttggccgttccggaccgcaaatacggacgacaacatgtaaccaatgaattactactacagttttttctttttagccccttgtaaatatcttaaaaatgttttggtttcttgtcaagatgtgtgtgtgtgtttttttttatgccatttccattactttgtaaattatttgtgagattggtgagcttttcaaagttcaaaatcttgattgcttgcaagtgttttcaaattcaaatgaagtgaaaaacctacaattgtgattggtaatcttttggcatctattctat

SEQ ID NO: 193443 - DNA, 731 bp, Gossypium hirsutum
ctcatcctctaccaacgattaccaattgtttctgttacagatttctactttttcttctgataatgatatcaaggcaccaaagaaacaatatggattagaaggaggtggtaattcaaagatgaagggcaatggaagcattagtggcaaagacttgatctttagaggtgatcaaattgatttaaaaagcttagacatgcagctggagaagcacctgagccgagtttggtctaggaacattgagaaacaaaggccagctgaggaatggcagattgatttggctaagtcgcatttaaggaatgttatagctcatggcacctatgggactgtttatcgtgccacttatgataatcaaaatgttgcaggaacctgagccagatgaggaagtagaaaatgaagcagatgaaaggctgttgttgagttcatggctgatctcgttgccaagagggataccaaggcaacaccaccaaagaaggagaaaggttgttggttcaggttttgctcgatttgttagccgctccggtccccaaatacggtccacaagatgtgtgtgtgtgtgtttttttatgccagtcccattactttgtaaattatttgtgagattggtgagcttttctgcaaagttcaaaatcttgattgcttgcaagtgttttcaaattcaagagaagtgaaaaacctacaattgtaaatcttttggcatctattctatagcttccaaattctacttttagtat

SEQ ID NO: 193444 - DNA, 592 bp, Gossypium hirsutum
cctctttagatttcacgcttattattttcgtaacattttgaactcatggaaatgactgcggcttcccttacaatctctccaagaaagcttccatccgatctctactcttactcctatcagaatgatgcaaaaaccccactggtgatgtcagtcctggcttctcttattgagagaacaatggcaagaaacgaaaggatagccaagaactgtaaatgggcattggcaaaagattgcaatatgcagagttttcgagtgccaggagacaccagacatgacgattcaatcctacctagaaagaatcttccgttacaccaaagccggaccatccgtttatgtggtggcatatgtatatatggatcggtttcgccaagcaaatccagggttccggattaatgctaggaacgtacataggctcctcattaccatcatcatggtggcttccaagtatgttgaagacatgaattacagaaattcgtactttgcacgagtaggagggttgacgaccaaggaactgaacaagttggaggttgaatttttgttcatgatgggtttcaaactgcatgtaaatgtgacagtgttcgagagctactgt

SEQ ID NO: 193445 - DNA, 728 bp, Gossypium hirsutum
  unsure (1)..(728): unsure at all n locations
gttactttgaaaattataattttttggtacccgaaggctcgatttttgctattttgccaattaaaccctagaactctttggttccaacaatgatccgattcgttttgttgcaaaacaggcaaggcaagactcgtttagccaaatactatgttcccctcgaagattccgagaaacacaaggtcgaatacgaggttcatcgattggtggttaatagagatccaaaatttaccaatttcgttgagtttcgtacgcataaggtaatttacaggcggtatgccggattgttcttctccttgtgtgttgacataaccgataacgagttggcatacttggaatgcatccatttatttgtggagatattggatcatttcttcagcaatgtttgtgagcttgacttggttttcaattttcacaaggtctatctgatgactcggggaattcattcttgctggagagcttcaagaaacaagcaaaaaggctataatagagagaatgggagagctggagaagctagagtaaagatgattctgcatgaaacagagattagtgcaatttgtgttgaattttctccatttgttgcttttctttttctgtgtgtgatattattaatttgtgtgcaatttgaaaactgaatacatggtgtccctttactcctgttttcctttgctacaatattgactaccaaaaatagagctgtgggacagtttttttnaaaaaaaaaaananaa

SEQ ID NO: 193446 - DNA, 484 bp, Gossypium hirsutum
tctaaatccaatgattcttgagactctttatcatcggcgtgtttgtgattttgccatataatctgccttcgcttccatagggtacttaatttagtgctcattgttgtggggatctgtgaaaatgaatggagctgtgcttgtagctcttgcagcacccattggtaatatgttgcaaggatgggataatgccaccattgcacgcgctgttttgtacataaagaatgcgtttaaattgctaagtgcaccaactatagaaggcctgattgtagccatgtctcttatcggagccacctgcattactacatgctcaggaggcatatcggattggctaggtcgtcgccccatgctaataatctcgtccgtcctttattttcttagtggtcttgtgatggtatggtctcctaatgtttatatcttacttttggcaagacttttggatggatttgggatcggtttggccgtaactttggtcccggtttacata

SEQ ID NO: 193447 - DNA, 647 bp, Gossypium hirsutum
gtgtgagggaaaaaaaaagtccatttgcatttagtgtacttaagttgttgaatgttacaattacatatgggactcaagaaattgtagcactgctaaaccggctgcccaaacatcgtcttccaatacatgctcctccggggagtgacttatgccgccccgacaccggacaaacagcattccaaccttggttagatgagatatggccatcgcatcatgccctgctccgctcattagcactggaacctcttcatgaatctgccctaccattttgttgacagcactgtaagctgcagattttagccgtgaactcagttcttgatcacaaattactgcatttgcatcatgcttccgttcaatgatgcaagatacagaacgtctatcacatattttatacatctgattagataattcgtaaacaacagcctcacgtccaacatcatcaattgcacgtaaatccacagtgaaagttacctgcattagagttcatattttactgcttatcagcattttctgtttacgctgacactgagattcgttcacggaagaatttcttgcctgccctggaatgacattacttgcacttggccaggttgagatctctccaactgtacagacaagagaagtggacaacgattctaatgtttgct

SEQ ID NO: 193448 - DNA, 618 bp, Gossypium hirsutum
tctcacgcgtccgaacagctgttcgtaattattggtcccttctgtcccccctaatattctcagatcatccaaagagacctggtgacgaggatccttctccaccttataacatgctcagaaatgttctagatatgaatgctcgttatggtggtttaaatgctgcattactggaagcagggaagtctgtctgggttatgaatgtagtcccaacaagtggacctaactaccttcccctcattcttgacaggggctatgttggtgtattacatgattggtgtgaagcatttccaacatatcctagaacttatgacatggtccacgcagatggacttctatcccttgagactagtcaacatcggagatgcaccatgcttgatctattcactgagatagatcggttgcttcgtcctgagggttggatactaatccgtgacgccgctcctcttgttgaatcagccagagctctaacgacacggttgaagtgggatgccagaatcatagaaattgaaagtaacagcgatgagcggctccttatttgtcagaaacctttctttaagaagcaagcaatgtgagaacaatttctccattaaaccctagtttatgtcttggtattcaaac

SEQ ID NO: 193449 - DNA, 713 bp, Gossypium hirsutum
  unsure (1)..(713): unsure at all n locations
cccacgcgtccgcccacgcgtccgtttttttagttcttttactttggaaatctaaatcataaacagcatcatcgccgccaaccatgccgccgaagtttgacccgacccaagtcgtcgacgtcttcgttcgagtcgccggcggtgaagttggagctgccagttcactggcacccaaaattggtcctctgggtctctcgcccaaaaaaaattggtgaagatatcgcgaaagaaaccgccaaggaatggaagggtttacgtgtcacagtcaaactgactgtccagaaccgtcaagccaaagttatggtggttccctctgccgccgctttggtcatcaaggcactgaaagagcctgagagggatcgtaagaagacaaagaatattaaacataatgggaacattagcctcgatgatgtgatagagattgcgaaagtgatgaggcccaaatccatggccaaggatttgagaggaaccgtgaaggagattttgggaacttgtgtctccgtcggttgtacggttgatgggaaagaccctaaagacctgcaggaggaaatttctgaaggggaagtcgatgttcccttggagtgaaaaacaaagtgattattatttttgaagtttgtgtttaatgattgttttcctttttgtaagttcttgataaatgttaaaaatgatgattgagttggggtttacgtcttananaatattaccgtctactg

SEQ ID NO: 193450 - DNA, 444 bp, Gossypium hirsutum
acttagaaataaaatatatttatttttttttatcccatcaggatttaaccgctagctaaaattaaatttacaataaaattcggttcggttcggctcttttctgttctggttttaataatatgtggggttctctttttttttttaagttatgaaccgaggcccgaatgaataccttacattgatattattattctaagcgaaacccgaagcgaaggctaaattcgaatcggatttctgcttattttaggcctttttctcagcccttgtagatatcacacagcagcacacacatggtattcttgggaatccccagctatgagcctcagagatgcaatcgttgctgcaatggacatgagagcgaagataaagacgttgagccaacgccgggactttagcaaggtacgcagtctgacattctttgccacgatgtacaggacgcgtggg

SEQ ID NO: 193451 - DNA, 536 bp, Gossypium hirsutum
gcttggaagtcctgaacaccgttcgatcagttggccaacctcttgtcgatgactggaaatgccctcaagaaaatggtgaggactttcgaaacacattgtggatcactagcccagtacgggatgaaacacatgcgatcccttgcaaacatctgcaatgccgggattcagacagaacagatggctgaggcatcggcacaagcttgtgtcagcgttcctactggtcgttggagctctcttcagaaagggttcagtgcataaaaataccactggaatcggcaaatattatcggccaaagcttggattatgtttggacttgctgtgttttcttatatcccgaatggtccgaatgctgctgcattttgatgattattcatgcggtttcttatttctgaagttatgtcggagcaactctaataccagactgctaaatttatgtaaatatgctttaggatgtgttctatctcagacgacgatgtttgtatataaatgatctatgatggaactatcataaatgaaaagaagtgcttgttttaatt

SEQ ID NO: 193452 - DNA, 850 bp, Gossypium hirsutum
  unsure (1)..(850): unsure at all n locations
ggttactcaactgtctccttcagttctgaaagctgagggtgtaccagtctatcgggccgtacaacattctggggagtttgttcttacctttccaagggcatatcatgctggatttaattgtggcttcaactgtgcagaggcagtgaatgttgctcctgttgattggctagaacatggtcaacttgcagttgagctctacagtgagcagcatcgcaagacatcactgtcccatgacaagctactcctgggatcagctcggcaagccatccaagctctcagggagttacatgttcttggcagagaaacgccgggaaattcgaggtggaaacgtgtatgcgggaaggatgggatgcttacgaaggcatttaggatgagaaagcagatggaagaggaacgagtaaattgccttccccctgatatgcctgtacgaaagatggaaaaagactttgatttggaaagtgagagggaatgtttctcttgtttctatgacttgcatctatctgcctgcagctgcaaatgctctcctgaacgatttgcttgtcttaaacatgtaaagagtttctgctcatgccaagatgaagacaagtttgtcctccttcgctacaccgttgatgaattgcaaatgctaattgaagccctagaaggaggattanatgctgttaaactatgggcatccanagatctcgggtcggtttcaggtattgattgtgatgcttatttgtctaagtgggttcangacantgaggtattanaatntgagcctgctcaaccanaggaaagtttctcttgttcctcaagattggagaaaaaaatggatttnatactccttacttgtatggtcatttttctg

SEQ ID NO: 193453 - DNA, 643 bp, Gossypium hirsutum
cgcattcttctaaactcatgacttcatcggtcggtggcggaggcagatgcatggcctgctctccgtcgccttccgcccctcactctccccatctatccggccttcgctccgccgccgccgctctccttgaccaagagaaatatctctcggagttactggcagagcgttacaagcttagtccatttatgacagtgattcctcatacctgtagactgttgaaccaagaaattttgcgtataactacactgttggggaatgcatcagttttaggtcaaaatgggcttgaacaagctagccccctggcttctggaggaacattttcaaatggaggagccgatatgaacagatggatgtcacagtttcaatcagaaatgcctggtttagtacaaccctctttggcggagaactggctgaattctcaaggtggctcttccggtcttattgttaagagaacaatcagagtggatattcctgtcgacaagtatcctaactacaattttgttggccgcctccttggtcctaagggcaactctcttaagcgtgtggaggcaaatacggagtgccgtgtccttataagaggtcggggcagtattaaagatcctgctagggaggaaatgatgaaaggaaaacctgggtatgaaca

SEQ ID NO: 193454 - DNA, 761 bp, Gossypium hirsutum
  unsure (1)..(761): unsure at all n locations
cggacgcgtgggtttccagcgactactaaacaaaataaaaattagcccaggacaggaggatctctcagctactttttctctcaaaatttctccaattagctctggtttaggcgatggcttcaaagcggatcttgaaggagctcaaggatctacagaaagatcctcctacctcttgcagtgcaggccctgttgctgaagacatgtttcattggcaagcgactattatgggtccacctgacagtccatatgccggtggagtgtttctagtcaccattcatttccctccggactatccatttaagccacccaaggttgcattcaggacaaaggtctttcaccctaatattaacagcaatggcagcatttgcctcgatattttgaaggagcagtggagccctgccctcaccatatccaaggtattgctctcaatctgctcactcttgacggatccaaatcctgatgaccccttggtgccggagattgcccacatgtacaagaccgacaggaccaagtatgagacaactgctcggagctggacccagaagtatgctatgggttagtgtgctaatatgcatataataggagggctttattctatgtggctttgatcttcaatttaatatgtatgaatcaatgaaacagtatgtgtgatctgtctctccaactatgtactggaccaatccctccttaaaacacatttgttgccttaattgtttgtatggaaattatgtttcaaaaaaaaaannnntnnnnnntnnnnn

SEQ ID NO: 193455 - DNA, 769 bp, Gossypium hirsutum
cccacgcgtccgtccacgcgtccctccactcataaaaaaaaaaaaaccacccaaacagacaatagactaggacaggaggatctctcagggtttaggtgatggcttcaaagcggatcttgaaggagctcaaggatctccagaaagatcctcctacctcttgcagcgcaggccctgttgctgaagacatgtttcattggcaagcaactattatgggtcctcctgacagtccatatgctggtggagtgtttctagtcaccattcatttccctccggactatccatttaaaccaccaaaggttgcattcaggacaaaggtctttcacccaaatattaacagcaacggtagcatttgccttgatattttgaaggagcagtggagccctgccctcaccatatccaaggtattgctatctatctgctcactcttgacggatccaaatcctgatgaccctttggtgccggagattgcccacatgtacaagacggataggaacaagtatgagacaaccgctcggagctggacccaaaaatatgctatgggttaaagtgctactacgtatgtaataggagggcttcattccctgtgactttggtctttaaattaattgtgtgatttgtctcctctttacatactggacctagccctccttaaaaacacaatattcttgttagttgtttgtatgaaaattatgtttcaaaacttaaatccccttttcttaaaaaaaaaaaaaaaatataaaatatttaaataataataaaaatgggcggt

SEQ ID NO: 193456 - DNA, 383 bp, Gossypium hirsutum
cttcaatttaaaattttctttgttagacacaaaaagcgatctagcttgaaaatttctatttgttttaataaaatgttgtttgttttagggtttaggtgatggcttccaagcggatcttgaaggagctcaaggatctccagaaagatcctcctacctcttgcagcgcaggccctgttgctgaagacatgtcccattggcccgcatctattatggctcctcctgacagtccatatgctggtcgagtgttgctcggctccatccatttccctccggactatccatttaaaccaccaaaggttgcattcaggacaaaggtctttcacccaaatattaacagcaacggtagcatttgccttgatattttgaaggagcagtggagccct

SEQ ID NO: 193457 - DNA, 432 bp, Gossypium hirsutum
cccacgcgtccgggcgaataaagggatatatggataaagtacgaaacttgaagagcggatatggtagtggcgtgtccgcttctcattccaagcttcttcagttatcggcataagctcaactctcgactgcccgcagtgaacttactgatggcaggctgattgattcgcattcaaggaacaagggatatatgcttgaaagatgatctgaagttcatcctctaaattcataaattttgggtggtttcatttatatttctgtggtgcagggattgctgtaggcagtgatgaaacagccgaatattctgtacagtaatgcctctttcattttcagaaaaaatctttatggacaattcaatcataaaattgcctgtaccttgcccaacttacatcatcatcaaagtcatgttagtctgttgagggccaaaataccat

SEQ ID NO: 193458 - DNA, 451 bp, Gossypium hirsutum
aaatcccaacttcaaacaccttaattgctacgattttgtttgaagaaagaataattaaggggaaaaatatgcctagattgttatgactttcgttttgttggaaaatgaccggacatccctggccgcacgatcgagcttccttccgatatcaaccctccagcaatcgtcgtcgcagcagtaaaaatatattacatctgttagggaagagagaagtctctcctagaacaaaatatgtaccaaagaagctgtggggagaagcacctaaacgaattgtctattcttcaccttggactgaacccattagagatgccagacgtggtattctgtcatgggctgaggaagagtctttgctgcatttatcaggcatatatgggcctctggttgccttctccaagtcaacatttgcaccagcttttatttctgatggaagaacacttgcttctaccatggt

SEQ ID NO: 193459 - DNA, 789 bp, Gossypium hirsutum
caaagattattttgttatgtgcttggcagctgcaaataagctgatattattttgatttgggttcctaaatcgttgggaggagggactgtaaaaaagcataggttccccatgcagatcctcccgtttcgaggaggcgcacttgtgtgcttcattgcttccttgttatttgttgccagtttttgcaatgccgatgctaaaacagtcgaggttgtcggggctggtgagtgtgcaaattgtgcaaagaataacttggagattagccaggctttctcagggctacgagtaaacatagactgcaagcccgaaaatgggaagaacttcaaaacacgaggatcaggggagcttgataaacaaggcaattttaaagtatccgttccagaggatttggttgaaaatggggaactgaaggaagaatgctatgcacagcttcacagtgtatcggcagcaccttgtcccgcccatgatggcttggagtcggccaagttagtgttgaagtccaggagtgatgggaaacacgggtttgggttaaaaggaaagctcaaattctcacctctaacctgtgcttctgccttcttttggcctcactttaagtttcctcccttgcctaattggaaccatccccctttgcccaagtttccacttcccccattcaaaggcttccaccaccattatccaataatccctcccatctacaataaacctcttccgccaccgtccccggtgtacaagccccctccatttcccgtaaacccacctgttccaatctataaacctccaccatttccagtc

SEQ ID NO: 193460 - DNA, 495 bp, Gossypium hirsutum
  unsure (1)..(495): unsure at all n locations
nnnnnnnnnnnnnnnnnnnnnnnnnnnnnnnnnnnnnnnnnnnnnnnnnnnnnnnnnnnnnnnnnnnnnnnnnnnnnnnnnnnnnnnnnnnnnnnnnnnnnnnnnnnnnnnnnnnncaacacaaacacagatatcttattgaaaaagaacacagataggacaatgtctcaaaatatcagaactgatataaataaacaaaggtgaatggtgaagtctatagctgaagccccccaaagtgagcttggctgattggttattgaagaaggttaaatgctgtgcaaagagaaaccaccctttccttgaaatgaaaccgtccatcctcttcactaccttctggaattaacacttgctttatttttcatcaattcttgtgatgtgtgtcgggaaatcgtgagtctttaatggaatcaacaaaaccactcctgagaagtctctcaacatacttgccgaggatatccacctccaaattcaccttttgcccaatttccttcaaag

SEQ ID NO: 193461 - DNA, 577 bp, Gossypium hirsutum
aaaatttggggctctttacttaccttgttcttgcttcttgatcggaatgttagatttggtacgggtcgtgcgtgtacactgatgccattttcacactatttagacctaaagccagtaattcggatcaccggcggccaagccttgattcttcgagacggagtatagatgtcggggccactcgatcgattcgctcggccttgctttgaggggttttatggtagtgatgagaggagagagaggaaatctgatttcgagaactcagaggatgaaaggcgcacaagaattggatccttgaaaaagaaagcaataagtgcatctgctagatttaagcattctcttaaaaagaagagtaatagaaggaaaagtgatggccgtgtcagctctgtatccattgaggatgttcgcaatgctgaagagctacgggctgttgatcaatttcgacaagcattaatcatggaagaactgcttccagaaaaacacgacgactatcacatgatgttgaagtttttgaaagcaagaaagtttgatatcgataaagctaagcacatgtgggcagatatgctccaatggaggaatg

SEQ ID NO: 193462 - DNA, 399 bp, Gossypium hirsutum
ggaaaggtccaactagttgaaggcatgcttactgaagcgtacacaatgttttcagaggctttttcaatacgtcaacaggtcactggaccagggcaccgggaggttgccaattgttgtcggtaccttgctatggttctgtatcatgcaggagatatggctggggccataatgcagcagcacaaagaactaattataaatgaacgttgcttgggtttggaccaccctgatactgctcatagttatggcaatatggcccttttctaccatggcctgaaccagactgagctagctctacgacacatgtccagggcactgcttttgctaagcctatcttctggcccagatcatcctgatgttgctgcaactttcataaatgttgctatgatgtatcaagatatt

SEQ ID NO: 193463 - DNA, 871 bp, Gossypium hirsutum
gaaaatggaaagcagagacagaagaccaagaaacggaagaaaataaatataagaaaagaaaaagaaaagaagggaagaatggagggagaggtggaatcacatgcgcattagttcactgtcgttctcctaggtcctcgtttgcttgttctaattcttgttaatcatcatcatattcctttttgctcgtcatggctgacaataaggaaatgtcggcccctgttgttgacgtcaacgatcccgtcaccggtcacatcatttccacaacgattggaggcaaaaatggagagcctaaacagaccatcagttatatggctgagcgtgtagttggcactggatcttttgggattgttttccaggcaaaatgcttggaaacgggtgagaccgtggctataaagaaagttttacaggacaggagatacaaaaatcgtgaactgcagttgatgcgtgtgctggatcacccgaatgtgatttccttgaagcattgtttcttttccacgacaacgaaaaatgagcttttccttaacttggttatggaatatgtaccagagagcatgtatagggttttgaaacattacagcagtgctaatcaaagaatgccacttatatatgtgaaattatacacatatcagatattcagggggcttgcatacctccatagtgttgttggagtttgccatagggatctgaagcctcaaaatcttttggttgatcctctgactcaccaggctaagatttgtgattttggaagcgcaaaagtgcttgtcaaaggtgaagctaacatttcatacatttgttcgcgtttctatcgggccccggaactcatctttggtgccactgaatacacaacctccattgatatctggtctgctgg

SEQ ID NO: 193464 - DNA, 511 bp, Gossypium hirsutum
cccacgcgtccgctcactgctcttttttttttcctctccttttagttgttgttgcttcttcatcttcattattattattattattatttttcttcttctatggccacactatgatctatcgctacgcttttgtctagttagatcgtttgtttttgttggttttgttcctcggcatggctgacgataaggaaatgtctacccctgttgttgaccggaacgatcccgtcaccggtcacataatttccacaactattggtggcaaaaatggagaacctaaacagaccattagttatatggcagagcgtgtagttgggacaggatcattcgggattgttttccaggcaaaatgtttggaaacgggagaaactgtggctataaagaaggttttacaagacaggatatataagaatcgtgaactgcaattgatgcgtgtgttggatcacccgaatgtgatttccttgaagcattgtttcttttccacgacaaccaataacgagcttttcctcaactt

SEQ ID NO: 193465 - DNA, 704 bp, Gossypium hirsutum
acgaaatcggccattccatgtccttaactaacaaatgcaacaactgaaatcagaaataatacaaagattgaaaccataaaacatgcataccaaaatccaaattctaaaatcaccacccaaatcaaaggacaaataaactgaatccaaccacaaccacatgcatctaccccatacatatatatagacagcgagagagggtacaaaggaagatttttgtttattgaaccatcatatattaacattaattactccatcaattttagcatctcatattttaatagccacaccatgagtcttaaggatctggtaactatgagttggttgtctcacaaacagatagctaataaaaacaaggaacaagtacaaggtttatcaccatttctatagattgctgaccatactattattattggccagcttattcctcttcttctgcttcttccagccaattcacaaatggctccagggccttcacaaaggtttgcctgcccttcgggttggttcctttgcggaaccaatgaagaatggtgtcttctgcaaggacatcctgatcatagagagatctcacaatctcgggaaacagcttcatcaattttgcatcctcatagcattgcatctgaactttatatatccgccccagctcaatgtttccactggtgcagaaagaatttaacagctttgcccatgttttgacctttatccgc

SEQ ID NO: 193466 - DNA, 646 bp, Gossypium hirsutum
  unsure (1)..(646): unsure at all n locations
cctctttgtggtagctctctcctttcctcttatttctcttcatgttttcctctttatttagggttttcttttgattactcctcttcccgatttcataaaattttattattctcccactccgaatcgatctatgatttgggcaattcctctgttttcgctgtaaatattattcaaaatcaatttcatcaattatgtttttattgtctttttcgttgatgacttgcaacgtgatattccaaaacctgcgtgtgttcggtcctggcttgaatcctttttcccctttctgcgtcgctcatcattcctctgcttctcgctaatctgtttccctcttctccttgttttcatctctatcatgtaatcatttttctcttcatcttaagctttcgaggggattgtttgttttccaagaaaaaaaaatgaaagggatctaactctttgtgaaaatttcacgtttttacaaaaatatcatgcgtttctttgcctaatcaatcaaatcttggtctggtgttctctttacttcttccgagttaaaggaataaagtctatatatctgcacggtattgttgggttttgtatgcttcaagaattgacccaggacgtcttgcgagaatctgcagaagcctcgtaagtgggatgntagannnaa

SEQ ID NO: 193467 - DNA, 969 bp, Gossypium hirsutum
  unsure (1)..(969): unsure at all n locations
tgacattatggggatgcaacaagaatcacctcaacccttttataatacctaagaattgcatcatttgactgttttcaccagaaaaaatgaaattgttagagtttcttgggcaagttgtatgtcttcttaaggaacttagccgctgtctcatcactccggtaacacaaaactcgcaagagtgtgtttggttccgtgggactccactgaccggatgttggtggcaatggaagcttggatttagcagaagaaccgtaactctctgcagtcatgtatttgaatggctcaatcaggctgtcagtttcagtatgaaataaagggaggatggcttttactgttgttgaaaacttttggatcaaatcagccggaagtccatcaccattggacccaaataaaatccgtcaagcaatttaaaatcttcgggtaattgtttaataatctngcaggggagaaagcaggagcaggacctccagcaagtaaaaccagaaggaaaccatcgaaagaagctttcattacttcagtaataactcgtgttctgactctgtcatgcacagttaatgaaagtacctccaaatagtgctcgagctcctgaagaaaaggttcaattctagatgatgaaacttccccaacatacagcccatcccagaggacatgacttagatcctggaagatgaccttatatgcagttgcctcacacagttgttgtatcccttccaaacaagcagcagctgaaagttcgaatgctttccccgtcccattggcaatattgttgttatgagattcagaacttctaagatgcacaattgtccgttttgccaagacatccaactccgttcgaatatgctgaagagtattaatgcgacagtatagctggggaatcccgaacgagccattaccatttgtggtcccaacctcccctttcctgctctgtgccttttgaaacttatcctttttcttaaatacacccgaaac

SEQ ID NO: 193468 - DNA, 407 bp, Gossypium hirsutum
aaaaaacccccaaaattattttcagattggagagagagagggctcaaacctgctctctccctcctcggtttattctaaattcgaaagcgaaagaataaataaaccctaagtttttcttccttctttttccattatatccctttctttttcttccatttcgtttaaaatttcatttttttcataaaaaggaacaaattctgtgcagtgttgacaatcgtatgccccttccccaacaaagttcgatcttttgatgcgacgatcgcatgctcgaaatcgggttgaatccaaatccaaatcgactaccaacccacaaaagatggacccaattaagctccaaatccgatccaattcccgatctaccgctctctttttgcgaaactctcgtcaaaccaagccgatcccttctt

SEQ ID NO: 193469 - DNA, 478 bp, Gossypium hirsutum
aaagatttaagcaaggccacggaagaagaaaaaagggattcgcttaacagccaacattttgtttccttctgctactggctagggtttaaatcaggggttttccttcttcttctcactgcttcaccactattccaccatcaacaaccaatggatagataccagaaagtagagaagccaaagcctgaatcacccattaacgagaatgagatccgaatcacttcccaaggtgctattcggaactacatcaactatgctattgctcttcttcaggacaagcatgtgaaggaaattgtcttgaaagcaatgggacaggcaatcagtaagacagtagccattgccgagattttaaagaaacggattcctcgcttgcatcaagatacttccattagctcggtgagcataactgatgtgtgggagcctattgaagagggccttgttcctgtggagatgattcgccatgtctcaatgatatctatta

SEQ ID NO: 193470 - DNA, 501 bp, Gossypium hirsutum
cttttagttgccattaggagcggatacccaactttgatgattgctgatgacattgaacaggaagctttagcaactctggttgtgaacaaacttagaggtgctttgaagattgctgctctcaaagctcccggcttcggagaacgcaagagtcagtatctggatgacattgctatccttactggaggtactgttattagagatgaggttgggctttccttggacaaagctagcaaagaagtcttgggtcatgcctctaaagtggtgcttaccaaggatacaaccaccatcgtgggtgatggaagcacccaggaagcagtgaataaacgagttgtacagattaaaaatctcattgaggctgcagaacaggattatgagaaggaaaaacttaacgaaaggattgctaaattatctggtggtgtggcagtgatacaggttggagctcaaactgaaacagagcttaaagaaaagaaattgagagtagaagatgctcttaatgcaact

SEQ ID NO: 193471 - DNA, 476 bp, Gossypium hirsutum
cgccgtttccgtacatttcccctaaaatctccacagacaaaatgcaagaaatgaaggctgagattgcaaccaaaaattcaaagaaggcaaatctattagatcacaattccctcaaacacatcctcgacgaatccgtccctgagatcgttacgagtcgtgggtatgcggaagacgtgaggatgagcaatgtcagattattcattggaacgattatcattgtaatcgctctatttgctcagttttacaaaaagaagttccctggaaaccgcgatttcctcattggttgcattgtattgtatataggtttcaatgtaatactccagctgttcagctacagaaaggaaaagaacccaattatgtttacttaccctcctcctggatccgtcaccagcaccggattggtggtctcttcaaagttgccaagattctatgatctttatacgcttagcatagcgagtgcagatcccaaattaata

SEQ ID NO: 193472 - DNA, 625 bp, Gossypium hirsutum
gatagaaagagcttcttcactttgacaacaatactcactttctcttacagagattgagagaaaatcacaaacacacatttatatagcacagtgatcatcatggctcttcacttgtcttgggttttcgtttttggtattctaggcaacgctgtttcattcatggtttccttggctccactgccaacattttaccaaatattcaagaagaaaacatcggaaggtttccagtcgattccctacgtggtttcgctcttcagtgcgatgctttggatttactatgcactgcttaagaaagatgccattttcctcattaccatcaacactttctgcgttttcattcaaactttttacattgttacttacttttactacggcccaaagaaagaaaagatcgtcacggtgaagcttatgcttctcttcaaccgttttcgggttcggagttatctttctcgcaacttacttcctaaaaaaacccttcccttcgtctcctgattttgggttacatttgcatggcattcgctttggctgtgttcgtcgcacctctcgccattgtgagaaaagtcataaaaacgaagagcgttgagtacatgccatttactttatcagtgttcctcactttaggagc

SEQ ID NO: 193473 - DNA, 594 bp, Gossypium hirsutum
  unsure (1)..(594): unsure at all n locations
cttgaatggtcttcagctccaaggatagcacaattacagatgaagacattgatagaatcattgccaagggagaagcagcgacagcggaacttgatgccaagatgaagaaatttactgaggatgcaattaaattcaagatggatgatactgctgaattgtatgattttgatgatgacaaggacgagaacaagtttgacttcaagaaaattgtaagtgaaaactggattgagccccctaaaagagagcggaagcggaattactcagaatctgagtacttcaagcaaaccttgccccagtctgctccagcaaaaccgaaggagcctcgtattcctcgcatgcctcaactgcttgatttccaattcttcacactcagaggctgagtgaagttgtatgaaaaagaaagtacgctatctcatgcaacacatcagagaatccggtaaagacctttgatggggattgactctgagaaggggaaaccgtaactgtganaagttgaaaaaggaccactttgaagagattttcttatgagttagagattcatacttcttaaactggagaattgacgatgattaaagatgctcnaatgaagagaan

SEQ ID NO: 193474 - DNA, 621 bp, Gossypium hirsutum
gacgacccacgcgtgcgcccacgcgttcttaagtcagaatgtttctcatcctgtgagccagacttcggcccctgtaattcaggatgatgctccggagaactcatatctatcacttggacatgcattgccaaagaattctgctccatttattgtgagagctccgcctcccaaacctaaacctgtgcagcagtctcgcaaagctgcaatacctgaagaatctgctcctaaaagctacaatacctcagaaaagagcaatgaatcttcaggtaagaatacttcgatatttgttgcgaacttgcctatgagcgcaactgaggaaatgctgaaagaggttttccaaaaatttggaccaattaaacccaatggcatccaagtcagaagctttaaggacaacaaaaactgctttgggtttgtagagttcgagtctgctacttctgtgcaaagtgctgttatggcttctcctattaaaatcggcaacaggcaggccaatatcgaagaaaagcgaggacccagcagtggtgggaaaccagggtatggtggttatagagatgaaaatggctaccgaaatgacaacttcagaggccgtgggaacttcaatggcagccgtaactttagaagaaa

SEQ ID NO: 193475 - DNA, 522 bp, Gossypium hirsutum
ccctcgcttccgaatccctctctttccttcaagttgccaacataccaggaaattaaatatgtcctaatataaacatcgaatggacacgcaaaagagtcaacccgacgagcaaaagagtcaacccgacaaacaatcgtcgtctgctgctgctcccctagtctcgacttcgtgtaggaagaaaaagaacgaagaggccaccttccttgaagacttgaaggatcacatcgatgagttcattaatgcttcaatggaagagcacaaaacttgctttaagaagaccatccagaagatgtttgggatgtcgaaagttgtagcagaaaggagtgcggctgaatccaaggaagccgaaaccgtgtcgaaataagattatcttcttacctctttagtaatgtgacttgtggactacatttatatgcattgaggttgcactgaaatgtagcttttggtttggtctaaaccgtgtagcagtgctttcattttgctttggttgcactttcctttacttaaattagtttttgtttt

SEQ ID NO: 193476 - DNA, 609 bp, Gossypium hirsutum
  unsure (1)..(609): unsure at all n locations
ccggaaaggaatgtattaagtatttgaaagagcaaaggcttcctcctcagactttcattcctcttcaatcagtgcgtgttaagccaatcattgaaaggttgcgcaccttaggtggcacagcgaagcttatctttgatgtgatccaatttgaccctgctttggagaaggcagttctttttgctgttgggaatactctagtttgtgatgatcttgaagaagccaaggttcttagctggactggagagaggtttaaagttgtaactgttgatgggattctactctcaaagtccggcacaatgactggtggtacaagtggtggaatggaagctaggtcgaataaatgggatgataagaaaattgaaggtttgaaaaaaaagaaggaacaatttgaatcaaagctggaagagcttggatcaattagagagatgcagctaaaggagtctgaaacatctgggagaattagtggacttgaaaagaaaatccaatatgctgacattgagaagaaaagcatagaagacaagcttaaaaacttgaagcaggagaagaagaatattaaggataggattggacatataactcctgagattcanaagttaaaagatgtgagtg

SEQ ID NO: 193477 - DNA, 682 bp, Gossypium hirsutum
gaaacctgtattacgcaatccatggctaccctttcttcaactcattcttcctcacaaaacatcctcattacgttcaccataatattcctcgcatcatctcttctgccttcctattctgcaatcactgagactgaccaacgccgcccatttaagaagatatacgccttcggcgactccttcaccgacaccggcaacaccgagtccctcaccggccccaatggctttgtccgcgtttccaacccaccttacggcaccaccttctttcaccaccccaccaaccgctactccgatggccgactcgtcatcgacttcgtggctcagtcactgtctctgctgttcttgccgccgtaccgttctcagaaaagccatccagaacttatcgggtttatttcgcggtggttggttcgactgccataaatcttgctttctctgtttagaactacccttcgctcgataccactccctagtcgattcacactcccatgatgtggttcgactactatttggagagtgaatgttgttaagatcctgaatcggatctctgctagtatacgtctgattatgctctgtcctgggttggtgcaatcggcgtctttcattctccttctgctctcggatctaccgtgtcttggcattcctttctatacctgcctttactacttttgcggactttttacggggc

SEQ ID NO: 193478 - DNA, 669 bp, Gossypium hirsutum
gcaggacagaatatgccctgactagctcaatgaggctatatacggcttgctctttgcggcgtcaaggaggggggattttcccgagcttctagagattcgagccgtttttacattatactacggcaaagaattcgatgctcgtgcaatcgagctgcgcaacaattgtggagtgaacgctaagattatacagaagctggcaaccagacaaccagacttgtagagcatatggaatgtgctcgaccagatggctgccgagtgcggcattgcttgacaactcgaggaaaccactgattccagcgagggaaatctggatgtaagcaagaagcaggagatatcagttaaggcaagtcatgatgcaggagatgatgatgagttctctgattcaataaaaacaaggagaaaatacagggatgtagccgatgcagctcaagcagcctttgagtcagctgcctatgcagcagcagctgcaagagcagctgtggaactctctcggtctgattcctatgatcctgatgatcagaacggtcccaatactcgacagaacacagtgtttgacaaacaagaagcaaattctaaagatatggaaaatcatggtagtcaagcagtggagttgaatcataccaagaaggcaccagaaatcaagatgtctagtccttcaagtgaaggatc

SEQ ID NO: 193479 - DNA, 433 bp, Gossypium hirsutum
tttattttacaagtccaggtccatgaagatgcgggggtcataattattcaagctcggaggactgcaacaaaagttctttttcttatccaccacccgcacaagctgatataaatcaagcaccacctgaaaacccaagagcagcttggttacaaaagcagtggattgagtctcgctcacttcagctagaagaacagaaactacaaattcaagttgagatgctagaattggagaaacagcgtttcaagtggcagagatttagtaagaagagggatcgtgagcttgaaaagatgagaatggaaaacgagaggatgaagcttgagaatgagccaatggcattagagttgaagcgaaaggaactggatgctgattaaaaccatgtgatttttacctcaatcttcttatattcttttacagtggcagggcctggatgcaa

SEQ ID NO: 193480 - DNA, 509 bp, Gossypium hirsutum
  unsure (1)..(509): unsure at all n locations
cttcgaagctctttgtttaaaaattttcaaatttaggttttgcatattaagatctaaccttttcaggtgcagacgcactctcagatcccagctctagaacttcaattctctccctaaaagtttggagacaaatgggagaaacacgagacaacgatgcctacgaggaagagctcctcgattacgaggaagaagaagagaaagcccctgactctgtcactgctaaagtcaatggcgaggccggcaagaagggctatgttgggattcacagttctggattcagagacttccttttgaagccagagcctgcttcgagccattgtcgactctggattcgagcacccttccgaagtgcaacatgaatgcattccccaagctatactgngtatggatgttatntgtcaagctaaatcagggatgggggaagactgcgggtttttgttctatcaacttacaacagatggaccctaccccaggcaggttgttgcccttgtttgtgcatactaggagta

SEQ ID NO: 193481 - DNA, 1512 bp, Gossypium hirsutum
  unsure (1)..(1512): unsure at all n locations
ttttcctagaaacttcatcattaaatcattgaaaacaacctcaaattcaagacaacaatacattttaatcaatctgaatacaacattttacccccaaaaaaccatatcaaacatatatataataatcatatggcatttattctttaacaacacactgcttagaaacagagcagctaaaccactccaattataatatgggatgttgataaattaagaagagaaacgaaaatttacagctgattcaacccgattaattattcctacccaatcctccatcatctaaaatatgaacaccacactgtcatgaaccctagacttttggttttgagccacacattcagacatccacatcagattcctgatctcttgctctcttaatctcatgtatgcaaagaaaacaccataatggaactgttgctcaaaagntaggcaaagccttttcacttcctctttgtaaaatgccttgtcaagcatctggctctctccgtaagatagtctggagaaaattgattggtagggaggatatttttccatcgcagcacggacntggtcaatatcctcacacacagcaagttcctcatggccatagggataaagcagaccaaaattcgagtataatttcctccgatcatcacgcgtaagttcagtgccaatgctgttaatggtgatatttacagcccttctgtcagcctcaaaggcaaggaggtcagacatgatctctgcggtcgcaccaccaagtttttggcaaaacttgtagaagtcttcaaggtatgctttgtagagagtgttcctcatgatttcaatgttcatgtcatcaagatcctcagaggtaatacactcagagaagtatggagccagtggagtgtcaacgagaaccaatctgtagagttcgcgcatgttctgagcaactgccagggttgcaatgctatcaaacatgcccaaaggatggcatttctccaaaagctcttgaacatctctctcatgcaaggttccagtaacaatcaagacaacattgtctatcatgtgaccatatgtgatatactctaagaaggtggacaatggctcggtagcctggcatagcatatgcttatactcatcaacgagtttaagagtgcatttctccacaatagtagtcgtatgcaatggtgaaggttcattttggaggtaaggaccgtattcggtggcggagaggtgcatcttgatatcgtcaagggtctcgcattggcagagattgttgtaatcggcggcggttaagagaccggcccggtgacctctcacgatcgcttccaggtaaccgccgtggatgttgaacgtcatagcttcgaatccgtacattttgctgggttgttttttcagtgatttgagtgattgagatctaaatttgcaaatttgaagctaagaacggaaccctacagataaagaattgggaaattgggagattttagatttatgggtccaaatcatgattgtgatgatgggaatcaaagggagcttggagcgatctcagtctag

SEQ ID NO: 193482 - DNA, 836 bp, Gossypium hirsutum
tcgagtttttttttttttttttttttttttcctggaaatgccttcaataaaagattgaaaataagctcaagaacacaacatatatatcctcaattaacaaagaaaacatataataatatatgaagggatttattcctcagcacacaaattgttgggataaagagcggctaaacacaccacttaaatgaaaatatgggtggagaatttgagggaggacagacaatgtacagctgatcaagtaaaagacattaccattcattattcctaacccacttcggctcggtggtcagatggatcatttaaaatataaagaccacactgtcatgaaccctagacttttggttttgagccacacattcagagatccacatcaggttccttatctcctgctcccttaatctcatgtatgcaaagaaaacaccgtaatggaactgttgctcgaaagctaagcaaagccttttcacttcctcctcgtaaaatgctttgtcaagcatttgactttctccatatgataatttagacaaaatcgattgatagggagcatatttttccattgcaccacgaacctggtcaatatcttcacagacagcaagttcctcgtgaccataaggataaagcagaccgaaattagagtataatttcctacgatcatcacgagtaagttcagttccaatgctgttaattgtaatattgtcagctctcctatcagcttcaaaggctaagaggtcagacattatctctgcagttgcaccgcctagtttctgacaaaacttgtaaaaatcttcaaggtatgctttgtagagagtgttcctagcagccctagccgaacgagtaaa

SEQ ID NO: 193483 - DNA, 593 bp, Gossypium hirsutum
tcttctagcaacactcctgaaagccaaggcattaagaatttcccgcttacaccaccaaggccaaattccgaattgaagcctagtccaaaaccgccattgagcagcaagcaacatcaatttatgtttgacaatatggacactccaacaccgaaatctacaagatcaactacacgacctatgcaaactccacctagtagaatcctacaaggaagcagttcaggattgtcaaaatattcaagaccgagagctagtggagcggattcgccattcgacttgcccttgaaggatgatgacagccttactagctgcccaccattttcagttccaaattacatgacaccaacagtttcagcgaaggccaaagcatgagccaacagcaatctgaaggagatgttcatggggactccaggaagcgagtcatcgaagaggcgggtttcattccctttgacacaagggataggatcattcaagtggagcaaagggtctttgttttcaggcaaggattcaagctctcaaaagggtttagataagaaccaatcgcttcaatctataggtaatttgagtgtggattcaaccgtttcaatgcctgctac

SEQ ID NO: 193484 - DNA, 570 bp, Gossypium hirsutum
  unsure (1)..(570): unsure at all n locations
aaaaccaacaacaccaacaccaacaacggcaacagaatcttgttcccagctccactctttttttgtccgtggtatgcgatgaattggctacccaaatcaaacgccagagagaagaattggaccaatttcttcaagcccagggaaaggaattacggcgaacgttagcggagaaaaggaataggcactaccatgcgctgttggcggcagcggaggaatccgtggcgaggaggttaacacagaaagaagcggaagtggagaaagcgacccggcggaacgccgtgttggaggcacgcgcagcgcaactaaccgtagaggttcaggtctggcaagcgaaagcccgggcacaggaggcaacagcgacttcgttacaagcacagctccaacaggctatgattggctgtggggctgctgcggtgacaccagaatataggataggggaggnnnggnnnncncgccncgcgcggggncccgcccccggcgccctctcctctcgcccgctttctttcttctcgctcctcccttctctgccttctttctcctcccttctctcccgtgctccctccccccttt

SEQ ID NO: 193485 - DNA, 495 bp, Gossypium hirsutum
caggtatttaagtgacagtgatgatgatgacgatgagtcatcaactaaaaagggtcggatggacgattcgtatcattttgatgctgatgagcgacgtgaatggagagccaagatcagggaagttatcagtaagcatcctgaaattcaggaggagattgaccctgctgaaaagttgagcaagatgcaaaaactcctggctgattatccgctggttgtagatgatgatgatccaaattggcccgaagatgctgatggctggggtttcaacctgggtcaattttttgataaaatcactatcaagaatgccaagaaggaaaacgatgacgatgatgattatgatagtgagaaggaagtagtgtggcaagacgataactatattcgtccaatcaaatatattaagattgctcagtgggaagagactgtattcaaggacattagtcctttaatcattcttgtccataaccgctacaaaaggccaaaagaaaatgaaagagc

SEQ ID NO: 193486 - DNA, 1076 bp, Gossypium hirsutum
agacaaacaaaacctaagaaaaagatccttgttgatagcaagcaaatatttggcagcaaatagccaattcagaagtttaaaacatagtcaaaactataaggaaacaaaagcactaaatcagataacaagaacacatttcatcgtctaatgcagaaaactacctgacatttagcaacttcatcaatcttcaaagcaagcaaatatttggcagtagatagccaattcagaaatttgaaacaaaagcactaaattggataacaagaccacatttcatcatccaatgcagaaaactacctcacattaacaatatcatcaatcttcaaaatctccctcacacactccgttgccaatgtaattgcacttgtgcttacaagcagtggctgcactacattctcctccaagatattagtaatctgtcctttcctcacattgatcccagcattgatctctccttgagcatgtcgattcctcagctcagtcacaatagcaatagggttcaacccagcattttcagccaacgtgtaaggaataacttcaagtgcctcagcaaacgacctcacacaatacccctccatcccatgcaacaccttagaccaagcaccaagctgcctcgacaattcaatctccggagcaccgccaccggcaatcaaaaaccttttactcactaaacacctgaccacacataaggcatcgtgtaaactcctctcagcttcgtcgaggaccaactgattcgaacccctaactaaaacagtagttgttcttcccatatccttgatcccagtaaccttaacaatctttccatccccgagcgaaacctcctcaacaagatctgcgtgccccaacttctccactcgaaagtgctcaatattagcaataggcaaacaattcaaagtcttggtaataaactcaatatcttccctctcaacatccttagcaaccataatcttagccttggccaaataatgcaatgacaaatccgtgactgcatctctcagaatactcttttggatcaaccaaacattacagccagtggctttaatcttcttaatcatacccaaaatataattcctttcctc

SEQ ID NO: 193487 - DNA, 393 bp, Gossypium hirsutum
  unsure (1)..(393): unsure at all n locations
nnnnnnnnnnnnnnnnnnnnnnnnnnnnnnnnnnnnnnnncaagaaaaagccaccatataatatcctcgatgaaagcaaatatttggcagtagattgccatttcataattctaaccatagtcgagtctaaaatgaaacataactactaattcaaatagccaacagatgcaaaagataactagagaaacacatatcatctccagagcatgaaattacctaacattaacgatatcatcaatcttcaaaatcatcctcacacactctgtagccagtgtaattgcactcgtgcttacaagcaaaggctgcactacattctcctccaagatattagtcatctgtcctttcctcacattgatcccagcattgatctctccttgagcatgtcgattcctc

SEQ ID NO: 193488 - DNA, 705 bp, Gossypium hirsutum
cccacgcgtccgggcactctttcaaactaacccaaacgcggccgccgggttttgctttcagaatcagcagcagcttgtatttagaaggatggtgagggtcagcgttttgaatgatgcactgaagagcatgtacaatgcagagaagaggggcaaacgacaggtcatgatcaggccttcctcaaaagtgatcatcaagttccttttggtcatgcagaagcacggttacattggagagtttgagtatgttgatgatcacagatctggtaaaattgtagttgaactgaacggaaggctgaacaagtgcggggtgatcagtcctcgcttcgacgtaggagtgaaggagatcgagggttggactgccaggctgcttccatcaagacagtttgggtacatagtgctgacaacatcagctggaataatggaccatgaagaagccagaagaaagaatgtaggtgggaaagtacttgggttcttctattgaggggatttcattagaattaaaacttttatgaattatgtttttttcctttaaacctcttagttagcaatgcctattttctaaattttggtactcatctatatgtattttgcttatgatgtttggagattttgaattgctgaatattcatcctaatatgagactccaataccattagcattgctcttttcccccaaaaaaaaaaaaaaaaaaagtcgacgcggccg

SEQ ID NO: 193489 - DNA, 640 bp, Gossypium hirsutum
cccacgcgtccgcggacgcgtgggctttgagcaaaacccttaagctgccgccatttttgctttcagcagcttgcatttgaaaagatggtgagggtcagtgttttaaacgatgcactcaagagcatgtacaatgcggagaagaggggcaaacgacaggtcatgattaggccttcctcgaaagtgatcatcaagttccttttggttatgcagaagcacggttacatcggagaatttgagtatgttgatgaccacaggtctggcaaaattgtggttgaacttaacgggaggctaaacaagtgtggggtgattagtcctcgttttgatgtcggagtcaaagagattgagggttggactgctaggctacttccttctagacaatttggatatattgtgctaaccacatctgctggcatcatggaccatgaagaagctagaaggaagaatgttggtgggaaagtacttggctttttctactgagtcaaatttttgatattttcctttgttcttttttaatttcactccatgtagaacttgatactttactgcaattttaattttgtattgggagttataattatgtttttggttataatgtttgagattatgaattagtgggttggccttaaaaaaaaaaataaaa

SEQ ID NO: 193490 - DNA, 493 bp, Gossypium hirsutum
cctcaagcaactttgacgcagctgctatttcttttttgtggttttcagcagcagcttgtatttggaagaatggtgagggtgagcgttttgaatgatgcactcaagagcatgtacaatgcagagaagaggggcaaacgacaggtcatgatccgaccgtcctcgaaggtgatcattaagttccttttggtcatgcagaaacatggttatattggggagtttgagtatgttgatgatcatagatctggtaaaattgggggtgaactgaatgggaggctgaacaagtgtggggtgatcagtcctcgttttgatgtcggtgttaaggaattcaagattttacttcttttttggtgtttcaagtttgaatttcttgtggaatggcgttgtcggacttggttttatcaagtttttgcttatgaatttcaagtgaaactgtgttgtctttgatattgttgtaataaagtactccaaatttaggagtcttcatttttgctag

SEQ ID NO: 193491 - DNA, 651 bp, Gossypium hirsutum
ttcaagcaactttgacgcagctgctatttcttttttgtggttttcagcagcagcttgtatttggaagaatggtgagggtgagcgttttgaatgatgcactcaagagcatgtacaatgcagagaagaggggcaaacgacaggtcatgatccgaccgtcctcgaaggtgatcattaagttccttttggtcatgcagaaacatggttatattggggagtttgagtatgttgatgatcatagatctggtaaaattgtggttgaattgaatgggaggctgaacaagtgtggggtgatcagtcctcgttttgatgtcggtgttaaggagattgagggttggactgctcggttgcttccttcaagacagtttggttatattgtgctcacaacatcagctggaattatggaccatgaagaagccagaagaaagaatgttggtgggaaagtacttggcttcttctactgagaaatttgcctttttcattttgaatcgaactcatattattaagatggcatctttttgtagttcagcaattatggttttaatgttttgtttacgattatgaattgttgggttggtaagagattttgtctatttgggagtttcagatatgattgttatgtttttaaagcattttacgcaggattggtggggt

SEQ ID NO: 193492 - DNA, 806 bp, Gossypium hirsutum
aaagatcagttgtttctacatgttcttatggttagaataattttaatatcagcaaaacaaaattgagttttggtttgaatgatgtaagagaataggaagaggtgtggttgtgacaaattaatgtttacaagttacaataatgagctgcttggttttttaaatctgattttgcagcaacttggatttggaagaatggtgagagtcagcgttttgaacgatgcactcaagagcatgtataatgcagaaaagaggggcaaacgacaggttatgatcaggccttcctcaaaagtcatcatcaaattccttttggtcatgcaaaagcatggttacattggagagtttgagtatgttgatgatcacagagctggcaagattgtggttgaactcaatgggagactcaacatgtgtggggtgattagtcctcgtttcgatgtcggggtcagagagatcgagggttggaccgctaggctacttccttccagacagtttgggtatatcgtgcttaccacatctgctggcatcatggaccacgaagaagctagaagatagaatgtcggtggaaaagtacttggtttcttctattgaggcaaatttcttagatttttcatttttgtttgaagtttctcttcatctagaacctctgttggtaccgatttcattccacatttaggggatcacgacgttttggttcgcttgcctctttgtcatctgatagctctgaagtctggctcgttaaggtttctgtaccctgttttttcacaattttataactgtgcatattatcctttttcttttgctcaaacaaa

SEQ ID NO: 193493 - DNA, 493 bp, Gossypium hirsutum
cccacgcgtccggctcccttctctaaagaaacactgttaggtagccgtttttgctttcagaaaatctaccgcagtttgcagttgagaggatggtgagagtcagcgttttgaatgatgcactcaagagcatgtacaatgccgagaagaggggcaaacggcaggtcatgatcaggccttcctccaaagtgatcatcaagttccttttggtcatgcagaagcacggttacattggagagtttgagtacgtcgatgatcacagatctggtaaaattgtggttgaactgaacggaaggctgaacaagtgcggggtgatcagtcctcgcttcgacgtatgagtgaaggagatcgagggttggactgccaggctgcttccatcaagacaggttagccggaaaactgaacttcataattttatgctttcataagattgttttaccctattctactgagttgtataatggatttgcagtttgggtacatagtgctgacaaca

SEQ ID NO: 193494 - DNA, 1912 bp, Gossypium hirsutum
  unsure (1)..(1912): unsure at all n locations
atcactcgggacaaaagcatattctttggtttcaaagcgtttaggttttacggaagccaaagaaaaaaaaaaaatcccttcgtcctcttaacgctaaagctctttgattaaacgattctctgtcaaaggaagggaaatcgatctgtttttctttctgttgtaatcggcgaaaaagaaaatgcattcgactcatctgttactcgaagagccaatcaggatggcttcaatcctggagccatcgaaggctagcttttttccggcaatgacgaagatagtgggaactttaagtccaaaatctcgatccattgaagtcatttccggctgccttaaagctggaatgtctgtggctaggttcgatttctcgtggcatgatccggagtatcatcaggaaactttagaaaatttgaaggctgccgttaaactcactaagaaactttgtgcggttatgttggatactgtgggtgctgaaatgcaggttgttaataaaagtgagaatgccatctcacttgaggcagatgctaccgttgttttgacaccggatgcaggacaggaggcctcttcagaattattgccaatcaactttgatggactgtcgaaggcagtgaagaagggagacactattttcattggtcagtacctgtttactgggagtgaaaccacgtctgtatggctggaggttagtgaggtacaaggaaatgatgtggtttgtgtgataaagaacactgcaacattaactggtgcattgttcactttgcatgcttctcaaattcgtattgagttgcctaccctctctgataaagacaaggaggttataagctcttggggagttaaaaacaaaattgacttcctctctctatcatacacgcgacatgcagaagatgttcgtcatgctcgtgagttcctttcgaagcagggtgacctctaccagacacaaatttttgccaagattgagaacatagagggtttaaaccattttgatgagatcctacaagaagcagatggtatcatcctttctcgtggaaatttgggcattgatctcccacctgagaaggtgttcttatttcaaaaagctgctctctataagtgtaacatggctggaaagcctgcagtggtcactcgtgttgtggacagtatgactgacaacttgaggccaactcctgctgaggcaactgatgttgccaatgctgttcttgatggaagtgatgctattcctcttggtgccgaaaacctgcctggaagttaccctgtggaaacaatttctactgttggcaaaatttgtgcaaaagcaaaaaaagttttcanccaaaaactaatttttcaaaaaaaattcaaatatgttggagaacaatgacccatttggaatccattgctttctctgcgggtagagccacaataaaggtaaaggcatcagttattatatgcttccatcatcagggagaactgcaaaattgattgccaagtacagaccaaccatgccagttctctcagttgtcatccctcgccttaagacaaaccaattgaagtggagcttcagtggggcctttgaggcaaggcaatccctcatcgtcagaggtcttttccccatgcttgctgatccccgacatcctgcggagtctacaagtgcatcgaatgagtcagttttgaaggttgcacttgaccatgggaaggctgccggagttattaagtcacatgatcgagtcgttgtttgccagaacgtcggggatgcttctgtggtgaagattatagagctcgaagattaaactaatgttactttctctgctttgggattatttttggaatctgatttgtgaaagcgatgaatgactatatgtagcacctgtggggtattggctccaggttttggtggatttgaatttgtgttaagaatgcatacactattttaagtctcatt

SEQ ID NO: 193495 - DNA, 1330 bp, Gossypium hirsutum
  unsure (1)..(1330): unsure at all n locations
aaggagatgatgtggtttgtgtganttttatttctgcaacattggctgggtcattgggcacgttgcatggctctcaaattcggattggtttacctaccctcactgataaagacaaggaggttataagtacttggggagttcaaaacaaaattgacttcctctcactatcatacacacgacatgcagaagatgttcgccaagctcgtgagtttctttcaaagttgggtgacctctatcagactcaaatatttgcaaagattgagaacatagagggattaaaccattttgatgagattcttcaagaagcagatggtatcattctttcccgtggaaatttgggcattgatctcccacctgagaaggtgttcttatttcaaaaagctgctctttataagtgtaacatggctggaaagcctgcagtcgtcactcgtgttgtggacagtatgactgacaacctgaggccaactcgtgctgaggcaactgatgttgccaatgctgttcttgatggaagtgatgcgattcttcttggtgctgagaccttgcgtggattataccccgttgaaaccatttctactgttggcaaaatttgtgctgaggcagagaaggtattcaaccaggacatgtatttcaagaagactgtcaaatatgttggagagccaatgacccacttggaatccattgcttcctctgcggtacgagcagcaattaaggtgaaggcatcagttattatatgtttcacatcctcaggaagagctgctagattgattgcaaagtacaggccaacgatgccagttctctcagttgtcatccctcgccttaagacgaatcaattaaagtggagtttcagtggggccttcgaggcaaggcaatcccttatcgtcagaggtcttttccctatgctcgctgatccacgacatcctgcagagtctacaagcgcatcaaatgagtcagttttgaaggttgcacttgaccacgggaaggctgccggagttattaagtcacatgaccgagtcgtagtttgccagaaggtcggagatgcttctgttgtgaagattatcgagctcgaagattaaacttatgttagtttctctcctttccgaatctgatttttgaaagcgatgaatgactttatgtagcacctgtgaggtattggctccaggttttggtggatttgaatttgtgttaagaatgcatacactattttaagtctcataaaagggaaatatggcccataatcccataattagctaatgggaaaaggcaaaagaacaaccccattttttccttgattcagtgggtaataaagatattggattcagtagagtanctg

SEQ ID NO: 193496 - DNA, 402 bp, Gossypium hirsutum
ggaaaaaacaatggttgtggtggaccggcaccaggtttccagtacttccgcgaaaagagaaagttttactctcaagaacaaaagcatattctttgatttcaaagcgtttaatttttaagggaaaataatcaaggctcttcattagaggattctctgtcaaaggaaaatcgaactgtttttctttctgttttaatcggcgaaaaagaaaatgcattcgactcatctgttactcgaagagccaatcaggatggcttcaatcctggagccatcgaaggctagcttttttccggcaatgacgaagatagtgggaactttaggtccaaaatctcgatccattgaagtcatttccggttgccttaaagctggaatgtctgtggctaggttcgatttctcgtggcatga

SEQ ID NO: 193497 - DNA, 818 bp, Gossypium hirsutum
  unsure (1)..(818): unsure at all n locations
caaacatacatgatagataaagccaaaggaagaatgagaatccgaatgaaagtaagcttagcattagtagtcgtcgttgggtgcatcgccatcggcacggtagccgtccattttttggaaaatttggattgggttaatagcttttatctcgctgttacatcagtgacaaccgttggttatggtgatttttcttttgaaacgttaacggggaggtgttttgctgtcctgtggttgcttgtaagcacgttagctgttgcgagggctttcctttacttaactgagttgaggattgagaaaagaaatagaaaaattgcgaaatgggttcttcagaagaagatgacactaggagatttggttgctgcagacctcgacaatgatggatccgttagtaaatctgaatttataatctacaaacttaaggatatggggaaaattgcagagaaagacgttctgcagatctgtgaccagtttgatgcactagacaatagcaattgtgggaaaattacagttgctgatctcatggatagtagctaactatttggtgtaagattcggttaaggctatgcatccgatcccgacctttttcaaatatttggaagatcattcgtacctnaatgtttnnnagaagaagaacaagaaaaatgaagattcgaccaagaggaagaaaaatgaagagtcgaagcagtatatacagactacaatgatgtgccattaaggaggatccatatctttcaatggagatagcctaattgcacaaaagcagaaccaccagattctgtgatcattttcagcttgtaaaaaaggcaagcatatagttt

SEQ ID NO: 193498 - DNA, 637 bp, Gossypium hirsutum
tacagagttgtgcatgaaccagaaagtcgggaaaatgatcaaatagccaatgttaatagtaagtttcaagacatgggattatccagtacagtgaaaggaagttctgttagaatggaagatgcttctacttcaactgattttactggactaccctctttttctcggtcttcatcaattccagattcaggttggaggcctcgtggggtgttggttgcacatctgcaggagcaccgatctgctgtcaataatattgcagtttcaaatgatcacagtttctttgtgagtgcatctgatgattccactgtcaaagtgtgggattcaagaaagttggagaaggatatatcatttaggtcgaggctgacttatcacttggaaggaagccgagcactatgcactgcaatgctccgaaactctgcccaagttgttgttggagcttgcgatgggacaatacatatgttttctgttgatcatatttctaaaggtctaggaaatgttgttgaaaagtattcaggtatcgctgatataaaaaagaaggatgtgaaggaaggtgcaatacttacccttttgaactaccccatagataactgtggcattcaaacgtttatgtacagcacccaaaattggggtattcatcttt

SEQ ID NO: 193499 - DNA, 1719 bp, Gossypium hirsutum
aattcgtcctccctttttctctctgctaggtttcgtcatttgaaggctgaagctatggagggtaaaaatgcgaatctggaagcggcgatcgaccagttgcttaatgttgagaagcagatgcggtttgccggcgatgtgattggcaccaagaaagcggtctctgacattttgcagctctgctttgaagctaaggattggaagtctctcaatgaacagatcgttaatttgtctaagaaacgtggtcaacttaagcaggcagtgactgcaatggttcagcaagcaatgcaatacattgatgaggcaccagatcttgaaactcgtatagagcttatcaagaccctgaacactgtgtctgctggaaagatttatgttgaaattgagagagcaagattgatcagaagacttgcaaagattaaagaagaacagggccttattgctgaagctgcagatttaatgcaggaagttgcagtggaaacttttggtgccatggcaaaaactgagaaaattgccttcattcttgaacaagttcgcctctgcttagatcgccaggattatgtccgtgctcaaattctgtcaaggaagattagtcctagagtatttgaggtcgatacctccaaggaaaagaagaaacccaaagaaggtgacaatgttgtggaggagcctcctgctgatataccttcactattggagttgaagcgtatctactatgaactgatgattaggtattactttcataacaatgactaccttgaaatttgccgttgctataaggcaatatacgagattccatccataagagaagatccatctcagtggattccggtcttaagaaaaatctgttggtacttgatcttggccccacatgatccaatgcagtcaagccttcttaattccacattggaggataagaatctttctgagatcccaaaatttaagttgctattgaaacagttagttacaatggaggttatccagtggacatccctgtggaatttatacaaggatgaatttgagaatgagaagaacatgcttggaggttctttgggtgacaaagctgcagaagatttgagaatgagaattattgaacataatatccttgttgtttcaaagtactactcgaggattacattgaagagacttgcagagttgttgtgtctcactatccaggaagctgagaagcatctttctgaaatggttgtctccaaggcactggtggcaaagattgaccgaccaatgggaatagtctgcttccaggtagcaaaggatagcaatgaaattctcaattcgtgggcttcgaacttggaaaaacttcttgatcttgttgagaagagttgccaccaaatacacaaagaaaccatggttcacaaagctgctctgaaagtatgaaaacgatgaacattcaccaaactacaggttgtggccaagttgaaatgtgctttttggaggcaagtggtctaatatgatggtaaaaaaaagtatgttgctatgaccttttctataactgaagtttggttactatggggaaaaccaaaagatggtgcctgttttttatagcaggtgggaggaaaacaattaggtgtggtatttgtattcttcatcactattcgacaatttcgcatctttcacattatttcaccactatttcttcgagcaagttacggaggaaaagcgggatgctgctcaatcggaaaaataaaagccatggatgcgatatctgga

SEQ ID NO: 193500 - DNA, 456 bp, Gossypium hirsutum
aacggaaaaaaaacaatgcgtagcgagagagagagtgaggcatatgctactgtgatggatgcttcgagaggtagcagacttaaagctccttgctgatcagtgcaaatcaaacccttcaattatccacactccctctctttccttcttcaagtcctatctcctaagtctgggagctcaaattccaaccgacccacggacggatagaggtggtgttaaaatggaagagcctgagcaacactctgatgacaagaaaccctatttttcacatgaagaagatgatgatattattgagtccgatctcgagttagataataacggtccatgtggaacctgacaacaatcctccacaaaaaatgggagactcttcggctgaagttacggaggataagcgggatgctgctcaatccgaaaaattaaaagccatggatgcgatatctggaggtaagctggatgaac

SEQ ID NO: 193501 - DNA, 570 bp, Gossypium hirsutum
  unsure (1)..(570): unsure at all n locations
gaaaaangggccgaccgcacgcgtacgaaagaaaccatggttcacaaagctgctcttttgtatgaaaacgatgaacattcaccaaggtcaggttgtggccaagttgaaatgtgctttttggagacaagtggtctaatagatggtaaaaaaaaagtatgttgctatgaccttttctataactgaagtttggttactatggggaaaaccaaaagatggtgcttgttttttatagcagttgggaggaaaacaattaggtttggtatttttattcttcatcactattcgacaatttcgcatctttcacgttatttcaccactatttcttcgagcacttcattgcacttgtattcttgcgtcactttcgtctttgatgatttccatgcgtcggagtaactcgttttaacaaagcttctttatcagtttactcccatttggtatctttaaatgattgcattgcttanaaaaaaaaaaaaaaaaaaaaaaaaataaataaaaaaataaaaaatatatataataattttattatataaaaaaaaaaaatatatatattatttaatttattattatttt

SEQ ID NO: 193502 - DNA, 486 bp, Gossypium hirsutum
cggatcgatcacagattctcggccccgtcgtttggctgccactccagttgacctctcttgttttcatccccctgtgagaaggtagagagcaaaaccaacccagcaacccacttttactatgccctattagtaaagcatttactttttgcaaggcttgctgagcttcttcatgtgacagacatcgcaaaagtaatccgtcgaactctcgccgatagagggcatcgttaaagtatacgattttttaaccccgatgggtttcgcagtcgaccatttgatagccctgttcctgaatatacagaactaatagggcttcgatgagccctagatgtaaaggggttaaaatacctctaagcaattagaagagcgcggaatttgacctccctcaaatggatggatctgggattgattgtggaatccgagcagagagaacccggggcgggcaggaagatacgctaggcggagtagtcgctctggagcaggttcttc

SEQ ID NO: 193503 - DNA, 466 bp, Gossypium hirsutum
aaacacgtttcccgttctgggttttcaatcaaattttgctttgtttcctgttgcggaagatgcagcaactcttcagtatgttgcaaggatctctcatggcgctcctttgggatccactgaccttgtggttgatcttggcggttcgtttctttggatggattgcaattccggacacgtgtcttcatcatacaggttggtctcaagctgctcggtcaactgctctagagcaaagttccatgatcttggaagcacgagttgtctattaaacaccaactgttatgtgtccccttacaatggcgtaacaggatcgacttcaatgggggaactagtggaggatgtcatagccgttgattctgttgacccttcagatgtaggccaaagcacaacagtggatcactttctgtttgcttgtgcatcgacgtttcatttacaaggcttatcaagtggggccaagggaatgatgggt

SEQ ID NO: 193504 - DNA, 705 bp, Gossypium hirsutum
  unsure (1)..(705): unsure at all n locations
gagcggtgctacaaaatatgcaggggatgatcttcaacttaatgttgatccttatctatcatctgacaaggacaacattcttattttcaaatccaactcttctcttccatctagaggtgccatagattttgtaccaggtatcaggaaaatggtatgtcaagattctggagtatggaagtatgatagaaatggttctgccaattcgactgttgggtctagtagaagttctcatgggttggctaataccttcagtcttgcacctggaagaggggtttacgctaataggctgcagacacgtgttcattcagatcctgcttggcttgaaactggagatgcagtcgcaaatttataccctgaactgcgggaagacgctcaagaccatgcacgatctcgtaacgcatattttgaccaggcacgtcaaggatttctcactggcaataaggctttaacaaaggaacttagtgtgaaaggacaactgcaaaatatgcatatgaaggcaactcatggaaacactcaagaatctttatttcgccagaggaaccaagttcctcctgagattgttggagggcaggaacggatcatagacctgcatggattgcctgttagtgaagccattcatatgcttgaactatgaactatcagtgctcaggagaacagnctcggctgcagatcagcgccttcaggtttacataagtgttggaactg

SEQ ID NO: 193505 - DNA, 757 bp, Gossypium hirsutum
  unsure (1)..(757): unsure at all n locations
catcgaccctccgaagttctctcgctttcagggttcaacctttgcggatttgaatctttgggggttgtcgtatggttttgagagatggggcaacagtctttgatctacagcttcgtggcgcgtggaactgtgatactcgccgagtacaccgagttcaccggtaatttcaccggtatcgccgctcaatgtctccagaaactccctgcttctaacaacaagttcacctatacctgcgatggccataccttcaattacctcgttgaagatggattcacctactgtgtagttgctgttgaatctgctggcaggcaagttccaattgcatttctggaaagagttaaggaagacttcaacaagagatatggtggaggaaaggctgcaactgctacggccaaaagtctgaatagagaatttgggtccaaattgaaggagcatatgcagtactgtgtgggccatcctgaagaaatcagcaaacttgctaaagtgaaggctcaggttttctgaagtcaagggtgttatgatggaaaacatcgagaaggtccttgaccgtggtgagaagattgagttgctggtggataaaactgagaaccttcgctcacaggcccaagattttaggcagcagggaccaaagatgagaagaaagatgtggctttccattatgaaaaatanaatgatcgttctgggtatcctgattgccttgattcttaacantgtgctgtctgtctgccatggctttcattggttaaatctgtcttgc

SEQ ID NO: 193506 - DNA, 866 bp, Gossypium hirsutum
  unsure (1)..(866): unsure at all n locations
ccataatccctcagctgctatcttattttttcccttccatttttttttttgtaacaattgaatttttggttgagaaaattttagggttagggttttgagagatgggacaacagtcgttgatctacagctttgtggctcgaggcacggtgatcctcgccgagtacaccgagttctccggtaatttcaacaccatcgccgctcaatgtctccagaagctccctgcctccagcaacaggtttacttataattgcgatggccacaccttcaattacctcgttgacaatggattcacctactgtgtanttgcaacggaatccgcgggcaggcaaattccaattgcatttctagaaagagttaaggaagacttctcgaaaagatatgggggatggaaggctgctaatgctaaagccaagagtcttaataaaaaatttgggtccaaattgaaggagcatatgaagtattttgtggaacatcctgaagagatcagcaaacttgccaaagtgaaggcccaagtttctgaagtcaagggtgttatgatggaaaatattgacaaggtcacttgaccgtggtgagaagattgagttgctggtggataaaactgagaaccttcgttcacacgttactcttattcaaactgcatttcattggttgcatttcggggaaagtgtttccttaccaaacttgggttcttttttttctttttcaaaatgatttaattttcctcaatgtaaaattccaattatacctcttatgctgttgcactgtatgatgcattttaagtggatgtacaatgatgctgcattccagcacaagattttaggcagcagggaactaagataaaaagaaagatgtggattgagaacatg

SEQ ID NO: 193507 - DNA, 1344 bp, Gossypium hirsutum
gcccaatttcagatacccaacgctgcagcttcatttgcccactatctgtctctctctctctctctttcacttcacttccacagccttctcttctccaccaatccaaaaaaaccaaagatgcagtacaaaaacctgggcagatcaggcttaaaggtgagtcaactatcgtatggagcatgggttagtttcggtaaccagctcgatgttaaagaagcaaagtcacttctccagtgttgtaaagacaacggagtcaactttttcgacaacgccgaggtttatgccaatggtcgagccgaggagatcatgggtcaggctattagggaacttgggtggaaacgatcggatatcgtggtttctaccaagatcttttggggtggtcctgggccaaatgataagggtttgtctagaaaacatattgtggaaggaaccaaggcgtccttgaagaggcttgatatggattatgttgatgtgctctattgtcataggccagacacacagactccaattgaggagactgtgagggcaatgaattatgtgattgataagggttgggcattttattgggggacaagtgagtggtctgcacaacaaattacggaagcatggggagtagctgagaagttggacctggtaggcccgattgtggagcagccagagtataatctattgactaggcacaaggttgaatccgagtaccttcctctgtatactaactatggtctaggtcttacaacatggagtccgcttgcttctggagtgcttactggaaaatacaacaaaggaaatataccatctgacagtcggtttgctttggaaaatttcaaaaatcttgctaaccgttcactaattgatgatgtgttgaggaaagttaatggactgaagccaattgctgatgaacttggtgtaccattagctcaacttgcaatcgcatggtgcgctgcaaatcccaacatatcatcggttattactggtgctacaaaggaatctcagattcaagagaacatgaaggcacttgatgtaatcgcattgctgactcctgctgtcatggagaagattgagacagtttttcaaagcaagccaaagcgtccagattcttacaggtagacgccggtacctgttgcttccttagcatgtcattggcatagctgtgttttggagcagatgtgtgagcatcaatttatgtacttggtttggtgttttatagtactttgcaactttagttgtatttggcacccttatcattgtggaaagaagacttgggagatgaaatgaatttggaactggctgtgattgttggtggattgtgaacgtacgtacaactctaatttatttatctgttttcta

SEQ ID NO: 193508 - DNA, 434 bp, Gossypium hirsutum
gacacgaacagcaacaaatttcatttttattccatcgatttcccccgtcaaaagttctgcattcctacgtttgggagtacatgaaatgaaagctatgttgcacacgaatatacattgacggtagctataatccgatactactaccatcaagctacatagcagagcgacgttgcgtgcgaggtcttttcaatccacacaaatacgtcccattcgattgcgtcctaccgcttgtcgcagccatcgataccatcgcgttatcgaacttctcgaacccttggttcaaaggacgaagaatctgctcgaaagtcacggcattgcagcgcttgtcaagccaagccgtgatgtctgcaaaaacaatctcgatgttttcatcaggctctaccgatgttaaaccatgccccatccctggaaaccgttttaatggtttgtccatg

SEQ ID NO: 193509 - DNA, 600 bp, Gossypium hirsutum
  unsure (1)..(600): unsure at all n locations
gaaaaagttcccacgctctggtttcactttttcttctgtcacttttcttgggaaaataatgtctcattcgatgggaaagtgccagaaaattcgtcgaattgtccgcatccgacaaatgctgaagcagtggcgaagaaaagccagcataacggccagcaacaacaccatcggcaacaacaacaacggagatgcgccgtctgatgttcctgctggacacgtggcggtctgtgtgggcacaagtctcaggagatttatcgtacgcgcgacgtacctaaaccacccagtcttcaaaaaactcctcgtacaaaccgaagaagagtatggtttcaaaaacatgggaccattaatcatcccatgcgacgagtcgttcttcgaagagattctccgagtcgtatcccgatctgattcttcatcaaactcgggtcctttctctactttcaaagatcttcaaaaatgctgccacgtgggcatngaagatanactcnggtttttctgcgagtctcgaccgttgcttcatggggtatccgacaaatccgtntactgatagtatgaagaactgacagctatattatgatttccttgagtgattaatgggtaatc

SEQ ID NO: 193510 - DNA, 782 bp, Gossypium hirsutum
  unsure (1)..(782): unsure at all n locations
cggacgcgtgggcggacgcgtgggcttgaatctcttcagcctacccaagttagcccttatgggtcaagataatttcgctccgcagaagagatcttctactggcggcggcggaggtttaccgacaatccgcaacgagactggcgctggcggaagaaaccgtggatttcccagtatgccccgtggcaggcagatgcacaagacattcaacaactttaaaatcacaatcctttgcggcttcgttacgatcctcgtcttgcgcggcacaatcggcgtcggaaatttgggaagctccgaagccgaagccatcaaccaaaacctgatcgaagaaaccaaccggatcctagctgagatccgctccgactccgaccccacggatcccgatgaatctcctgaagcggagcgcgggcctaatgttacatacactctggggcctaaaattacggactgggatcagcagcgtaaggtttggctttccaaaaaccctgaattccctaattttgttaatggaaaagctcgaatcttgctcgtcactgggtcgccccctaacccttgtgacaatgctataggagaccattatttattgaaagcgataaacaataagattgattactgtaggcttcatgggattgaaattgtttataacatggctcatttatacaaggaacttgctggttattgggcgaaattgccattgattaggaggttaatgttgtctcatcccgaacttgagtggatttggtggatggatantgatgctttttttacagatatggtgtttgagt

SEQ ID NO: 193511 - DNA, 623 bp, Gossypium hirsutum
  unsure (1)..(623): unsure at all n locations
cccacgcgtccgcttccatatccaacactatctcacacacacaaacaccaaaaatgccgttcaagagatacgtcgagatcgggagagtggctctcgttaactacggcaaagactacggcaagttggtcgtcatcgttgatgtcgtcgaccagaacagggcacttgttgatgccccggatatggtaagaggccaaatgaacttcaagaggcttacattgacagatatcacaattgacattccccgtgttcccaagaagaagacattgatcgaagctatggagaaggctgatgttaagaacaaatgggaaagtagctcgtggggtagaaagttgattgtccagaagagaagagcatctctcaacgacttcgataggttcaagcttatgttggctaagatcaagaggtccggagtcatcaagcaagaacttgctaagctgaaaaaggagaatgcatcttgaatttattctgaattatgggattttttgctagtttttgtcatcaatcttccgccaggttgttctttttttgtaattntttcttttatttacaaatgattaaaaagattaagatcagttgagagatctttgtttgctatattacatattttatagtgagtttaatag

SEQ ID NO: 193512 - DNA, 335 bp, Gossypium hirsutum
  unsure (1)..(335): unsure at all n locations
gctgntgtccagaagagaagggcagcgctcaccggcttcgttaggttcaagcttatgttagctaagatcaagaaggctggagtcgtcaggcaagagcttgcaaagcttaaaaaggagaatgcatcttgaagtaattctgaattatgggattttttgctagttttttcatcaatgttccgcgagttctttttgggattgatttcgtttttctattaaacaaagggttaaggtcttttgaggacaccttatttgctgtatgacagattttgtagtgagtttattgctatatattgcttgctcaatgtggttgcttgttgcagtattcttttcctttc

SEQ ID NO: 193513 - DNA, 681 bp, Gossypium hirsutum
gtttcgacaaaatcaaacggttacgaacactaggagttccaaaaaggggcacacccgatattcacctccttcaaaagttttggcattttcattttcgtctccactaaaaaaagccctgcgtccttcgaatcgattccattcgatttcaccatcttttaaatcctatcaatttctcagatctttcccagtcttttctgcaaccatgagtaagggaccaggactcttcgtcgatatcggcaagaaagccaaagatctgttgactaaagattatacctcggatcagaagttcactgtttctacttacactgccgctggagtggcccttacatcaactgctctaaagaaaggaggactttctactggggatgttgctgcattatacaagtacaagaatactcaattcgatgtcaaagttgaaaccgactctaacatctcaacaacacttacattcactgagattcttccatccacgaagactattgcatcgttcaaagtgcctgattataagtccggcaaggtggtggttcagtatttccatgaccatgctaccgttacaacaacggttggtttggaccatacaccaaacgttgttgtctcggcgaccatagagacacccactattactgtgggtgcacacgcatgttactataccacctctggaaattatacaaagggtactgc

SEQ ID NO: 193514 - DNA, 716 bp, Gossypium hirsutum
ctcgtgccgccttatgcaaaagtccttacatgctcgttaaagggtggcatcgattatttcatgaccttgtaggtcgagaaggccctttcttggagacaatatgtgtaccatttgcaggccttgccatcttactttggccactcgctgtcattggagcagtgttgggctcaattgtgtctagcatcttccttggtgcctatgctgcggtgattggttaccaggagtcctcgttttggtatgggctttgttatatccgtgcttcgttgtccatatatgatgaatacagcactgatgtccttgacatgcctgaaggatcttgccttcccaggcctcggtatcgtaggcatagaaatgaatccttctctaaatctgactccttccgtcctcctgctcgcagtgggtcacttacaaatgcaaggcttgatttgaacccactccagctactcgagggcttatttaaggagtgccatgtccatggtgagaaaatggtgtctgaagggctgataacttctaaggacatcgatgatgccaagtccatcaaaggaagtagagtggtcagcattggcttaccggcttattgctttcttcaggcactcttgcgctctgtggatgcgaatagactgggcatattactgagtgacaatacagaaataacggccacaaaccgaccaaaagatgcattctttgattggtttcttaacccctttttgatactg

SEQ ID NO: 193515 - DNA, 555 bp, Gossypium hirsutum
gagaattctggagccttctttattttctctaaatctcagtcatccgttgaacaatctcgcttataaattatatcccaaacccaaatcctttccctcaagcaatttgagtgattctttctttttattgtggtctccagagcttctctgttacatcgtttattttctctcaagaactgaagaaaaaatccgaatagattaaaacttaagaaagatcaaaagatgtttggaagagcacctaagaagagtaataacaccaggtactatgagattctgggtgtttcgaataacgcttcccaggatgatttgaagaaagcttataaaaaagccgccattaaaaaccatccagacaaaggcggtgatcctgaaaaatttaaagagttggcgcaagcttatgaggtattgagcgatcctgagaaacgtgagatatatgatcagtatggtgaggatgcactcaaggaaggaatgggtggtggtgccggtgctcatgacccgtttgacatcttctcctccttctttggtggtagcccgtttggaggtggtagcagtcgaggtaga

SEQ ID NO: 193516 - DNA, 535 bp, Gossypium hirsutum
tcctcacgcgtccgcgaaaatctctcccccattttccacagtttagtttttgcagccacaacacagccaaagaaagaagaaaatggcgtcgaatgcggcggttccattctggcgtgcagccggcatgacttatataacctactcgaacatatgcgccaacctcgttaggaactgcttaaaggaaccttacaagactgaagcccttagtcgtgagaaagttcatttctccatctccaagtggacggatggaaagcctgaaaagcctactctccgctcagactcacctgaagaatgagatgcaagtttggtcatggaagcttcgaaactggaaggattttaattttttttttagtaatttctgttatgtctgaaacataagaacagatttcaggctgagatgatgttgcacatcctaataataatgtactttgtgacttgactgccgttgacccttcacgggatgttcatgggttatcaagtattcttgtcaaagtattttaagctgcacctttcaaacaaaaaaaaaaaaaaaaaa

SEQ ID NO: 193517 - DNA, 403 bp, Gossypium hirsutum
ccatgttttttcacaatcagttggggcagtaccccttaattgaaaataaatctccaataaacagaaatcttttttttttaaaatgtcaacaaacctcagatagaaacgaatccattacaactcaaattctctatgtcaaagataagttgtcctgcaaatagaacaaacgtagttaaaagaccataaaaggctagggatcatcaacttcactttaattgattaaggtctccaagctttgcttcatctccacctatgccttgctatctatgctcattggttggggttcctttgcagctgatttactggaatccccagaatccattttattcatcctggcaaacatgttgccatagaatttggcgtgcttcctgtcttgttccttgatcttctctttcaaagcgcc

SEQ ID NO: 193518 - DNA, 924 bp, Gossypium hirsutum
gctaaagttgtttcgatcaatgattatgaggatgttccggtgaatgacgagaaagcattgaaaaaggcagtcgcgaatcaaccggtgagcgttgccattgaggcaggaggaaggagtttccagttatatcaatcaggtatatttgatggaaaatgtggaacacaactagaccacggtgtcactgctgttggatatggcacagagaaaggtaaagactattggattgtaaagaactcatggggaagcagctggggagaagcaggctatctcaggatggcaaggaatgtggccaataccgtaactggcaaatgtgggatcgcgatggaagcctcttatccgatcaaaacaggtgaaaatccccccaatcccggaccgtctccaccatctcctataaaacctccgaccgtgtgcgatagttattattcctgtcccgagagcaatacctgctgctgcatatacgagtactataactactgctttgcttggggatgctgcccactcgaggctgccacttgctgcgaagatcgctacagctgctgccctcatgactaccctgtgtgcaacatacatgaaggcacctgcttgatgagcaagggcaatcctttggcagtgaaggcactgaagcgcactccggctaaaccgttctgggcacattgaaagcctgggattgtaatgcagtagatgatgggttacaagggagaagatgaaagcttgacagtgcttaacaatctccttgggtttaatatcggtagatggatggtgacaattatgtatatagtatcctatttattacccatggtgtatttgggaaatggatagaatatttccaatttctgtatatcatgtcatcatttagcaatgactttgaaaaagttctattcctgctttaaaaaaaaaaactatagagacaagacagaacattat

SEQ ID NO: 193519 - DNA, 707 bp, Gossypium hirsutum
acctttaccgtcacattcgtgagaaaaacgtgtatgagattcaccagatgtacgagatctcgttccaaaccctctccgaccgcctcttcaaagacactccttggccctccgttgacgccgtcgctcattacgtcgacaacgaccaagtcttctgcctcctttaccgtgagatgtggttccgccatctctatgctcgcctttctcccactctcaagcagaggatcgattcttgggataattattgtagcctctttcaggtggtgttgcatagggtagttaacatgcagttacctaatcaatggctgtgggacatggtggatgagtttgtgtaccaattccagagtttctgtcaatacagggctaaaatgaagaacaaaaccgagcaagaaatcgctcttctccgtcaatatgatcaggcatggaatgtgtatggggtgcttaattacttgcaagcatttgtggagaagtcaaatattattcagatattggagcaggagaaggagggtcttgagcaatttactgctactgatggatatgattacagtggtggaagcaatgtgttgaaggtgttggggtacttcagtatggtgggtttgttgcgagttcattgtcttttgggtgattaccaaaccgggttgaagtgcttgcttcctattgacatcagtcaacaaggtgtttacaccagtgttataggaagtcatattggg

SEQ ID NO: 193520 - DNA, 961 bp, Gossypium hirsutum
cccacgcgtccgcccacgcgtccgggaattctcctccgttgctttataagatgagattgatccagggaatagctaattttaggcgtctttacgctaattctatagacttgaacacaaaatcctacctctccacgacaaagcgtgcattttgcaggccaagtgaacacgcaaaggtcgttaacaccaccatcacttgttctccattttattgcagcaataacttaggatcgagatcccattcaagcagacccgaaatggaggggatagagcatagggtaatcaaagccaatggcataaatattcacgtcgctgagaaagggaaaggccctgtaatccttttcctccatggattcccagagctctggtatacatggcgccatcagatcactgcttttgcctcgcttgggtaccgagctttggctcctgacctgcgtggatttggggaaacggaggcacccgatgatgccttcacctacaacagtttacacgtggtgggatgatcttattgctcttctggatgatgtttatgtcgtctcatgatcatttattttacattggtcaatattgtatagatctcatttactagatgtttgtcaaatttatactaatttatgtctaatggctatgtttactaatattgtattatataactttatactccattaagtatcattctgattttcaatgactttttatttatatattattattatcatatttcagattataaatctatttgtatatttaatacatcttcaatatctatttcttatatcataatgatatatgtaatttactaatgattatttaataactatatttagtaatatattattattatatattattatattattatattattgtattttatattatcattcaaatattcaacaattatatctatatgtatataatctattatactgatgttctcttcgaatttatatattcatcgatt

SEQ ID NO: 193521 - DNA, 443 bp, Gossypium hirsutum
  unsure (1)..(443): unsure at all n locations
gcgtncgctctattgagttggaattgaaaaaaggttccctgaaatggctaatcgttctctagtttccctttacaagttccttttcaggcacccttttcaatcatctgcaaaacccacgtctccttttctctttaaatccctttctccgtttcaaactcaactcgcggccaactctgtcccatctccgagacctgcctcttttcgattcccagtcttccaaacctcacaagttcagcacccaatttaccacatcctgaggaagtacagttctgagtcaccagcatccaagttggatgtgaacaaggaggtggactcgatcaacctcaagtttgcagaggcaagagaagagatagagatggcaatggagtctaaagagaccgtttatttcaacgaagaatcacagtgtgctcgtgctgttgttaaagaggttttggacatgtttg

SEQ ID NO: 193522 - DNA, 1351 bp, Gossypium hirsutum
  unsure (1)..(1351): unsure at all n locations
cccacgcgtccgcccacgcgtcaaaaattgtttttgtttttaaaatataaacttacgacatctacaaatggtgacctcagtgctacctagagtagaaagcttggcaagcagtgggattcaatcaatcccgaaagaatatatcaggcctcaagaagagcttacaagcataggtaacgtgtttgaagaagagaaaaaagaggaagggcctcaggttccgaccatcgatttgacagaaatcgagtcggaggacaaagaggtccaggagagatgtcagcaggagctgaaaaaggctgccatggaatggggtgtgatgcaccttgttaaccatggcatctccgaggagctcatggatcgtgttaggaaagttgggcagaaattctttgaactccctgtggaggagaaagagaagtatgccaacgaccagagctctgggaatgttcagggctatggtagcaagcttgctaataatgctagtgggcagcttgagtgggaggactacttcttccatctaatttttcctgaggataagagagacttgtcaatttggcctaaaatccccagcgagtacactgaagttacaagtgagtatgcaaggcaactgcgaggccctagcgagcaaaatactttcagcactatcaatttgcttgggattagaagaaggaaggctagagaaggaagttggtggcgtggaagagcttcttcttcaattgaaaatcaattactaccccaagtgtccacaaccagaactcgctctcggtgtcgaagctcacaccgatataagtgcactcactttcattctccacaacatggttcctggcctccaactcttttaccaaggcaagtgggtgaccgctaaatgtgttcccaactccatcatcatgcacattggagacaccatcgagatcctcagcaatggaaagttcaagagcattctccacaggggtctggttaataaggagaaggttaggatctcatgggcagttttctgtgagccaccgaaggataagatcatccttaagccactcccggagactgtctctgagaccgaacctccactgttccctcctcgtacctttgctcagcatatcgagcataagctgttcaggaagacccaggataatctgtccaactgaaactagtatttttatttgtcgcgataacctatttctttctgtactctgatgaatgctatatttcgttggggggttaaacccttggttgtggcgtctgtctccactccttggctcctctttacctgttttatttgaataatgagagctgatttggttctttaaaaaaataataannnnnnnnnnnnnnnnnnnnnnnnnnnnnnnnnnnnnnnnnnnnn

SEQ ID NO: 193523 - DNA, 463 bp, Gossypium hirsutum
tgcgagtttttttttttttttttggcgaaaaccctatctcgcctcccctgagcttcactattttccttttccctctttcgagtccgtgcttttttctagggtttgttctttgatctaactaacgcagattattaagaaaatgtcaagtgctttagagatgtcgctagacgatctcatcaagcgcagccgtaagtctggatccggaaactcccggggtcgaggccgtggatccacggcgggacccgcccgccgcattcctaaccgccgagcgaaccgctccgcaccctataccgctgctaaggcgccggagacgacgtggcagcacgatatgtattcggataagggagcagcgttgcaaggacaagcaggtcgggcctccgcaatagaaaactgggacgaagctttatattctctaaatttagattatgggggtttccaatgacgccatcaaggagttattttc

SEQ ID NO: 193524 - DNA, 687 bp, Gossypium hirsutum
ggctcagaaaaaacgaagagctcatcgttgatggataacttattgggccttcttcgggttcggggcaaacggggcgttaacctcgccgttcgtgatgttcgaagcagcgatccttacgttgttgttaaattggataaacagaaattgaagactcgtgtaataaagagggatgttaatcctgagtggaatgaggatttaactctttccataacagatcctagtactccaataagactgacagtttatgaccatgacacttttagcaaggatgataaaatgggaaatgcagagattgacatcaggccgtacatagaagccttgaaagtggatgtggatggtatcccgaatggaaccacgatagccagagtgcaaccttgcaggaccaactgcctgtccgaggagagtgccatcactttggtcgacaggaaggttgtgcaagacatttgcctccgattgagaaacgtggagtgcggtgaagtggaaatccaacttcaatggattgaacttcccgggtctaaaggtttatcatgaagtgtgtgttcataaaaatgcggtttcgttccatctcgttatgttttttgttgcaggtttggggagcttctaataccgagcaccgtatacccccccccccaaagtgaagtaattgccttttgtacaatttaattttctgagcttcaggtctttgtc

SEQ ID NO: 193525 - DNA, 434 bp, Gossypium hirsutum
cccacgcgtccgggttgcgatgcggcggcgcctttctctcacaattgtcagatagcaataataaaaatgggtggttggtaattgggggtgtgggctgggggagagagccattccttggtcgtctccgttgcagcagcaataataataacagcaactgcgatgcgaaaaagggtgtccctgattcaaactacgtagtgcccctggagaaatctttttcgccttccaactcctcctgcatcactcgccctcttattgaaatcctgcgcgacctcaataagcgtatcccgcataacatcatcaagtctccgcctaattcttccactttcctcccctggtaccatgccaatcgcatgttgagcttctacgcccctgggtggtgtggagaagtacgtgatgttatatttcgccaacattggaacctttactggttgtgt

SEQ ID NO: 193526 - DNA, 574 bp, Gossypium hirsutum
cccacgcgtccgcggcgcgtgggatttgaccaaacgagcttggaaatccattggaaaaaatggcaatacaattgcgaatcggcggtggcgtcttcctctcacaatggtctccacagctagtgttggatagtaacaataggaatgggcggcggttggtaatcgggggcgagagctgggagagatcgcgattcatcggccttgtccattgcaacagcagaagcagcaataatggtagcagcgatgctaaaaagggagtccctaattcaaactacgttgtgccactcaacaagtcgttttcggcatcaaactcttcgtacatcactcgtcctctagttgaaatccttcgcgatctcaacaagcgaatccctgataacatcgtcaagcctccttctgattcttcttccacttttctcccttggtaccatgccaatcgcatgttgagcttctacgcccctggatggtgtggagaagtacgtgatgttatattctctgagaatggaactatcactgttgtatatcgactcactattcgaggatctgatggagaagcacatagggagtcaacagggacagt

SEQ ID NO: 193527 - DNA, 531 bp, Gossypium hirsutum
tgcacgtaaatataattttctatacttgaaagaaaaatcaaaatagattttttttagtttaagcactgtgattcatttgtatgtacgccagcgtcaaggctgctgaatgacacgcaaaagaaaagaacctaactgccaatgccaaatgtcatacagaagagaagtccagtcgactcaccaacactctagctttctactggcctattactcaccgacctgataataatagtatacaattaacttcaccctcaacctcgagccaactaccccacaacaatattatctcaattttcaatctcaagagatggtttactcaattgtcgacaggtagtaggcacataccttataatcaacaactgattgagaaggttaatgggaattcagaaagttgaaaccagagtgggtatagtaaagcactattttctccagtcaaccaaatgcacgtgaacactgaaccaggacaaactacatcagagatttcataccttcaattttctattgctgatttaacacaggaaaagatggacgtgg

SEQ ID NO: 193528 - DNA, 621 bp, Gossypium hirsutum
  unsure (1)..(621): unsure at all n locations
gtacgaattcncaatttcccgatgtatcttcaacaactgacttcaacgtcgtcgtgtctggccgtccgatgtacagaccttcnatatacccgaacgttggtcaacctggtcaccccgtagtccctcccgcaccccggacctcctctttcccttcctcttccgccggattgggcattagagttgttttgaaaccagattatcgaattactcctctgcctcagttttcgccgcaagttggggatattcgtcgaagcaatttccagtttgatttccagtttgagaggaaaatcttggctcaaccagatgcggaattcatgaatttgagccaacttgacttggaaaatcatccttcggaacctacccaatcaactccttcctccggtgcaaattcggattctgtgttaaacaaatacattgcctctggtctcagccaagacgctgtcatcatcgctgttgcaaattatggagacagtccaaccaaggttcgggaatttgtcaatggttacaacctactgcgagaaatggggttctcagcaaacaacgtcgctgatgctttgctcgtgtatgacaatgatactgacaaagcattggcacatttcctgaacagctcatcacgaggat

SEQ ID NO: 193529 - DNA, 424 bp, Gossypium hirsutum
caagcattgcccaagtgtttgttgctgcttacaacaaacgacttcttaggcttcctgcagagggacaggaatgtggagttttctatgatcctcctttaaaggaatacgtgctgtcaaagctacccctcacctaccagttcaggttcttgaacaaagccgcgattacaaccaagaatgatttagaagacgatggttcccctaaaaaatggcggttgcgcagcatccaagatgtagaagaggtcaaatgccttgtcacaatcatccctatatgggcttctggtatcattagcttcaccgccatggcacaacatggaacattcaccttatcacaagctttgaaaatgaacatgcatcttggtcccaagttccaaatcccagctggttccatgggtgtcatatcgacgctcacaattgggattttcct

SEQ ID NO: 193530 - DNA, 525 bp, Gossypium hirsutum
tctaaaaccaggggaaccccccggcctgcagggttttttttttttttttttttaaattcgaatccaagttgaaagatgttacaccaaaaagatcacattttaggctttgcaatatttcatttgaatcataactgaagcacattaatttaaatgaagcatgtctggttcagcgtggctacccaacaattttgggcagaagcaatcacatgaataatcataaaaaatgcagagactttatatatatacacttatctcttaggaaagcactttatgaaatacaacatcatcaaagttaaggtcttccaacagttgacaattctgctacattttatgcgctgaaccctttctcaacagacacccaatgtcctaaaggaatgttgacacaagcttgtgcagatacctcacccatcttttctgtctcaattccagcattgcagatgtttgcaagggaagcacgccgtttcatcccgaactgtgccagtgaaaaaaaatgcgtctcaaaggttcttaccattttcggacgcg

SEQ ID NO: 193531 - DNA, 356 bp, Gossypium hirsutum
ggggggggggcgctctagaaactgagggtatccccggctcgtgcggaatttggacgagggaaatcgttgaatgagcttcaactttccattagtatggaaaccggggcgttcatgcggccaaaacaatctcgaaatgagcgagacgctggcgacatttcttgcgtcgacgccattgttggaggaagcatggagggtgtgcaatatagcaaacataagctccccaggggcttacctggtggaacggattggaagcgtggcttatattgcgttttccggcccgcaaatgacttctgggtctgaccagaaatgcatgtatttgttggctatgaccatagactaccgtatatcaaagggta

SEQ ID NO: 193532 - DNA, 403 bp, Gossypium hirsutum
atttgaagtacactcgacagttccagcttaaagctttgttttcttttgggtgtctctctaaaaccctttcttcaatggcttacgaaggcatcctcttgggcatgggaaacccgcttcttgatatctctgctgttgttgatgaagacttcttaaagaagtatggcatcaagttgaacgatgccattctcgcagaggataagcacttgccgatgtatgaggagatgactaaaaagtatgaagtggagtatattgctggaggtgccactcaaaactctatcagagttgcccagtggatgcttcaaatcccaggcgcaactagctacatgggttgcattggtaaagataagttcggagaagaaatgaagaagaattcaaagcttgctggtgttaatgtgcattacta

SEQ ID NO: 193533 - DNA, 595 bp, Gossypium hirsutum
  unsure (1)..(595): unsure at all n locations
cactgatattctaatgagaaacttgaatcagatccatgggagctagttccatcaaatcatctcaaaagaacccatttttcacaccaaaaacacccataatttccctagctccacccagatccatcttcatataatcccaatttccttttctattaaaaacccagtttttttcttcacccaaattaagacacccagatcctcaaaacccaaaaagaaaccatgaaaaaccaatcgaaaatgttcacgatcgggctagtatcagcctggtactcttccaacataggtgtcttgttgttaaacaagtatttactaagcaattacggcttcaaatacccaatcttcttaaccatgtgtcacatgacagcttgttctttgttaagctacatcgcaattgcatggatgaagatggttccaatgcagaccattcgatctagggttcagtttttcaagatcacgactttgagtttagtcttttgcgtgtccgtgtgggtttgggaatattcctttgaagtgcgtggagttaataagtgcngggctacacacgttttatggatttcgtactgagactgaaagaagcgctactattacttgtcgg

SEQ ID NO: 193534 - DNA, 1087 bp, Gossypium hirsutum
  unsure (1)..(1087): unsure at all n locations
gcattggttcccagatttcaagttaataccgggttctttctccttttcttaatcccagatacccagatcttcaaaacaccaaagaagaccatgaaaaccaactccaaattgatcacaatcgggctagtaacagcctggtactcctacaacattggtgtattgggtgtaaacaaatatttactaagcaattatggtttcaaataccccaatctttcttaaccatgtgtcacatgacagcttgttcattgttaagctacatcgcgattgcatggatgaagatggtcccaatgcagaccattcgatctagggttcagttcttcaagatctcggctttgagtttagtcttttgtgtgtcggtggtgtttgggaatatttctttgaggtacttgccggttagtttcaatcaggctgtcggtgctacgacgccgtttttcacggcggtcttcgcttacttgatgactttgaagagggaggcttggcttacttaccttacacttgtgcctgttgttactggtgttatcattgccagtgggggtgaaccgagtttccatctatttggtttcatcatgtgcgttgcagctaccgctgcatgagctctcaagtcggttttacaaggaattttactttcttccgaaggcgagaagctgaattccatgaacctccttctctacatggcaccgatagctgttgtgtttctacttccggcagcgctcattatggaagaaaacgtggtcggtataaccattgcccttgctagagatgacatgaagatcgtttggtatctaatattcaattcagcactcgcttatttcgtgaatttgaccaactttttggtcacaaagcacactagcgccctcactttgcaggttctangaaatgcaaaaggagcagtanctgtggtggtttctattttaatttttagaaacccagtttccgtcaccggaatgctcggttatacactcacagtctttggggttatactctacagtgaagctaagaaacgaaacaaatgagactatcctgggaaaacacggtacgtacgttaccggtcatatatttcatttccttttattgcaaagaacatcgt

SEQ ID NO: 193535 - DNA, 749 bp, Gossypium hirsutum
cccacgcgtacgaccacgcgtacgcttcctctggtaaaaggctcattattctctgtttcgtatttctcttaaaactctacaatggctaaaacctttgcttgctttgtcctattagctctcatagttagttgcgcacttggtcaggctcctagctcggccccaaccaagtcaccgccgtcttctaaccctactccggctcccaaggtttctccaaccatgtctccaaccactacaccaaccgcatctccgccgtcaacatccactcccccgtcttcagcccctgaatcttcaccaacttcctctcccaccacttctcccccagctcctcccgctggttctcccgctggttctcccgctggctctcccgctggctctcccgctagcgctgtttctcccacaaactccatcagcgatacaccaggcagctctcccacttctcctacgagtgcagccgctttgaacagggtcaccgtcgccggatctgccgttgcagtcgtttttgctgctttgttgatttagatctgactttcgggggaggacaggatttggatttgatgatttttattttacgctcattgttaatttcttatttttagtagtgtatttcttttgtttttatttatttttatttatattttgacggtgatgatgattttatatcactatagcgtgttgctattttgacggttgagatttgatgatagcttactctcgattgttattataattattatgagtagttatatatt

SEQ ID NO: 193536 - DNA, 512 bp, Gossypium hirsutum
ctctgttaaaaggctctttgttctctgtttcggggggctcttaaaactctacaatggctaaaacctttgcttgctttgtcctattagctttcatagttagttgcgcacttggtcaggctcctagctcggccccaaccaattcaccgccgtcttctaaccctactccggctcccaaggtttctccaaccatgtctccaaccgctacaccaaccgcatctccgccgtcaacatccactcccccgtcttcagcccctgaatcttcaccaacttcctctcccactacttctcccccagctcctctcgctggttctcccgctggctctccccctaccgctgattctcccacgaactccatcagcgagacaccaggcagctctcccacttctcctacgagtgcagccgcttggaacagagtcaccgtcgctggatctgccgttgcagtcgtttttgctgctttgttgatttagatctgactttcgggggaggacaggatttggatttgatgattttta

SEQ ID NO: 193537 - DNA, 408 bp, Gossypium hirsutum
aacaaatgctaattttgtgcatatatatgaatgtgtagagccaggatcaattaatgcaataacagtagtatcatagagagaaaatgtacccgcaattacatcaggagaggacgcctcttcacgtgctcgagtagcatatgatcttgcaggtgctctaacatctgatctaaccgctgaatctttgaatgcacccctattacttgcccccactcctgggtttctctgcggtctacctctggtaggagcattacctgatctcgcactcattatttcttctcttttagttgtttcaggacaatcccgaataaagtgatcggatgctccacatctgaaacaaacattttcacctgctctacactctccggggtggcgtctcccacattgaggacattccggcggacgagtagg

SEQ ID NO: 193538 - DNA, 402 bp, Gossypium hirsutum
gtgtttttgaaaagaaatctcgagaacctctcttcattctctatttcctccgtgaaagctgctgttgtgctgatccaagtgataaaccagtgtaaagatgagcgttgttgggtttgattttggcaatgagagctgcattgttgctgttgcaaggcagagagggattgatgtagtgcttaatgatgaatcaaagcgtgaaactccggctattgtgtgctttggggagaagcagagatttattggtactgcaggggcggcgtcttcaatgatgaaccctaaaaattcaatttctcagattaaacggttgattggccgtcaattctcagatcctgagttgcaaagggatatcaagtcgttacccttcaatgtcactgagggccctgatggataccctctgattca

SEQ ID NO: 193539 - DNA, 858 bp, Gossypium hirsutum
  unsure (1)..(858): unsure at all n locations
gcggagcaaacgaagctggtttctggtttctttgtttccgaattttttccttcacttcaatgcctggatgttgcttcgggtgtgaagtatagagttgaaaagactcatgcagaagctgacaggattcttcggagcattgttaatgatcacaaagaaagtagagcaaaaggcagaagtgaagatgaagaccaggaagatctggttgatgttcttttaaggcttcaggaggatggcgaatttcccttaactgacaacaacgtcaaagccgtcctccttgacgttttcactgccggaagtgagacatcagcaacagccgtagaatgggcattgtcggaaatgattaaaaacccaagagttatgacaaaagcacaagcagaggtaaggcaggtgttccaaggcaaaggaaatgtggatgaaacaggcgttcatcaacttaaatatctcaagtgtgttataaaagaaaccttaagactgcaccctgttgtacctttattgattccaagagaaagtagcaagaattgtgtggttaatggatttgaaatacctgcaaagaccagagtcattgtgaatgcatgggcaatcgggagagatcctaatcattgggttgagcctgaaaagtttgagcctgaaaggtttgtcaacagttcagttgatttcatggggacaaatttcgagctcatcccatttggggcaggaaggaagatatgtccaggcatattattccgcactgcccaaatgtaaagctgccacttgcccaactgttgttccattttgattgganattccggggggaatgaagcangaagatatggacatgactganaaattcggcgtatctatgaaaaaaaaaaaaaaaat

SEQ ID NO: 193540 - DNA, 784 bp, Gossypium hirsutum
atcggttctacacttaattaaagaccttccggttaccttagcttctcagctgggcgaataagacgaaggagagtctccttcctttccatttctttttccttttccaaaaacctccgatacttcctctctccctttcctccgattccatatctctctctctttctgctagggtttgggagttagtgaagaaggggttgttatttcatggggcaacaatcgttgatctacgccttcgtggcacgaggcaccgtggtcttagccgactatacggagttcaccggaaacttcaccggcatagcttctcagtgtctccagaaacttccttcttcaaacaacacgttcacttacaactgcgatggccatacctttaactatctcgtcgataacggcttcacttattgtgtggttgctattgaatccgttggcagacaggttcctatggcatatcttgagagaattatataggatttcatcaagagatatggcagatgaatagctgcatctgcccctgcgaacagcctgaccaagagtttggcctaaattactgagatatgcatatagctttgatctcctgagagatcattgaatacaagtgaagctcatattataattaatgagtttgttgaaacatttgaaggtacatacctgttataaattgtctctcgtggtatactattactttatctcataccatcttctatctagtaccatatgggcattatggtacatatcattatatcatgataccgtcttgactcattctatataatatagctaagttata

SEQ ID NO: 193541 - DNA, 1062 bp, Gossypium hirsutum
ccctctcgtccgcccacgcgtccgaaggggaaaggaaacaactctccttccttccgacgataaaaacccttccccttcctcttgctcttcatttcaattcaatcttcctgagtcaaaggactgtgatggggcagcaatcgctgatctacgccttcgtggcacgaggcaccgtcgttttagccgactacactgagttctccggcaacttcacctccattgcttctcagtgcctccagaaacttcctgcttccaacaacaagttcacttacaactgcgacggccatacctttaactatctcgttgataacggctttacttactgtgtggttgctgttgaatccgctgggcgacaggtgccaattgcctttcttgagagaattaaggaggattttaccaagagatatggtggaggaaaagctgcatctgctcctgcaaacagcctgagcaaggagtttgggcctaagctaaaggagcatatggaatattgcattgatcatccagaggagattagtaagattgccaaagtgaaagctcaagtttcagaagtcaaaggagtaatgatggaaaatattgagaaggttctggaccgtggcgggagaattgagcttctggtggatagaacggaaaatcttcgctctcaggcacaagatttcaggcagcagggaacccggatgaggagaaagatgtgggtgcggaacatgaaggtgaagctgagagttttcggaatcctgatcgcattgattctcattatcgtgctgtccatttgcggtggcttccattgttgaagaagaatacgctcatctgctcggctatggactctatttcctcttcatggatcagaggtattgttgcagtcgcacaactgtattgatgctcgtgtgcctatacatttcttgattacacgttcttttttattttctggtgtagcctaaatcacaagactgtgtgctgtatattacagtttggattcttttgattgcattaagttcattgatgtgtggaaattcattatccgtctttttgaaactggattttgatatataaaaattgataattataatt

SEQ ID NO: 193542 - DNA, 450 bp, Gossypium hirsutum
gttctcagtcatggagattgggtgccactcttagcacaggtgaatgaacactcaatgttgtcaatgctgagaaatgcaacctgcacattatcaaatttctgcaggggcacgccccagcctgcatgggagcaggtgacgcctgcccttcctgcgcttgaacgtctcattcattcaaatgatgaggaagttctcactgatgcctgttgggctctctcgtacctgtctgatggtacaaatgacaaaattcaagctgtgattcaggcaggagtttgcccacgccttgtcgagctcctgctcaatccatctccttcagtgctcattcctgctcttcgtactgttggaaatattgtgactggagatgatttacagactcagtgtattattgatcatggtgcattagcatgccttatgaacctattgaccaataattataaaaagagtataaagaag

SEQ ID NO: 193543 - DNA, 405 bp, Gossypium hirsutum
ctgattttgctctgtcatgatttgaatttttgttcaatgttccttttactttccttcaaatctctccaatctccaccgctacttccgccacttcggccaccgccgcgaatttccgatttataatgtgtttgtattaattggtacctggtacgatttgggaatatttgagttagggttttcgatttatcttgatttatttgtaaaggaaaagggaaaaaggaaaagaaaataaaagatggacaagtacgagctggtgaaagacataggatctgggaactccggcgtagcgaggttgatgcgtaacaaagaaaccaaagaactcgtcaccatgtaatatatcgaccgtggacaaaagattgatgagaatgtggcaagggagattataaatcatatatcactacgtca

SEQ ID NO: 193544 - DNA, 790 bp, Gossypium hirsutum
tttcacttttacaattcggagaggggttgggacacctgattgtgtcagtgtcaactatgatgattttgttaatgatgtagaagtgggtgacatgcttcttgttgatggtggtatgatgtcattagtggtgaagtctaagacagaggattcagtgaagtgtgaagtagttgatggtggtgagctcaagtctaggaggcatttaaatgtccgaggaaaaagtgctacactgccttctattactgaaaaggactgggatgacataaaatttggagtagacaacaaagtcgacttttatgctgtttcgtttgttaaagatgctcaggtggttcatgagttgaagaattatctgcagagttgcgatgcagacattcatgttatcgttaaaattgaaagtgcagactctattccaaatttgcattcaattataacagcatcggatggggcaatggttgcaagaggagatcttggtgcagagcttcctatcgaggaggttcctttgttgcaggaagagataattagaacatgtcgaagcatggggaaagctgttattgtggcaaccaatatgcttgaaagcatgattgttcatccaacaccaactaaagcagaggtatctgacattgccattgctgttcgagagggtgctgatgctgtcatgctttctggagaaacagctcatggaaagttcccattgaaagctgttaaagtgatgcatacagttgctctacgaactgaagcaaccatatctggtggtgaaatgccacctaatctcggtcaagcttttaagaaccat

SEQ ID NO: 193545 - DNA, 479 bp, Gossypium hirsutum
atcttcccccccccccaaaaaaaaaaaaaactatgtcccctctaaattaacaataagatatgtctgaagcaaagctgcagcgttctcatgttccaaaatttggtgactgggacaatggtgatcgaccatatacaacctactttgaaaatgctcgcaaagagaaagctggcataaggatgaaccctaatgaccctgaggagaatcctgaggccctcatgtatacgaggggaggcccggaaagcaactacgatggccggtccgtgccagtcacggccgataaacaccatcggaatgctgctaataaagatggtccttcttatgatcatcaaaagagcgcaagaaggcaacgggacacagcactggaatccgaaaacaacaccggatcggaccgttcgattctgcattcgagtcatcgacgtcgaaactcgggtcaaaagaatagtcggcctgggggaagtgccttctctgcatctgtctca

SEQ ID NO: 193546 - DNA, 517 bp, Gossypium hirsutum
cccacgcgtccgcccacgcgtccgcccacgcgtccgcccacgcgtccgcccacgcgtgcgggctgctctcactgaattcttctcccacctctacaccgtgaccgtcgtcttcttcaccctcttactcctcgaagttgctatcctcatcaggtcccttaccggcggcctttccgattccgagaaacgcctcatcacaactacccagtacctgaaattcattgaagaaaagaacccaacaatcatatactccacaagatcatcatccagggtggatctgtcatcgaacgagtgcaccgtgtgtttatctgagctagaagaaggtgagaaggtgaggaaactgaaatgtaaacacactttccacaaggattgcctcgatagatggctccaacagtattgggcaacttgcccactttgtaggaccaaagtgttgccaaataaggttggggttaatattcacaggctccaaaatcagtgtagagttgatggaagtgatgaagagaagatttttttattatcc

SEQ ID NO: 193547 - DNA, 386 bp, Gossypium hirsutum
cccacgcgtccggaaggaatctttgctatatctttgtccagttttactgtgcctcgccgaagaaaaagtcaattgaatcctcttactttactcttatgaagagttgagtaaaatttagattattttaccaaacccccaacttccacaacagttttcttcaatcacatctaaatctttttctctttggtgatctaatctttggctgaaaattttgtgaagatgagtgaggttttcgaaggttatgaacgacagtactgcgaacttctctgccaatctttcccgaaaatgcaattctgcttctgctattacagattcagaacagaagatacagatgttttcggagatcaattctgggatcgatgaggctgatgtcctgattcggaaaa

SEQ ID NO: 193548 - DNA, 978 bp, Gossypium hirsutum
gtcacacccgaaagcgcaaaaaaaaaaaaaaaaaggaaaagaggaaaaacgttctctcccacgaaacccaccattactgcaaatggcgacgacggcccccgacaacctgagccgcgatcagtacgtttacttagcgaagctatccgagcaagctgagcgctatgaggagatggttcagttcatgcaaaaactggtcctcggctcaaccccagccgctgaattaactgtcgaggaaaggaaccttctctccgtcgcctacaaaaacgtcatcggatctctacgtgccgcgtggagaatcgtttcttccatcgagcagaaagaagaaggtcgaaagaacgaggaacatgttgtgctggtcaaggagtacagatccaaggttgaatccgagttgtcggatgtttgcgctagtatcttgactttgttggactcgaatctgatcccatctgctgctgcgagtgagtcgaaggttttctatttgaagatgaaaggggattatcatcggtatttagcagagtttaaggttggtgatgagaggaaagctgctgctgaggatactatgctgtcttacaaggctgctcaggatatcgcactgacggatctagcaccaacgcacccgatcaggctgggacttgcgctgaattactcggtgttctactatgagattctgaatcagtccgataaggcttgtagcatggctaaacaggcatttgaggaagccattgctgagcttgacacgctgggagaagagtcttacaaggacagcactcttattatgcaactcctaagggataaccttactctctggacttcggatgttcaggaccagttagacgagccatagaaggtggtgtaacccgtgttggtcctagtcttcttccggaggaggtgggctttgaatgtcatttgtttatgttgattaaagtgtgtaatttaaaatgggaagtaatccatggcatgatgctatacttctacccccga

SEQ ID NO: 193549 - DNA, 633 bp, Gossypium hirsutum
  unsure (1)..(633): unsure at all n locations
cctcacgcgtccggccacgcgtccgaaaaatattcctctctttctaaccttcggaagctcaccaatttctgcaaaaatggcgacgatggtgcctgacaacctaagccgtgaccagtacgtttatttagccaagttagcggaacaagccgaacgctacgaggagatggttcaattcatgcaaaagctcgtcctcggctctactcctgcttccgagctcaccgtcgaggaacggaaccttctctcggtcgcttacaaaaacgtaatcggatctctacgcgccgcgtggaggatcgtttcttctatcgagcagaaagaagaaggtcggaagaacgaggaacatgtggtgctcgtcaaggagtatagatcgaaggttgaatctgagttgtcggatgtttgcgctagtatcttgactttgttggactcgaatctgatcccatctgctgctgcgagtgaatcgaaggtnttctatttgaagatgaaaggggattatcatcggtatntagcagagtttaaggttggtgatgaaaaganagctgctgctgaggatactatgctgtcttacaaggctgctcaggatatcgcactgacggatctagcaccaacgcacccgatcaggctgggacttgcgctgat

SEQ ID NO: 193550 - DNA, 555 bp, Gossypium hirsutum
cacgcgtccgcccacgcgtagcggtccacttcacctctcttcctcctttctgaatttttcagcaattattttcccttagcttctcaaagtaaaagaaaacaccattaaacaaatagtaaggcaagccaaagcaaaccaaatcaatccgacttttctcatcaggtgaacaactgataaaaccagaatttattttattcaaatatggaaggagagaacctagcaagtactgaaatcccagtgaaggaagctcttaaggatactgaaaacattgccgagcctgttaatgtcggaaaggaaggaaacaaagacgaagaagaaaccgccttggatggagaattcattaaagtagagaaggaagcactagatatgaaggacggttcaaatgtcgctaagccctcacccaaccagggcgatgagtcaactaccatcgaaagaagcttaagcaatccaggtagagaactacttgaagcccaagaaaagatgaaggaactcgagcttgaattggaaagagtgaccggagcattaaaggattttgaatcagaaaatagcagactg

SEQ ID NO: 193551 - DNA, 755 bp, Gossypium hirsutum
  unsure (1)..(755): unsure at all n locations
gtcaaacaaacagccagaagcagccagccagccctcgtttccctcattttcctcttcattttctcgggaaaaaagaagcatgggaaaaggtcctggtctctactccgatatcggcaaaaaggctagagatcttctttacaaggattaccaggctgaccacaagttcactgtcactacttacacttccaatggagtcgcaatcacatcaaccgggactaagaaaggtgaattgcttttggctgatgtaaatactcagctcaagaacaagaacatcacaactgatgtgaaattcgactccagatcgaatcttttcaccactgtcactattgatgaacctgcaccaggattgaagaccatctttagtttcgttgttcctgatcaaaagtctggcaaggtggaactgcaataccggcatgaatatgctggcataagcactggcattggattgactgcaaagcctcttgttagcttttctggtgttattggaaacgattctgtctctgttgggactgatctctcatttgacactgccagtggaaactttatcaaactgaatgctgggttaaatatcacccattctgacctcattgcttccctaacattaaatgataaaggtgacactcttaatgcttcctactaccacattgttagcccattgacaaacacancggttggtgcggagctgaaccatancttttcaagtaatgagaacactctcacgattggtacacagcatgctcttgacccgttgaccc

SEQ ID NO: 193552 - DNA, 425 bp, Gossypium hirsutum
ctcgccttcaatggcttctaatgaccgtggctttagtgggatgtcaagtaataggaaagttggctataatggtgagaataatgtgggttctgctatggaattatggcaagcttttttcgccaatcctactgaatggtgggataataggaaaaataagaggaacccaagatatccagattttaagcacaaggatactggagaagctctatggattgaaggtaggaatactccccattgggtgagatcccagttggagatactagattctagaatgagctctctgcaagatgaggatgaaaggatgttttcttcgatggccagtgacaatctcctgcctttttaatgggttaaaccagtgtgtttatgatgttactataaggtgattgcacttggcaagggccctgcattttggatgcaaaaagttt

SEQ ID NO: 193553 - DNA, 432 bp, Gossypium hirsutum
cagtactacatcgtagtgatttgttatatttactttacccgtgttgtggtttatgccttggagacgattacttcctataagtatctttggaccgctgtgagtggctggggagttggccacacgttgcattttatgtgtttacagggttcaaattcaagccagaggctcataacccatactttgtgatcgatgatgaggaggaagaagctgcagcagagcagctgaagcttgaagatgagtttgaattgtgatagtattcattgaggaaaagaaatggagaatgattgaagaaggttcaggttgtcaaactggggcaattgaggtagaagccttatcatcttaatgggtaccatcgaaaaaaaaattgttatatttgatgcttgtttgtacttatttgtgccccttttgatcctactttcccttttttttata

SEQ ID NO: 193554 - DNA, 565 bp, Gossypium hirsutum
aactcttctcaccttgttctcctcgctttcaagctgtctctctattgaagcagtgcaatgggtacgaaaagcaagactcagggcttcgcttttctgctactggtatccactgctcattccttctatctccctggtgttgcacctcgtgatttacaaaggggtgatcctctttatgtaaaagtgaataaattatcctctacgaagacacaacttccatatgactattactacttgaaatattgtaagccatccaagattgtgaacaatgctgagaatttgggggaggtactacgaggtgaccgcatcgagaactccgtctacacctttgaaatgagggaggatcagccttgcaaagtagtctgtcgaataaaactcgatgctgattctgccaagaatttcaaggaaaaaattgatgatgaatatcgagttaatatgatacttgataaccttccagttgcggttcgtagacaaaggagagatggaagtcaatcaacaacatatgaacatggtttccgtgttgggttcaaagggaattatgccgggagcaaggaagagaagtatttca

SEQ ID NO: 193555 - DNA, 975 bp, Gossypium hirsutum
ggcaatgagaatgtggttcctaagtaatccaccaggggaaagccaccatacaggtccagaacattgaagaatttacatggttaaactcaagctacagtccagttcttaagcagttaggttctccttccatgattgattattacttcagggcacatcgggctagttctgattcaaatctgaagttccggaacccaaagtatttgtccatactgaaccatcttcggttttatctaccagagatcttcccaaaactaaataaagtgctgttcctagatgatgatatagtagtccagaaggaccttactggcctttggtcccttgatttgaagggaaacgtcaatggtgctgttgaaacttgtggggaaagcttccatcggtttgatcggtatctcaacttctcaaatcccctgatctcaaagaactttgacccacatgcttgtggatgggcatatggaatgaatatttttgatctggcggaatggaggcggcaaagcatcacggaggtataccacagatggcagaggctgaatcgtgacaggcaattgtggaagttgggaaccctgcctcctggtctcataacattttggaaacgcacatactcccttgacaaatcttggcatgtgctggggcttggctacaatcctaatgtaaaccaaagggagatccaccgggctgctgttatacactataatggcaacttgaaaccatggctggagataggtatacccaaatttaaaatctattgggccaagtatgtaaattatgagacagtgtacttgcgagagtgcaacatcaatccatagaaagccttgatgggatattaaagtgtggtggtgagccatggtttacccgtgcattttgacatcaatttgtagttatttcgttaagaggtagcgggttgatattcatcatgccttgtatacattgtcaattttgtttttgattttttggttcttaccggaatgtgttgatttc

SEQ ID NO: 193556 - DNA, 394 bp, Gossypium hirsutum
tgtccatctgctgtattaccagtgttggactcactggtggaccctcttcaaaagacaattaatttcaagcccaaacaagatgctgtcaaacaggaagtagaccgtaatgaagatatgatccgtagtgctcttcgtgcaatcgcatccttgaaccgaataagtgggggagatagcagtatgaagttgaagaatctcatgagtgaaatatcgaaatctccaacattatgggacaagtattactccatccggaacgagtgaggtaatcttctaattgtgtaaagtaggtaaaggtttgatcggattgcattgcgatccgaatccaggggaacattgttgttgtgaaagatgataattgttggatattgagttggtttcatgtatgattgcatcctgc

SEQ ID NO: 193557 - DNA, 452 bp, Gossypium hirsutum
tcgtccacgcgttcgtccacgcgttcgtccacgcgttcgcaaataccatggtctaataaggaaccggtcggattcgttgataattttttgaaagatttcttcgaaaaggtttcattaactcctcatttatatcgagtagaccttgttgttgcgagaattcttaattcatgagttgtagggagggacttatgtcaccacaaacagagactaaagcaagtgttggattcaaagctggtgttaaagagtataaattgacttattatactcctgaatatgaagtcaaagatactgatatcttggcagccttccgagtaactcctcaacccggagttccgcctgaggaagcaggggccgcggtagctgctgaatcttctactggtacatggacaaccgtgtggaccgatgggcttaccagccttgatcgttacaaagggcgatgctacgacattgag

SEQ ID NO: 193558 - DNA, 575 bp, Gossypium hirsutum
cccacgcgtccgatgaggtagatgctagggattagggagggggcttagaggtggaagaactggggtaccttctctttctttttatgctgctgattcatacgctgcttcttcttttctctctcttgagataaaccagatttaataggctctagaagattcgtcggtcactcttcccggtcggtcaccgaatcgtgatcgctggagactagacgagttagagtgtttctttatctttgtttgttagtgtaagaggaaagtgtgcgtgtttggattgataagaggaaaagagaaaatgaatgggaatagcaatggatttgggagtgccggtgcggtggcggcgactgagtttttaaggagacgtcatcgacatgagactggagagaatcagtgtagttctgccgtcgtcaagcggatcaaagctcctgttcctctcgtttggtctctggtgaggcgatttgaccagcctcaaaagtataaaccctttgtcagccggtgtgttgcacaaggaagccttgaaattgggagtcttagagaagttgatgtcaagtcagggctaccagctactacaagcactg

SEQ ID NO: 193559 - DNA, 567 bp, Gossypium hirsutum
cgaatctttatcgaattaggacactttgttaccccatttccgtttgaatcaatcaggttttttgtcatggaagataagcagtcggttgcaacactcatagactcaacaactactaagatacagcagcttcagaaagcatttgctgaacttgaaagtcatcgtgctgtaacacttaatctgaaatggaaagaacttgaggaacatttccatgggcttgagaagtccttgaagagacgcttccatgaattagaagaccaagaaaaggagtttgagacaaaaactaggaaatctcgagaaatgttgaagaagcgtgaagctgctgttgttgctaaagaacaagcttcactagtgaggttacaagaaaagagagatgctgctgtttttgccattagtaatgctctagaaaagcataggaaagtatcacctgaggagcctgctgatagctgtgatggagacagtggtgaactgtcagttgaggagaaaccccctgattctgtagcttccgaaagtaactcagaggatataaaatgttcttctgaaaatggaaatttcggggtgaaatcttat

SEQ ID NO: 193560 - DNA, 905 bp, Gossypium hirsutum
ccaccgcatgcttcttgcaccaccatgcactcacctccgcacccagatcatcatcgactccacccttcacatcccagcgccaagttgcaatcgtcaagtcaaatcaactactggcttgcacatctcagaaacaggcagtccaagaaaatgatgattcgggaagcaacgctgtgatctcccgtacgttggctctcactgtactcattggtgctgccgctgttggctctaaggtttctcctgctgatgctgcctatggtgaagctgcaaatgtatttggaaagccaaaaacaaacacagagttcatcccatacaatggggaagggttcaagctgtcaataccatcaaaatggaacccaagcaaagaggttgagtacccaggtcaagtcctgagatacgaggacaacttcgactccaccaccaatgttgctgtcctggtcactcctactgataagaagtccattactgacttcggttcccctgaaaatttcctctctaaggtggactatctgcttggaaaacaagcatactctggcttaactgatgctgagggtgggtttgactcaaatgcagtggcaactgcaaacatattggagacttcaactcctgtgatcggagggaaacagtactacttcttgtcggtgttgacgagaactgctgatggagatgaaggtggcaagcaccaactaattacagccaccgtaaacaatggtaaactttacatttgcaaagcacaagctggggacaagcggtggtttaaaggagctagaaagtttgtggagagtgctgcaaattccttcaagtgtgcttagttaaaagtcttacttgttaactagagaataatttcatgtaaatcttgttagaaaatatctgatgttggacctaaaaaaaaaaaaaaaaagggcggc

SEQ ID NO: 193561 - DNA, 926 bp, Gossypium hirsutum
cccacgcgtccgattttatttttttcaaccagcctagagagcactagcattagcactagcactagtagcaaccatggcctccgccgcatgtttcttgcaccaccacgcactcacaaccaatggcagatcatcatcattatcgccgtcgctgcgccaggtttcaaacatgaagcctacccagcaggtggtgtgcaaggctcaaaagcaggaagatgatggaagccttgtgtcccgtaggttggctctcactgtactcattggtgctgccgctgttggctctaaggtttctcctgctgatgctgcctatggtgaagctgcaaatgtatttggaaagccaaaaacagacacagacttcatgccatacagtggggatggattcaagctctcgataccatcgaaatggaacccaagcaaagaggtggagttcccaggtcaagtgctgaggtacgaggacaacttcgacaccaccagcaatttgagcgtcatgatcactcccaccgacaagaagtccatcaccgacaacagttcccctgaggagttcctctcttcggtggatatatcttcttggaaaacatgcggtctttggtaaaaccgattctgagggtggttttgactccggtgcggtggcgaccgcaaacatattggagagttcaagttcaacagtcggcgggaagccgtactacttcttgtcagtgttgacaagaaccgccgactgagacgaaggtgggaagcaccagctaataacagccaccgtctacaacggcaagctttacatttgcaaggcacaatctgtggacaagaggtggttcaagggagctagaaagtttgtggagagtgctgctagttccttcagtggtgcttaaacaaagcttatacatggaagagggattttattgaaacttgtggatgttgaatattaacttctg

SEQ ID NO: 193562 - DNA, 527 bp, Gossypium hirsutum
gttctagatcgcgggcggtcgcccttttggtactcttttagttgaactctggatatggcatgtataggactaccctttgttggttttttcaagtactttttgtgatgtatgtgtgtacagacatgcgaaaatggctcgtagaagtggagtatggcgtggctatgaaaattgtgtcccaaatggtgttgctaaggagaagaagagctggtttggctggaataagaaaggctcaaagaacagtgatgatcctgatgattcaaagattggaaagttctcaaaatcggctcctgaaggtagcaatcagagacaagttgataatcatagatcgtcatctgaatttgcgaaggaagatgctgccatggcaagaagcgtaaagataaaagcagcaagaagaagaagaagaaagggggcaatagtgatgataaacatgaaagtgagtataagaagggtttgagacctgttttgtggttaacaccagatttccctttaaagacagaagaactcctgcctttacttgacatattagc

SEQ ID NO: 193563 - DNA, 708 bp, Gossypium hirsutum
accctacttactaaccctttaactacctatcttcttcacactctcttcgtgctcccgccgtatttcacttcccctctcttctctcttcttttccttccttccttccttccttctgtcaacaccactctctaatggcttcccttgctggttcatccatctctatgcaacctcgccagaccctggctacaagcagggtttctgggttgaaattggtttcatttgtgaaccggggaagaagcagcctctcctttaggctgcgtccggatcgcttgcggatttcatgtgctgccaaaccagagacagtggataaggtatgtgaaatagtaaggaaacaactagccctaccaagtgacaaagcagtcacaggtgaatcaaaatttgctgaacttggagccgattctcttgatacggtcgagattgtgatggggcttgaggaagagtttggaatcactgtggaagaggacaatgcccaaagcatatcaactgttcacgatgcagccgagcttatcgacaagctctgcggcgagaaaagtgcctagaaacaaaccaaggacctaagtttgggattcatttgccaatttatttgtgaactcatcatgcctatttatttgttcaaatctagtaaaactcataaagtggttggtattttagttaaattatggatttaacgcttttgtgttgtaagtcaagaaaatactatttgatctt

SEQ ID NO: 193564 - DNA, 1026 bp, Gossypium hirsutum
  unsure (1)..(1026): unsure at all n locations
cccacgcgtccgcccacgcgtccgcccacgcgtccgcccacgcgtccgcaccaacaaaatcagttgcttcacaatggcctctacaaccatggctctttcttccccatcattcgccggtaaggcagtgaagttctccccttccacccctgaaatccggggaactggccgtgtttccatgaggaaaaccaccaagcctgttccttctggtagcccatggtacggtcctgaccgagttttgtacttgggtccactttccggtgagccaccatcttacttgaccggtgagttccctggtgactatggttgggacactgctggactctcagctgatcccgagacctttgctaggaaccgtgagctcgaagtcattcactgcagatgggccatgttgggagctcttgggtgtgttttccctgagctgttggctaggaacggtgtcaagttcggtgaagctgtatggttcaaggccgggtctcaaatcttcagtgagggtggacttgactacttgggtaacccaagcttgatccatgctcaaagcattttggccatctgggcttgccaagttatcttgatgggagccgtcgagggctaccgtattgccggtggaccactcggtgaagtgactgacccattgtacccaggtggcagctttgacccattgggtcttgctgatgacccagaggcattcgctgagctcaaggtgaaagagatcaagaacggtaggttggctatgttctcaatgttcgggttcttcgttcaggccatcgtgaccggaaagggaccattggagaacttggctgaccaccttgctgacccagtcaacaacaatgcttgggcctatgccaccaactttgtccccggaaagtgaacttagagagtgagaagggatttgtcttgtttatgtttttatttgttggtgtgaatttaaatttgttgcacaatcaatgaaagtataatgtgaattttgtgtgctcaaaaaatataaaactatgtatatgtatttatacttaaannnnnnnnnnnnnn

SEQ ID NO: 193565 - DNA, 779 bp, Gossypium hirsutum
cggacgcgtgggcggacgcgtgggaaaaaattcacctcatgctctcattgatttgcaacaggtttacatgacatcaacagagaaaacttataccacaaactcccatcacccgagatcatctttccccttcagaatggcggctgcaaccatggctctctcttccccatctttcgccggaaaggccgtcaagctctctccttccgcccctaaaatccaaggcaatggccgtgtttccatgaggaaaaccgctaccaaggctgctccctctggaagtccatggtacggtcctgaccgagtcttgtacttgggtccactatctggtgagcctccatcttacttgaccggagaattccctggtgactacggttgggacactgctggactctcggcggacccagagacatttgccaggaaccgtgagctcgaagtcatccactgtaggtgggctatgttgggtgctcttgggtgtgttttccctgagcttttggctaggaatggagtcaaattcggtgaggctgtgtggttcaaggccggatctcaaatcttcactgagggtggacttgactacttgggttacccaagcttgatccatgctcaaagcattttggccatctgggctcgccaagttatctttattggagccaacattggctaccgtattgcctgtggaccacttactttattttctgaccaaattttttctttttgcatcttttatccattgggggcttggttttttactttatttacttttttttcattctcaacgattattttta

SEQ ID NO: 193566 - DNA, 446 bp, Gossypium hirsutum
gagcacacaaaattcacattctgctttcattgattgtgcaacaaatttacattcacaccaacaaaatcagttgcttcacaatggcctctacaaccatggctctttcttccccatcattcgccggtaaggcagtgaagttctccccttccacccctgaaatccggggaactggccgtgtttccatgaggaaaaccaccaagcctgttccttctggtagcccatggtacggtcctgaccgagttttgtacttgggtccactttccggtgagccaccatcttacttgaccggtgagttccctggtgactatggttgggacactgctggactctcaaatcttcagtgagggtggacttgactacttgggtaacccaagcttgatccatgctcaaagcattttggccatctgggcttgccaagttatcttgatgggagccgtcgagggtac

SEQ ID NO: 193567 - DNA, 893 bp, Gossypium hirsutum
cccggtcggacccacccttccgaaaaaatttaaaaaaaaaaccccaccttttttcctttcaatttgcacaacacaagggggcatcgtatcgacatctaaaactcaaaagagtctgtcatttcccttacttcctcaaaccagaagccatggccagcatgataatggcttcctcaaagcctgtaatctccattgctgcttcatcatccttcttttccaaacccaaactcaaacaaatcccacaactttccctcccaaaactccccaccccaaagttcttgaaaacccaacaaatcccctcactctcctccaccactctcaaatctatctccctcttcacagtcaccactttatcctttgccccaccttctcttgctgcagaaatagaaaaggccgctcttttcgatttcaacttaaccctccccatcatgatggtccagttcttgttcctcatgtttgctcttgacaaggtctactttaccccactcgggaaattcatggatgagagagatgctgccataaaggagaaacttgccagtgtgaaggacacgtctgaggaagtgaagcaacttgaagaacaagcagcggctattatgagagctgcaagggctgagattgcagccgctttgaacaagatgaagaaggagactcagttggaagttgaggagaaactggctgaagggaggaagaaagttgaggttgaattgcaggaggctttggctaatttggagaatcaaaaagaagagactatcaagtcacttgattcccagattgctgctctcagtcaggatattgtcaagaaggtgcttcctctctaaaatcccacttcatatttggtttaattttgagtcaataatgtttatatagttttgaaaccatctgtgtatttaatatga

SEQ ID NO: 193568 - DNA, 442 bp, Gossypium hirsutum
cttttcctccgactttcattccatggattgtgctttatctcctcagatcttcataaacacaagatttgctaggtgtgtggccatcagactaggagttgaaatcaggctatacagaaaaagatggttgagttctacttgctgtgctgtgggggtgtctgagatgggtgctggcaacctgtttgatgatgggtccttgaaagggtctgaaaatgggtcattgttgggtgcacttggtgactcagttttaccaccatttggaacagtggatgctgaaattaccccagaaaccgttgatttctttgttagtgatgcagaaggtgatcctgactgcccttctaaaggattctcttccattgaccaagcattgaatacaatacgccaaggaaagtttgtgattgttgtatatgatgaaaatgatgattttaaagaacccttatcattg

SEQ ID NO: 193569 - DNA, 822 bp, Gossypium hirsutum
  unsure (1)..(822): unsure at all n locations
cggacgcgtgggcggacgcgtgggccacgcgtccgcccacgcgtccgcccacgcgtccggtgagactcttttgtataactgtagcatacactactagtacccactactagcaatggcttcctcaatgatctcatcggctaccattgccactgcctctccggcacaggctaacatggtcgcccctttcaccggcctcaagtctgcctctgctttcccagtcaccaggaaggccaacaacgacattacttctctcgcaagcaatggcggcagagtgcaatgcatgcaggtgtggcctcctactgggaagaagaagttcgagactctctcatacctccccgatcttacacccgtgcagttggctaaggaagtagattaccttcttcgctcaaaatgggttccttgcttggaattcgaattagaggagggattcgtgcaccgtaagtactcgagcttacccacgtactacgatggacgctactggaccatgtggaagctgcctatgttcgggtgcaccgactcggctcaggtattgaaggagcttgaggaatgcaagaaggaataccccaatgcattcattagaatcattggcttcgacaacgtgcgtcaagtgcagtgcattagtttcattgcctacaagcctccaggcttctaagctttttattaactttgtctctccatttgtttgaatttgtactcagaaaaaccatgttctttacttttgcttttctctttctttgagttatttattggcctttgtttctcgatttccgggttttaatcctgagaactaatgaataaaaagttggttttcttcccnnnnna

SEQ ID NO: 193570 - DNA, 901 bp, Gossypium hirsutum
acggaccgggaatgcccgcgtccgcccacgcgtccgcccacgcgtccgctcacgcgtcggttcagctatagcatacactactagtacccactactagcaatggcttcctcaatgatctcatcggctaccattgccactgcctctccggcacaggctaacatggtcgctcctttcaccggcctcaagtctgcctctgctttcccagtcaccaggaaggccaacaacgacattacttctctcgcaagcaatggcggcagagtgcaatgcatgcaggtgtggcctcctactggaaagaagaagttcgagactctctcatacctccccgatcttacacccgtgcagttggctaaggaagtagattaccttcttcgctcaaaatgggttccttgcttggaattcgaattagaggagggattcgtgcaccgtaagtactcgagcttacccacgtactacgatggacgctactggaccatgtggaaactgcccatgtttgggtgcactgactcggctcaggtgttggaggagcttgagaattgcaagaaggaataccccaatgcattcattagaatcattgggttcgacaacgttcgtcaagtgcagtgcattagtttcattgcctacaagcctaaaggctactaagttgtttacttccctcctaggaattccatttgtttcaaagttgtacttaaattaagcccctcaaaccccccccccctttttctttttcttttttaattgaggtatttggcttggggtctttctctttgttttgttttggatttccaatggaacggctgagaactaatgaataaaaaggtagtttcttgccatatttcttggaaaaaaaataaaaaaaaaaaaaaaaaaaaaaagggcggcgctcgcgatctcggacgcgtgg

SEQ ID NO: 193571 - DNA, 705 bp, Gossypium hirsutum
  unsure (1)..(705): unsure at all n locations
cttcgaaattcctttggggggcgcgtgcgcaacgcgttcaaccactcattttcttatttttccagccatggcggcagaatgcaatgcatgcacgtgtggcctcctactggaaagaagaaattcgagactctctcatacctccccgatcttacacccgtgcagttggctaaagaagtagattaccttcttcgctcaaaatgggttccttgcttggaattcgaattagaggagggattcgtgcaccgtacgttagctcgcgagcctacccacgtactacgatggacgctactggaccatgtggaagctgcccatgttcgggtgcaccgactcggctcaggtgttggaggagcttgaggaatgcaagaaggcataccccaatgcattcattagaatcattggcttcgacaacgtgcgtcaagtgcagtgcattagtttcattgcctacaagcctccaggcttctaagctttttattaactttgtctctccatttgtttgaatttgtactcagaaaaaatcatgttctttacttttgcttttccttttctttgagttattggcctttgtttctcgatttccgggttttaatcctgagaactaatgaataaaaagttggttttcttcccaaaaaaaaaaattttttaaaaaattaattatatataaaatatcatttaaatttattanttatattttttttattcttaata

SEQ ID NO: 193572 - DNA, 555 bp, Gossypium hirsutum
cggacgcgtgggtaaattattagggttatttttaaaattttcatatttgataaaggtgtttatggaaaccctttctcctaaatcaacctcaaacttttttaaccaaaggatgttatacccaaactccatcattataaatgggaccttggaccggcgggaaataaacgggagatatagttagctatagcatacactactagtacccactactagcaatggcttcctcaatgatctcatcggctaccattgccactgcctctccggcacaggctaacatggtcgctcctttcaccggcctcaagtctgcctctgctttcccagtcaccaggaaggccaacaacgacattacttctctcgcaagcaatggcggcagagtgcaatgcatgcaggtgtggcctcctactgggaagaagaagttcgagactctctcatacctccccgatcttacacccgtgcagttggctaaggaagtagattaccttcttcgctcaaaatgggttccttgcttggaattcgatttgggggagggatttcgtgcaccgtaagtactcgagc

SEQ ID NO: 193573 - DNA, 660 bp, Gossypium hirsutum
cggacgcgtgggcggacgcgtgggcggacgcgtgggctcgcaagcaatggcggcagagtgcaatgcatgcaggtgtggcctcctactggaaagaagaagttcgagactctctcatacctccccgatcttacacccgtgcagttggctaaggaagtggattaccttcttcgctcaaaatgggttccttgcttggaattcgaattagaggagggattcgtgcaccgtaaatactcgagcctacccacgtactacgatggacgctactggaccatgtggaagctgcctatgttcgggtgcaccgactcggctcacgtattgaaggagcttgaggaatgcccgtccgaattcccccatggcattcattagtttcatgggcttcgacaacgtgcgtcaagtgcagtgcattagtttcattgcctacaagcctccaggcttttaagtttttaataaacttggcctttcaattggttggaattggacctaaaaaaaccaaggtctttacacttggtttctctctctctgagagattgggctctgtgtctcgagatctgggggttaatcctttttggattttcattggaagaaaggctgtgaactaatgtataaaagttggttttcttcccaatttccttcctaacaaaaaaggtgttttttatgaac

SEQ ID NO: 193574 - DNA, 596 bp, Gossypium hirsutum
  unsure (1)..(596): unsure at all n locations
ttgtacgctcctttctgacgccgggctaacgcgtgtgcggacgcgtgggcggacgcgtgggagctatagcatacactactagtacccactactagcaatggcttcctcaatgatctcatcggctaccattgccactgcctcttcggcacaggccaacatggtcgcccccttcaccggcctcaagtctgcctctgctgtcccagtcaccaggaaggccaacaacgacatcacttctctcgcaagcaatggctgcgagagtgcaatgcatgcaggtacttggtgatgcataaatacaacttaaattaccccaattgtttgaacacaacaaattacataaattgaatcaaatatatatcttggcttttgagtataggtgtggcctcctcttgggaagaagaagttcgagacactctcatacctgcccgatcttacacccgtacagttggctaaggaagtagattaccttcttcgctctaaatggattccttgcttggaattcgaattagaggtgttttcgagctctaaattattccattccaacactttatttttttagtgggatatttgatttgattaaatgtgttntataagtatgt

SEQ ID NO: 193575 - DNA, 625 bp, Gossypium hirsutum
tgcattggggtattccttcttgcaattctcaagctcctccaacacctgagccgagtcagtgcacccaaacatgggcagtttccacatggtccagtagcgtccatcgtagtacgtgggtaagctcgagtacttacggtgcacgaatccctcctctaattcgaattccaagcaaggaatccatttagagcgaagaaggtaatctacttccttagccaacatggtggcccccttcaccggcctcaagtctgcctctgctttcccagtcactaggaagcccgtccgccgccacatcacttctcttgcaagcaacggtgggagagtgcaatgcatgcacgtgtggccgtcctcttgggaagaagaagttcgagactctctcatacctcccccatcttactcccgtacagttggctaagggaagtagattaccttcttcgctctaaatggattccttgcttggaattcgaattagaggagggattcgtgcaccgtaagtactcgagcttacccacgtactacgatggacgctactggaccatgtggaaactgcccatgttcgggtgcaccgactcggctcaagtgttgaaggagcttgaggaatgcaagaaagaatacccccatgcattca

SEQ ID NO: 193576 - DNA, 448 bp, Gossypium hirsutum
ttttgtataactgtagcatataatactaggtaaccaatataaccatgggcttcttcattaatttatcgggaacccaattgggccacacgggaacctggctcccctccccggcaacaagggcacaacatgtgttggggcccccttcacacggcccctcaagtctggcctctggctttcccacgtcacctaggaaaggccaaccaaccaccactcacttctcttgcaagccaatggtgggaggagtgccaatgcatgccaagtggggccctcctcttgggaaggaagaaagttcgagacaactctcataccctccccgatcttacacccgtacagttggcttaagaaagtagattaccttcttcgctctaaatggattccttgcttggaattcgaattagaacggagggattcgtgcacccgtaagtactcgagcttacccacgtactac

SEQ ID NO: 193577 - DNA, 467 bp, Gossypium hirsutum
cccacgcgtccgcccacgcgtccgacccaccattctgtcattagccctcaaccatacgccaaaatatggcagccacttttgcaagcccatcaaccgtcgttggcctcggtggcaccgccacctctatgtcatccccgccgatgaaaacccgcctctcttcagggtttttgaaatctggggtgacggctaggaaccctttgaggctggctggtgcttgtgggggcaagtttacttgcttcgagagagactggctacgaagggactttaacgtgataggatttggactgattgggtggatagcaccatctagcataccggccatcgatgggaagagcttgactggccttttctttgaaagcattggaactgagctcgctcacttccctacacctccgccacttacctctcaattctggttgtggttggtattatggcacctaggactgttcatcactcttacttttgga

SEQ ID NO: 193578 - DNA, 681 bp, Gossypium hirsutum
ggcagcaacgtgggtgacggaacggaaaatagattaggatcttggttaatgctgacatgtttccaaacttccgttatttcttcttcgatgtttttaactgcaatggcggcgaatccattaagtgctaatttagctttcaataccattaaacagcagatcgggtggatggattgggctaaggcggcattcgtgccgggtttagtttcgttgcttgttgtgccattgattttgtatgttatttatccaccaacggtgaaaactagtcccgacgcgccaaagcttgctagggagaaactggagaagatggggccgatgtccaagaatgagattatcatggctgggactctatttctaacggtggggctctcgattgttggaggggcgttaaatgtggatgctgctactgctggcattcttgggttatctgtactacttgtgactggggtagtaacatggaaggagtgacttgctgaatcagttgcatggtatacacttactgggttggctgcactcatcgctatggctgagtctgtgtacaaatgtggtctaatctgatgggttagtcacaccgtgtcaaggtcgcacgtggattcagactttcatggcatatgtcaagcggcattgtgcttcttctctatagctactggcattacttctttgactgtggaactgctcatattg

SEQ ID NO: 193579 - DNA, 806 bp, Gossypium hirsutum
  unsure (1)..(806): unsure at all n locations
cccacgcgtccgcccacgcgtccgcccacgcgttcgcaacaacaacccccatcagaaataacatattctcctttcttcttatttcttcattataaaaaaagaaaagaaaagacatggctgctgttactgctgcagtctctgttccttctaccaagtccacctctctccctgctagaacctctcttgtctctcctgataggatcaccttcaagaaggtgcccgtttactacagagatgtttgcagtggggggagagtggtttctgtcagggcccaggttacaactgaagctcctgccaaagttgtaaaggaatccaagaaaaatgatgaaggtgttgtggttaacaagttcaggcctatcaacccttacattggtagatgccttctaaacactaagatcactggcgatgatgctcctggagagacttggcacatggtcttcagcaccgaaggagaggtcccctacagagaaggacaatccattggggtgattccagatggcgttgacaagaacggaaaaccacacaagctgagattgtactctattgctagcagtgctcttggtgattttggggactccaaaactgtatccctatgtgtgaaacgactggtatacaccaacgagaaaggagagcttgtcaaaggagtctgctccaatttcttgtgtgactngaaactctgggcggaagttaaaataactggacctgttggaaaagaaatgcttatgccaaaggatcccaatgccacaatcatcatgctcgctactggaactggaatcgctccctttcgatcatttctgtggaaaatg

SEQ ID NO: 193580 - DNA, 1061 bp, Gossypium hirsutum
ctaaacggccaatagaaggatctagaaacactactgaagcattttctatataataatgtcgttacgcgctacttattgtctcagtaatttctcttcacctgaatataatcttttgcttacggtttttcctgcgtgctcttgaattggggttttgagttattctcaatggcggacacagagacgtttgcttttcaagctgagattaaccagcttcttagtttaattatcaacactttctacagcaacaaggagatctttcttcgtgagctcatcagcaacgcttctgatgcattggacaagattagattcgagagtttgacggacaagagcaaacttgatgctcaacccgagctgtttatccacattgtccccgataagacaaacaatactctatcgatcattgatagcggtattggcatgactaaggccgatttggtgaacaatcttggtaccattgctaggtccgggactaaggaattcatggaggcattggctgctggtgctgatgttagcatgattggacaattcggagttggattttactcggcttacttggtcgccgaaagggtggttgttacaacaaaacataatgatgatgagcagtatgtgtgggagtctcaagctggtggatccttcaccgtcacgagggatacttccggggagaagcttggcaggggtactaaaattacccttttcttaaatgaggatcaactggagtttcttgaggagcggcgtttaaaggacttgattaagaagcactctgagttcattagctatcctatttctctttggattgagaagacaaccgagaaggagatttctgatgatgaggacgaggaggataagaaggatgaggaagggaaagttgaggatgtagatgaggaaaaggagaaggaagagaagaaaaagaagaagattaaggaggtctcgcatgattggtcattggtgaataagcaaaagccgatttggatgaggaaaccagaggagataaccaaggaagaatatgctgcattctacaagagccttacaaatgattgggaagagcatttggctgtcaagca

SEQ ID NO: 193581 - DNA, 459 bp, Gossypium hirsutum
cccacgcgtccgtttctcctctttctctctattcgaaatttgaatactctctcattttacgatatttcttagtgtgttttggatcgggaggttagaggtttatcatcaatggcggatactgagacgtttgcatttcaagctgagatcaatcagcttcttagtttgattatcaacactttctacagcaacaaggagatcttccttcgtgagcttatcagtaacgcctctgatgctttggataagatcaggttcgagagcttgacagacaagagcaagcttgatgcacagcctgagctcttcattcatattgttccagacaagaccaataacactctatcaatcattgatagtggtattggtatgaccaaagctgatttggtgaacaatcttggtacaatcgcaagatctggtactaaggagtttatggaagcactggctgctggtgctgatgttagtatg

SEQ ID NO: 193582 - DNA, 418 bp, Gossypium hirsutum
tttcacgcgtccgcactttgttctttttcttctctcttcaaaatctaacctcgaaagctttagagattctcattttgctaagcgtattttagatcgggagtttagaggttattcattaatggcggatacagagacatttgctttccaagctgagatcaatcagcttcttagcttgatcatcaacactttctacagcaacaaagagatctttcttcgtgagctcatcagcaacgcatccgatgctttggataagatcagatttgagagcttaacagacaagagcaagctagatgctcaacctgagctcttcatccacattattccagacaagactaacaacacactgtccatcattgacagtggtgttggcatgactaaggctgatttggtgaataatcttggtacaatcgcaagatct

SEQ ID NO: 193583 - DNA, 703 bp, Gossypium hirsutum
cccacgcgtccggctcacgcgggcgcccaaaagtccaatcactcccaatactttcataacatttcacgaacttcactctccagtctccaatggcggctgccgtctccaccatcggtgctgtcaaccgagcaccgttgagtttgaatggatcaggtgccggagcttctgctccaagctcagctttcatggggaacagcttgaagaaagtgagcgctaggttcaacaacaacggcaaggctccagtgggaagtttcatgattgtggctgccaaagaaatcgacgaagacacacagaccgaccaggaccgatggaagggtcttgcttatgatatctccgatgaccaacaagacattaccagagggaaaggtatggtcgactcattgttccaagctcccatgaacgatggtactcactatgctgtcatgagctcctatgagtacattagccaaggccttcgcacatacgacttggacaacaacatggatggattctacattgccccagctttcatggacaagcttgttgttcacatcaccaagaactacatgacccttcctaacattaaggttcctcttatcttgggtatttggggaggcaaaggtcaaggaaaatctttccaatgtgagcttgtgtttgccaagatgggaatcaaccccattatgatgagtgccggagaattgggagtggacgcgagacagcagtg

SEQ ID NO: 193584 - DNA, 1630 bp, Gossypium hirsutum
acgcccacgcgtccgcccacgcgtccgcccacactctcaaattcagttaacaatttcacagttgttttcttcagtctctctctcagccatggctgcagccatctccaccgtcgctgccgctgccgccgccaaccgagctctgggagtgtcagtcccaacctcagctttcatggggaagaaagtgagctcaagattcaacagcaccaggcaggttccttcgggaagttttaaggtgatggcggcggagaaagagatagacgaagagacacagaccgaaaaggaccgatggaaagggttggcttacgatatttcggacgaccaacagacattactcgagggaaagggatggtggattccttgttccaagctcccatgaatgatggaactcactatgctgtcatgagttcctatgaatacatcagccaaggtcttaaaacgtacaatttggacaacaacatggatggtttctacattgctcctgcattcatggacaagcttgttgttcacatcaccaagaacttcatgacccttcctaacattaaggttcctcttatcttgggtatttggggaggcaaaggtcaaggaaaatctttccaatgtgagcttgtctttgccaagatgggaatcaaccccattatgatgagtgccggagaattggaaagtgggaacgccggagaaccagccaagttgatcaggcaaaggtaccgtgaggccgccgacattatcaagaaagggaaaatgtgttgcctcttcatcaacgatctcgacgctggagccggtcgtatgggaggaaccacacaatacacagtgaacaaccaaatggtgaacgccacactcatgaacatcgctgataaccccaccaacgttcagctccccggtatgtacaacaaggaagagaaccctcgtgttccgatcattgtcaccggtaacgatttctcgacgctgtacgcgccgctcatccgtgacggtcgtatggagaagttttactgggcacccaccagggaagataggatcggtgtttgcacaggtattttcaggaccgacaatgttcccgttgatgacattgttaagcttgttgacaccttcccgggccaatccattgactttttcggtgctctgagggccagagtttacgatgacgaagtgaggaaatggatcggagaggtcggagtcaatggtgtcgggaaaaagctcgtgaactcgagggaagggccaccatctttcgagcaaccgaagatgaccattgagaagctgttggaatatggatacatgcttgttgctgagcaagagaatgtgaagagggttcaattggctgacaaatatttgagtgaagctgcccttggaaatgctaatgacgatgctatcaagagaggagctttctaaatgggaaattaagctctaagggaagaaaaaaatctatattgggcacaaacaaaggaaatcccccctttgtgtcttaattgaatgttgttttccttttgtgttttaagtggatttgcatcctctatttttgtgttataaaatctccactttgttcttgtcttaaatgtttcactttatttgttccaatcaacttttttttttacatgattagttttgaataaaaaatcggacgcgttggtcccccccg

SEQ ID NO: 193585 - DNA, 827 bp, Gossypium hirsutum
  unsure (1)..(827): unsure at all n locations
taccgaatcggaagtgccggcgctagaccgtacccgtaccgctgtaactctccgatcatccatgacggttttatgtagaagatttactgggcacgcaccagggaagataggatcggtgtttgcacaggtatgtccgcaggaccgacggcgtccgagatgaagacattgttaagctcgtcgacaccttccccggccaatccatcgatttcttcggtgccttgagggctcgggtttacgatgacgaagtgaggaaatggatcagtgaggtcggagtcgcaagcgtagggaagaagttagtgaactcaagggaaggacctccaacatttgagcagccaaaaatgaccattgaaaagctattggaatatggaaacatgcttgttgctgagcaagagaatgttaagagagtccaattggctgacaaatacttgagtgaagctgccctcggtgaagctaatgaagattccatcaatagaggaactttctatggcaaagcagcacaacaagttggggttccagttcccgaagggtgcactgatccaaatgctgataactttgatccaacggctagaagtgatgatggaacttgcacttacaaattctagacctcgtattatagtagtattgggttgaaaaagaaaaccctttttctattttatgtaatgatgtgagattgttccaaaactatcgtttgccttttgttgttccaattatatgattttgctttctcaattcttaatattttctcttcnnnnnnnnnnnnnnnnnnnnnnnnnnnnnnnnnnnnnnnnnnnnnnnnnnnnnnnnnnnnnnnnnnnnnnnnnnnnnnn

SEQ ID NO: 193586 - DNA, 705 bp, Gossypium hirsutum
aaaaagatgttcagcatctgagagcacaatatgagctcagctcaggtccgcttgacagggtcgaagttggacacgccaatcacagctccaacaatggcgaccagaaccacacccccagccgctatgctgagcaagaagttcttgagagatgctgtacatcttttttcacaagttgacagggtctcagccgaagtacagctacggtagtttatagctgcaaaaacattattaaacagataacataagaaaaaagatgtacagcatgagagagaattatatgagctcagatcaggtccgcttgacagggtcgaagttggacacaccaattacggctccaacaatggcgaccagaaccacacccccggccgctatgctgagcaagaagttcttgagagatggggtgactccatcagctgcttgagccacctctggcatcatcatcgatgtcgtcagcgctgctgctgtcaaccccgtcaccgccttttccttgaacgaagaagcaccagccttgacttggagccgtccgttgggtcttttaacaccgcccattgccctccatggcttcaccggaagtggcttaaagaatgcctcagagcttggcatcctgttttgggtagctccagctaagggcagagccattgaagcagctgaactggaagccattgactctttttttctgctctcttcaccctacaagtctaaacc

SEQ ID NO: 193587 - DNA, 566 bp, Gossypium hirsutum
cccacgcgtccgcccacgcgtccgcccacgcgtccgcccacgcgtccgcccaacctcagctttcatggggaagaaagtgagctcaagattcaacagcaccaggcaggttccttcgggaagttttaaggtgatggcggcggagaaagagatagacgaagagacacagaccgaaaaggaccgatggaaagggttggcttacgatatttcggacgaccaacaggacattactcgagggaaagggatggtggattccttgttccaagctcccatgaatgatggaactcactatgctgtcatgagttcctatgaatacctcagccaaggtcttaaaacgtacaatttggacaacaacatggatggtttctacattgctcctgcattcatggacaagcttgttgttcacatcaccaagaacttcatgtccctccctaacattaaagttcctctaatcttgggtatttggggaggcaaaggtcaaggaaaatctttccaatgtgagcttgtgtttgccaagatgggtatcaaccccatcatgatgagtgccggagaactggaaagtggaaacg

SEQ ID NO: 193588 - DNA, 1001 bp, Gossypium hirsutum
aagaagagtagaagtttataggaaatcatagggtattagccaaagacaattcattacaggaaatattaaacagacacacaggttggaaaaaaaactcatagcatagtagcatctgagagcttatatggttcaggtccgcttgacagggtcgaagttggacacaccaattacagctccaacaatggcaacaagcacaacaccaccagccacaatgctaagcaaaaagttcttgagagaaggggaaactccatcagcagcttgagccacctcagggatcaccatggatgttgtgattgcagaagctgtcaatcctgtgattgccttgtccttgagtgaagaagcagcagccttgacttgaagccttccattggatgttgtagttgggattgcccccgatggcttgagtggcaatggcttaaagaaagcttcagaggcaggcaccctgttttgggtagcacgagttagtggcagagccattgaaactgctgaagtggaagccattgatttctctcttctcactctgagttgaaaacctgcaacgctgcaacttcttctgtgagtgtttttagtatgaagggaaatggagggaggaagttagtgaactcaaggtacggacctccaacatttgagcaaccgaaaatgaccatttgaaaagctattggaatatggatacatgcttgttgctgagcaagagaatgtgaagaggggttcaaattggctgccaaatatttgagtaagcctgcccttggaaaagctaatgacgatgctatcaagataggagcttttataatgggaaattgaatgcttaaggaaccaagaattcattttttgccacaacaaaggaaatcccccctttgtgtcttaaatgaaagtgtgttttccctttgtgttttaagtggaattgggcaccctatttttgtgtgacacaaacccccctgtgatcccccccccaaaaaaaaaaaaaaaagggcggcaaaaacgatcttaaaacacgagtgggt

SEQ ID NO: 193589 - DNA, 955 bp, Gossypium hirsutum
cccacgcgtccgcccacgcgtccgcccactctttcggttgttccaaaaaaaggcaaacgatagttttggaacaatctcacatcattacataaaatagaaaaagggttttctttttcaacccaatactactataatacaaggttaaaattggtaagtgcaagttccaccctcatgaacatcgccgataaccccaccaacgtccatctccccggtatgtacaacaaggaagagaacccccgtgtccccattatcgtcactggtaacgatttctccacactgtatgctcctatcatacgtgacggtcgtatggagaaattctactgttcaccaactaaggactaccgcgtcggtgtttgcacaggtattttcaggaccgacaatgttcccgttgatgaccttgttaagcttgttgacaccttcccgggccaatccattgactttttcggtgctctgagggccagagtttacgatgacgaagtgaggaaatggatcggagaggtcggagtcaatggtgtcgggaaaaagctcgtgaactcgagggaagggaagacgatcagataccgtcctagtctcaaccgaagatgaccattgagaagctgttggaatatggatacatgcttggtgctgagcaagagaatgtgaacaggggttcaattggctgacaaatatttgagtgcagcctgcccttggaaatgctaatgacggatgctatcaagagaggagctttataaaggggcaattcagctctaaggtaagaaaaaaatctacattgggcccaaacaaagctaatcccccctttgtgtcttaattaaaagttgtttaccttttgtgttttaagtggatttgcatcatattctctcgtgtcagaaaatgaccaagttgttgttgttgaaagagatataaacaatggcggcgctcgcgggacgggtcgctcggcccggcccttccgttccgg

SEQ ID NO: 193590 - DNA, 409 bp, Gossypium hirsutum
ttcagctccccggtatgtacaacaaggaaggaccaccatctttcgagcaacagaaaatgaccattgaaaagctgttggaatatggatacatgcttgttgctgagcaagagaatgtaaagagggttcaattggctcacaaatatttgagtgaagctgcccttggaaatgctaatgacgatgctatcaagagaggagctttctaaatgggaaattaagctctaagggaagaaaaaaatctattttgggcacaaacaaaggaaatcccccctttgtgtcttaattgaatgttgttttccttttgtgttttaagtggatttgcatcctctatttttgtgttataaaatccccgccctgttcttgtcttaaaaaaaaacggacgcgtggacgaacgcgtggacggacgcgtggg

SEQ ID NO: 193591 - DNA, 437 bp, Gossypium hirsutum
agcgtccgcccacgcgtccgcccacgcgtccgtttccgcggccgggtatggtcgactcattgttccaagctcccatgagcgatggtactcactatgctgtcatgagctcctatgagtaccttagccaaggccttcgcacatacgacttggacaacaacatggatggattctacattgccccagctttcatggacaagcttgttgttcacatcaccaagaacttcatgacccttcctaacattaaggttcctcttatcttgggtgtttggggaggcaaaggtcaaggaaaatctttccaatgtgagcttgtctttgccaagatgggaatcaaccccattatgatgagtgccggagaattggaaagtgggaacgccggagaaccagccaagttgatcaggcaaaggtaccgtgaggccgccgacattatcaagaaaggg

SEQ ID NO: 193592 - DNA, 471 bp, Gossypium hirsutum
  unsure (1)..(471): unsure at all n locations
ggaaaacccggcccgacccacgcgtccggnccagctccccggnatgaacaattttgaagttttcccccgcggccccatcagcgncacgggtgacgttttctccacactgtatcctcctctcatccgcgacggccgtatggagaaattttccactgggcaccaacttaggccgacgaccgtacgtcggtgtttggcaaaggtattttttcaggccaccgacggcgttccgccagatgaagaccattgctaagctttcgtcgacaccccttccccggcccaatccaaatcgatttcttccgtggccttgagggcttcgggtttaccgatgaccgaagtgaggaaatggatccagtgaggtcggcagtcgcaaggcgtacggggaagaagttagtgaactcaagggacggaccttccaacattctgaagcagccgaaaatgaccattgaaaagctattggaaatggaaacatgc

SEQ ID NO: 193593 - DNA, 1104 bp, Gossypium hirsutum
cccacgcgtccgcccacgcgtccgcccacgcgtccgtcaccaccaccaacatagtccaacattttcataacaatggctgccatcacaaacgccgctgctacatcctccttcatggggacacgcttccccgacgtctacacaagttcagggagattcgtcgccaggtttggctttggcggcaaaaaagcagctcccaagaaagtctcgaaacgaaccccagaccgccctctatggtacccaggagcagtggcgcctgattggctcgatggaagtttggtgggtgattacgggttcgacccgttcgggttagggaaaccggcggagtacttgcaatatgatttggattctttggaccagaacctggctaagaattcggctggtgagatcattggaactaggaccgaagttgccgacgtgaaggcgacgccgtttcagccttacagcgaggtttttggtctacagaggtttagggagtgtgaattgatccatggacggtgggccatgttggctacgcttggtgcacttaccgttgaatggctcactggtgttacatggcaagatgctggcaaggtggagttagttgagggttcatcgtatctcggccaaccccttcccttctcgatgacaacattgatttggatagaagtattggtgatcggattcatcgagttccaaaggaacgccgagcttgacccggagaagaggctgtaccccggaggaaagtactttgatcctctcggcctagccgccgacccggagaagaaagcaaccctacaattggctgagatcaagcatgctcgccttgccatggttgctttcttggggtttgctgtccaagctgctgcaacaggcaaaggccctctcaacaattgggctactcacttgagtgacccccttcatactaccattattgacactttcacctcttaaaaaaagccatattcctttgcttttatgtagattttgctcaatgtactattatgttaacattgttaagaaaaacttgcgtatgttaataggtatctgatcggtttagatgtggttggtatgataatttatttttattatttacacattataaaatgttaacaatattttatattg

SEQ ID NO: 193594 - DNA, 1186 bp, Gossypium hirsutum
gcgtccgcccacgcgtccgcccactcgtccgcccacgcgtccgttcatttcaaagattctctcaaaacagtgagggagtagtagttcgagttatcgacgacgttttttttcaacacgaaaaaaaatggataacttttacgcaccagggaagaaccatctcttcgttccgggtccggttaacataccggaacccgttattcgagccatgaaccggaacaacgaggattaccgttccccggctattccggcgatgacaaaaacccttctcgaagatgtcaagaagatattcaagactacgaccgggactccttttatgatcccaacaacaggaaccggtgcatgggagagtgcacttactaatacgttatcccccggtgaccgaatcgtatcgttcctcattggacaattcagtcttctttggatcgatcaacaacaacgtctcaaattcaacgtcgacgttgtcgaaagtgagtggggacaaggtgctaacctcgacgttttggccgaaaaactcgcggccgatcgtacgcacaccattaaggctatttgtattgttcacaacgaaaccgcgactggagttaccaacaacttggccacagtgagaaaactactagatcattacgggcacccagcactgcttctcgtcgatggagtttcctcgatttgtgctctcgatttccgtatggatgaatggggagttgacgtagccttaaccggctcgcaaaaggcgctttctcttccaaccgggatcggtattgtttgcgctagcccgaaagctctcgaggcgaccaaaaccgcgaaatcagtccgggttttcttcgattggaacgattaccttaagttttacaaattaggaacattttggccttacactccttcaattcaactcttgtatggactaagagcagctttggaccttatttttgaggaaggacttgacaatgtcattgaaaggcatagtcgtttaggcaaagcaacaaggcttgcagtggaagcatggggcttgaagaattgcacacaaaaggaggaatggttcagtgacacggtgacggcggtgcttgttccaccatatattgatagttcggaaatcgtttaacgggcatggaagagatacaatttgagcttaggtcttggccttaacaaagtggcaggaaaagttttcagaataggacatctttgaaaccta

SEQ ID NO: 193595 - DNA, 650 bp, Gossypium hirsutum
gatttttcttgataagtttccttcgaagcaaagccaaattaacagatcttatcgattttacttctccttcgcctctgcttttttgcttacagtatgccagaagacacagagtaccgctgttttattggtaacctttcatggtcaacatctgataggggcctaaaagatgcatttgaaaagtttggaaatcttcttgaggctaaggtagctactgacaagttttctggccgttctcgtggattcggatttgtcacttttgatgagaaagcagcaatggaagaagctattgaagcaatgaatggaatggatttggacgggcggaatataactgttgatagagctaaacctcaacaagggtcagggagagattatgatggtgaccgtagccgtgatcgtggacgtgatcgtgaccacgatcgtagccggggctatgatggcagtcgtggatctaatggtggggagtgttttaagtgtgggaaacctggacactttgctagggagtgtcctagtgatggggctagggggggcaagtatggtggtaggggggatcgctatggcggtggtagtgatggtggacgttatggtcctgaccgatttggagaccggtttggtgggcgcaatatatatgcaggtattcgatgggtgtctgt

SEQ ID NO: 193596 - DNA, 803 bp, Gossypium hirsutum
gcagcaaccaatagactgctgctgacaagatttcctgatccacaacatcttctgatttccattataaccccttcctctcctccaaaccaaaatagactacaataaccatcggcaaacaaaccaagtcaacctaaagccttaggcaccatggcaacctctgctatccaacaatctgctttcgttggccagaccgctttgaagcagtccaatgagctcttacgcaaagtcggagctttcgatggtggtcgtgttaccatgcgcagaactgtgaaaagtgcccctaccagcatctggtacggccctgaccgcccaaagtacttgggtccattctcagaccaaatcccatcatacctgacaggtgaattccctggtgactatgggtgggacactgctgggttatcagctgacccagagacatttgctaagaaccgtgagcttgaagtgatccactgcagatgggcaatgcttggtgcccttggttgtgtcttccctgaaattctttcaaagaatggagttaagttcggagaggcagtttggttcaaagctggatctcaaatattctccgagggcggccttgactatcttggcaacccaaaccttatccatgctcagagcattcttgccatctgggcttgccaagttgtgctcatgggatttgttgaaggatacagagttggtgggggaccactcggtgatggactggacccaatttacccaggcggtgctttcgacccacttggactggctgatgatctgagcttcccataattaggttatgagacagattggcgcttgatgtttct

SEQ ID NO: 193597 - DNA, 451 bp, Gossypium hirsutum
cggacgcgtgggcggacgcgtgggtgggatttgttttatgatacagagttggtgggggaccactcggtgaaggactggacccaatttacccaggtggtgctttcgacccacttggactggctgatgatcctgacgcgttcgcagaattgaaggttaaggagatcaagaatgggcgccttgcaatgttctccatgtttggattctttgtccacgctattgtcacaggaaagggtcccattgagaacctctttgaccaccttgccgatccggtggccaacaacgcatgggcttatgccactaactttgtccccggaaaatgaacttagattatagatatgtctctgaaagctgtaacattaattgctatgtagcatctgttgctgtgtactgatgtaattcactgctagtcttttgagctggtggatcattacatacatatacctttttcctg

SEQ ID NO: 193598 - DNA, 394 bp, Gossypium hirsutum
cccacgcgtccggctctcaggcatcaccatggcaacctctgctatccaacaatctgctttcgcgggccaaacagcggtgtagcagtccaatgagctcgtctgcatagatcggtgccgtcggtggtggtcgcgttcccatgcgtagaaccgtcaaaagtgctccaaccagcatctggtatggccctgaccgcccaaagtacttgggtccattctctgaccaaatcccatcatacctgaccggtgaattccctggggacatacgggtgggatactgctggattatcagctgacccagacacatttgccaagaaccgtgagcttgacgtgatccactgtaggtgggctatgcttggtgcccttggctgtgttttccctgaaattctttcaaagaatg

SEQ ID NO: 193599 - DNA, 648 bp, Gossypium hirsutum
caaccccaccaatttctcaaagtagggctggcaatggggatgatgaggctttccaaatgctgggtgtcgttgttgtttcttgtggctctgtcgggattcacccatggatttgtgatgtcgcctcgcactttgcttaaccgcttctctcaaaacagcaattattatttaaccactgaagagcactggttcgatcagactctcgatcactattctccttacgaccaccggcaatttaagcaacggtactatgaattccttgactactttcaagttcccgatggacccattttcttaaaaatttgtggggagtcttcgtgcagtggcataagcaatgactatctcggcgttttggccaagaagtttggggctgccgtggtttcacttgagcatcgttactatgggaaaagcagcccttttatgtcacacacaacggaaaatctgaaatatctttcatctaagcaggctctctttgacttagctgttttccgtcaatggtatcaggaatccttaaacttgaagcgaaataaaacaggtgctgagaattcatggtttgtttttggcatttcatactctggtgctcttagtgcgtggtttcgtcttaaggttcctcaattaacatgtggaagcctggcaagttctggtgttgtt

SEQ ID NO: 193600 - DNA, 734 bp, Gossypium hirsutum
attttcgatgggaagatcttcccccattcgcgtcatctcttctctcttttcattctctccgatctcattgactcacaaatgaatccttccattctatcaaaccgtcctttagatctctatcccatgtttcagatctctcttctgtgattcagttttttgacgtttttagaaagaaaaagaattatcttttgattaaatctcacgatccctcgattttctctcacaaacccagttttttttctttcatttttcgtaatgggtttcactccaattcgctttctcttcattgtttcctttttcttcttcgttttcgcttccgtttctttttctcaggattcaggttttcaagctgagaaggaggaatctgatgggtcaattaaagatctcggccgccgcggcatgattgtttcaaagaactccgagaatggtgtagtagacgagaaggtcggtaccgattccataggtactaatcttggtttcgatccagctggtcttggcgtccttgatgcattcgttgcaagtttttccatgataattgtcagtgagattggagatgaaacttttataatagccgctcttatggctatgcgacacccaaagtcaactgttttatccggcgcattagctgccctgtttgttatgactgtactttccactggactaggtaggattgtgccgaatttgatatcaaggaagcacacaaatagtgcagctaccagtctctattgcatttt

SEQ ID NO: 193601 - DNA, 737 bp, Gossypium hirsutum
gttctttctttcactattagctgaacctcagcggagctcacataaacacaatagccaaaatggcatctccaacttctgctctaaccaattccccgttttgcccccatcttctcccccaattctctcctctacccgtcctctccttcactcacagcctcaaacctatcctgccaaagctcaagtctctgatttccctcaaaagagacaaccacccctcaaccttaaccgtcaaagcccagaccttggacttctccggctcattctttgagggtggtttcggctccgatgatgacccgccttcccaacccggctctggcataaccgccttggaggataaagaggaaccccaatgcccaccgggcctccgacagtacgagacaatggccgtcttgagacccgacatgtctgaagatgaaaggcttgctcttacccagaagtacgaggagcttcttgtcgccggtggtggcatgtatattgaggtatttaatagaggggtccccccttttgcctccagcatcaagaagaaaaataaagctggggaaaccaacgcttacttggatggcatttacctcctctttacctactttacaaaacctgagtcaataacggctctcgaagcggcgttgaatacagacgatgatgttatccgctcaaccagcttcaagataaggaagaggaagtataattagattggtatgtacctacatgtctgtatcttgagatgaatatgattagga

SEQ ID NO: 193602 - DNA, 435 bp, Gossypium hirsutum
cccacgcgtccggttttaaacctttccttgcttgtataagcatacctaaatgtagcaatgacaacaacaacctcagctacactctctccacccacattggctgctgccagtgttggcaatcccaggaggagaactaaagttaatgtaagttacattataggattgaattcctttggtgggctaaaagctcataacaatgtgatctcactaggccaaccagtgtgcattgaacgatcatttgcaaaggttgtgagctcactcagagctccatccaaggggaaaggtagtggcggcggtgccctctcttcaacctgcaatgcaattggtgagatatttaggattgcggcaatcatgaatggacttgttctcgttggtgttgctgtggggtttgttctccttcgaattgaagcatctttggaagaggctgagtgagaa

SEQ ID NO: 193603 - DNA, 935 bp, Gossypium hirsutum
cgtccaatcaagggattggccggtggagacgacgcgctcgttgagggccaaggaaggaaggaagaagagagagagagagataaaaaggagaatctgcttcaaagtttcaaactttcccgtctcatatctaatccccaatttctctcttctgctctaggttccttcctgtcctcttaggattcttgtggtctgttcaaagcgtcatggcctcgaagcggattttgaaggaactcaaggatttgcaaaaggatccacccacttcttgcagtgcaggtcctgtagctgaagacatgtttcattggcaagcaacactcatgggcccttccgatagcccttatgcgggaggtgtatttttagttagtattcattttcctccagattatcctttcaagccccctaaggttgcatttaggaccaaggttttccatccaaacatcaatagcaatgggagcatttgtcttgatatcctaaaagaacagtggagtccagccctaaccatttccaaggttctgctctcgatctgctcgttgttgactgatccaaaccctgatgatccgcttgttccggagattgctcacatgtacaagactgatcgggccaagtacgaagctactgcccgcagctggacccagaagtatgcaatgggttgatgatgatgatggtggtggttagtgtgtaatatacctatgggttttgtatgtcgtcaaatgttttacctttagcaggcatgttttcttgaagggaacttgtcattgtgttttcatactttggatcagtgttgaaatattgtcttcggtccactctactcctaaagtgcgtactgaatggtctgactattgttataagagatatatgccaccgttcctttgcttcttttatccaagcatttcgtctaaaaaccaaaaaaaaaaaaaaaaaaaaaacccacgcgtacg

SEQ ID NO: 193604 - DNA, 549 bp, Gossypium hirsutum
cccacgcgtccggcttcggggagttgaaaataagcgtagatccggagattcccgaataggtcaacagatgtcatcacaaaaagactactccatggcaacagcagatgtggtggatgcagaggtaagggatctagtagagactgcatacacaagggcaaagcagataatcacaactcacattgacattctccacaagcttgctcaacttctgatggagaaagaaactggtgatggagaagagttcatgagcctcttcattgatggaaaagctgagctatatgtttcttagatcgtacattatatagtccccattcagtccttgtataactatgaccctcaaatgttcagattcatctgtgtatgctttcataagatagggaaaaaaatctcaatactttttcttcctgtaattgagaaaacctatgatgtggccatgaaaattgaaaatggaacacaattacagttttttgtcttaaaaatttaaaatattcttttaattttaatatattggcttttttattatcttttatttttttttatatatttttt

SEQ ID NO: 193605 - DNA, 461 bp, Gossypium hirsutum
gtggatacctaggcacccagagacgaggaagggcgtagtaagcgacgaaatgcttcggggaggttagaccctgaagtagagcaagagggtacggactcggtcgattttgcgtggaggatgcatgtgaacgatgacaaggtgaaggtggtggatgggaggatggggtcactggttaacttggagcaagccattcgagctttggacattgggctgctttgtacgttaaatgagtctaagggtaggcctaaaatggaagaagtggtggagtttctcagcatggacaaacaaattcctgagctgcctgcttgtagacccgtctcattgttcccttacaacagtgccacacgtctttgcactggttattcttgcggcccattcaagtgaatccagctgtttgcctgcttgtattaaactttcaagatcggtttattatttgtacaaaaaatgttggtcagtcaagc

SEQ ID NO: 193606 - DNA, 481 bp, Gossypium hirsutum
cccacgcgtccgcggacgcgtgggatttttaaaaaatcagatctgcagaaatggcaacttttggatttctcaccattgcttttttcttagtttttgaactcaccttcgccacagattcgccggcgcctgctccctcgctcggtgcagacacatcaccgctacttgctcctactccggttacgggatctccggactcggcaccgttaatctcaccggtgatgcctgcttcgcctccggcgccaatcgcgccgtccccatcagatctggcagaaggagagtcatcgccttcaagttctcctgctccttcaccgggcgatgcgagtgatatcaaccacagcaacatcaatgcagaggaaagcgaaaacaagactggtggtggcggaggactgaacggaggaaaaaaagcaggaatcgtggtggcggtggtggcaacggcgtgtttgggtggcttcggggattgatttacaggagagacagacat

SEQ ID NO: 193607 - DNA, 720 bp, Gossypium hirsutum
  unsure (1)..(720): unsure at all n locations
tgcactcatgcctgaatatgatcctgtggcaaagatttctatcattcctcgtggtcaagctggtggccttaccttttttgctccaagtgaggagaggcttgaatctggtctctacagccgaagttacctacagaaccagatggcagttgcactcggtggaaggattgccgaagaagtaattttcggggaggaaaatgtgacaacaggagcatcgaatgactttatgcaagtctcacgagtggcaaggcagatggttgaaagatttgggttcagcaaaaagattggacaagttgccattggtggacctggtggcaatcctttcttaggtcaacagatgtcatcacaaaaagactattccatggcaacagcagatgtggtggatgcagaagtaagggatttagtagagactgcatacacaagggcaaagcagataatcacaactcacattgacattctccacaagcttgctcaacttctgatggagaaagaaactgttgatggagaagagtttatgagcctcttcattgatggaaaagctgagctatatgtttcttagattaaagattgcacatttttggcttaagtctctattgagtcttttgtgctagtactagtatcaattcaaatcccatacctttttcttctgtnnnnnnnnnnnnnnnnnnnnnnnnnnnnnnnnnnnnnnnnnnnnnnnnnnnnnnnnnnnnnnnnnnnnnnnnn

SEQ ID NO: 193608 - DNA, 654 bp, Gossypium hirsutum
  unsure (1)..(654): unsure at all n locations
ccctcttcttccggagacgaggaagggcgtagtaagcgacgaaatgcttcggggagttgaaaataagcgtagatccggagattcccgaataggtcaacctttcgaactgctgctgaatccatgggcagacaagagacaacctggcgaactgaaacatcttagtagccggaggaaaagaaagcaaaagcgattcccgtagtagcggcgagcgaaatgggagcagcctaaaccgtgaaaacggggttgtgggagagcaataaaagcgtcgtgctgctaggcgaagcggtgaagtgccgaaccctagatggcgatagtccagtagccgaaagcatcactagcttacgctctgacccgagtagcatggggcacgtggaatcccgtgtgaatcagcaaggaccaccttgcaaggctaaatactcctgggtgaccgatagcgaagtattaccgtgagggaagggtgaaaagaacccccgtcggggagtgaaatanaacatgaaaccgtaagctcccaaccagtgggaggagcccnaggctctgaccgcgtgcctgttgaagaatgagccggcgactcataggcagtggcttggttaagggaacccaccggagccgtancgaaagcgagtcttcatagggcaattgtcactgcttatggat

SEQ ID NO: 193609 - DNA, 1136 bp, Gossypium hirsutum
cccacgcgtccgaccagctcctgcttatagtatctatcctccccattccccctttccccactccgcccacgcgttcactcaccattgttccaagtttgttgtaaaccaagctagaaccagcagccaacatggcctcattagcagcctccaccgctgccgcctcccttggcgtctctgaaatgctcggtaaccctctgaatttcagtggtggagctaggtcatcggctccaacaccatccaactcatccattttcaagaccgttgctcttttctccaagaagaaggccgctcctccaaagcccaaggctgctgctgtcgccccggccgatgaagagctggctaagtggtacggtccggacagaaggattttcttgcctgaaggtctgttagacagatcggagatcccagagtacttgaacggagaagttcccggagactatggatacgatccgtttggtctgagcaagaagccagaagactttgcaaaatatcaagcatatgagttgatacacgcaaggtgggcaatgcttggtgctgcagggttcatcatccctgaagcctttaacaaatttggtgccaactgtggccccgaagccgtttggttcaagaccggagctcttctcttggacggtaacaccttgaactacttcgggaagaacatccccatcaaccttgtggtggctgtcgttgccgaagtcgtccttgttggtggtgctgaatattacagaatcatcaatggcttggatctggaggacaagcttcaccctgggggaccatttgacccactggggttagccaaggatccagaccaggctgctttgctgaaggtgaaagagataaaaaacggtagactcgcgatgttcgccatgctcggtttcttcttacaagcttatgtgaccggagaaggtccggtggagaacctttcgaagcacctgagcgatccttttggcaacaacttgctcacggtcattgctggaactgctgaaagagctcccaccctctgattttaatatctttgtcttctgattttcgccgctacttgttattgcgtttatgcattttgttgtacatcaaatcaaacttatcggataattcccgagaactttaatcttgaaggtctcaccctcgaatttact

SEQ ID NO: 193610 - DNA, 526 bp, Gossypium hirsutum
gctgacgtaccggccgaattccgggtcgagcgctcgttcgcccacgcgtccgattcactttaaccttgtacactactattacacttccggaaaaaaatcatggccaccgtcacgacgcaagcctctgccgctgttttccggccatgtgcatcgaaaacacggttccttactggttcttccggtaagttaaaccgagacgtttcatttaaaccagtggcttctacatcgactagctcattcaaagttgaagcaaagaaaggggagtggttacctggtcttccttcaccagcttacctcaatggcagtcttccaggtgataatggctttgatcctcttggattggctgaggaccctgagaacttaagatggtatgtacaagctgagcttgtgaatggacgttgggctatgttgggtgttgcagggatgcttctgcccgaagttttcactaagattgggataatcaatgctcctcaatgggacgatgccggtaaagccgaatacttcgcatcgtcctcgaccctgttcg

SEQ ID NO: 193611 - DNA, 600 bp, Gossypium hirsutum
cgcgtttcatttactcacacgctcatcctctttcagcctcaagttctttcactcttcttcgttttggctttgcttttaagcttttgaagagcgccataatcgttaaaatacaaaagaaaaataaaccaacatatataatcctccatggatgttctcaaagcttctcctaccattgtttattcaccatacattccaacaacaacaagaaacaaaacccagttttctaaacccatctttcacaatttgaacttacaattaccatgttttacaagaaatggatcgaaatccaggttgtttacgaccttatcatcgtccccaatatcaacaacggagtctattgagccacctatgccggaagttgaggctgaggtcggtaaagagagattcgattggtactcacagtggtatccggtgatgcctgtatgtgatttggataagagggtgccacatggtaagaaagtattaggacttgatctagtggtgtggtgggataagaacgagaatgaatggaaagtgttcgatgatacttgtcctcatagattagctcctctatctgatggaagaattgatcaatgggggaggttacaatgtgtgtaccat

SEQ ID NO: 193612 - DNA, 618 bp, Gossypium hirsutum
acgctcacccatttccttctgcgtagaccacggttgaacgctgttgctgctggttgatctcttgacaaagagacaattttagtacaattaatgtgcctagtacgatgatgtctggtccacttagcatgagcataggcttatcttcagctctgaacatcactgaagaagcaactactgtcactaagaagcaaggcatagtatctattcttggatcggatactgatcagagaccaaccaaagggtcttcacttagaagaactttatcagctgatatgtcttccaagaaatggctcactcaactgagcaatattgcatcttccgatgaactccctgtttccattgcagactcatcctcagaggaagcagaagaagaggattatcaagaaaagaaggcactcgaaaagcctgcccagttcgatatatggacctcaatcatttcaagcaaacctcaagacgactccaaatcgctccccccgccttacattcaccctcttgtaaaaagatcggggagctgtttaagcgagaaaagcctcgaaatatgcactgagagccttggttccgagactggctccgatgggttttcttcctatcctccgacggaaaccggtgacgtggagg

SEQ ID NO: 193613 - DNA, 457 bp, Gossypium hirsutum
cgtttattgaacttgcgggaactcaaaaacaattcgaaattaatggctaccactcacctgacaactcaaattctccggcaagcccctcctgtttgcggaagtgtccgacgtgttaccaccaccggactctcttctagttctcctcttactataacctttaagacaagaaaagaaccaagtccgaagaaccaaaagttcaagtgggcacgtaagttaagcttagtggaggaaagcagcccgccaaaaccaactgttgatgttgaagggttagctactttcttgtacgatgatcttccccatctggttgatgatcaagggattgataggacggcatatgacgaacaagtcaagtttatggaccctataacaaagcatgatacaattagtggttatttgcttaacatttctttgttgaaaagactctttaggcccctgtttcaattgcattgggtcaagc

SEQ ID NO: 193614 - DNA, 761 bp, Gossypium hirsutum
cccacgcgtccgcacacacgccctcaattccccgcacataatttgacccaaaatggcctctgtttgtgcttcttcggctattgcagctgttgccatctcatcccccagttcccagaagactggatcagtagtggggacaacaaaggcttctttccttacagggaagaaacttagatctgtgagaaagtacacaaaaccagctgccggaccaacatttccagtgtgcgccgccgccgaccccgacagacccctttggttcccaggcagcactcctcctccatggctggatggcagtctccctggtgactttggtttcgatcctctcggtcttgggtctgaccctgagacattgagatggaacgtacaagcagagctggttcactgcagatgggcaatgttgggagctgctggtattttcatcccagagttcttaaccaagattgggattttaaacactccatcgtggtactcagctggaacagaggaatacttcactgacaccacaactctcttcatcgttgagcttatttttatcggctgggctgaagggagaagatgggctgacattctcaagccagggtgtgtaaacactgaccccatcttccctaacaacaagctcaccgggactgatgttggatacccaggtggcctgtggtttgaccctcttggctggggaagtggttcgcctgagaagatcaaggagctgaggacgaaagagatcaagaatggccgattggctatgttggcagtgatgggtgcat

SEQ ID NO: 193615 - DNA, 1168 bp, Gossypium hirsutum
cccacgcgtacgtgagaacccattctggtcttactgatggagatgctacatcatgttcgagctaaccttgtaccaataatcgacaggtttcaccatcaagctttctaagcagaagttagctggtaccatccatggtagtgacagatccagttgttgcgcctgcaagtgcactggttcaggagcttcagagcaagcctgatctccgaatgaaacacgagttgcttgcctataaaggtccagatcaatcaacggacacaagtactgtgacagaccagtttgaagcatcctcttctggaacatcatactgcctggatgcaggcaccatccagcataatttctctctccccacctttgtggaaggtgatgtccaatcacatcctcggaacaatcttcaattttcagctaatattgacggactggcgcccgacaccttgttaccaaggggatatgactctcagaaggatcttcaaaacctgctttctaattatggtagcaatccaagagatattgacacagagttgtctactgctgcaataagtccccagtcatttggtgtgccaaacatacctttcaagactggatgttcaaatgatgttgccataaacgatgcaggagttttaaatggtggattgtgggccaaccaaactcaacggatgcgaacatatacaaaggtgcaaaagcgtggctctgtgggaagatcaatcgatgtgacccgctacaaagggtatgatgaactcaggcatgatctagcccgcatgtttggtatcgagggacagatggaagatccacaaagttctgactggaaattagtatatgttgaccatgaaaatgacatattacttgttggtgatgatccttgggaagaatttgtaagttgtgttcagagcataaagatactgtcatctgcggaagtacagcagatgagcttggatggtgatcttggaaatgtggcagttcccaatcaagcttgcagtgggactgacagcggaaatgcatggagaggacattatgatgatacctcagcagtctcatttaacagatgatgtttctaaattcggatattgagatgtcttcttcccttgaacttttgccgggcctgtggatgaatatattgtatgcttgttcactcaaatgagtacaatgcagtccagtccttcaagagaagtga

SEQ ID NO: 193616 - DNA, 415 bp, Gossypium hirsutum
tcgtttcaacaacaaaaaaaaaaagaacatggctaagaagaagcatgttttgaaggaagacgatgaacatgatgggtccaacactaaaaaacaagtttgtcgagctgatttccctccccactttgtcttcggtgtttctacctcttcctatcagattgaaggaggtgtgaacgaaggtggcagaggtaaaagcatatgggatgctttctctcacattgaaggaaaaatcgttgatggaagcaatgctgatgttgcagtggatcattacaacaggtacaaggaagatatagagcttatatccgagttagggttcaaagcttacagattttccatatcatggcctcgtatttttccagatggtttgggaaccaaagttaatgaagaaagaattgcattttacaacaatgtgatcgat

SEQ ID NO: 193617 - DNA, 632 bp, Gossypium hirsutum
cccatgctttcgaataagcaaacacacactctcattctctctctgtatttcctttggctctttaatggctactttcttcttcttcctcctctccttccttatctgctttcacttctcaagtgctgagccgtttattggagtgaactacggccaagtggcggacaacttaccgccgccgtcagccaccgcgaagcttctaaaatcgacgtcgattgagaaagttagattgtacggagcggatccggcgattatcaaagctttggctaataccgaaattgggatcgtaatcggagcggctaatggagatattccttctttggcttccgatccaaactcagcagctcagtggattaactccaacgtgttgcctttttaccctgctagcaaaatcatcctcatcactgttggcaacgagggtattgactacaaatgacccgaatttaatagaccaactgctacccgcaatgcaaaatatgcaaaacgccattaacggcgcttcactgggtggaaagatcaaggtctcaacgggtcattcaatggcggtgttgggtcaatccgacctgacatcttccgggttgtataggccgagttatcaacccgcattgtaaggtttgcttcagttacacaaggac

SEQ ID NO: 193618 - DNA, 697 bp, Gossypium hirsutum
  unsure (1)..(697): unsure at all n locations
atccccacgcgtccgcccacgcgtccgctttgccaaacatggagactagtgtcacgtgctacgctcgtgggattgttcttcctggtgtctcttctaagcactcctcggcattagtctcccctccatccatatctccttccttcagctctaagagccttaaaacaagttcactatttggagaatcattaagggttgttccaaggtcatcattgaaggtttcaaaggcaaagaacactacttcactagtgacaaaatgtgaaattggagagtctttggaagagtttcttacaaaggcaacaacagataaggcattgattagaataatgatgtgtatgggtgaagcattaagaacaattgcttttaaagttagaacagcttcatgtggtggtactgcttgtgttaattcctttggtgatgaacaacttgctgttgatctacttgccaacaagcttctttttgaggctttgacatactcgcacttttgcaaatacgcgtgctccgaagaaattcccgagcttcaagacatgggaggacctgctgaaggtggattcagtgttgctttcgatccgctcgatggttccagcattgtcgatacaaatttcaccgtaggtaccatctttggtgtttggcctggtgataagttaaccggtgtaacggggcgagaccaagtgcctgcgcatggaaattcgtcctcaan

SEQ ID NO: 193619 - DNA, 1323 bp, Gossypium hirsutum
ctaatttttcacttcactcccacactgcttcaacaatggcgacgcccacatttcgccggctagaccttaccctgttaaccctttctttactcgccgtcgccgtcaatgctcacaacatcaccgccatactcgaaggtttccctgattactccgtttacaacgatttcctcactaaaaccaagctcgccgatgagatcaatactcgacaaaccatcacttgccttgttcttaataatggagctatgtctgctctcactgctaaacacccactttccgtcgttaaaaacatccttagccttcatgttcttttagattattatgacccacaaaaactccataaaatttccgatggtactacacttactactactctttaccaaaccaccggaaatgctcccggaaatttgggtttcgttaatatcaccgatctacaaggtgggaaagtcgggtttgggtcagccgttcctgggtctaaacttgattcgtcttatactaagtctgttaaacaggtaccgtataatatttctatactggagatcagtgcgccgattattgctcccggtgttttatcagctcctgcaccgtcggcttccggtgttaacattaccggcttacttgagaaagctggttgtaagacgtttgctaatttgcttaccagtagtggtgtgttgaagacttatgaagcggcgcttgataaagggttgactatttttgcgccgtccgatgaagcttttaaagccgacggtgtacctgatctgagtaagttgaccaatgccgatcaagtttcgctgttagaataccatgcctcgccggattataaaccaaaggggactttaaagacgacgaaagatccgattactacattggctactagaggtgccgggaagttcgatttgacggtcaccgccgccggtgattccgtcacgcttcatactggaatcagtccatctagagtcgctgaagcagtttttgactccccaccggtcgtgatattcaccgtcgacaatattttgttaccctctgagttgttcggaaagtcaccgtcgccagcacctgctcctgaaccagtttcttcaccttcaccgacaccttctccattatccgaagcaccatcgccattagccgcttcacccccagctccaccaaccgacactcccgccggatctccagctgattcgccggctggttcgtcggagaacagcacctccgataatgctgccggtcacgtgagtcccactgttatcttcactgtgttggccattgtccgctattcactatgttaatttgatcttttctgggtttgctattttgcttattttcttt

SEQ ID NO: 193620 - DNA, 838 bp, Gossypium hirsutum
  unsure (1)..(838): unsure at all n locations
cggacgcgtggggcacatatttctatttcccactctcttttttgctctcagttaacaacaaaatccgtaaatggctaccactgcttctccaatggcgactcagctgaagagcagctttacgtcgtctgttacaagaggactggtagtccccaggggcatttcgggatccccgttcaaagtatcttccggaaagaccaggaccccttgcttcactgtcaaagctgttcaatccgacaagtcaacatttcaagtaatccaacccatcaacggcgaccccttcattggaagcctggagactccaatcacctcaagccccttaattgcatggtacctttccaacctcccagcctataggacggcagtgaacccacttctgaggggaatcgaagtgggtctggctcacggcttcctcctggtgggtccattcgttaaggccggccctctaaggaacactgcggtggcgggtcaagctgggtccttagccgctgccggtttggttgtgatcctcagcatttgcttgacgatgtatggtgttgcgtcgttcaaagaaggtgagccatcgatagcaccgagcctaaccctgactgggaggaagaaagagccagaccagttgcaaacggcggatggatgggctaagttcactggagggttcttctttggtggaacctctggtgtcacttgggcttacttcctcctgtatgtccttgaccttccttactactttaagtagatcatcatttgatctatgttttacctgggtccctttttaatgtannatcttgtattcaggatgatccttttggaacgaatatcaattatatcaagtgaatgtcactct

SEQ ID NO: 193621 - DNA, 1611 bp, Gossypium hirsutum
cccacgcgtccgcggacgcgtgggttccccctcccccaatcatacaacttagtgttttcttttcgtttgcagcggagccatggaagtgacgccaggcagaaagcagttctatagcaattatatgctattgaaccctaagaaagcctctttctttgatctaatcgccctcttattttctaaaaatttaaagaagagaaaatttatcgaaaccagtatcgaaactgaggacagtttctggtatagacttgttatattcctctctactctgttacagaagtttctgctttccataaagacgccaatggctttggctggccaaacttttgaggatatgctcaaccttttcactaacaatggtggcttgtttggtctcattaaaaaggtcatgacagggaaggtggtgattccaagcagagaagcagcaacctatgtctctgctgttggatatacggacttgagaatggatttagacaaacaaattatatacgggaattctatgtattatccagcacttgcgattatgacttgtaaagctgtttataataatgctgcttacaacaaatctataatcgaaaacaattgggggatggaagtcatcggattctataattattggaacgattacctgaggcaaccggatacccaagtggtgatgttccgaaacaaaacttcggagcacgacactattgttgtttccttccgaggaacacaaccgtttagtgccgacgattggtgttcggacgccgatctgtcttggtacgaattccccaacattgggaagattcacagtggtttcttgaaagctttggggatgcagaaacttgtgggttggcccaagtttgtgattccagatcttactcgcaaagcacctttggcttattatgacataagggataggttgaaagaccttttgaagaacagccctgaggcgaaagttatagtgacgggccacagtttgggcggcgccttggctgctcttttcccggcgattttgttttaccacgacgaacagttggtgcttgagagaatggaaggcgtttacacgttcgggcagcccagagttggtgacgaagcctttgccggctacatggagaagaatttgaacaaaaatgggatccagttttacagatatgtttactgtaatgatatagttcctagggttcctttcgacggcatgttcaagcactttggtacctgcgtttactacaacagcaaatatcaagcaaagatagttgaagaagtaccatacttgaactacttctcgctgtttggattctttccgatgcatatgaacgccatttatgaggtgataagaagcttcacaatgaaggctaaatatggagcagattatacagatgggtggctgatgtttggtgtgagattattttgatgttaatccctggagttgcaaatcattgtccccaagactatgtcaactccactcgtcttggcaaacccgatgatgttttattccttcctctccacactaaaaaggcacttggtttttaagtccctttgcttgctgcctaatgcatcttcctccataataaatatctatctgtgtaaacttatcgggcttgggattttgagttcatgatggatttccatttc

SEQ ID NO: 193622 - DNA, 1092 bp, Gossypium hirsutum
gtccgcccacgcgtccgcattatactcgtactaagaagaaactagttgtaggcagctattatatcgtttctcctttctcccttctcttaagagtagaatgattattggaaggttacgccaatggttaagtctactggtctgtgtgcttgctgttatactactcaaatctgaaggcgctagtgtagggattacttatctgcaggatgccgtagcgaaaggagctgtttgtttggatgggagtccaccagcttaccattttgacaagggctctggcgctggacttgataattggattgttcacatggagggtggaggatggtgtgaagatgtgccgacttgcctctctcgtaagaacaccgatttagggtcatcaaagcaaatggtgaagcaatttggcttctctggactcttgagcggccagcaaaaatccaatccagatttctacaattggaaccggattaaggttaggtactgcgatggatcatcgttcaccggggatgctgttgatcgagctaataatctctttttcaaaggaaacagcatatgggaatttatcattgctgatctactagcaaaaggaatgagaaatgctaaaaatgctattctttctggctgttccgctggaggattggcttcgatattgcactgtgacaggtttcgagctctccttcccgcttctactaaagtaaagtgcatttcagatgctggcttcttcctccatgcgcaagatgtctcgggagggaagcacatagaagaattctatggcaaagtggctagactacacggatccgttaagaatttaccagcgtcttgcacttcaagaatgggagccagaccagagttgtgtttcttcccacagtacgtggtgcagactatgcaaacaccaatcttcttcgtaaattcagcttatgactcctggcagattaagaacattttggctcccagtgctgctgacaaaagtaaggagtggaaaagctgcaagctggccgaaagggtcagaaacgcagtcaaatatcagattcagacgcatttaagtgcctgacaaaccgggacactttcatttagatgtcataatctgcttgcaacgcagtg

SEQ ID NO: 193623 - DNA, 886 bp, Gossypium hirsutum
gacaggtttcgagctctccttcccgctttttctaaagtaaagtgcatttcagatgctggggtgtttctccatgcgcaagatgtctcgggagggaagcacatagaagaattctatggcaaagtggctagactacacggatccgttaagaatttaccagcgtcttgcacttcaagaatgggagccagaccagagttgtgtttcttccctcagtacgtggtgcagactatgcaaacaccaatcttcttcgtaaattcagcttatgactcctggcagattaagaacattttggctcccagtgctgctgacaaaagtaaggcgtggaaaagctgcaagcttgacttgaagaagtgtacagcagcgcagctcaaaaccatccaagatttcaggacgcaattcttaagtgccctgaacagagccggggtggtcaactctccatctaaaggaatgttcatagattcgtgctatgcccactgtcaagtaggaaagcagatacaatggtcaagcgatagttctccggtagtaagcaacatgaaaattgccaaggctgttggagactggtattatgagcggagccccatcaaaaagcttgactgcccttatccttgcaaccctacctgcccaaaagttgactctgattcataaatcctatacatataattatggactacagtttatttattagatggatattagtccattgtttatgtctatttatccatctataaatctctcttgttgttttattttaataaagaagcgtatgatcttggaaacaaataaagttgcttgagcttgtatcattaccactagattgtagtggtatttttatttatgagatgtttccgtaattttcaattccagtgaataagttaattaagattttgtc

SEQ ID NO: 193624 - DNA, 694 bp, Gossypium hirsutum
caaggaattcgataccccgtcattgaaggagaggaagacgaagaaagtcggaagcagcgcggaaaagggaatgtagataggtggctccaaatgctgttagagaacagtcaagaagaattggagcctcaaaatgacaatgtagatgcagaggaagtgagtggaactgatgacatcataaaaaagctagacttgaagtatcccctgaaagagaagaaagaagataataatgttaatgtagaaggaaacaaaacaccaaggagaaatagcgatgctgtcgatcgagctaataatctctttttcaaaggaaacagcatatgggaatttatcattgctgatctactagcaaaaggtatgcgcactgctaaataggctattctttcgggctgttccgctggtggattggcttcgatattgcactgtgacaggtttcgagctctccttcccgcttctactaaagtaaagtgcatttcagatgctggcttcttcctccatgcgcaagatgtctcgggagggaagcacatagaagaattctatggcaaagtggctagactacacggatccgttaagaatttgccagcgtcttgcacttcaagaatgggagccagaccagagttggtatgtgtggctattttttgtatgacaaatcatagtcccttcctaattaattactcttgtgcatgtcttcttcattaac

SEQ ID NO: 193625 - DNA, 465 bp, Gossypium hirsutum
tcgcccactcgttcgtccacgcgtccgcccacgcgtccgggtcaagcgatagttctccgggggtaatcaacatgaaaattgccaaggctgttggagactggtattatgagcggagcctcatcaaaaagcttgtctgtccttatccttgcaaccctacctgcccaaaagttgactctgattcataaatcctatgcatataatcatggcctccagtttatttattagatggatattaggccattgtttatgtctatttatccatctataaatctctcttgttgcttactttaacaaagaagcgtatgatcttggcaacacataaagtcgctagagcttgtatcattaccactagattgcacagccatttatatccatcagatgtttccctgacgccaatctgtcttgatacgaattccccaacattgggaagattcacagtggtttcttgaaagctttggggatgca

SEQ ID NO: 193626 - DNA, 1011 bp, Gossypium hirsutum
caaaaataaattagaaaacgaattttttctaagaagagcttttttttttttttttttgaaagcaaggaagagtactactgtgaaagaaggcagcaaaaggaaaggaaaggataggatttgtagcgttcaagagggcgcttatctatctcagaaatagcagtaattaatttttgaggaaaaaatggcggcagcagcagcatcagcttccatgtcggccaccgccgtcttgattccacgtgttcctgcagccgttagaacaacccactgttccgccttgccgcctgtccctcctcgcgtttccaccgcttccttttcctcgtccgttaagctaactccagaatcccggaggtttccttttctccaaacaaaagcaacagaagacacctctgtcgataccggggagctttttgatgacttgaaagaaaaatgggataaagttgagaacaagaccacggttcttctttatggtggtggggcaatagttgccgtttggctatcatctattcttgttggcgccattaactcagtgcccttgcgttccaaagataatggagttggttggacttggatattcaggatggtttgtctatagataccttctcttcaagtcaagcaggaaagaactagctacggatattgtaggcactgaagaagaacattgctggaactgaatagatgtacaggattggcaatggcatgctaatctggccttcttgtatcctctaaaacagacatctttattctgtaattgtagggattccttgcatgaattcttgtcacctttatatttcccctgtccctggaataaaacttgtcaattttatgcgcaaaagacaaaaaaacttgcccaaacgaaaaactactgcacaaatatttttggcaagaaaacaaagacgccgtgcttgtcttggagttcttgaggaccgatttgtcggcggtcatccgagacgcgaaaaaaagggaaggtggggtccgagtcggggaagttaaaaggtggatgcttcagatttt

SEQ ID NO: 193627 - DNA, 420 bp, Gossypium hirsutum
attgaacctcaaagcataattcagtaagcggggggaaaataaaaaaaaaatggggcaaccattaccaaagagctggagcatccatacccgacccgagatcagcgccaagtaccagatcctggagcgcgtgggttcaggcgcttactccgacgtctacagggcgcgtcgtctctccgacgacctcatcgtcgccctcaaggaagtccacgactaccaatcggcgttccgcgaaatcgaggccttgcaaatgcttcggaactgcccaaacgtcgtcctcctgcacgagtatttttggcgggaagacgaggacgccgtgctcgtcttggagttcttgaggaccgatttgtcggcggtcatccgcgacgcgaaaaaaagaaaggaaggtggggtccgagtcggtgaagttaaaaggtggatgct

SEQ ID NO: 193628 - DNA, 478 bp, Gossypium hirsutum
ttctatcgcgtccgcccacgcgtccgcttcttcattttccaaagccaaaggccaaaaccctcctttcctctcctctcctctcctctacaaggaaatggcaatttcatcaacagcggcagccactgccgcttcttctaagcttagatacccacacgcctcccctttcccaactcactcctcaaccaccacctctgcctttttctcctcaattccctctaaactaacccctacccacctctcctcttccttcctccctcctttcctcactaccgtcgccaccacttccgtattccctcgccgtcgcggttctttcaccgtcaaagctgcccgtggcaaattcgaacgcaaaaagccccacgtcaacatcggcaccatcggccatgtcgaccacggcaaaaccaccttaactgccgctctaactatggccttagcctccatgggtaacagtgccccaaaaaagtacgacgaaatttgatgc

SEQ ID NO: 193629 - DNA, 734 bp, Gossypium hirsutum
cccacgcgtccgcccacacgttcgcaaccacccactcttacactggagaccagaggctctgaggggctttacaccgtgacttgaggagagccagggctgcagcattgaacattgtaccaacaagtacaggtgctgccaaagctgtctcccttgtgcttgctcagctcaagggcaagctcaatggcattgcacttcgtgtgccaacacccaatgtatctgttgccgcccacgcgtccgatgttgagatgaagggtatcacagctgaagatgtgaatgctgcattcagaaaggcagctgaggggccattgaagggcgtattggatgtgtgtgatgttcctcttgtctcggtggactttaggtgctctgatgtttcctccaccattgactcttcattgaccatggtcatgggagatgacatggtcaaggtggtggcctggtatgacaatgaatggggttacagccaaagggttgttgatttggcacacttggtggcaagcaagtggccaggcatgcctgcaggaggaagcagtgaccccttggaggatttctgcaagacaaacccagctgatgaagaatgcaaagtttacgaggcttaaatgattgcaattttcattttttttaaaaaaaattgttttccatgctggtggtatagttagtggtcaagattttccagtgttcatgttatcaataagctcattttgtaataacaccagagtggatgaagagaatttatc

SEQ ID NO: 193630 - DNA, 471 bp, Gossypium hirsutum
cccacgcgtccggcaaaacataaggcaatggccactactacagccacctgttttcacttacaaaacataccatcatcaccatgggtgaacaacaccagcagaataacaacatacaaagccatggatggatcattaagagcttcaaacccccgaacccaaacattcattaaacccgtgaaatgtagtagtagtagtagtagcggaaatgagataggcatagccgatttcatcggtggagatctattaaaattcgatttagggcaatggctatcggatgtagaacaacacaaagcccttgctatttacacccctcacgaaggtggctacgagggtcgttactttacacggcttcgacaccagggttactatttcctcgaccttactgctcgtggccttggtgatcccgaaactacactcactaagatccatcctgttttgccctcctcatgttgggaaagcaaccaataagca

SEQ ID NO: 193631 - DNA, 513 bp, Gossypium hirsutum
  unsure (1)..(513): unsure at all n locations
tcgtgcggtancaccaaaaaatggtcagtnnccttggtggaatatgttggtnnttccattaganngctcaggtcactttacagaatgcgtcctgtcaaatagcacccgaaaaatgttccatagaaagaaatgacganngggtattgtnntgtgaacannagttcaaaccataagtgaacccctacanttggaaatgtgccttcctcaacatccaaaattatccggagaagcgtcccttccaggagagaacttggcacattggtttttcagtaccgaagggggaagtttccatatcagaagatggactatatccattggtgtcccatcccagatggtattgacaatgaacggataaaccccacaatacttagattgtacttctattgctagccagtgctttgggagattttggcaattctcaaactgtttccttgtgtgtgaaatggcttgtctacaccaacgaacattgatagatagtgaaaggagtttgctctaattttctgtgttacttga

SEQ ID NO: 193632 - DNA, 688 bp, Gossypium hirsutum
acccacgcgtccgagctaattgagctccatttccctagtaaacagagttctttttttcacagcaatggcagccatgaactccagtgttttggcatgcaactatgctatctcaggcactggatcatctgagcttaatgccaagcttgcttcagcaccatcagttgcttccccagttatgtgcggtggtcacaagttgcctgtgatcagagcccagcaggctaaattttctgattccaaaggatcaggtgccagtgaaggaagaagagctgctatgctctacttggcagctggccttttcaccacagctgttgcttcttctgcaaatgctggggtcattgacgagtaccttgaaaagagcaaagctaacaaggaattgaatgacaagaagaggttggcaacaagtggagcaaacttttccagagcatacactgttcaatttggcacttgcaagttccctgagaacttcactggctgccaagatcttgcaaagcaaaagaaagtaccattcatctctgatgatttggccttggaatgtgaacggaaggacaaatacaagtgcggttgtccaacgttctctggaaatggtgaagacatcccaatgtaattttctcaattttctctgtattgttgtgctatttagtgaaacaccctgaaaatgttgtggtatttgttgataaacagaagtatg

SEQ ID NO: 193633 - DNA, 397 bp, Gossypium hirsutum
ggcagccatgaactccatcgttttgtcatgcaactttcctatctcaggcagtgggcttaatgccaagaccccctcagtgccttcagttgcttccccagttttgcctggtggtcacaagttgccaatgatcagtgcccaacaacagggtaaagtttcaggttccaaagaatcaagtggcaatgaaggaagaagagctgctatgctgtatttggcagctacccttttcaccacagcggctgcttcttctgcaaatgctggggtcattgatgattaccttgaaaagagcaaagctaacaaggagttgaatgacaagaagaggttggccacaagtggagcaaactttgcaagagcatacactgttcaatttggcacctgcaagttccctgagaactttccg

SEQ ID NO: 193634 - DNA, 428 bp, Gossypium hirsutum
agaacccccaaaaagaaaaccagacgcagttaaaagaagcttctatcaaagtgccattaacagtggccactctctcaattggcatcgcctcctccgcccccgccgccaccaccttcttttcgacaaaaacaaaacgaacccacttcaagctcaacatctcctgcgtccaatgggacccagaaggtattttaggaaagccggggtcaggacacttagctcgtcttgaattcaaaaggcggctagagagggacgcagaggctcgagaagcatttgagcaacatttacgtgaagagaaggaacgtcgccgagctcttcgccaatccagggaattacccggtactgctgaggagacgatcgagtattttcttgacaccgaagctcaagagatcgagtttgagattgcaagattgaggcatagattagatgag

SEQ ID NO: 193635 - DNA, 1451 bp, Gossypium hirsutum
tgcccacgcgtccggttcaataatttaggtgacctgttgtgtaccatcactgggtttgactccttcgctttgcaacccaatgccggcgctgcgggcgagtatgccggactaatggttatccgtgcatatcatatgtcaagaggggaccatcaccgcaacgtgtgcatcatacctgtttcggcacatgggacaaatcctgcaagtgctgctatgtgtggaatgaaaattgtttctgttggaaccgattccaagggtaacatcaatattgaagaattaaggaaagctgctgaagctaacaaggacaagttgtccgctcttatggttacttatccttcaacacatggagtgtatgaagaaggcatcgatgagatatgtaagattattcatgacaatggaggtcaagtttacatggatggggctaacatgaatgcccaggtcggtttgacaagtccgggttttattggagccgatgtttgccatctgaatctccacaaaaccttctgcattccacacggaggtggtggacctggcatgggacctattggtgtcaagaagcatttggcaccatttttgccttcacaccctgtggtacctacaggaggtatcccagccccagaaaaatcagaccctcttggtaccatttccgctgcaccttggggctctgcacttatcctgccgatatcttacacttacatagccatgatggggtctaagggactgactgatgcttcaaagatagctattctgaatgcaaactacatggcaaaacggttggagaactactaccccgttcttttccgcggtgtcaatggaacagttgctcatgaattcattatagacttgagaggttttaagaatactgctggaatagagcctgaagatgttgccaaacgtcttatggactatggattccatgctcctacaatgtcgtggcctgttccgggcacgctcatgattgaacctactgaaagtgaaagcaaggcggagctggaccggttctgtgatactcttatctccattagggaagaaattgctgaaatcgagaatggaaaggctgatatccacaacaatgttcttaagggagctcctcatccaccatctttgctcatggccgatgcatggacaaagccgtattctcgggaatacgctgccttccctgcttcctggcttcgaactgctaagttctggcctactacaggacgtgttgacaacgtatatggtgatcgcaacgtcatctgcacccttcttcccgtatcgcagatggttgaagaggctgctgcagccaattcgtaggcctaggcctcatctatgttgtcattgaagccaacattttctttttccttcaacaaaaaaggggtgggggggggggggtcccaatgtctttcttgttcatgtacacaaactattcaccatttgcatatgttctaagctgtgactttcattttattggt

SEQ ID NO: 193636 - DNA, 567 bp, Gossypium hirsutum
cggacgcgtgggcggacgcgtgggcggacgcgtggtttcctttccttttctctctctctagcaatggagtcgcgattgttatcacgcgcttctgttatcaccggcttacctcagctcaggccgaagctttcgccggggattgtcaacgtttcgtatgcttcggctaagccgatcggagccgtcggtgaaggcgggaacgtcatatggcggaggcaactaaggccctccttgctactcgaatgctcgtcggttagcaagcgagaggttctgaaaccggtttcggctgccgcgtcgtcaccggccgagggaggaagcgattccgccggggaggggaagatcgctccggttggattcttcgagaagtatcctgctcttgttaccggatttttcttcttcatgtggtacttcttgaatgtaatattcaacattctcaacaagaagatctacaattacttcccttatccctattttgtatcggtcattcacttgttcgctggggtagtttactgtttggtgagctgggccgtaggcctccctaagcgggctcctattgattcaaacctactg

SEQ ID NO: 193637 - DNA, 601 bp, Gossypium hirsutum
cttcggaagtttaatttacccattacttttttaagggaaaaaacagagctcgctcttgggggtttgcttaggggtttcttttaatcaaaactaatctgattctgctttctactccaaaatcaccaaaagcccagatttcgtttagaaattagaaaaccccaccgtttatagcgctgttattaaatacctccataaacatcatcccctcaaaaaaggagaagctgctctctcccattaaccctaactacacaagaaataaaattacctcaaaacaataggatggcagaagcagaggtaggatctggtgaaggaaagccccaagagatgtcgttgaaggataaagggaatgagtttttcaaggctgggaactaccttaaagctgctgctctttacactcaggccattaaacaagacccttcaaatcccactctttatagcaatcgagcagcagcgtttctacatttggttaaacttaacaaagcgctggctgatgctgagacaacaattactttgaaacctcagtgggaaaagggtgttttggtatatttcagggatattttcgaaaaggatgcattttagaggctatggaacgatatgacga

SEQ ID NO: 193638 - DNA, 612 bp, Gossypium hirsutum
cgaggaacggaagctaatattggatcgaagggcgtagctaagattagtaacagtggtgggggtggcattggaagctcaggtcaaacaatatctaattccgatatgtcaaagcaagggaaacaagcgtccatgcttcacggtatacctgattttgctgaagtgtatagcttcattgggagtgtctttgatccagacactgatgggcacgtacaaaaactcaaagagatggatcccataaatcctgtgccggttttgttactgatgagaaacctcactgggaacttgtgtagtccagattttgagccaattaggaaggtcctatcttcatatgatgttggcacaaacacggtgggagttaccaaaggaattattccccaaaaccaaatgaatgatatattgtgttaaggtgtttattatgtaggattttcgggcaactacgttcctctcatattatacttctccaatgctgcccccagaacagaatctgttttctggtgattgctatcttaaatctaaagcgagtgatgggaattaggggcagcatccttcgaggtttaccaggtggagaagttgcagccagcaacctatagaaaatgctggaaacgatgagtg

SEQ ID NO: 193639 - DNA, 517 bp, Gossypium hirsutum
cccacgcgttccaaaaaggcagttaggaaccagaaaccaaggcaatggcttctcttgcaaccttagctggtgttcaaccaacgaccatcaagggccttggtggcagctctctcaatggaaccaagctcttggtgaagtcaactcgccagagtttcaaacccaaaaactacagggctggtgctgtggtagcaaagtatggtgataagagtatatactttgatttggaggatattggcaacacaactgggcaatgggacttgtatggatccgatgcaccttcaccgtacaacccactccagagcaagttctttgagacatttgcagctccatttaccaagagaggattgttgctcaagttcctgatcttgggaggcggttccctcggtctttacctcagtgccactgcttccgatgaccttctaccgatcaagaaaggtccgcaactcccacccaagcctgggccgcgtggcaagatctaatttagttaaactctttaagcttttcattgtatgtatct

SEQ ID NO: 193640 - DNA, 429 bp, Gossypium hirsutum
cccacgcgtccggctgtcgaagaatacgaggatagattttaacatctacagccggaatacatcatctacaagctcaacggttccttgtagcagtgacaagtgcgaacaacagagaaaatgttcttcaccttcaagtaattgtccttatcaagttatctatctatccaatggcacctcgtcgatcggggttttggtggaagatgtcttgcgcttgactacggacgacgataaaacaaacaaacccgtcgacgccaagattactttcggttgcgggaagattcagactggatcgttcttaaacggtgcagctcctaatggtcttttcgggcttggtatggacaatatatcagttcccagcatattagcaaaagaaaatgttacatcgaattcgttctctatgtgttttcgatctgatgggatcggaagaat

SEQ ID NO: 193641 - DNA, 648 bp, Gossypium hirsutum
  unsure (1)..(648): unsure at all n locations
gtgagtggcaatggcaaccgctacagttacagcagcgtctacactttcatggcttcacagctttggaggaacacaaaacgagacagcaaaagtagcagacaaaaacagggtcttcgtggttttcgcccagaagaaagctaaaaagactcgaaagataatactgaaggaggatgtggaatacctggggaaaaagggacagcttttggatgtgaaagctgggtatttcaggaattatcttttgcctacgggaaaagcccagattatcacttcttctttgcttaaggaaatgaaaatggaggaggaaagaattgaagcggagaagcaacgggtgaaagaagaggcacagcaacttgctctaatattcgaaacagttggagcttttaaggtgaagagaaaaggtggaaaaggaaagcaaatttttggaagtgttactgctcaagatcttgtaaacattatcaaggcacaacttcaaagggatgtggacaaaagaattgtttttcttccaaagatcanggaaacaggagaatatgtagcagagctgaagctccaccctgaagttactgcccgagtccgagttaatgtttatgctaactgaggacnacttcctctccaaatgtgcagctttgtcagccatttgcatctgtctaa

SEQ ID NO: 193642 - DNA, 1037 bp, Gossypium hirsutum
aaaataaagacaaaaacgaagaattcaaagcaaagaatgggttggaaaaaagagagggaagaacaaagtatgtgcggattcaaaaaaatctagtggataggacctaaaaaaaagatgtcgaaatagttctgacggttcaataatcttctcacttccattcggagttcttagttacttcggcaggttgaatcttagcgatggaataatataattaagtcaaaattcattggatgattgtatcattaaccatttctttattttggtgcgaggaacttatcatgaatccactgatttctgccgcttccgttattgcgtgcggggttggctgtcgggcttgcttctattggacctggagttggtcaaggtactgctgcgggccaagctgtacgaaggtattcgcgagacaactctcgaggcggaggggaaaaatacgacggtacctttattcggcttagtttggcttttatggaacgctttaacaatttatcgggctggttgtagcattggcactcttatttgcgaatccctttgtttaatcctataaacatgagaattttgtatttttttttcttattttatggcttgggacttactcctcgctttttcgaattctatcaagatttcacccctacaattaattattcgttgggacaataatccatgggaaggattaatttgaggatgaggaattatcacaccgactcgctttcttccttccccttcttagttcaagagaaccccttatttctcatttattgtttaaaggagtattgcaacgaatgaggtattttgccattgacatgaaacctgccccctaattctaataagaattattattattgggaattttcaattgaaaaaaaaatacatttctagctaactagataaatagaatatatttttgactccgtttagacataggtaaatgaaaattcattatttatgaataattttataaaaaatttaataatttattaaaacaaaaaagaaatacatagaattagaataattagaataatataaatatgatagaatag

SEQ ID NO: 193643 - DNA, 1914 bp, Gossypium hirsutum
  unsure (1)..(1914): unsure at all n locations
gggaagaattcgcggccgcaaaattcccggccaaaaaagaaataaaaacagtttcatttccattctaagtttgtgtttttgatttgccttttgtgggtttttttttataaaaaagttcagcaaaaatgtttattgagaattttaaggtggagagccccaatgtgaagtacacagagaatgaaattcagtctgtttacaactatgaaactacagagcttgttcatgagaacaaaaatggaacctatcaatgggttgttaaacccaaaactgtcaaatatgaattcaagactgatatccatgtccctaaattgggggtgatgcttgtgggatggggaggaaacaatggttcaaccctcaccggtggtgttatagctaacaaagagggtatctcttgggctactaaggacaaggtacaacaggctaattactttggttcattgactcaagcatcaacgatccgagttgggtcctacaatggagaagagatttatgctccatttaagagtcttcttcctatggtgaacccaaatgatattgtgtttggaggatgggacattagtgacatgaacctagctgatgcaatggctagggccaaggttttcgacattgatctgcaaaagcaactgagaccctacatggaatccatggtcccactccctggaatctacgatcctgatttcattgctgctaaccaaggtgaacgtgccaataatgtcatgaaggggaccaagaaagaacaagttcagcaggtcatcaaagacatcagggagttcaaagagaaaaacaaggtggacaaggttgttgtactctggactgcaaacactgagaggtacagcaatgtcattgtggggctaaatgacaccgtggaaagccttatggcttctttggagaagaatgaatcagagatttctccttccactttgtatgctattgcttgtgttcttgaaaatgttcctttcatcaatggcagcccacaaaacacctttgttccagggttgattgatttggctattcaaaggaactgtctgattggaggagatgacttcaagagtggccagaccaagatgaaatctgtcctcgtggatttccttgttggggctgggatcaagccaacatcgatagtgagttacaaccatctgggaaataatgatggcatgaatctgtcagcaccccaaaccttccgttccaaggagatctcaaagagcaatgttgttgatgacatggtttcaagcaatggaatcctctatgagcctggtgaacatcctgatcatgttgtggtcatcaagtatgtgccgtatgtgggagacagcaagagagccatggatgagtacacatcagagatattcatgggaggcaagaacaccattgtgttgcacaacacatgtgaggattccctgttggctgctcccattatcctagatttggttctccttgctgaacttagcaccaggatccagttcaaggctgatggagagggcaagttccacactttccatcctgtggctacaatcctcagttacctcaccaaagcccctcttgttccaccaggcacaccggtggtgaacgcactgtccaagcagcgtgcaatgctggagaacatactaagggccagcattggcttggctcctgaaaacaacatgattttggaatacaagtgaagaagttgaggagagaaaagtggaacaaagctttggttcttagaactttaggaccattttccctttctctgtcgttttcataaaagctgtggttactgtagtcacagattgtaacggttgtatgatggtttatgctttggtatattatgcttctttttttctcatttattttccgatggcgctcatgtttgtagctcactcttgaaccaagcaccccttttgtggaaatagatatgataatatgaattttggtnna

SEQ ID NO: 193644 - DNA, 453 bp, Gossypium hirsutum
cccacgcgtccgctcaaatcttcaatcattagttcatctcttcaaaaaaatggcaggttccaacgttttcattttattagcttgtttcattttgttgggtttttcaagcatggaggtcagcctagcagctcgaaatcttcagcaagtaccattaccttcacttcctaatcctatcgttgttcttccaccacttcctaaccttccgccacttcctaatcttccaccacttcctaatcttccgccacttcctaatcttccaccacttcctaatcttccgccactttctaatcttccgccacttcccagattaccaattccaccgctttctaaccctaccattgttctttcgccactccccagattaccaattccaccactttctaaccctaccaccgttctttcaccactttccattgtaccaattccaccactttctaacccttaacaacgttc

SEQ ID NO: 193645 - DNA, 779 bp, Gossypium hirsutum
ccctcgcgtccgcccacgcgtccgcttttttgtttcttatcttgttgttggtctggaaatctctgcactctctctttttgcttccaagttttgctgctaacagtatatctttgaaagtcagttgatattacaattattcccttcccaaaccttgcatcatcaatcatggttcctttcatttatgttgttcttttcttagccatgtctggccattcaagtgccaactattgcttatgtaaagatggagtgaatgagcaaacacttcagaaaaccctggattatgcttgtggagcaggagctgattgtactccaattaatcaaaatggtccttgttataatcccaacactgtgaaagatcactgcaattatgcagtcaatagctatttccaaaagaaaggtcaagctcaaggaagctgtgatttttcaggcactgctactgttagtgttaatcctccttcaaatattccctctacttgcaggggtccgtccagtggtacaagcacaacaccatccacagggactccgacgacaccgaccacagggacgcctacctcaacaccaaccacagggactcctaccacaccaacaacggggacaccgacaacagggactcctaccacaccaacaacggggacaccgacaacagggacaagcaccgggattccttccacaacacccaccacggggacaaccaccgggtctccgacggtgtttggtggtggcaccacctcacttggtccgtcgggaacaaccaccggcatcaatgatccaagtcatgc

SEQ ID NO: 193646 - DNA, 637 bp, Gossypium hirsutum
tttcgctttcgcgtccgcggacgcgtgggttttaaggcttactattgtaataaaaagaggcttatatatcatatcatatacccaccataccattatcaccagtaagtcactacctctacccaccgtcgtaccgctttcttttctttttttttttcctctttatattccgactagaactctccattttctcttgtgctgtctttggtttctctttatttttcctctctaaatctctgcatcatcatcgatcatgtctcttttaatctccctactcatgttcttagccatgactggccattcaagtgctacttattgcttatgtagagatgggttaggggatcaagctcttcaaaagaccctggattatgcttgtggagctggagctgattgttctgcaattctacaaaaaggtggttgctataaccccaacactgtgaaagatcactgcaactatgctgtcaatagttatttccaaaagaaaggtcaagcacaaggaagctgtgatttttcaggcactgctactgttagtgccaatcctccttcaaatattgcttctacttgcagctttccctctagtagcacaggcatgaccgcaccaactgggacaacaaccgggacaccaaccaccactggctca

SEQ ID NO: 193647 - DNA, 703 bp, Gossypium hirsutum
cctttttctccaaagtccaaactccactagcaacggggagatggagagtggagcagggaaatggggtttccaagggacgcagggcctggaggcagcgtccaccaccaccgtccgaggatatctcaacctattaatgggcaacatcaaccaagatagttgccttacagtcgttcctctcggtcatggcgacccctctcattttccaagcttcaggactacccctgctgctgaagatgccatcgctgatgctctacgttcggctaagcataattgttatgcgaccactggtggtattcttcccgcaagaagggcacttgcagattacctcaaccgtgaccttccctacaagtcatcgcccgatgatgtttatttaacaaatggatgtactcaaggaatagaagttgttatatcaattctttcccgccccggtgccaatattttgcttcctagaccgggcttcccactctatgaagcttggtgtgcttataaccatcttgaaatgcgtcattatgatcttcttcctgaaaaaggttgggaggttgatcttgatgctgtagagactcttgcagatgagaacactgttgctatggttattataaatccaggcaacccttgtggaaatgtcttcagctatgaacatttgaacaagattgcagagacagcaagaaagcttgggattttggtcattgctgatgaagcttat

SEQ ID NO: 193648 - DNA, 513 bp, Gossypium hirsutum
tctgtagaagctgagaagtaagcaaaatgggagaggcagaggggtgtagcaaagacaaaagatggagtcttcaaggcatgactgcacttgtcaccggtggtaccaaaggcatcgggcatgcaatcgtggaggaattagctggacttggagccattgtgcatacatgttctcgaactgaaaccgagctcaacgattgcttactcgaatggaaagcaaagggttttcgagttacaggttcagtgtgtgatgtttcgaatcaagctcaaagggaaaatctattaagcactgtttcctctgtgttcaatgggaggcttaacatcctgataaataacgttggaacgaatatagggaaaatggtgacggattacacggcggaagatgtttcgtttttgacgagcaccaacttcgaatcggcttataaaattagtgtattggcacatccccttttgaaagcttccgccgctgcaagcgttgtgtttatttcttcaattgttggtgcattacctatatata

SEQ ID NO: 193649 - DNA, 578 bp, Gossypium hirsutum
caaaaatggtatttttggtcatgtgggatcgttgagggaagagaatgaaggtgtgaggagtgatcaaaaaaatggttttggtgaaaaggggtattttggtggcaatggtttgtggtgtattggtgtttggatgcaaaagagtttttactgtggatggagtggctaatgctggttatggagttattgggtagtgcatattgttgttgaggaatgcttggcctaaggcatctatgattcttaaagtgtttaaggaacaaggtctggttttgacagctctgttgggtcttccagctttcttctcgatggtagagactactataactacattatggccttagaagatgagggatggatttaaggcctgctttacagagggtatacatgacaagggcttctgcatatagagatgctcttaagagtttcatagaaggatatcaagaaggtatccagcagatcatgggtaaaaaggaagattcttctaaagcacagcaagaaggcaatactgataaaaattcaacttgatagctgataagtgcataattggagatgcatgtgagtacttctccagcatacctatt

SEQ ID NO: 193650 - DNA, 641 bp, Gossypium hirsutum
gctgttatctgtttgtgctggactggtgcgcttgcattgggccaaatcatgacatctcttgtggctggtgcgattcttctcttgctgtcgttgaccggaattgtctcagccggtagagatgtaaccggagacatactccggttaccttcagaagctaataagttcttccatgggggtgacgatgatgaagttgaaggcacgagatgggcggtcttgattgccggatctaatggatattggaattacaggcatcaggctgatgtttgtcatgcttatcaactgttgagaaatggtggcctaaaagaggaaaatatcattgtttttatgtatgatgatattgcctacaatgaagaaaaccctagacctggaatcatcattaacaatccccatggtgatgatgtttataagggtgttccaaaggattacactggagaaaatgttactgttaacaacttttttgctgctatccttggaaacaaatctgctcttacagggggtagtggcaaagttgttaatagtggccccagtgatcatatcttcatatattactctgaccatggaggtcctggtgtacttggcatgcctaccttaccttatctttatgctgatgatttgattgatgttttaaaagaaaaacatgc

SEQ ID NO: 193651 - DNA, 511 bp, Gossypium hirsutum
aaaaatgaaaagagatagagacgaagcagaagaaggaaacgaagagagaaacaaaaggaaaatggagattgtttggcaaactcctgctcatcctgctcagaaacaagattatgtttttcacaacgggaagcgccatgtacgaccttactactttgagttcgtctctcatgttaataaacgatgggaaggtaaaacaatagtggatttgttcgctcaagagttcagaggtcgatctagagattactatgttagtgctgtcaaatgtggacggatacaagtggatggagagaatatacctgtttcatacatagttaaacgatgccagaagattagccacttcttacataggcatgaaccaccagtgatggcttgggatgttgaagttcttcaaaatgaacctgatgtactgacagtttgcaaacctgcatcagttcctgtacatccatgtggtcaatatcgtaaaaacacagttttgggtattctccaagcagagtatggattggctcctttg

SEQ ID NO: 193652 - DNA, 1177 bp, Gossypium hirsutum
cgggccccttatttcctgccttagtttcattgaaggcgggactctcagactactctttcgaaccagctccaccatcacccccaaaaaacaaagcaaattgtagaagatggcaacacaagcacttgtatcatcgtctcttacctactcagtggagactgcaaggcagattcttggagctaaacgacaaattgggccttcaaggaaaggatcctttgttgttaaggcagcttcgactccacccgttaagcaaggagctgatagacctttatggtttgcatctaaacaaagcctttcatacttggatggcagccttccaggtgattatggatttgaccccttgggactctcagaccctgaaggtccaggagggttcatcgagcctaaatggctagcctacggtgagatcatcaacgggcgttatgctatgttgggtgcagtaggtgcgattgcccctgaaatacttgggaaggccggtcttatcccagcagaaacagccctcccttggtttagaaccggtgtgatcccaccagcaggaacatacagctattgggcagacccttacactttgtttgtgttcgagatggcactcatgggatttgcagagcacagaaggttccaagactgggccaaaccaggttcgatggggaaacaatatttcttggggttcgagaagtaccttggagggtctggtgagccggcataccctggaggaccactgtttaacccacttggttttgggaaagatgagaagtcattgaaggatttgaagctgaaagaagtgaagaatgggagattggcaatgttggcaatcttgggttacttcatacaagggctcgtgacaggtgtaggaccataccagaacctgttggatcacttggctgaccctttcaataacaatgtcttgactaacctcaagttccattagatgaaagtgcctatatttgttccatggaactaccctccccccccctccggctaaaagctccattgccaaatccctttctgctcctttcttgatctcagtaaaacatgtgtaaatttattctgtaatctgcgagaaagaactgaaatagactttgttaatgccactgtaatatcatgagtttctttttccccccccccaaaaaaaaaaaaaaagggcggccacgcgatccggacgcgtgggcggacgcgtggg

SEQ ID NO: 193653 - DNA, 1615 bp, Gossypium hirsutum
cacgcgtccgtcaatttctacctccaaatgctttttcacttaaacttgtaatttaatataatgggtataaatatatactcgtgacttgttttaatatggatcccatttttttccgataaaaccttttttttttaaatatttttcattgccaatcagtcccttattaataagtagagtatttccataactggtttaattcccttcatgcactgtgctccatagtcttggaacccaaggacagaagactcttttaacatttcaccgcaaagatggagataacaaatgtgagcgagtatcaagaaattgcgaagcaaaagttgccaaagatggtgtatgactactacgcatctggtgctgaggaccaatggacattgcatgagaatagatttgctttcactaagatactgtttcgtcctcgtattctcatcgatgtaagcaagatagacatgaccacaactgtgttgggtttcaagatatcaatgcctatcatgattgccccaactgccatgcaaaaaatggctcatcctgaaggggagtatgcaacagctagggctgcatctgctgctggaactatcatgacattatcctcatgggcaacttctagtgttgaggaggttgcttcgacaggacccggcattcggtttttccaactctatgtatacaaggacaggaatgtagttgcacagctcgttagaagagccgagagggctggtttcaaggcaattgcccttacggttgatactccgagactcggtcgcagagaagctgatatcaagaacaggttcactttaccaccatttttgacattgaagaactttgaaggtttggaccttggcaagatggataaagctgatgactcgggtcttgcttcgtatgttgccggacaaatcgatcgttccctttagctggaaggatgtgaaatggcttcaaacaatcaccacattgccaattcttgtgaagggtgtactcactgctgaagatgcaaggatagcggtagaggctggagcatccggaatcatcgtcttcaaccacggagctcgccaactcgattatgttcctgccactatcatggccttggaagaggttgtcaaagctgctcaaggtcgggttcctgtcttcttggacggtggtgttcggcgtggaaccgatgtttttaaagctttggcattgggagcctctggtatatttattgggcgaccagtggtgttctcattagctgctgaaggagaagctggcgtgaggaaagtgctttcgatgctgcgtgaggagtttgagctaaccatggcgttgagcggttgtcgttcgcttaaagaaatcactcgtgaccacatcgtgacagaatgggacagtcctcatcctcgtccggccccgagactgtagagccctatatattatgggcgtgcaactttagcctagcaaatcgcaagatgaacttagttggagctcaagagatatatatagcatttgcattgcatttatggcataaaattactgtcttttttttttctttgggaacaagtttctggttcattgagttaaaaggttatgtaatgataatgttggctaccgttgccttttctgtatattcttttcttaaaaacaaatgggtaatatg

SEQ ID NO: 193654 - DNA, 1599 bp, Gossypium hirsutum
  unsure (1)..(1599): unsure at all n locations
tttttctagacatgttggctgccatggagatgggcattgatgataacgttaatggactatccatgtccctcggcggtggcatgtgtgatcattacagggatagtgttgcaatcggatcttttgctgccatggagaaggggattttagtttcttgttcggccggaaatgctggtccagctccgtacaggttatcaaacctggctccgtggattacaactgtcggtgcaggcacactggatcgtgatttccctgctttcgttagccttggaaacggcaaaaatttctccggcgtgtcgctttaccgaggcagccccttgcctggaaagatgttaccatttgtttatgctggcaatgctagcaatgctaccaacgggaatttgtgtatgatggatactttgataccggaaaaagttgccggcaagattgttctttgtgatcgtgggatgaacgccagggttcaaaaaggagctgtcgttaaagcagccggtggtataggcatggttttgtctaacactgccgcatatggtgaagagctggtagcggatgcccatttgctcccggcaaccgccgtgggtcaaaaatctggtgatgctataagagactacttgttttcaaatcctaacccaactgtcaccattctttttgaaggaaccaaagttggcatagaaccatcaccggtggtggctgcttttagctcaagaggaccaaattctataacctcggagatattgaaaccagacatgattgctccaggggttaacattttagcagggtggtccggtgcagtaggtccaacggggttggctacggataccagacgagtggattttaacatcatttcaggaacttcaatgtcttgcccacatgttagtggccttgcagggttgctgaaggcggctcacccagattggagtccagcagctatcagatcagctcttatgactacagcttatacggaatacaaaaacaagcagaaaatgcaagatgttgcaacggggaaaccatccaccccgttcgaccatggtgctggacatgtggatcccgtttcagcgcttaatccagggcttgtgtatgatttgacagcggaagattatctgggtttcctttgtgccttgaactacacagagttccaaatcagatccctggcgagaagaaacttctcatgtgatgctagcaagagatacagagtcactgatctcaactacccttcctttgctgtcaattttgattcggtcatgggtgggtcgaatgttgttaaacacacccgaactctcaccaatgtgggctcgccaggaacttacaaggtatcggtatcacctgaaactccaggagttaagatatcagttgaaccacagactttgagttttagccaagcaaatgagaagaaatattacgggacgtcatggtagttccagccaccggacnaacgtgtcgctctttgaatggtcgtggaagttaccggagcagcctatgcattagctgacatgatagagataagggatgatgttttaacttaaagtgatgcttctaactactaacaaagnaatagagtgtatgtttangnttaatgatgccgttatatctaacactatatgagcn

SEQ ID NO: 193655 - DNA, 522 bp, Gossypium hirsutum
atcacctgaaactccaggggtaaagatatcagttgaaccacagactttgagttttagccaagcaaatgagaagaaatcatatacggtgacgttcagtggtagttcacagccaaccggtacgaacgtgttcgctcgtttggagtggtctgatatgaagtataccgtgggcagtcctattgcaattagctggacatgataggagaataaaggggatggacagtttttaaactttaaaaagttgaatggcttcttaaactcactcaacaagatgagatgggggttggttcaattgttttagtgttttgtagttgccagattcatgatagctaaaccagctaataatggaagctggggtcttaagtgtttgatgttattctctgagagagggaacaatgaaaactaggaacattggtaggttttctttctcagtatacagtgtattaatatgcttttaattgcttaaaaaaaaaaaaaatctcacatgtaatgttttttatagatcaatcaaaaatacggcctctg

SEQ ID NO: 193656 - DNA, 656 bp, Gossypium hirsutum
  unsure (1)..(656): unsure at all n locations
acgatttttcaactcaaaatcaatccccattgacaaacaatggcttccatgcttagctctggaactgttcttaggccaaccccatttcttggccaaaccaaaaatgctaaccctcttagagatgttgtctctttgggcactcccaaatatgcaatgggaaatgaactatggtatggaccagacagagtgaagtacttgggaccattttcagctcagactccatcttacttgactggagaattccctggtgactatggttgggacactgctggtttgtcagccgaccctgaggcctttgccaggaatagggctcttgaggtcatccatggaagatgggcaatgttgggagcactaggctgcatcacaccagaagtacttgagaaatggcttagggttgatttcaaggaaccagtatggttcaaggcaggagctcaaattttctcagaaggtggcttggattacttaggcaaccctaacctagtccatgctcaaagcatcctcgccgttctcggattccaagtcgtcctaatgggactcgtcgaaggattccgcatcaatggcctccctggtgttggtgaaggcaatgatctttaccctgagggacaatactttgaccctcttgancttgctgatgaccctggtacatgtgctgaact

SEQ ID NO: 193657 - DNA, 492 bp, Gossypium hirsutum
tattttttttaaaaagggttgcccccttctaactctgaaaggcaatggcttcaatgcttagctcaggaaccgtccttaggccaaccccatttcttggccaaaacagaaatgctaaccctctcagagatgtctccgtgggcactgccaaatacacaatgggaaatgaactgtggtatggaccagacagagtgaagtacttgggacccttttcagctcagattccatcctacttgaacggcgagttccctggtgactacggatgggacactgccggtttgtcagctgaccctgaggcctttgctaggaacagggctcttgaggtaatccatggaagatgggcaatgctgggagcactaggctgcatcaccccagaagtccttgagaaatggcttagggttgatttcaaggaaccatactgcggacgcgtgggcggacgcgtgggcggacgcgtgggcggacgcgtgggctccaaccttccatacaattctcacc

SEQ ID NO: 193658 - DNA, 514 bp, Gossypium hirsutum
cttttccagaatacatttcaacatatcaaatgcccttctaaaaacagagtatctgagctactagtaagcaagtattttccttctcttcaacaatggggaactcaaactatgtactctcagttttagtcttcttcttattcttttcgtttacgcaaaacttcgaacagcttctggtcttacctcaatggctctccctcagctaataccttctcactcttcttcttcactcactcaccagccttccataaaccctaacgcagccaatccataccccatgttgaagtcctttttgaagccatcttctctctctcaatctcgcaggtttcacaggctcagctctcttcgagcttcggcctcttccttccccgatcatcaccaaaccgatccttctaaaccagacgacgtcgtagagctccctatattccctctgcccttggttctctttcccggcgctatcctccctctccagattttcgagttcccgtaccgcattatgatgcacacgctccttcac

SEQ ID NO: 193659 - DNA, 546 bp, Gossypium hirsutum
aaaggattgtaggcacagttgtacgttcagtgcaagatgatcaaaaggaacaagacattaaaatcttggatgctgaggttcaagctctggaagagctttcaaagcagctattcttggaaatctatgagcttcgccaggcgcaggaggctgctgcttattcacgaacatggaagggccatatgcagaatttgcttggatatgcaggttcagtttattgtgtgtacaaaatgattaagtcattacaaagtgttgttttcaaggaggctggttcagttgaccctgttacaatgtcaattaccatattgttgcagttctttgatattggaatagatgctgcattgttatcacagtatatttccctgctgtttattggaatcttgatcacaatatcagtgcggggtttcttaacaaatctaatgaagttcttctttgcagtttccagagttggtagtggatcttcaagcaatgttgtccttttcctttctgaaattatgggaatgtacttcctctcttcaattcttctgataagaaaaaagttgaggactg

SEQ ID NO: 193660 - DNA, 668 bp, Gossypium hirsutum
cccacgcgtccgcccacgcgtccgccaggcttttacttatcaaaataaacccatcttcttaaaagtcaaaaaaacaaaaagccaataacaatggcactcagaatgtgggcttcttccactgccaatgcactcaaaatctcttgttcctccaaacctaatgtttcccttgctttctcactctctagatgcttttccactgttttggatgggctgaagtatgctaattcacatgaatgggtgaagcatgaaggtcctgtggctaccattggcatcactgaccatgctcaggaccatcttggagaagtagtgtttgtggagttgccggaaccaggtggttcagtgagccaaggaaaagggtttggagcagtggaaagtgttaaagcaacaagtgatatcaattccccaatctccggcgaagtcgtggaggttaactccaagctgtccgaaactccgggcctgatcaactcaagcccatatgcagatggatggatgatcaaagtgaagccaagcagtccatcagagttagaatcattgatgggtccaaaggaatacaccaaattctgtgaggaagaagatgcttcccactaagaaaccattgtacccttattttcaaactttgtgttcaagaaataaggtttattgcaattttaattttatggctatttatc

SEQ ID NO: 193661 - DNA, 643 bp, Gossypium hirsutum
aagctctccccataaacatcaataccccaactgcacctcgataacacccatcatctacatggccatggcaactcaagcaggtctgttcacccccacaatgaccaccccaaaatctttggccccatggaaaccagcctcatcattttcctttgctacctgttccaagtccctcaacttctccgtggctcaaagaaccattagagctgcagctgctgatgaggaagcatcatctgctgccgccacaaaggaagctccggttggtttcacccctccagaattggaccccaacaccccatcacccatcttcggaggaagcactggaggactgcttagaaaggctcaagtcgaagaattctacgtcatcacatgggattcacccaaagaacaaatctttgagatgccgactggtggggcggccatcatgaggcaaggacctaacttgctcaagttggcgaggaaagaacaatgcttggctttgggtaccaggctgaggtctaagtacaagattaagtaccagttttacagggtttttcctaatggtgaagtccaataccttcaccccaaagatggagtttatcctgagatagtgaacccaggtcgccaaggatttggccagaacttcagatcaattgggaagaatgtc

SEQ ID NO: 193662 - DNA, 627 bp, Gossypium hirsutum
gcgtccgcccacgcgtccgtccacgcgtccttttactcttccgccattttccaccacaagcgtgtccagaaggttcagaggattttagagagaacaaacaacaatggctgctacatctggggctgtactaaatggattaggctcttcatttctttgtgggggaaagaggagccaagcccttttgggtgccagcattggggccaaaggctcgccctcccctactgctggaactagaaagttgatcgttgtggcagccgccgcacctaaaaagtcttggatccctgctgttagaggtggtggcaacttcattgaccctgaatggctcgatggatcgctccctggagactacggatttgacccactaggtcttggaaaagacccagcattcctcaaatggtaccgagaagctgagctgatccatggacgttgggccatggctgctgtcgtcggcatcttcgtcggccaagcttggagtggcattccatggttcgaggcaggagctgacccacgtgcgatagctccattctctttcggctcactccttggtactcagctcatccttatgggttgggttgaaagcaagcggtgggttgatttcttcaacccccaatcacaatcaggggaatg

SEQ ID NO: 193663 - DNA, 526 bp, Gossypium hirsutum
  unsure (1)..(526): unsure at all n locations
cggacgcgtgggctccttgttggccatcttcgtggtcgtcttcattcgtaccactaacagaagaaacctcttattgccaccgtcgccgccgaaactcccaatcatcgggaacccccacaaccatcggccgctaccctcatcgctcactcaggtccttacctcaccggttcggccctctcaggtcgctacgcttcggcaatttccccatactcgtcgtctcctccgctgatgctgcctctgagatcaagaaaactcatgacttgacattcgtaaacagaccgaaacgcagcctctttcaaaagcttctttatgactacaaagacgtggcgtcggcaccttacggtgagtattggaggcaaatgaaaagtatatgcgtagtaaatcttttgagtaacagaagggataaatcttatcaaggtgtgcgagaagaagaaacggctctagcagtggagaagatcgaaaagtctagctctttgtgttccccggtgaatctaagcgaactctnttccgcaaccaccaacaacgt

SEQ ID NO: 193664 - DNA, 466 bp, Gossypium hirsutum
agtcaactaggggtcaagtgcagtagagattcatgttcccgacaatggagagtttcgggttttgtttccttatgcttacaatcgcaattttggcatcacccgcactttccgatctggtcctttccaaagtcgatcgacgcatatatttgacatcacatattgttcggatttcttcaactatgaaggtggagaatgcaggttccgaaaaggagtccaaggttttgctggcttttcctgagcaacaagccaaaaatatggcatatttgattgctactccacatgaagggaaagggaaaggaaaaaaccctgttgttgttctccctgttgaggctgccaacccaaaagacatgcctgctgctttgacattctattcagtatctttgcctaagggattagctgagggtgatagcttcacttttgatgtcttggccgtatttacccatgccttgcgacctattcctgagca

SEQ ID NO: 193665 - DNA, 603 bp, Gossypium hirsutum
tgtggcacttaagatccttgataaagacaaggttctcaagcacaaaatggctgaacagattaagcaggaaatagcaacaatgaagctgataaagcacccaaatgtcatccgtttacatgaggcattagtgataataagatatattattatcacttaaatcttagaggaagtgtttttgccagaaggctgactaggctaccttcaattcctaagaatgaagcaaagttcagtttattaagagagtaagatggcatccactttcacagccatgtcatcagttggctcattcgttgcacctaatggtctggtcatggataagaagctttcatcttcttccaacagattgtcatctttagcatccatttcttcatcttcatttcttagtagacgaaatgttgttcttagaagatctcgtctgcccaagatttctgcagcaaaagagctacatttcaataaggatgggtcagccataaagaaattacaaactggtgtgaacaagcttgctgatttggttggagtcactcttggaccaaaaggtaggaatgtcgttctagagagcaaatatggctctcccaaaatcgttaatgatggtgtgacagtggc

SEQ ID NO: 193666 - DNA, 1114 bp, Gossypium hirsutum
ctcttctcttcttttctcttctcactctctaattttgtgagtgacaatggaagctggacttccaatgcttaactgtctcttgcagcacacgctacggagcttgtgttcatattcagattcttcttcttcttcttcttcttcttcatcaaagtgggtttatgcagtgttttggaggatactgcctcgaaattatccaccaccaaagtgggattatggagggagtgcacttgatcgttccaaaggaaacaaaagaaactggattcttgtatgggaagatgggttttgtgatttccatgaatgtgagcgtgctggaagtggttatgtaaagggaaggtttggagctgatattttcttcaaaatgtcacatgaagtttataactatggagaaggattagtagggaaaattgcagcagataacagtcacaaatgggtgcataaagaaatcccaaatgaaaatgatccaggcttcatctcctcctggaatatgtctattgaacctcagccaaaggcatggacatcacagttcaattcaggcattcagacaattgccatcatttctgtcagagaagggatcattcaacttggttcattggacaagatggtggaagatcttaatctggtgatcagcatacagaggaaattcagctatctccagagtatacctggtgtattcgccattcaaagacccgtccggccgattcaacatccgtacgcccttaaaccaaataaccagatgcctgaacaccatgaagcaacaaccatctgtcatgatgacaaacgccagtttggcggaacaaaaagattgatcgaagaaagacccgaggattctccaatcaagtccatcaacttaggttggaacagcccacaaaatggcattataggaccacccttttggtcaattccaccccttcttcctactgtgtcttgcagtcttggagctttgttatccaagctgccttctgtcatcccatcttatagcgttagcgaacctcctgaaataaacatcatcaaccagaccaacaaatacaacccaaagaggaaaggccgataatggaggttcgttcggtgaagttcccattgctgagacaaaaatagaagcttcaaatcaattgga

SEQ ID NO: 193667 - DNA, 382 bp, Gossypium hirsutum
ctacctcaatagccaggccctctctttccgcgtcaccaccagcgacggcgtgactctcgacttccccaacatagtcccggcgaattggaacttcgggcagacgttcacaagccgggtgcaattcacttaaagatccaagatccgaaatcctgcggcagaggcatgctcactatttttgctaccattgcccgccaaccagtttttttttctttcaaaatttgtttctttctccccgccgacttactatttacacacatcctttcttgggttgctaaatgatgcagagcttgggaggtgttggacattattagtttacttttcaagaaataaaagttgaaagagggggtgatggttgtagccaaaaaaaaaaaaatataagtat

SEQ ID NO: 193668 - DNA, 736 bp, Gossypium hirsutum
attaacccagcggtgactttcgggctgttcttagcgaggaagttgtcgctgataagagcagtcttttacatgataatgcaatgccttggagctatatgtggcgctgccgtcgtaaagagcttccaaaagacccaatacgaaaggctaggcggcggtgcaaacacggttagctcgggatatagcaagagtagtggccttggtgctgagattgttggtacctttgttctggcctatacggtcttctccgccactgatgctaagcgtaatgcacgagactcccacgtccctatcttggcaccgctgcctattgggtttgctgtgttcctggtccacttggcaacaattcccgttactggaacaggcattaatccagctaggagcctcggcgcagctcttatttacaacaaggaccaagcatgggatgaccattggatattctgggtaggacctttcattggagcagccttagcagctttgtaccaccaaatagtgataagggccatccctttcaagtccaagtaagggagtgagggaggaaacaggtgcttgataagtgccagtctatgatgaagtgttctccattatcattttctcttccaaggagtgagtttgatgtttatttttcatctatgtaattaatggtcggttaaggaacgaagcatgggcacctatattgtactagtggtggttccatatcaatggttttctctaatatgaattgaaatgatgcacgaca

SEQ ID NO: 193669 - DNA, 723 bp, Gossypium hirsutum
cccacgcgtccgcggacaaatggcctttgttttaaaaatctgatcgctgctgctactctggtccggatcaagaaaaggaaatgttaggtgcgcttagtgctgcaagtttaacacttggtctggctggtgcgccagcagcattcaccgcccaatgcggcaatggtggcgctgccaaagccttagcgtttcctagtagcagcaacagcaacaaccgcgcccaattgttggttaagagctcattcacttccacttccaggactccaccatcctttaggacagccgttgctgcagtcgactccgaccagctcagtcccgacatgcaacaatccaaaaaatactattttgttgttgcgaatgcaaagttcatgcttgatgaagaggagcacttcaaagaacttttgtttgagaggcttcgttactacggagagggcaataaagagcaggacttctggcttgtaatcgaacccaagttcttggaaaatttccctgacatcacaaagaggttgcgcaggcctgctgttgctctggtttcaactaacggcccttggatcacgaaaaagtgcatcttagtttaagaatggcttgaaaacacccatcctcatggttgtaggcaacacaaatggaattacatcccaaactatttctgaaccttttattagtgggaattagccatagttttaaggtttatgaaattgaagttggacagagttttatctgatagct

SEQ ID NO: 193670 - DNA, 657 bp, Gossypium hirsutum
gaaatcagtccccaaggctaccccccagcagcgccgattttcgccatttacagcccagagacgaccccctttcgaactccgatttcaacagagcagaacgagggttaacggcgcaaaaaacaaaggtcactttctcctttcttatttgctttatgtatatgcttatgtgtgtgtaaatagcataacagaggaaagaaggaagagcaatcgaaaaaaaaggataaaaagaaccccaatcgataaaggaaaaaaagaaaaccttctcttgtgtattgatttcgtttttttgatacagtatgcgtgtccccttgaaacaatacagaaatggggtttttatagccccgaaaatacatacatttcccttctattttttctatttttttcttttctgttgctattttgctatttttctttttctctttctgtttgctgctggtttgttgtgcaggtacgggtatggaggtgcgcgagcgcgcatatacggaggctatgcgtgaagaggcaggcgatcgtggggggagcgtacatgtgtgctggcgtcgatggctgaaggggagttggaaaccctagggttttctgtttcagctaggctaagtgttgggcctccgtaattgggctaaggttatttgggcttaggttttggctaattgggtttag

SEQ ID NO: 193671 - DNA, 791 bp, Gossypium hirsutum
cttattaaaagccaacctctcattgtttttccatttgagttactctcattgcgactctggatacattcagcaagccttgcacaatggccaccatcacctctgccgctgtcgctatcccatctttcaccggccttaaagccggtgcaaccgcagctaaagttagcgccacagccaaggttgcagcctctccagtcccaaggggcagcatcaaggcctccctcaaagacgttggtgttgctgttggggcaactgctgcaagcgtaatccttgccaacaatgccatggccattgaagtcttgctcggcagtgacgatgggggtctggctttcattcccaaagaattcagcgtaagcccaggggagaagattgtgttcaagaacaatgccggattcccacacaatgttgtgttcgatgaggacgaaatcccaagcggcgtcgacgtatccaaaatctccatgcctgaagaagagctactcaatgccaaagacgagacttacgctgttaccttgactgagaaaggaacctacagtttctactgttctcctcaccagggtgcaggtatggttggaaaagtcacagttaactgagttatacatttatcttttcaacccctttgtgctttgtatgtatcatctcacacatctcttctactttttgagcactagagttttgagtattggggatggatgaggtgatcttgaaaaatcaactatgatgcttttgtatcttcctatcttgtactttaaatttggctcatatttgcttggaacccggttttaattttacccttc

SEQ ID NO: 193672 - DNA, 437 bp, Gossypium hirsutum
cccacgcgtccgcccacgcgtccgcccacgcgtccgggtgggatagtgtctgatgatgataatgggaatgctgttgtcactgcacggcttcttgttccaaataatatgggaggatgtctcttagggagagggggtgatgccattcaaagactgcgaagtggcacaggtgctactatacgtgttcttccagctgatcatcttcctgcttgtccagtggcaacagatgaattagtgcacacatccggaaaacgagatgtcacatagagagctctatatgaactttccactctttcgcatcaacatccacggaaagacaagcctcctcttgagcttctactgtgccacattcaagccagaatttccctcctagggctcttccaccgagcaattcaatgtggtcgcatcgaaatttttctcctcatgatagtccaccaatg

SEQ ID NO: 193673 - DNA, 700 bp, Gossypium hirsutum
gtgtatagcttagacagtagcagtcttaaaaacaccgggaaccggaaacagtcgacgacgcagctaaacatgtcggaaagagaagaagattacgattctgatgcacccgaagagttttcaaatcagcagggaataaagcaagatgagaacataagaaaaatccagaaagaaaacaaggccagggttcgtcgtgagggaaaagaacgtcgaaggctttgggctcagaggaaaacaccccgtcaatctacaaaggttgaaaaggtccaagaagatgtagaaactgatgaggaatctcaggctaagaaggggatgcttcctaccaacatcgttgaaatgcttgcatctcgtgaaaaacaagttttcttatccgactccgaggatgagaaggctgaggtaaatccaattccgagaaagaaaaagaagaaaaactcaggggttgaacccgttattttgaatgacataccacctcctcaatgcttacaaagctccttggagttcttgaagaaagggaaaatgcaggttccaagatcatctttggttttaaagaactctaaccaagtactccgccttagttgtgccatatcaacttctgggttacgtgaaagttgtaaaagactgtaatgaagtttgctagtgtccttctgaacctgagattgtgccaatatttctaaaaaagggttcaatgcagcctattcctatt

SEQ ID NO: 193674 - DNA, 651 bp, Gossypium hirsutum
cccacgcgtccgcccacgcgtccggaagaactaaattccccagaatttgcttcagtaatggctgcctcagttatggcttcttcagttaccctcaagccttcattcaatgttgagaaatctggtgtaagaggggttccttcccttgctaggtccccttcttctttcaaggttgaagccagtggtggcaagaagatcaagaccgacaagccttatggaatcaatggtggtatgaacttgagggatggtcttgatgcctctggaaggaagggtaagggaaagggtgtttaccaatatgttgacaaatatggtgctaacgtcgatgggtacagtcctatctacaacaccaacgactggtctcccagtggtgatgtttatgttggcggtactaccggattggcaatctgggcggttaccctagccggaattcttgccggtggtgcacttcttgtttacaatacaagtgctttggcgcagtagatgtctctaaagtgatccctgcactcggttgcattataggctgtccgatgtaattgttgtgatcaacagaaccatcccacaactactttgcatatctttatgtagaatattttgccttggactgaattgagacctttgtattataacttaataatgtgctttgttttggtcttt

SEQ ID NO: 193675 - DNA, 799 bp, Gossypium hirsutum
  unsure (1)..(799): unsure at all n locations
cccacgcgtccgcccacgcgtccgcccacgcgtccggtctggcctttgaattgaaaccctcaaaattccactaaaaaatggcctccacagcttccctctccaccgccgtagccaccacctctttcctccgcggccatccggcgccgaaaaccctaaactcccttcctttcaaccaatctcttttcgggctaaaaccccaacgaaatggccgtctcaccatggcagcatacaaggtgacactgttaacacccgaaggaccccaagaattcgtgtgccccgacgacgtatacatcgttgaccaagctgaggaagaaggcattgatcttccgttctcgtgtagggctgggtcttgttcttcgtgtgccggagtgattaagcaaggctccgtcgatcaatccgacggtaatttccttgatgatgaccagattgctgcaggttttgtcctcacttgtgttgcttaccctcagagtgatgttgttattgagacccacaaggaggaacagcttaccgcttgattatatatgatactatataatataatcatcaactagaccaagatttaatcatctttttcctgtctgtttgatttatgtttgttcagtttggtcggagggatgatgttcatgtccctgcttgtgggagcctttaatgagttcatttgtaatggcatttgcatgctttattttttaaggctttttcttcatttgtagtagtaataaatcaacattgtttgtaaccctnnnnnnnnnnnnnnnnnnnnnnnnnnnnnnnnnnnnnnnnnnnnnnnnnnnnnnnnnnn

SEQ ID NO: 193676 - DNA, 494 bp, Gossypium hirsutum
accggaacggcagggccggcccaggcgtccggtaacagcacgcgtgcgaaacgcgtgcgctgtgaattgaaaccctcaaaattccacttaaaaacaggactacacagcttatgtctacaccggcggaaacacaacttttttcttcgggggcaccccggcccgaaaaccctaagcttccttcctttcaaccaaatctcttttcggccttaaaccccaacgaaatgccccgctcaccattccttcatacaaaattacacttttaacaccctaaggaccccaaaaatttcttttccccaacatactttacatccttcaccaaacttataaataaagcattgatcttccgttctcgtgtagggcgggggggggctacttctgtcccggaatgattaaccaaggctccgtcgtacaatccgacggtaatttgccttgatgatgaccagattgttgcaggttttgtcctcacttgtgttgctaaccctcagagtgatgtt

SEQ ID NO: 193677 - DNA, 473 bp, Gossypium hirsutum
cggacgcgtgggtaaaaataatataagttacttttataaaattcattatagaatcaacacagagtggttgataagagagagagagagagagagagagagagagagattataattctaaaaaaatatatataaatatatgcatgggtaaattacaatcatatttttgggagacatacataaagaggatatatcatctagatgtttgtatattaggaaggaatctagtccagaatccataataaaataatgaaggaagaggatatataatatatataagttagtgaattagaaataattccattatataatcttcaatgagatggataaggaaaaacaaacaaggttgaacaatttaatggttgatcctcgtaacatgcgtatataaattattgactttgagttggaggaaaattatatgatttctaaattagatttgtcttaataggtatatatatatatataaggttgaagga

SEQ ID NO: 193678 - DNA, 484 bp, Gossypium hirsutum
cttgaaaggccattattttattgccacttatcatcccttccaaccagactatcaagggtggctctaaaaaattgtttccagttcacctcagtttgcaacaccagagctagtgtgcttcaaagctaccatcatcatcatgtttcttctgttgacaagatccatttccagacatttaaagggttgaaattgaataaacccaatttatcattcactgctggtagatgccaaaaatccaggcttatatgcaaagccagtgaggctgttgctcaagttgaagtggtgacagaagcagactgggaagagcttgtggttggcagtaagacaccagttgtagtggatttttgggcaccatggtgcggaccctgtcgggtgattgaaccagctatagctgaattagccaaagaatatgctgtgaagattgtttgttacaagctcaacactgatgacagcccaaatattgccacaaaattcggtatcaggagca

SEQ ID NO: 193679 - DNA, 546 bp, Gossypium hirsutum
cccacgcgtccgcagagatctcagaactcattccacctcaccaccatttcatcattcataagtgcaccttccaaagctaagggcctctgagccttgttgtcatccaatcaattccaacaaaaatcctccattgttgatggttcaagcctttccatcatacatttgacacccatctctttgcataaaaattatgcaaatgaggaccctcaatgcagcaactccaagtttgacacctctctcggttctttctgagacaagaaccgaggccagaaaagcaccattgctccccattgcttcaccactcaaactacccaactgcccagcttttattaagacccaaccagctttgcaccagtgtttgtcaagaaccttgcatggtggcttactgcttctgtcatcacttctccccaatggtttcgctaaagccttgtcatacgaggaagccctacagcagactacgggattctcctcgtctgttgattttgacccaaatgggatccttgataccgttgtcagttttgtaactgagaatcccacggttatagc

SEQ ID NO: 193680 - DNA, 1128 bp, Gossypium hirsutum
  unsure (1)..(1128): unsure at all n locations
catagctatatcatatgagggttgtaactcactggtggctgtgcacatagtgtgtgaagaggcttgctgctagaaggaaaacgctgtgcagtatcaatataggctgccaatactgatggcgatgtgacgtctgatgcggccaaagatgctacactaaatgctctagttgctgcttgctatggagctggtgcacaaacgtgcatggcactacacacactaggcattcatggcgactctcaatcatctgtgaatgacctggtacagggtcgcctaaagacatatagtgaatgctggactataacccaatgcagaccttgggacagtgattaacatacaggctagagaacgaatatgctgattcgttcaatctggagttgagagtggtgcaaaactactgcttgatggtagaaatatcgtggttccaggatatgagcaaggaaattttattggtccgacaattttaactggtgtcacagctgacatggaatgctataaggaggaaatcttcggcccagttcttgtttgcatgaaggctgacagcttggaagacgctttaaacattgttaacagaaacaaatatggtaatggtgcttctatatttactacatccggtgctgtagcgaggaaattccagacagaggttgaggccgggcaggttggcatcaatgtccccataccagttcccttgccgtttttctcatttactggcaataaagcatctttcgcaggcgaccttaacttttacggcaaggctggagttaactttttcacccagattaaaacagttactcaacaatggaaggatttacctagcggcagcggtgtttccctagcgatgccaacatcgcagaagttataaccatgatcggattgttctttcaggagttgtaggtctgccctgtaccaatgtcaagatcttcacttaaccacctttcaactgattccctatactgctagtttataagacgggaaaacaagggaaataagattgtccttaatgttatttaactatggttgtggacacatttttgttcgcggtcacatttatagtggttgcggatgtaatgcatgctattactggcaattgtggtaaatatcggttgttaaatccatctcttttggnnnnnn

SEQ ID NO: 193681 - DNA, 1400 bp, Gossypium hirsutum
gatcggaagggccggggccaggcgcacgcgtccgtaaatttcccctacgctctcactaaaacaactctctcttctttgttttccaatagttcgtaacaatgtcggtctcacttcaagctgcagctaccctgatgcaaccaatcaaggttgctgcaccatcaaggaccaatgtgctgctcaggtcctcccagagcgtttctaaggccttcggtttggagcctgttggtgctaggctcacctgctctttgcaaactgacctcaaggacttggctcagacgtgtgttgatgctaccaagctcgctggtttcgctcttgctacatctgctcttgttgtctcgggagcaagcgctgaaggagttccaaagcggctaacctacgatgaaatccaaagcaagacatacatggaagtcaaaggaacaggaactgctaaccagtgcccaaccatcgatggtggtgtcgactcttttgccttcaagcctggcaaatactacgccaagaagttctgcttggagcccacttccttcactgtcaaggctgagggtgttaacaagaatgcccctcctgagttccaaaacaccaagctcatgacccgtttaacctacacccttgacgaaatcgagggccctttcgaggtatccaccgatggcaccgtcaaattcgaggagaaagatgggattgattatgctgccgtcacagttcagcttcctggtggtgagcgtgtgcctttcctgttcaccatcaagcaattggttgcatcaggcaaacctgatagctttggaggagacttccttgtaccatcctaccgtggctcatctttcttggacccaaagggaaggggtggctcaaccggttacgataatgcagtggccttgcctgctggaggaagaggggatgaggaagagctagccaaggagaacaacaagagtgctgcatcttcatcagggaaaatcaccttgagcgtcacaaagagcaagccggagaccggtgaagttatcggtgtgttcgagagccttcagtcatctgacactgacttgtgtgccaagactccaaaggatgtcaagatcactggtgtctggtatgctcagcttgattcataaacaagtcttgtatgaatttgtttattctcggctgagattttgtaatttttaaacaagtgttgctaaactttgcagtaatccactgagaaacccttatcttctttgtatgttactatgttggcttcttataataattttctaagcttctactacaaacccgttacttttgatcaaagcactgggaatcctggaaactaaataatctcactctcattaaggagtttgaatgtaaatgatcaataaacggccttggttcttccgtgcaagtgggggtaaaaccatggcttcaagtacttcaacatc

SEQ ID NO: 193682 - DNA, 693 bp, Gossypium hirsutum
caaaatgttattcatggctactttatctacactccatactactttcacttgtcattccttgcggtatcagaaatcctttaacacccccttttgccttaacaaaaatcccatttggaagaaaacaatcaaaactccaactctaaccgcttcggttgccacggaagctgtcactgagactgaaacaccatccgacttcatcattcctcagaaacctgaggaggtggtcaagcaagttggaaagccaagactggttttgaaattcatatggatggaaaagaacatcgggcttgcccttgatcaagtcataccgggccacggcactgttcctctaagtccatatttcttctggccaaggaaagatgcctgggaagagctcaaggccactctagaaagtaagccttggatttctcagaagaagatgattatccttctcaatcaggccactgatatcatcaatctatggcagcaaagtggtggcaacctttcccagagctagatgtgcattttttttatataattttttttgtcttagctatgcaaaaaggcctcggttaattcactgatattgagaatgtctggtttgaaacctcttatctcttaactaagatatgaattgatggttttaataggataacaaacactgctgaattgttggtatttcccttaaaatccacatatttgtttatttatcat

SEQ ID NO: 193683 - DNA, 940 bp, Gossypium hirsutum
  unsure (1)..(940): unsure at all n locations
gtttttctttgtcatcagcacagggactttgatggcagtcacagtgcttgtttacatccaagatgaagttggtcgaagttggggttatggaatctggttccgcttcaatgttcattgcactcttgatattcttttcgggaacgaaacgataccgatacaagaaatgttcgggaagccccattgtacatatttgccaagttgtttctgctgcatctgcgaaaaagacggctaaactcccttctgatatttccttgttgtatgaagatctccctgaggcatcacgaatccatcacacggatcagtttcgcttcctggacaaggcatctgttgtgacagaagatgattacagacaaggttccttcatgatgaacccttggaagctttgtgcagttacaagggtggaggaggttaagaagatgatcaggctactcccgatttgggcaacaacgattatattttggacgacatatgcacagatgatcactttctcggtggaacaagcaaccaccatggagagaaccataggacatttccaaattccagctggttcacttactgtcttttttgtgggagccatattgatcagtttagctgtttatgatcgttttattattccactttgtaaaaaatggagaggtgaaccagggtttacaaatctgcaactgataggcataggtctgttcctgtcagccatgggaatggcagctgcagcagtggtagaggtgaaacggctatcggtggcaaagaaatacaatgaaacaaccacactaccgataaccgttttctacctgattccgcaattcttcttggtgggtgctggagaaggatttatatacactggtcaactggatttcttcatcactcaatccccaaaaggaatgaaaacaatgagcactggcctcttcctcaccactctttcactcggnttcttctttagtag

SEQ ID NO: 193684 - DNA, 791 bp, Gossypium hirsutum
tttccggggtgagcccatgcgtcaggtaaaccctattttgtcaccctatcttttccagctgtagttgcagtcgaagtcgcggcatatccagtttaatactcctaccgtaaagatgaacaaggaaaggctcatgaaaatggctggtgcagtccgcactggtgggaagggtagcatgagaagaaagaagaaggctgtccacaagacaaccaccaccgacgacaaacgattgcagagcacccttaagagaataggagtgaatgctattcctgcaatcgaggaagtcaacatattcaaggatgatgttgttatccagtttattaatcccaaagttcaagcttctattgctgccaacacctgggttgtaagcggttctcctcaaacaaagaaattgcaagatattctccctggaatcatcaaccagttgggacctgataacttggacaacttgaggaaattggcagagcaattccagaagcaggcacctgctgccggttctggtgacggtaccggtgcagccactactcaggaagaggacgatgaggaggtaccagatcttgtacctggcgagacctttgaagctgcagcagaaggccaagctgctaaatagagtttttatctttaattttcttttgttatatgtttttgatgaatttaactatttgtttctttttccaaaatttctctatctgtggtttttgtttgctctaccttgtactcttaatggtttggttcagggtaagccttctagaattcctattattattgccaatggattagagatgcattttccc

SEQ ID NO: 193685 - DNA, 397 bp, Gossypium hirsutum
cccacgcgtccgacttgaggaaattggcagagcaattccagaagcaggcacctggtgctggtgagggtaccggtactggtgcagtcgccactcaggaagaggatgatgaggaggtaccagatcttgtacctggtgagactttcgaagctgcagcagaagaagtccaagctgctgctaaatagtgtttttctctttaattttattgttatatgttttggtaggtggtttttggtgctctttccttgtactcttaatggtttggttcagagtaaaccattttgttttctagaattcctattattattggcaatggattagatgcatttttcccaaaggccaatagtattgtcttggaatcctaatctatgcagtaaatcttatctacagtttaagttgc

SEQ ID NO: 193686 - DNA, 441 bp, Gossypium hirsutum
atttctctttttcctttcactcgctgaactgagaaaggaaaggggacagggagatggcaattaccttccataacgcttccttcagatctcctttcattaaccctagctctgaccctaagcctaagtggctatgccccgacgcagctttccggtctcatctcttctccactgtcttccttcaactccaaaacgacatgtctcaaatttgggtctaggactttcactaaaccggtcaagtgctctgtgtctcaggcggctcaacctgcaatcgagaagaggaggcagttaaagaggcgaagcgatataaggaacatagcaatcgtggcgcatgttgaccatggaaagactactttgggcgatgcaatgttgaaacagtcaaaggtttttcgggacaatcaattcgtacaagagagggtaatggactcaaatgatcttgaacgg

SEQ ID NO: 193687 - DNA, 529 bp, Gossypium hirsutum
gagagacgaggcttgtttgcttggcacctttgttatatctctaaaaacacttgtacaagggtgggggtacaatatgaacgcggctgtggctgatgcagcggactacaatggacaccctgctaacaagtctagaactggtggctgggtacctgctgctctcaactaatgaattgaaatatgtcacgcgcccgcaacaatgggaatagcagtgaaccttgtgacttacttgggtggagccatgcaccttccaagcgctacttctgcaaatgttgtgacagacttcatggggacatcatttctactatgtttactgggcggctccctagccgattcatacttgggcagataccgaacgatcgctatattctccatggttcagatgcttgggacttgcctgctagcagtatctacgaaactcccacaactacggccaccttcgtgcaagtataccgacgtaacacaatgcgaacaagctaacaacttttaaatgggaattctttatctttcaatatatctaatagcattaggg

SEQ ID NO: 193688 - DNA, 516 bp, Gossypium hirsutum
ggtggaggtcgttgtaagggattgtagtgagtggtgccttgcttgtttaaatagagcttggctactcatcttctttaacagcttatagttgttcccttcatattgtagagagcggaggcttctttgcttgccacctctcttttatctcttcaaacacttctaaaatcatggatgagaagatgagtttgactgttgctgatgcagtggactacaagggtcaccctgctgacaagtctagaactggtggctgggtacctgctgctctcagcttaggcattgaaatatgtgagaggctgtcaacaatgggaatagcagtgaaccttgtgacttacctgggtggaaccatgcaccttccaagtgctacttctgcaaatgttgtgacagacttcatggggacatcatttctactatgtttactgggcggcttcctagccgattcatacttgggcagatacctaacgatcgcaatattcgccatggttcagatgcttggaacttgcctgttagcagtatcga

SEQ ID NO: 193689 - DNA, 660 bp, Gossypium hirsutum
  unsure (1)..(660): unsure at all n locations
cccacgcgtccgcccacgcgtccgcccacgcgttcgtttagaaccttttcttgcacgtgaaaatggattcttcactcactgatcagcagcaagacaagtaccgttcttacttgcatggagaaggtgaaaagaataccaactggaagcttggtgctcctccaaactatgacactgttaacaagctctttgaagaaggccgaaccaagatatggcctcctgcatcactagaagagaaggtccagaaccttgtgaagacatgggaaatggaaatgttcaataaaatatccttccctgactacaaatcagtgaaactacagaattatacagtcagcgtgaatgggaggaaacctttgagtttagaagagaagaggaagctgggaggaggctataattcctttatgcaaacctccttaccagaggacctgaggggctataatccagcacaagaaactgaacactcctcacatcttgccttcacaacagctttcccaagaggatttgctttggaagttatccaagtctactctggcccgccatcgattgtgtataagttcaggcactgggggtataagggagggtctttcaaaggccatgcccctactggggaactngttcaactntatggaatatcaattnttgaggttgacgatgagatgaaaa

SEQ ID NO: 193690 - DNA, 734 bp, Gossypium hirsutum
atcatagcactctttcttgcatagcatgcaaccgttaagcagagaagatatgatgttgcacgccatgaaatctataataacctttatgcaaacctacttacaaacgacctgacgggctattatgcaacacaagaaactgaacactactgacatcttgacttgacaacagctttcccaagaggatttgctttcgaagttatccaagtctactctggcccgccatcgattgtgtataagttcaggcactgggggtataaggaaggtcctttcaaaggccatccccctactggggaacttgttcaactttatggaatatcaatttttgaggttgacgatgagatgaatatcttgaaggtggagttcttttttgatcgtggggagctgcttggaggtcttatgaaaggtgataaattgactagtggaactgaccaagcggctttgagctgcccattcttgaggaacacagggtagcctagcgttgatgggtatgcatgaattgcagcgtttagctttgatgggaatgcatgaatttagtgtttgagaaataaaactgatggatcattacataatatagaatagtgagcttccatttacttctgctgattcacttatgcctgccatctatatgtatctgtagaaattgagatgtacaagcacacgagcataacatggcctggttgtatttttcaggacgaatatagtttcggtatctacatattgattcttgctgaaaa

SEQ ID NO: 193691 - DNA, 702 bp, Gossypium hirsutum
gagggtatcatgagggaggctctcttagacttttatacacgttcagggaagaggaagcctgatcagatcattattttcagggatggggttagcgagtctcagttcaatcaagttttgaacaaagaacttgatcaagttattgaggcttgcgggttccttgacgagaattggaaccctaagtttgtggttattgttgcacaaaaaaaccatcataccaagtttttccagcagggatctcctgacaatgtgctacctggtactggcattgacaacaaagtatgccatccgaagaacaatgatttttacctttgtgctcatgctggaatgatagggaccacatggccgacccactatcatgttctcttagaccaggttgggttttcagctgatgatctgcaggagcttgttcattctctatcctacgtgtatcaaaggagcaccacagccatatctgttgtggcccctatttgctacgctcatttggcagcttcacagttggggcaatttatgaagtttgaggatgcttcagagacatcatcgagccatggtggggtgactgctccgggagcaatttctgttcctcagcttcccaggttgaaggataatgtcagcagctccatgttcttctgctgaaaaccgttgaaccatctttttgtatagggcttttggattttggctaccaaaaactgtttatgctgcttt

SEQ ID NO: 193692 - DNA, 1411 bp, Gossypium hirsutum
ccgggacatggaacgggccagcacgcgtccgcccacgcgtccgagagaaagcactgaaaacagcaaaaccatggcctctgcttctctcctcaagacttcaccagttttagacaagtctgagtgggttaagggtcacacccttcgccaaccttccacttctgtggtgaggtgccaccctgttgcaccctccggactaactgtgcgtgcaagctcatatgccgatgagcttgtcaagactgctaaagctattgcttctcctggccgtggaattttggccatggatgagtccaacgctacctgtgggaaacgtttggcctcaatcgggctagaaaacacggaggctaaccgccaagcctacaggacgttgcttgtttcagctcctggccttggtcagtacatctcaggtgccatcctctttgaggaaaccctctatcaaaccacaattgatggcaagaagatggttgatgttcttgttgagcagaacatagtccctggtatcaaggttgacaagggtcttgttccactggctggttcaaacaacgagtcatggtgccaaggtcttgatggcctcgctccacgttcagctgcatactaccaacaaggagctcgttttgcaaaatggcgtactgtggtaagcattcccaatggaccaaccgaacttgctgtgaaggaagcagcctggggacttgctcgctatgccgccatctctcaggacaatggattggttccaattgttgagccagagatcttgcttgatggtgatcacggaattgacaggactttcgaagtagccaaaaaggtatgggctgaggttttcttctatcttgcccagaacaatgtgatgtttgaaggtatcctcctcaagccaagtatggtcactcccggtgcggagtgcaaggacagggctactcctcaacaagttgctgattacaccctcagcctcctccgccaaagaatccctccagctgtccctggaatcatgtttttgtctggtgggcagtctgaagttgaggctaccttgaacttgaatgcaatgaaccaagctccaaacccatggtatgtgtcattctcatatgcaagagcccttcaaaacacttgcctgaagaagtggggaggcaggcctgagaatgtgaaggatgctcaggaagcgctgctcatccgagcaaaggccaactctcttgctcaactcggaaagtacactggcgaaggagagtcagaggaggccaagcaaggaatgtttgtcaagggttatgtctattagcatgtttgtatcttcaacaggtcaatgaatttcctgcactgaaaatttaattgaaagagcagaacactgatctttcattataaaatattaggtttccccctttttttccctcttaataattatgttaaagcataagaattagaccaatcc

SEQ ID NO: 193693 - DNA, 933 bp, Gossypium hirsutum
gcaagagtgagtgaaccagaggaagagaacccaaagaaaatggcactcctttgtgcttcaacctcagtcatcttctcttcttcttcttcttcagagaggccttcctttgcttcattgaaaaggactagtcccagtaaccaaagctcatttcttgggttcttccctgtagtggcattgtccaaaccttcttatgctcggacaacaaccttgtctttctccaaacgggatttcaaggtttgctgccgggacctatctcttgtccctgaaaaccaacgttggatgttcgaggaatccgaggctgatggccctgacatttggaacaacacatggtatcccaaagctaaagaccacattaataatgaaaaaacatggtatattgttgatgcagctgacaaacattctgggaagactggcatcaacaattgctgtgcatattcgtggaaagaatttgcccacttatactcctagtgtcgatatgggtgcttttgtgatagtggtgaatgctgaaaaagttgctgtatctgggaagaaaaggacccaaaagctctacagaaggcattcaggaagaccaggtggcatgaaagtggaaacattcaaccagctgcagcagagaattcctgaaagaatcattgagcatgctgttcgtggtatgcttcctaaaggacggcttggtagagcattgtttaaccacctgaaggtttacaagggccctgaccatccacacgaggcccagaagcctattgagctgcctatacgggacaagagggtgcagaagcagagataatcgaactataaagcagggtctggcttgtgggtgcgcgggcaatgcttcacatcctgcttgccatttactcatgtttttggtcctccgagtatgagcttctttctttggctctccatgacagcatgctgcacttgtttatattttgattg

SEQ ID NO: 193694 - DNA, 1248 bp, Gossypium hirsutum
ttcacgcgtccgcccacgcgtccgcccacgaatccaccttgttctccccccttctccgtctttctggcaacatgggttcaccaccactttgggttctgcttctgggtgtgttgtttatggcttccggaacaatcgcagctccccctaagaagcctgtagatgtaccattctccagaaactatatgcctacttgggcttttgatcacattaagtatttcaatggtggctctgagattcagctccaccttgacaaatacactggtactggtttccagtccaaaggatcatacttgttcggacacttcagtatgcaaataaagctagtccctggagattctgctgggactgtcactgccttttatttgtcttctcaaaactcagagcatgatgagatagattttgagttcttgggcaacagaacagggcaaccatacattcttcagaccaatgtgttcactggtggcaaaggagacagagaacaaaggatttacctttggtttgacccaaccaaagaataccactcctactctgtcctctggaacatgtatcagatagtgttctttgtggacgacataccaatcagagtgttcaaaaactgcaaagatttgggagtgaggttcccattcaaccaaccaatgaagatatactccagcttatggaacgccgatgactgggccacaaggggtggtctcgaaaagaccgactggtccaaagccccattcatagccgcatacaagagcttccacatcgacgggtgcgagtcgtcggtggaagccaagttctgcgccacacagggcaagcggtggtgggaccaaaaggcattccaggacctcgacgcctatcagtggcgcagattgcgttgggtccgcaacaagttcaccatttacaactattgcagcgatagggtgaggtaccccacgatgtcgcccgagtgcaagagagacagagacgcttgattcatttccatcaccaccgagtccaagttccccccttatattcttcactaccatatgagatccgtcattgtcctttagatttcaattgcttgttggccttcacttatttccacatcaatttcattatatgtaattttactcctaaaacatttgttttcgtgataatattatttaaacatagattacaatctcttgacaggggacaagagcattatcttgtaagtataagtataagaagcttggattcgatttcaagaaataaaagtctatttaaaaaaaaaaaattttggtg

SEQ ID NO: 193695 - DNA, 1006 bp, Gossypium hirsutum
ctcaatctttatctccttcaattgtttgtttttgggttagaaagctctgtttttttattacccttttcatcaaaaagcttcaatctttcaaccatgttgcttaaagcttcccctgctttttctttgttgaagaatccccaagttgaaactcgggttcctctgttttcaagaaacggttctggggttgggtctggggctgttgttgtttgtgctaccaaaggagccaataataagccattaacaggtgtgatttttgagccttttgaggaagttaagaaggaacttaatcttgtcccaactgtgcctcaaatgtccttggctcgtcaaaagtttgctgatgagtgtgaagctgccatcaacgaacaaatcaatgtggagtacaatgtttcatatgtctaccatgctatgtttgcctattttgatagggacaacgttgctctcaagggtcttgccaagttcttcaaggaatcaagtttagaagagagagagcatgctgagaaattgatggaataccagaacaaaagaggtggaaaagtgaagctgcaatccataatgatgcccctctctgagtttgatcatgcagagaaaggggatgctttatatgcaatggagcttgccttgtccctcgagaaactaacaaacgaaaagctcttgaacttgcacaacgtggctgagcgaaaccatgattcgcagttgaccgatttcatcgaaggcgagttcttagctgagcaggtcgaatccatcaagaaaatatcggaatacgtggctcagctgagaagagttggcaaaggacatggggtgtggcactttgatcaaatgcttctccacgagggagctgttgcatgaaaacttgaccagagaaaccgccgcttgcttctgataccagcgatccttcttttaagttcccgtgttagtagttgttgagagattaagttttgcaagttggatggctagtttagaaaactttgtgttgatgatataagaagattgagagactcaaaaggga

SEQ ID NO: 193696 - DNA, 449 bp, Gossypium hirsutum
accactacttgttatttgcattaaccttcactctcctctttattcatcaaccctcgtattagcgtttcttcttcttcttcttcttcaaaagcttcatcccgccatcttccctcattctcaaaacgttttggcgtctatttgccaggtttataactcagaaatcaaagctcgaattagcgattgtgccaacaatacgtatgaagtcagggatgctaagtttaagatctggaaacccttgctttcaacagcattggcagcagccatagtcgcttttggctctgaatatctctgctatggcgtgaacctaataagtttgaggcagaaactcgcggtgaatttaggtatcgcgatctgctgcacagtttggttctgcggatttgaaaaaagctgttcacgtgaacgaaaatttcagaagggcaaacttcacatctgctgatatgagggaatct

SEQ ID NO: 193697 - DNA, 1386 bp, Gossypium hirsutum
  unsure (1)..(1386): unsure at all n locations
gccacgcgtccggctggaacaaacataattgcactgctgagtgttgctgatggatgaccgcatgttggtggacactatgagacatggaatacagggatcctacgtccagatgcactgcatgacttgaccaacgcaaatgggacctgtgcaggcaaaaatggacttaccagggtggtcttaaaggagaggccatggatctgggctcaccaaatggattttccgcagctgagtggatggcggcatcattggttgcacaaaaaccagagccattaagatggcataaggcttattttaatgcacctgacggtgatgagccgttagctttggacatggtgagcatgggaaaaggtcaaatctggattaatgggcagagcataggcagatattggacagcatatgctcatggtgactgcaatggttgtaattatgctgggacgtttcgaccaccgaagtgtcagcttggttgcggccaaccaacccaaagatggtaccatgttcctcggtcttggctgaaacctacacagaatctgttggttctttttgaggagctgggaggagaccccacaagaatctcacttgtaaaaagatctgtgtccagcgtttgtgccgatgtcactgagtatcacccgaatattaagaactggcagattgaaagctatggaaaggcacaacagttccgcagaccaaaagttcacttgcgctgtagtcctggacaatccatctctttcattaaattcgccagttttggaactcctttgggaacttgtggaagttaccagcaaggcccttgccatgctcctgctacatatgccatcgtggagaagaaatgtgtagggaagcaaagatgtgtggtcaccatagccaacagtaacttcgggcaagatccatgcccgaacgtgttgaagcggttgtctgtggaagctgtttgtgctccgatatcttcaacaacagcacagccaaactggggaggctaataagattgaaacactcacaaaggaactctatagcgcttgcatctagtaatttaaccatacagaagcaagcaccaaagaagaaaataaaaaagaagagtgcaaagaattggcgtttagttagggttaggttgagtgccatagcatttcaaaaatggagtgctttggcaaaaggtgttcgctgttcaatgctataggcaatgagttattttaattttataaaaaagaaaaaaggttaagtgaggttaatagactactgtaaattagtgatcgaaagataggtgagtttctaaattcttagggtccttcaatttaggcccgaagggtgaaatgtcttgcatgtgtnccncngactttttaataacccgatacacggcccaggaatacaagatgcatgtcngtttgcttttgcnna

SEQ ID NO: 193698 - DNA, 666 bp, Gossypium hirsutum
cccacgcgttcgcccacgcgttcgcccacgcgttcgcccacgcgtgcgcgcatgggttttcattttcaaaccccactccccccatggctggtctcaagcttatttgtggcctagtattgttgtgcatgttggttttggaacccatggccacaactgctctcacatgtggacaagtggcaagccaaacgggtagttgtataaggtatttgcagcgtggagggaaccctccagctgcttgctgcaacggagttaggaacctaaacaggcaagctagaaccacccgtgaccgtcaaactgcatgcagatgcttgcaaactgccgctaggaccatctccggtatcaatactaaattggctgccggtcttccggccaaatgcggtgtcaaaattccttacaagatcagcccctccaccaactgcaatagagtgagatgatcatggatgaagtaagcagcttgcaggaaatgttatatatatatatatataagcgtgaaataaagattttgggatggatgcttattccaaaatccaaattagtgtcttgattaattatttgtttatctttgagatgttggctctaattatgttgtctatgtatggaatgttcagtgttttatgaggtaaaaagcctatgttttattatattacatgatatctggattgtttc

SEQ ID NO: 193699 - DNA, 423 bp, Gossypium hirsutum
agtttctaaagcaaactccggaataccggttccaagctctttcctcttcctttgctaactgttctactttacacgttggatcacacgtctttctttcttcttcttgtttctttcatttccttcttgttgtagctgccagttttttaagtgtcatacaggagatttagagtacaagaggagaatatttttgtttagcttagtcgcctccgggatataacggctgaattgttttaattttgacaagcgtgctaaattgtgtgatggtaattgtatcaaagtgagaagaatctgtatgatggccactgctgctgtgattggacttagcaccggaaagagactcttgagctcttccttttcttattcggataccgtagataagctgtcgtatgctggtgattatggatcttcatattatcaaactcc

SEQ ID NO: 193700 - DNA, 820 bp, Gossypium hirsutum
atcgtgttattatccattaaaatcttcctctccacccttgaaccatgtcggcttttgttggcaagtatgcagaggagttgatcaagaacgccaactacatcgccacgccaggcaaaggtattttggcggcggacgagagcacaggcaccatcgggaagcgtctctcgagcatcaacgtcgagaacatcgagtccaatcgccaagccctccgcgagctccttttcacctctcccaacgcattatcctgcctctccggtgtcattcttttcgaggaaacactttaccagaaaacatctgacgggaaacccttcgttgaaatcctcgaagagaacaatgtcattccaggtatcaaggtcgataagggcaccgttgagatagccggcaccaatggcgagaccactactcaagggttcgactccttgggtgcgcgttgtcagcaatactataaagctggtgcgcgtttcgccaaatggcgtgcagtgctcaagatcggtcccaacgagccatccgagttggctatccagcagaacgcgcaggggttggctcgttatgccatcatttgtcaggaaaatgggctcgtccccattgttgagcctgaggtgctaactgatggccctcatgatattaaaaaatgtgccgctgtcactgaaaccgtgcttgccgctgtttacaaggcgctgaatgatcaccatgttttactcgagggcacccttttgaagcccaacatggtcactccaggttctgacagcctaaaggaggcaccagaggtgattgcgcaatacacagtaaccgcacttcgccgaaccgttccaccagcagt

SEQ ID NO: 193701 - DNA, 454 bp, Gossypium hirsutum
cccacgcgtccgcccacgcgtccgtcttcctccccacccttaaaccatgtcggcttttgttggcaagtatgcaggtgaactcccgtttaggaatttggctttcactgtcttctcctgcatgttttattccattgtatttggggacatgcatgtaaatccttaatgaccacaacacttgatcgatccgtaccataaatgttcaaattttcattacagatatgctattttatgcataattttgttagtcctagctttgactaaaccctgtatgtatattttcccccagaggagttgatcaagaacgccaactacatcgccacgccaggcaaaggtattttggcggcggacgagagcacaggcaccatcgggaagcgtctctcgagcatcaacgtcgagaacatcgagtccaatcgccaagccctccgcgagctccttttcacctcttccaacgcat

SEQ ID NO: 193702 - DNA, 1229 bp, Gossypium hirsutum
ttcacgcgtccgcggacgcgtgggttcccaaaccttaccttatctagggttagggttttgctccttctgagtttctctcagtaccaaaaatatccccaaattgaagatgatgcaacaaccagcacaagctatggtaccaccaccaatggctccacagacccaacagtaccaatatcagcaaccacctccggctccggttcctcaggcacaacaaccttacatgatgatgaacatgatgcagccgcctcagagtcatcctccacctatgtggcccccacaacaaggttcggctggggtacctgctcaacaacagccagctggtcaaccggctaacgcagatgaggttcggactttgtggatcggagatttgcagtattatatggatgagaattatctcttgagctgttttgcccaaactggagaggttgcttctgtaaaagttatccgcaacaagcaaaccggtcaagtggagggctatgggtttattgagtttgtttcaagagctgctgctgagagagttttacaaacatacaatggtacacctatgccaaatggtgagagcaactataggctgaactgggcatcctttagttcaggtgataggcgagatgagacccctgagttcacaatctttgttggagacttggctgctgatgttacagattacatgcttcaagagaccttcagggcacactttccttcggtgaagggtgcaaaggttgtgattgataggatcactgggcgcacaaaaggttatgggtttgtcaggtttggcgatgaaactgaatataatcgtgccatgactgagatgaatggtgctttttgttcaactaggcctatgcgcatagggccggctactaacaagaagactggtgctgcacagcaatatccagcagcttcatcgcaagggactcagaacgagaatgatccaaataatacgactatatttgttggtaatttggattctaacgtgactgaagaccatttgagagaggtcttcagcccatatggtcagttggtgcatgtgaagattccacaaaacaagcgttgtggatttgttcaatttgctgataggagttgtgctgaagaagcactccgaatactgaacgggactcagttgggtggacaaagtattcggctttcatggggtcgtagcacatcaaacaagcaggcccaagcagatccaaaccagtggaacgctggatattatggatacagccaaggatatg

SEQ ID NO: 193703 - DNA, 446 bp, Gossypium hirsutum
tccacgcgtccgctttcatatttcccaaaccttaccttatctagggttagggttttgctccttctgagtttctctctcaataccaaaaatatctccaaattgaagatgatgcaacaaccagcacaagctatggtaccaccaccaatggctccaccaccttctatggcgggtgctccacagacccaacaacagtaccaatatcagcaaccacctccggctccggttcctcagacacaaccaccttacatgatgatgaacatgatgcagccgcctcagagtcatcctccacctatgtggcccccacaacaaggttcggctggggtaccagctcaacaacagccagcgggtcaaccggctaacgcagatgaggttcggactttgtggatcggagatttgcagtattatatggatgagaattatctcttgagctgttttgcccaaactgg

SEQ ID NO: 193704 - DNA, 578 bp, Gossypium hirsutum
gtgacggccaaagctttcccttcctctttctctgaaattgtttcaaaaaatttccccttttcgattcaatcatgagtaacgaatatgattatctgttcaagcttctgcttatcggcgattcctccgtcggaaaatcctgcttgcttctcagatttgctgatgattcttatgtggatagctacatcagtaccatcggtgttgatttcaaaatcagaacagtggagttggacggcaagacaatcaagctgcaaatttgggatactgctggacaggagcgttttcggactattactagcagctactaccgaggagctcatgggataatagtcgtctatgatgttaccgagatggagagcttcaacaatgtcaagcagtggttgaacgagattgacagatatgctaatgacagtgtatgtaagcttctggttgggaacaaatgtgatttagttgagaacaaggttgtcgacacgcagacagcgaaagcatttgccgatgaaattgggattcctttcctggagacaagtgctaaagattcaatcaatgtggagcaagctttcttaaccatggctggcgagaat

SEQ ID NO: 193705 - DNA, 1604 bp, Gossypium hirsutum
cggccccgtggcctttgccttcacaacttacaactcagcctctcctctctctttctctcttcgcctccaaatggcttctgccaccacttccaccactctttccctcctcaaaaccaccgcctccaccacctcttcctccgcctcccgctcttctgcatccctcatccgccttccttccacgcgccgccacctcaagtcctctcctctcatccacagcctaggcttctcctccgctgcttctggggactctctgctttccctccatgtctcctccaaagttcgatctttcaagggaaaagggtcaagaggggttgtttcaatggccaagaagagtgttggggacttgactgccgctgatttgaaagggaagaaagtgtttgtgagggctgacttgaatgttccattggatgatagccagaacatcactgatgacaccaggattcgtgctgctattcccaccatcaagcatttgattcagaatggagctaaagtcattctctctagccacttggggcggccaaagggtgttactccaaaattcagcttggctcctcttgtacccaggctttctgaattacttggcattcaggttgtcaaggctgatgactgcattggtccagaagtagaaaagttagttgctgcacttcctgaaggtggtgttcttcttcttgaaaatgttagattttacaaggaagaggaaaagaatgaacctgaatttgcaaagaagcttgcttcgttagctgatctctttgtcaatgatgcatttgggactgcacatcgagcacatgcatcaacagagggtgttacaaaattcttgaagccatcagttgctggtttccttttacagaaggaactagactaccttgttggtgctgtttcaagccccaaaaggccttttgctgccattgtgggtggctcaaaggtctcttccaagattggcgtcattgaatcactccttgagaaatgtgacattctccttcttggtggtggtatgattttcacattttacaaggcacaaggcctatcagtcggttcatccctggtagaggaggataagcttgaacttgcaacatcacttcttgtaaaggccaaggcaaaaggagtgtctcttttgttacccactgatgtggttatcgccgacaagtttgcccctgacgcaaacagcaagattgtgccagcatctgctatccctgatggctggatgggattggatattggacctgattctgtcaagacattcaatgaagctttggatactacccaaaccatcatctggaatggaccaatgggagtgtttgaatttgagaaatttgcagttggaactgaggctattgcaaagaagctagctgaacttagtggcaagggagtgacaacaatcattggaggtggagactctcctgctgctgtataaaacgttggagttgctgatgtcatgagccacatatcaactggtggtggtgccagtgtagaatcgttggaagggaaggagcttacacgtgtgattgccctggatgacgctgtttcagttgctgtgtaagatcgaatcaaatttttcacatcctcactgcgtagtgatttattcacacaataaatgctttatgatg

SEQ ID NO: 193706 - DNA, 629 bp, Gossypium hirsutum
  unsure (1)..(629): unsure at all n locations
ggaaaacgttacgtttccagcactggggagccattgaagaaagttgagttgagccatggctcttatctccaatcctccggacgattcgcgcgacctctgtctctgccccatcccctaagcttcccccttctatctcttcaccccaacgctttcccttcttaaccaaacccctccgacccaatgccttcaatctctcaacatcatcatcagctcctgatcagaaatggagggttaacgtttctttcttcccagctttttttaacaaaggcaaggacgctaaggttctcaagcaagaccttcttgattgcattgcaccacttgaccgaggtgccgatgccacccccgtggaccagcagagagttgatcagtttgcaagcaaacttggagcagttaatcccacaaagcagcctctgaaatctgatttactaaatggaaaatgggagcttatttacaccacttccaaatctattttgcaaactcagagacccaaattcctaagatcttctacaaactaccaagcaatcaatgtggatacatttanggcccaaaacatggaatcttggcctttcttcaaccaggtgacagcagatttaacacctctgaatgcaaggacagtggctgtaaaattt

SEQ ID NO: 193707 - DNA, 434 bp, Gossypium hirsutum
aaaaccggggcggcccacgcgtccgcccacgcgtccgttcgcatttcggagaagtcgcagagggagagagagagttgaaacgatttcgtttttggtgatagaaaacaaatggcggtttcatcatgttcatttactcttagccctagggtttgtaatccatattcttcatttgagtgccgtccagatcccgatttctccagtgcgccgatcggggacaagcctcgtcttgcctccagccgaagggtgacggcttcgtcgctttacgccggaggtatcagtagccgagggttgtcttctctgatctttcgtttcccgccgaatttcgtgcgccagcttagcatcaaggctcgccgcaactttagcaatatcggggttgcgcaaatagtcgctgcttcgtggtcgaatggtcctgctccagattcccccttcttggc

SEQ ID NO: 193708 - DNA, 1201 bp, Gossypium hirsutum
acctagcagagatgaaaaatcttcaaatctgaaagaaattctagatgataattgctctgaggtttttacccttctccatgaagcaaactgctcctccatgtcttctgtgaacaagaattttataccaacatcaacagcgcttagaaattcttgccctcttagggagtttgtaccttcactaaaggagacaattaataaagatacaagtaagccttcaaacttggagaattcttgcacttcatatgagaaaccagctcaagttcagagaaaagatgatatggacggtgctacatgtacagatgagatgcaagccactcataataatcctcaacatgttgctgtgcatgtcctagatggaagcccaggaacatgtgctccaaatccttctatggatataacttttcaggattctatatttcaccctatgggtgatattcatggacaagttaacctgtttgcaaatccagcggcatctgctaccactgcacatcagaataatgcaccaagatcaactcatcaggcgtttccaacgtttcatactccctttatgcatcttcatcccaatcaagaggactaccgatcatttctacacgtctcttccactttttcaagtctcgttgtatctactttattacagaatccagctgctcatgctgcagcaagctttgcagctacattttggccatatgcaaatgttcaaaattctgatgattctcctgcttgtgaccaggaaggttttccttctagacaaatgaactctgctacaggtatggctgcaattgcagctgccactgcttggtgggctgcgcatggactgctttccgtatgtgctcctctgcagactggctgtacttgtgctcctgtatccactgctacagtaacttctatggtgaatggtgaagctccggctgcatagatggaatgatatatgtatgctgctctatatccttccatgcagatataacggttggatcctatatattcatgaatcttgttattgtcaactatagttatttattcacatacattattctcagtctcgtttagatatctgtgtaggatatatctactatctataggaattatctttatatatgactttaatactcatcttgtcatattttgaaactatttatcgatctattgtgtatcatatctccagttatgtatatgtaatatatattgtcacttctgtctataa

SEQ ID NO: 193709 - DNA, 582 bp, Gossypium hirsutum
agctcttgtacattcagggagtttgtccctttgccaaaagagatatttcatgataatggtacaaatgagatgaaagctgctcaaaattatcctcggcatgttgctgtgcatgtcctagatggaagccttagaacatgtgttcaaaatccttccctggctgcatcggcaactactgaacatcagaataatgcaccaaaatctactcatcaggcattgccaccttttcatattccctttatacatcttcggcccgatcaagaggagtatcgatcatttctacatgtctcctccactttttccaatctcattgtatctactttgttacagaatccagctgctcatgctgcagcaaggtttgcagctacattttggccatatgcaaatgttgaaagttctggcgattctcccacaaatgaactaagaggtttcccatctacacaaacaaactctgctcctattatggccgcaattgctgctgcaacagtagcagctgccactgcatggtggacccgccatggactgcttcctgtatgtgctcctctgcacacaggctttacctgtgctcctgcatccactgctgca

SEQ ID NO: 193710 - DNA, 753 bp, Gossypium hirsutum
ttcacgcgtccggcagtattttgctggaaagaagagagcgaacatggcgataggagttaaggccttgcacttgtcctttgtgcctcatgccctcgcgattgccggcgctgttatggtattggtttggtgcattcacttcaggggtggattagcttgggaatcttctaacaaaaatctcatctttaatctccatcctgtattgatgttgattggcttcattatcttaggaggtgaagccattatgagctacaagtcattgccactgaagaaggaagttaagaaagtcatacatcttgtgctccatgccactgctctgattctaggcattattggaatctatacggcattcaagaatcataatgagagttcaatacctaatctctacagcgtgcattcttggcttgggattggaatcattaccctttatggcattcagtggatatatgggtttctcatattcttctaccctggagggtcgaccggattaagaagcgaatcacttccatggcatgtactgttggggctgtttgtatacatcttggcagttggcaatgccaccttagggttcctggagaagcttacattccttgagaactcagggcttgataaatatggtgccgaggcataccttgtaaacttcacagctattgtcacaatattgtatggagccttcgtcatatttacagttctctcccagggtcctcaggaagatgactacagctattcagctatataatttcatgtaatatatct

SEQ ID NO: 193711 - DNA, 492 bp, Gossypium hirsutum
cccacgcgtccgctcttgtgtttttgtttttgttttttaattgttttctcttcatcttcctcttacggtcttacttacagatgaaagagtgaaaaatgagattgagatttgttgtgttttttatggtattattattataatgaaaggagaattccttttcctcttctttgaaagctatggctctgcaagcagaagggactcagcagattcaaagccctccattgatgaatcttgatggcctgttatgtgaagaagaagatttaggagtttatagttttgaagaaaatggaagtgaaattcctgctgaaaaggagaattttgtacctttatttcttaacgaacatgatttgttctgggaagacgatgagttaatctctttaatgtctaaagagaaacaaacccatcagggttacgttgatttttgtccagatgagtctttagttttagctcgtaaagaagctttggattgggttttcaaggttaaggcacact

SEQ ID NO: 193712 - DNA, 1909 bp, Gossypium hirsutum
  unsure (1)..(1909): unsure at all n locations
cccacgcgtccgcccacgcgtncgnggacgcgtgggcggacgcgtgggcttcccccccttcagtttccatttctattaacaaaaaaaatggatccagttaacacatggggcaactcctcccttgaatccgtcgacccagaaatgcatgacctcatcgagaaagagaagcgtcgtcaatgccgcggcatcgagctcatcgcttccgagaacttcacttccttcgccgttatcgaagccctcggcagtgccctcaccaacaagtactccgagggcatgcccggtaaccgttactacggtggcaacgaattcatcgacgagatcgagaatctctgcaggtctcgcgctttgcaggctttccacctcgaccctaccaaatggggtgtcaatgtccagccttactccggttccccggccaacttcgctgcttacacggccgttctccagcctcatgataggatcatgggactcgatttgccttcaggcggtcatttgactcatgggtattatacctccggtgggaagaagatttctgctacttctatttacttcgagagtttgccttacaaggtgaactccactacggggtacattgactacgataagttggaagagaaggcgttggatttcaggcctaagcttatcatttgcggtggaagtgcgtatcctagggactgggattacgctaggttcagggccgttgctgacaagtgtggtgctctgttgttgtgtgatatggctcacattagtggccttgttgctgctcaggaggcaaacaatccgtttgagttctgtgacattgtcacaaccaccacccacaagagcttgaggggtcctagggctggtatgattttctatcgcaagggaccaaagccaccaaagaagggccaacctgaagatgcagtgtatgactttgaagacaagatcaactttgcagttttcccttcccttcagggtggtcctcacaatcaccagattggtgccctggctgttgccttgaaacagtccatgacacctgggttcaaggcatatgctaaacaagtgaaggccaatgcagttgcccttggaaagtacctgatgggcaagggataccagcttgttactggtggaactgagaaccaccttgttctttgggatctccgacctcttggattgactggcaacaaggttgagaagctttgtgacctctgcaacatcactgttaacaagaatgctgtttttggtgacagcagtgcattggctccgggaggtgtacgaattggtacacctgccatgacttcaaggggtttggttgagaaggactttgaacagataggcgagttccttcaccgagccgtgacaatcactttgaacatccaaaagcaatatggtaagcttttgaaggacttcaacaaagggttggacaacaacaaggagatccaagagctgaaggttgatgttgagaagttcgcatcctcattcgatatgcctggcttcaagatgtccgaaatgaagtacaaggattagatctaaataaccatacgatctaattgatgttattatcagcatctgccactttttgggttgcccccatttgatgtcttatgagtgaaaggaaaaagaaagggaaaagagaaggatgcaaatgccttccacgtacggttttaagtgtcttcatttactggtcaatttgatatgatatttttcaagtttttgctgttctgtctttataagagtttgcataaaacgtatgtactaattttatgtattcttttttgttgctagaaaagttttttttttgggggggggagataaaggagagaaatgaatggtgtttgattgaacatcccaaactctggaaaataaaaagaggaaaaggtattcaccttctgcgtatttgagctgctggtcaagagatgagaggcatgggcca

SEQ ID NO: 193713 - DNA, 518 bp, Gossypium hirsutum
tccacgcgtgcgattttctcccattaccaattcccttcaatttctccattttctctgaaatccaatggatccagtaagcagttggggcaattcctccctcgactccgtcgatcccgaaatccatgacctcatcgagaaagagaagcgtcgccaatgccgcggcatcgagctcatcgcttccgagaacttcacttccttcgccgtcatcgaagccctcggcagtgccctcaccaacaaatactccgagggcatgcctggtaaccgttactacggtggaaacgaattcattgatgagatcgagaacctctgcagatctcgcgctatccaggctttccacctcgaccctaccaaatggggtgtcaatgtccagccttactccggttccccggccaacttcgctgcttacacggccggtctccagcctcatgataggatcatgggactcgatttgccttcaggcggtcatttgactcatgggtattatacctccggtgggaagaagatttctgctacttcta

SEQ ID NO: 193714 - DNA, 645 bp, Gossypium hirsutum
caagggtgagaaactctgtgacctgtgcagcatcactgtcaacaagaatgctgtatttggtgacagcagtgccttggcacctggaggagtacgaattggtacccctgccatgacttcgagaggtttggtcgagaaagacttcgaacagataggtgagttcctccaccgagcggtgaccatcaccttggactcccaaaagcagtacggaaagctcttgaaggacttcaacaaaggtttggagaacaacaaggagatcgaaaagctgaaggccgatgtcgaaaagtttgcatcctcatttgacatgccgggtttcaagatgtccgaaatgaagtacaagaattagatcttatagatatttatggttttattcatgcttattgctgttattatcggcatatgtgtcatctggaaatttgcctctgctgatttccaaggagttgatgttagaaaaaaaaaatggaaaagaaaatgaagtaaaggcttccatctatggtatgtttttttaaagttttttaagcccattacttgtgagagcttccataaaaaccatgtaacaattttatatattgtttttgttgctggaaagtttagggttttaattaccaataaacgagatattggggtttaaaaaaaataaattctatt

SEQ ID NO: 193715 - DNA, 439 bp, Gossypium hirsutum
ctcacgcgcccggtggcccacgcgtccgggagaggctttggaacaaaaagaaaaatgaaagccacacttcccacaccccatctccggtctttcccttctccaaccccactttctttcaaactctccttcgcattccctgaaaccagaaggaaatcactaagcatcagctctactccgaagggaacaccatctccttctttggcttacgtgccactgagggtgagtgccagttctcaagccgctgctgcacctactgtcaatttgacggcaattcccaccgaaatgaaggcttgggtgtacggggaatatggaggtgttgatgtgttgaagttggatgataaagtgagcgttccagaagtgaaggaagatgaggttttgataaaagtggctgctgctgcccttaaccccgttgatgccaagcgaaggcagggcaagttta

SEQ ID NO: 193716 - DNA, 467 bp, Gossypium hirsutum
  unsure (1)..(467): unsure at all n locations
ntgcgccacgcgtnncgccacgcgtgcggtcactcttacttactctgatcatggcttgcaaaattagttccttgctttctcacgttttcatcctcagcattctgggtgttattgctgggcaagccattgcagcacgtgacatctcgaagaatgatgatcaaatgaaacagcctgaatatctaaaacatgaccgtagtgtgctcattccaggccttggacgagtgttgctgccaccagttttcaaacatcacaatccacacactatcggcactggcacccacaccggcagcagtggcggccaccttggcagcacaattggccgaaatcgccagattccacgtggtgatgtcacattctgttccaaaccccgggtttgtggtgccaattccaacaggtcgtggtgcttgcattgcacgaacaaacccacgttcttgaacatgcttggctatgaaacttccaataaatct

SEQ ID NO: 193717 - DNA, 590 bp, Gossypium hirsutum
cccacgcgtacggcacgcgtacgcttaccactcagattcctctcttacccaactcttcatgctctgcatcggctttcccttgtgccctcacttcccgtaacacaaggccccataaattcagaattcatgcaaacttgggggaaggagaaggagagctcaagcctaaaggaaagaagaaatttataactagagaagaagaaccagagcagtattggcaaacagcaggagaaagggaaggagagaatcccatgaagacccctcttccttacattataatatttggaatgtcaacaccttttgtaatcttagccattgcttttgccaatggctggattaacgttcctgttcgatgagttttgagaattgagagactgggtttttcaatgttggtttactccaaatgcacctttaattcagccttctcggctttctaccgtaagcatttgttgttaacacacccttgttttgagtatttatgttgtgaatttctcaagcaaaaccagaccatttctgagtactgggtcttctatatcagttaaaagagacatggctttttggtcaaacccaaaacttcttagtaataaaattat

SEQ ID NO: 193718 - DNA, 652 bp, Gossypium hirsutum
gcaaaagcagcatgggcatggcagttcattgcaattccgctcccttgtcttgcaaaacttggagaaacagaggccccacactcttacccgcccgtctctgctcacttcctcaaaccccatttagcttccgttcagatgcattaaagctctcaacttgcaggtgggataaggtggcttctgctgttgcttctgaagaaagtgcagttggatcaagctcttctgggactgatgtattcaaccttacttacctagaggggaatagttggctgtgggatataagtggggtgagagttttggttgatccaatattggtgggtaacttggattttggtattccatggctctatgatgctgccaagaaatttttgaagaatttcgagcttactgaccttcctcaagttgattgcttactcataacacaaagccttgatgatcactgccatttaaaaaccttaaaaccgctctccgagatgtccccaaatctcagagtcattgctactccaaatgccaagcctttgctggatcctgttttcagaaatgttacatatctagaacctggtcaggagtctgaagttgaagcagagaatggttccaaagtcagaattcgagctactgctgggccagtcctgggtcctccatggcaacgacctgt

SEQ ID NO: 193719 - DNA, 459 bp, Gossypium hirsutum
cgattcatgcctttccctcactttctaggttctactctttcagtgagggtttccaaattagcctatctttgatacgcaggtgtctggattggttaaagaatggccatgacgccacaaatggcttaataaataaatcccacacccagttggccaaagctttacaccgaagaagcaaagcagcatcggcatggcagtttattgcaattccgctcccttttcttgcaaagcctcgagaaacagagaccccacacccttatccgcactcttacccacccgtctcttctcacttcttcaacccccaatcagcttccatccagatagattaaagctctcaacttgcaggtgggataaggtggcttctgctgttgtttctgaagaaagtgcagttgggtcaagctcttctgggactgatgtattcaacctcacttacctagaggggaatagttggctgggggatat

SEQ ID NO: 193720 - DNA, 505 bp, Gossypium hirsutum
tggcttggactacctaggcaaccccaaccttgttcatgctcaaagcattcttgctgtcctcgggttccaggttgtcctcatgggactagtcgaaggattccgcatcaatggtctccccggagtcggtgaaggcaatgacctttaccctggtggccaatactttgaccctcttggtcttgctgatgaccctgtcacatttgctgaacttaaggttaaggaaatcaagaatggctggctagccatgttctctatgtttggtttctatcgttcaagccattgtcacaggcaaaggtccactggaaaatctcttggaccaccttgacaaccctgttgccaacaatgcttgggtctatgctaccaagtttgtgcctggatcgtaaattaacagccctggatcgaactcgttccattatttgcttgtatctatcctctatgtacctgtagatttcgcatcactctgaaattttaaacctgtatcactaagaagtcaatgaaattcatgatc

SEQ ID NO: 193721 - DNA, 1066 bp, Gossypium hirsutum
ggaaattcccgtcctattatcttccttccttttcattccttttgctatggcaggaactggggtggtcgctgtttatgggaacggcgcaatagctgaaacccacaaatcccctttctccgtcaaggttggcctagcccaaatgctccgtggcggggtgattatggatgtcgtcacccctgaccaagctcgcatcgctgaagaagctggagcctgcgccgtcatggctcttgaacgagtccccgccgacatccgagcccaaggtggcgtggcgcggatgagtgacccacaactcatcaaagaaattaagcaagctgtcaccattcccgtcatggccaaggctcgtattggccatttcgttgaggcccagatccttgaagccattggcatcgactatgttgacgagagcgaagtccttaccctcgccgacgaagaaaaccacattaacaaacataattttcggattcctttcgtctgtgggtgccggaatttgggggaagcgctccggagaatccgagaaggagccgcgatgatccgaaccaaaggagaagcggggaccgggaatgttatcgaagctgttaggcatgtcagatccgtgatgggggatattagggcccttaggaacatggatgatgatgaggttttcagcttcgctaagaaaatccagtctccctacgatttggttatgcaaacgaagcagctggggaggttgccagtggttcagttcgccgccggaggcgtggccacaccggcggatgcggcgttgatgatgcagttgggttgtgacggagtgtttgtcggatctggggttttcaagagtggtgacccggctaagcgtgcccgagctattgttcaggccgtcactcactacagtgaccccaacatgcttgcggaagttagctgtgggctcggtgaggccatggttggccttaatttgaacgattagaaggttgagcggttcgcagctcggtctgattagtaagtgaaggagggatcaagcctttggttgttgaaccaccgtcaccagtgcactggtgttccaagttatcatagtttaaagtggagtctt

SEQ ID NO: 193722 - DNA, 499 bp, Gossypium hirsutum
cccacgcgtccgcttagagtctctctcagatcagaactagagtgtttacatcctggtaagaggttgagttgccatggcttcagcttcctccaattcactatcaatctcaccctcatccaccctcgtggatgccaaagctcctcgtcaaccaactgctgcatccccacaatgtgtcactcttcctactcttcctcccccacccgttcagtcccagagtcgtccctggaagaccactgcctactgtcgcaagattgctcgaaatgtgatggctatggccactggtgagactttggccacgcgtgaagctccaaccgaagttaccccaactgagctgacagagtttatcaacaaaatacaagaaacatgggataaagttgaggacaagtacgcagtgagttcacttgctgtagcaagtcttgttttggtctggggtactgctggaatggtctcggcaattgataaacttcctgtgatttccacatttctcgaggtcgtgggt

SEQ ID NO: 193723 - DNA, 594 bp, Gossypium hirsutum
cccacgcgtccgcccacgcgtccgaaataatattactagttttgcttgaacccgacatccatggctacacacgcaagtctagctccttcaaggatccctgcaacaaccaggcttccttctaagaccactcactctttcccctctcaaattcaatgctcttccacgagactgcaagtgactgaattctctggactgcgatccagctcatgcgtcacctttgccaagaatgttagagatgcttcctttttcgacgtgctggctgcccaacttactcccaagagtgcaggtgtaccatcagcatctgttaggggagaaacagttgccaaactgaaggttgcaatcaatggatttggacgcattggcaggaacttcctcagatgctggcatggcaggaaggactcacccctcgaggttgttgttgtaaatgacagtggtggtgtcaagaatgcttcacacttgctgaaatatgacttcatgctgggaactttcaaagctgatgtgaaaatagttgacaatgaaaccatccgtgttgatgggaagcccatcaaggtcgcttctaacagggaccatctaaagcttgcttgggctgaactt

SEQ ID NO: 193724 - DNA, 1018 bp, Gossypium hirsutum
cggacgcgtgggtttcttttcaattttcttttcctttttctctctttctctaaaagaaaggttttcttcaatggccgaccggtgctgacgtaccagaggcgcttccctcctcattcctctcatctcctttcaccagatccgggtttgttttcgataaatttcttctatttccatggctgctccacctgcaagagctcgagctgattacgactacctcatcaagctccttttaatcggcgacagcggtgtgggtaagagttgcctccttttgcgtttctcagatggctcatttactactagttttatcacgacaattggaattgactttaagataaggactatagagcttgatggaaaaaggatcaaactgcaaatttgggatactgctgggcaagagcggtttcgaacaattacaaccgcttactaccgtggagccatgggtattttgctcgtgtatgatgtgactgatgagtcatctttcaataacattagaaattggattcgtaatattgaacagcatgcttcggacaatgtcaacaagattctggttggcaataaggctgacatggatgaaagcaaaagggccgtccctacctcaaagggccaagctcttgctgatgaatatggcatcaagttctttgagactagtgcaaaaacaaacttaaacgttgaggaggttttcttttcaatagcgcgggatattaagcaaagacttgctgacactgactcaaaggctgagccacaggcaatcaaaattaaccaacaagaccagggagctggggctgcggcagctgctcaaaaatcatcttgctgtggagcttgaacaaactacattgccgatgagatctgaagggtacattttcttctctatggtgccattttgatcctgggaaaactaatttgttacaactattttgtttatattctcctgcatatcattattttccggcggcttcgccgttgggaatgttattaaactgggatttgcatattattatttaaatattggttaaaaaag

SEQ ID NO: 193725 - DNA, 990 bp, Gossypium hirsutum
  unsure (1)..(990): unsure at all n locations
cccacgcgtccgcagaagaacaaaaaaattcaacggccgaccgtttgtgtcgttccggagacgtttcacatctcatttcaccagatctcaactcttccttcgccgggtttatttgttcttccttgttttttggctgttttcaataaatttcttctatttttccatggctgctccacctgcaagagctcgagccgattacgactatctcataaagctccttttgatcggcgacagcggtgtgggtaagagttgccttcttttgcgtttttcggatggctcatttactacaagttttatcacaaccattggaatcgactttaagattaggactatagagcttgatggaaaaagaatcaaactgcaaatttgggatactgctgggcaagagcggtttcggactattacaactgcttactaccgtggagccatgggcattttgctcgtctatgatgtgactgatgagtcatctttcaataacattagaaattggattcgtaatattgaacaagaagaagaagaagaaaaacagcaagtttaagcgcaaaagagaaggatccaaagagcttaaaagccccaataatggatataagaaagggattaggaaacacccacttagagttcctgggatgaggcctggtgaaaagttgttatatatgtaaagtanaagatcatattgccaagctttgccttcaaaaagctcaatgggagaagcatatgaatatgttgcccttgccgnaaacgtggacacagtttaaagaactgccttgaagtaatggattaaagaacttgttcaactgtgnaggagctggacattcgcttcaaaaatgtctcacctctcaaagggtggactaaattgctcatgttttgtctgtagggatctggactttgagcaagactgccccaaatactatggaattatcaagggggtgtggaaaattgcgtggagtacacattggcaagatgtcccataagcanagacattttttgttn

SEQ ID NO: 193726 - DNA, 1022 bp, Gossypium hirsutum
  unsure (1)..(1022): unsure at all n locations
gccgaccggtgctgacgttccaaagacgcttttctcctcatttctctcatctcctttcatcagatctcactctttcttttccctgacccgggattgttaattttctcctttatttttgattgattcgataagtttcttctattaccatggctgctccacctgcaagagctcgagccgattacgactacctcataaagctccttttgatcggcgacagcggtgtgggtaagagttgcctccttttgcgtttttcagatggctcatttactacaagttttatcacaaccatcgggattgactttaagatcaggactatagagcttgatggcaaacggatcaaactccaaatttgggatactgctgggcaagagcggtttcgtacaattacaactgcttactaccgtggagctatgggtattttgcttgtttatgatgtgactgatgagtcatctttcaataacattagaaattggattcgttatattgaacaacatgcctctgataatgtcaaccaagttcttgttggttataaggttgacttggacgaaaccaaaagggccgtccctaccccaaagggccaagctcttgccgatgaatacggcatcaagttcttcgaaactagtgcaaaaacaaacttaaacgttgaggaggttttcttttcaatagccagggacattaaacaaagacttgccgatactgactcaaagtctgagccacagacgatcaaaattaaccaaggcgaccaagcagcaggaggtgcagcgcccgctcaaaaatcagcttgctgcggttgaacgaactatttcgaggatgagatgagatttgaagggtacattctctattactgtagtanctgttttggtcttaaaaaagaaaaactaatttcgttacaacttatatatattgtttgtgtttgtattcacttctttgcttatcattatttttacaatctgctaactcctttgtgtgaaatgtttgattatattagattatttttatcacctaaaaaaaaaaaaaaaaaa

SEQ ID NO: 193727 - DNA, 440 bp, Gossypium hirsutum
tccacgcgttcgcccacgcgtccgcccacgctttcgtaaaaccttttcaatgtctatcttaaaacaacatatgtgcccgtcgaggtctctaacgcatatttctactagcccacggctgcaccttgttgcaaggttgacatgttcggccactaccaccacaaccaagcctaagtccagtcagaaccagttggttatcgagccacggcttgagacaaaaccggactctatcactcccattatccctagtgttggccctcccttgtccaatgatccaagtttacaatcaacatggtcccaccgagcatgggtggccagtggttgcaccaacgcttttcttttccctacccaagactggaacgggtgccgctgatacacatatttgggttgaacctaataatagaagcttttgtgggtattgtttaacttaccctttgtctggg

SEQ ID NO: 193728 - DNA, 818 bp, Gossypium hirsutum
cccacgcgtccgcccacgcgtccgctgtctctaccactgaaagcaaagaaaaaatggcaacggagatggcccttgtaaagcctatctccaaattcagtacaagcagtccaatttttagcaactcccgatatgggaagttcacgaccgtcagaatgtcatctacttcccaatcaacagcaaaggccgccgcgaagggtggcaagaaagctgccaaaaccgccatcaaagagacccttttgacaccaaggttttacaccaccgactttgatgaaatggaggcgcttttcaacactgagattaacaagaaccttaaccagtccgagtttgaggcactgctgcaagagttcaagactgattacaatcagactcactttgtaaggaacaaggagtttaaagaagctgctgataagattgatggtcctttgagacaaatcttcgttgagttcttggagaggtcttgtactgctgagttctctggttttctcctctacaaagaacttggaaggaggctgaagaaaaccaatccagttgtggctgagattttctctcttatgtcaagggatgaagccaggcatgccgggtttctgaacaagggtttatccgatttcaatttggcattagaccttggcttcttgacaaaagccaggaagtacacttttttcaagccaaagttcattttctatgccacttatttatctgagaaaattgggtactggagatacattacaatctacaggcatctcaaagaaaacccagagtaccaatgttatcctattttcaagtattttgagaactggtgccaggatgaaaaccgtcac

SEQ ID NO: 193729 - DNA, 460 bp, Gossypium hirsutum
cccacgcgtccggctggggctggatcggctaccttgtcaatggcatatgcagctgtcaagtttgcagatgcatgtctccgaggcttgagaggagatgccggagtcgtggaatgtgcctttgtagcttccgaggttaccgaacttcctttctttgcaaccaaggtacgacttggtcgtactggagccgaggaagtctatcaactagggcctctaaacgaatatgagagggttggtttggagaaagcaaaggaagagttagctggaagcattcataagggtattgccttcatcaagaaatgaaattgttgctgctgagctaatcttttaatataaatataatataagcttcttatatctgttaaaagggctttgtatatgttttggcgcttaagaacctctattgagacctaaatgccattgatatactcttctggttaatgcagtcaaattttatgcttgt

SEQ ID NO: 193730 - DNA, 488 bp, Gossypium hirsutum
ctctgatgtcaccaatttcgacattttggagaattctgtgaaaaatttagggtttcccattgatgttgttgtctcttgtcttgctagccgtactggtggtgttaaggattcatggaaaattgattacgaagctacaaagaacagccttgtcgctggtaagaaatttggggcttcacattttgtgttgctatctgccatttgtgtccggaaacccctcctcgaattccagcgagctaagctgaaatttgaggccgaattgatgaaagaagccgaaggagatgacgggtttacttacagtattgttaggccaactgcattctttaagagtttagggggtcaagttgacttagtgaaaagatggaaggccttttgtgatggttgggggtggcaaattatgtgcctggtaagccaatttatgaacaaaaattgggttccctcattggaaattggggtttggaagaagattaaaattatcaaatttttgccat

SEQ ID NO: 193731 - DNA, 555 bp, Gossypium hirsutum
cccacgcgttcgcccacgcgttcgatgctttatatgagcagtgtgattttcaagcaatatgtggaagtggtataaaaggaaaagcaggactatctgctgacaatttggcagaagatcttgggcctctctttgagtctataatcagatgcatacctggtccacatattgacaaagatggtgcactgcaaatgcttgctacaaatattgagtatgatgaacataaaggacgaatagctattgggcgcttgcatgctggggtacttcggaaaggaatggaagtaaaggtttgcacctcagaagattcgggtagatatgcaagaatttctgaactttatgtctatgagaaatttagtaagaccgctgttgagagagtagaagctggtgacatttgtgctgtttgtggaattgaagatattcagattggagagactattgcagataaagcatttgggaaagccattacctgccattaaggtggaagaaccaactgggaaaatggctttctctatcaacacttcaccatttgttggccgtgagggaaagtatgttactagc

SEQ ID NO: 193732 - DNA, 849 bp, Gossypium hirsutum
cggacgcgtgggcggacgcgtgggcgctcatcgaacttccgatttgctttttgaaacgcaagaaagaagagaaatctcaatggcgccgaaagccgagaagaagcccgctgagaagaagcctgccgagaagccaacggaggagaaaaagtccaccgtcggcgagaaagccccagcggagaagaagccaaaggccggcaagaagcttcccaaggaaggtccaggggccggagataagaagaagaagaaagccaagaagagtgttgagacctacaagatctacatcttcaaggtcctgaagcaagtccatccagatatcggtatctcaagcaaagctatgggaatcatgaacagtttcatcaacgacatcttcgagaagctggctcaagaatcttcaagactggcaaggtataacaagaagcccaccatcacttccagggaaatccagacggctgttagacttgttcttcctggagaacttgccaaacacgccgtttctgaaggcaccaaagccgtgaccaaatttactagttcttgaatttgatggaatttagggttagtgttttcccctccattttgtcagcgtagttttgatgactgtaagtacttgtgtcacttatggatttgaaaaggaagaccctttttctttttggatatataaaattgctaatgtttgcctatattacgactgtctttatcaaggatgttgataaataaccacagcaccataaatataattaaatgagtatgcaaaagaattaatgattattacagttgcttctaagaaagaaaaagctggtggaaaatgctttactattgatcaacttgctttgagggcaccttttggtaaaa

SEQ ID NO: 193733 - DNA, 594 bp, Gossypium hirsutum
gcactttcgaatctttagaatccacaactagtttcaaatggcacccaaagccgagaagaagccagccgagaaaaagccagctgaggagaaaaaggccgagaaggccccagctgagaaaaaaccaagagccgagaagaagctccctaaagaagccggggacaagaagaagaagcgaagcaagaagagcattgaaacctacaagatctacatcttcaaggtgctgaagcaggtccatcctgatatcggcatttccagcaaagccatgggtattatgaacagcttcatcaacgacatcttcgagaagctggctcaagaatcttcgaggctcgcacgctataacaagaaacccaccattacctcccgtgagattcagactgccgtaagattggtcctacctggggagttggccaagcatgctgtttcagaaggtaccaaggcggttacaaagttcaccagttcttagtttccaaaaatctaaaatacaaaaaaaaaaaaatctgggaaatatggttttgttgtaaaaatcattagctttttgtaggtcttcctgttatttgcagagcttaaatggaaatttaatcatattttgaattt

SEQ ID NO: 193734 - DNA, 782 bp, Gossypium hirsutum
gcgagcgccgcccttttttttttttttttttttttttttttttaaataaaatacataaacaggtaataaattcacatagtataccaccctcatattagtatatattttggtggattaataaacttattaaactctcacaaaacatgctaaaatgggggggaaaacatcgtagtatagcaaaacattcaatgtagccagattctagggcatatgtggcttgcttcatcgacggctgtaaatcaggtcgatgatgatcaaggattcggggaagtttggatgctcaaaagcttcacgtcgtcgaggactgggccacatagggaagagaagtcatcactcctcatggtgtaaaaagtgctaaggaacatgattcttgttctgttggaaacagccttgaatttaagctcagcacgcttgaatccccctttgccctttgactcatatgggactttgagtgtgtcttttccagcgaatgcctccacaaccaaagaacgtacacaggagttgttagcatccccaaccgcaaacgagagcctgtacatttttccgacgatggtcctgactatctgagcgatggcactctcttttccagcaactagctccactgcttttcgcccttgaggcacaaagtaatgtgctgagtcgatgtacttgacagccttgagggattcaacaatccaggcaggcagaggagagtgatcatcctcgatgttgggtggaattaagacaccccatggagtgttggggaatacgtagggacctttttcaaaacctccatttttcac

SEQ ID NO: 193735 - DNA, 494 bp, Gossypium hirsutum
tagctcaaagcactgcggggcgctgctcggaggaagtgaaccagctggttctacctttcaatgccaatgtgaaaaccatgatgaatagccttaatgctaaccttccgggtgcaagatttatctacgtcgacattgctcacctttttgaagatatcgttgctaatgctagaacatacggatttagtgtggtaaaccgagggtgttgtgggattgggaggaacagagggcaaatcacatgtcttccattccaaacaccatgtgaaaatagagatgaatatgtgttttgggatgcattccatccaactgagaaagtgaatatcataatggcaaggaaggccttcaatggtgatccttccattgtttatcccatcaacattcagcagcttgccaatctttgatctttgtattagtaccataaataagccattatctggcttattttctttgtgtacttcattttctggttgattgtaaaggaagagcactttggttca

SEQ ID NO: 193736 - DNA, 617 bp, Gossypium hirsutum
cccacgcgtccgcaaaaacaaaataaaataaagaacacacaacaatggccgccaacacactaatgagctgtggcatagccaccacatttccttcacttctttcctcatcaaagtccaagttcagtggcgccgccgtatcgttgcctagtgctgttggtaccaatgttggccaccgtgttagcatgtcagctgactggatgcctggtcaacctagaccaccttaccttgatggctcagcaccaggtgactttgggtttgacccactaagacttggtgaggtccctgagaaccttgagaggtacaaagaatctgagttgattcactgcagatgggctatgcttgctgttccaggtatattggtaccagaggccttagggttgggaaactgggtaaaagctcaagaatgggcagcaattccaggtggccaagccacttacttagggaacccagtcccatggggtacccttccaacaatcttggtcatcgagttccttgccatcgccttcgtcgagcaccaacgcagcatggagaaagataccgagaaaaagaagtaccccggcggtgctttcgaccccttgggatactccaaggaccctaaaaagtttgaggaatacaaa

SEQ ID NO: 193737 - DNA, 481 bp, Gossypium hirsutum
ccggccgaattccggtcaccagcgcgtccggacctgggcgacctggcggaccctttttcctcccatggccgccaccaacacattgatgagctgtggcatcgccaccgctttcccttcagtgctttcctcttcaaagtccaagttcgccaccgctacgccgttgcctagctttggcgccaatgttggccaccgtgttagcatgtcggctgactggatgcctggtcagcctaggcctccttatcttgatggttcagcacctggtgactttggatttgatccacttagacttggtgaggtgccggagaaccttgagaggtacaaggaatctgagttgattcactgcagatgggctatgcttgctgttcctggtatattggtgccagaggcattggggtatggaaactgggtaaaggcacaagaatgggcagccgttcctggtgggcaagccacttacttaggcaaccctgttccatggggaact

SEQ ID NO: 193738 - DNA, 598 bp, Gossypium hirsutum
  unsure (1)..(598): unsure at all n locations
cccacgcgtccgctagacttataaatttaagctaaaaaggcccctccatattggcacctaagttgctcctgcaggaaaaatggcatccatcaccatgacaacatcattccttagcaccactaacctcacaaagggttctccaagaattacccagcggagactagtggttgccaatgctgctaagggagctcaagtggagagtgtccagatgagcggtgagaggaaaacagagggcaacaatggcaggagggagatgatgtttgcagctgcagctgctgctatttgctcggttgcgggggttgcaacggcggagcctaaacgtggtagcgcagaggccaagaaggcgtatgctcctgtttgtgttactatgccaactgctaggatctgtcgcaactgaggcagtgccactgcacattgctcgagtgccatgagactatgcttgttatgggcaggggctgaaggatgtaatttaataatgcttgtaaattttcatttttataattgagaaacctaattttaatttgtgtctttctttaaaaaaaaaggattctatcttttttnnannnnnnnannnnnnnnnnnnnnnnnnannacccct

SEQ ID NO: 193739 - DNA, 455 bp, Gossypium hirsutum
cccacgcgtccgcgagctctgtatagattcttctagttccgaccaaaaaaagaattgctcatctttccttcagagaatatttgttttgagtgaaaaaaaaaatgttgggagtattcagcggagcgatagtgtccccgccggacgagctggtggctgccggttgcaggacgccgtcgcctaagataacggcggacgctcttgtgaaacggttcatcgaggcaaacccctccaccgtgtctatgcagatcggagatcatgtccaattcgcttattctcaccgtaacgagtctgctttacttcccaggtcattcgcggtgaaagatgaaatattctgcatgtttgagggggcacttgataacttagggagtttaaagcagcaatatggacttggtaagtcagcaacagaggtggtgttggtgatagaagcttacaaggctcttcgtgacagagcacct

SEQ ID NO: 193740 - DNA, 657 bp, Gossypium hirsutum
aaattcatctgatctactttctattcagtagtatatacaaactaaattagcttggcttctctccaacagaaatggctcccgcttccttccatcacgagaaagtttgcgtgatggacgcctccggtcgcctgggctctaccctggttgaacgcttgctggaaagaggctacactgtccatgctgctgttcaaggccatgttgatgatttgaaactgaatggggtagctactgaaagggaaaagaagctcaagattttccgggcagaccctttcgattatcagagcattaccgacgccctgaaaggctgctctggtttgttttacgcctttgagcccccacaagaccaccctgcctatgatgaatatatggtagaagtggaggtacgagcagcacataatatggtagaggcatgcgctcggacggagacaatagacaaggtggtcttcacatcctccgccactgctgttctttggagagacaacaattcccaatcgcttgcttccgatttggatgaacgccattggagcgacgtcaatttctgccgcaaattcaagttatggcacgcgctgtcaaagacggtggcagagaagacagcatgggcgttagcaatggatagggacattaacatggtttcaatcaacggggggttgttgatgg

SEQ ID NO: 193741 - DNA, 474 bp, Gossypium hirsutum
gtcactttttttctttcgttcaatatttggctctttgtttttgttttttggtttagagagatggatcatgcagcagatgctcataggactgatttgatgacaataacacgtttcgtgttgaacgagcaatccaagtatcctgagtctcgtggggatttcaccatcttgcttaatcacatcgttcttggttgcaagtttgtttgctctgctgttaacaaggctggtcttgccaaactcatcggactcgctggggagactaatgttcagggtgaagaacaaaagaaattggatgtgctttcaaatgaagtctttgtcaaggctttagtaagcagtggcagaacatgcatccttgtctcagaagaagatgaagaggcgacttttgtagatccctcaaagcgtgggaggtactgtgttgcttttgatcctctagatggttcctccaacattgactgtggagtttcattggaacaattt

SEQ ID NO: 193742 - DNA, 424 bp, Gossypium hirsutum
ttggcctccagaatcgacggcgattcctcccgaaaaatcatccccgacccgacccgaataaccaatccctcgataactcttcggatcctcaatccttgctccattccaggtttttaaaagtctaagcgcaatggatgatgtaactgatttgactggtgatggaggtgttattaagaagatcgtagcaagagccaaagtgggtgcgctcgccccttccgaggatcttccgatggttgatgttcattatgaaggtaccctagctgaaactggtgaagtttttgatacaacacatgaagataactctgttttctcctttgagcttggaaagggcacggttattcaggcttgggacattgctttaaaaactatgaaggttggtgaagttgcgaaaataacttgcaagccagagtatgcctatggtgct

SEQ ID NO: 193743 - DNA, 451 bp, Gossypium hirsutum
tcatcatattatccgaacatgcaggaaccagtaatttatcggtgaagtttcatctctgaaggtgtgggatccgggtggtgcgcggaattgctcattcggttctgtacttgtagtcatgtatcttaattcattgaagatctcaaaatgattgctgcacgctagctgagattcatggaaggatgggctttattagcatcgtgacacaccaatttggttttctactatgcttattgccgcaggcctgttggtgttcatgcctttcgaccaacctgcaagatttaacgcccgtgcctagtcgttttaatacataattaggtaattattgagtattgctcatctttttatgcattgttgattgcatattatggctgtcagattcccaacttatctattctgagatttagctgcatatttggttataagtgtcgatctatctgaatgcttgcggaca

SEQ ID NO: 193744 - DNA, 546 bp, Gossypium hirsutum
agcattcccatttaaaaaaaatatatttctctattttatcattttctttggtgcactgttatctctctcgtctcgttaatagcaaaagataaaccttcgtctatccctctctcattttatttgcacggctccagaggtaggccattgagagaaaagtataggtcgaaaactctcaaaacccctacccgcgaacggtgaatctgggaaaacccactcagctcatttagatccctaccaaatctgcaaaaaacataccatgatttgatcccaaaaccccaccccaaacaaatgggttttggtttttcttcaaaacccttcttccttttcctctcatttcttgttttctttaccaatcttgaactttaccctcttgttgaatcagcccctgattacacaactttggtctacaaaggttgtgctaagcaggctttcacagatccagctgggatatacttccaggccttgtctggcttggttcagacctttctttcacaggtcatgaagggaaaggtttacaagaaaaacaccgggtactggccaaaccac

SEQ ID NO: 193745 - DNA, 453 bp, Gossypium hirsutum
cccacgcgtccgcccacgcgttcgcccacgcgttcgcccacgcgtccgcggccacatatcagaaactgcgaaaattcatttaaaaatggcgaccgctgcatcctcttcatcctccatggtggccaccgccgttttgattcctcgttttccggcagcctccgttggaactacccgctgcagtgccttgccgcctctccctcctcgcgtttcgaccgcttccttgtccttttcctcttccgttaagctaatcccagaatccaagaggttttctctactgcagacaaaagcctcagaagagacctctgttgatgctggtgaccttttcgctgacttgaaggaaaagtgggataaagttgaggacaagaccacagttgttctttacggtggtggggcattagttgctgtttggctatcatccattcttattggtgccattaactcggtccctttgct

SEQ ID NO: 193746 - DNA, 1964 bp, Gossypium hirsutum
cggacgcgtgggccgaagtaaagaatgaagaaataaactcaaagccaaatggatctcctcttcttggagaaggccctcctgggccttttcgtggcggtggtactagccatcaccatctctaagcttcgtggcaagcggttcaagctccctcctggaccattacccgtgccggtgttcggcaactggctccaagtgggtgatgacttgaaccaccgcaacttgacagatttggccaagaaatacggtgacatatttttacttcgaatgggacagcgtaatctagtggtggtgtcttcacctgagctagccaaagaggtgctccactcgcagggagtggagttcggctcaagaactaggaacgtagtgtttgatatattcacgggtaagggtcaagacatggttttcacggtgtacggagagcattggaggaaaatgaggcggatcatgacggtaccattttttaccaacaaggttgtgcaacagtacaggtttggatgggaggacgaggctgctcgtgtagtggaggacgtgaggaaaaatcccgaggcagccaccaacggaatcgttttgaggaggagattgcagctgatgatgtacaacaacatgtacagaatcatgttcgacacaagattcgagagtgaggatgatcctttgtttgttaggctcaaggctttgaacggggagaggagccggttggctcagagttttgaatacaattacggggattttattcccatcttaaggcccttcctcagaggatacttgaagatctgtaaggaggttaaggacaggaggttgcagctcttcaaggaccatttcgtcgaagagaggaagaaacttggaagcacaaaaagcatgaacaacgatggattgaaatgtgccatagatcatattttggatgctcaacagaagggggaaatcaatgaggacaacgttctctacattgtcgagaatatcaatgttgccgcaattgagacgacactgtggtcgatcgagtggggcattgcggagctggtgaaccaccctgaaatccaaaagaagctgcggcatgaacttgacactgttctaggacctggtaaccagatcactgaacctgacacccacaaactcccctaccttcaggctgtgatcaaggagactttgaggttacgaatggcaattcctctactcgtgccccacatgaacctgcatgatgcgaaattgggtggctatgatatccctgctgagagcaaaatcttggtaaatgcatggtggcttgccaacaaccctgctaactggaaaaatcccgaagaatttaggcctgaaaggttctttgaagaggaagccaaggttgaggccaacggcaatgatttccgctacctcccctttggcgtggggagaagaagttgcccaggaattattcttgcattgcccatccttggtattactttgggtcgattggtacagaattttgagctcttgcctccccctgggcaatctcaaattgataccacggagaaaggtggacagttcagtcttcatatttctgaagcattccaccattggtgctaagccaaggcaattttaacttgttctcttctatccattttagtgaactcttgtaagacagtatgaaacattattcagttgaaaatatttgtgaggtgtgacaatgtaaatccatgaatcaatcaagatttgcaataagattaatattttcccttccaaaaaaaaaaaaaaaaaaaaaaaaaaaaaaaaaaaaaaaaaaaaaaaaaaaaaaaaaaaaaaaaaaaaaaaaaaaaaaaaaaaaaaaaaaaaaaaaaaaaaaataaaaaaaaaaaaaaaaaaaaaaaaaaaaataaaagggggggggcctttttaaagaaccaaattttctttcccgttttttgcaaataaaaactttttttttggggcccccaaattaaattttttgggcggtgtttaaaaaacgggggattggaaaa

SEQ ID NO: 193747 - DNA, 419 bp, Gossypium hirsutum
cccacgcgtccgattgattttactcaattttgaaataaaattaaaatttgacttcggctgcttgtgaaatttatgaaattgaaaagaatgaaagagaaaataggatggatacttcttttaatcatttctctttagactaatttgaaaaacaactaagtgaaaattggtgggttttgtttgctttagtcactacttggggtacaggggacaagttatcgtaacaaaaattattgagttagaatttgttgtgttctacagcaattgagacgacactgtggtcgatcgagtggggcattgcggagctggtgaaccaccctggaatccaaaagaagctgcggcttgaacttgacactgttctatgacctggtaaccagatcactgaacctgacacccacaaacttccctaccttcaagctgtg

SEQ ID NO: 193748 - DNA, 836 bp, Gossypium hirsutum
cccacttgtttcgcccacgcgtccgcccacgcgtccgacgctctctcctatactcaacttcttccacttaaaagcaagttagctagctagggttttgtgagccagagagatgggttcaaaaagaacggcatcactagccctcttctttgcactcaacatcctcttcttttccctggtgagtgcttgtggttcctgcccttcccccaaccccaaacctaaacctaaaccaaagccaaaccccactccctccccatcttcttctggcaagtgccctagagatgctcttaaactcggtgtatgtgctgatttgctcggtggcttgctcaacgtcaccattggtacgcctcctgttcaaccctgctgctctctcatccaaggtcttgctgatcttgaagctgccgtttgcctttgcacggcaatcaaagctaatattttgggcatcaaccttaatgtcccactttccctcagcttgcttcttaatgtctgctcaaagaaagtaccctctggcttccaatgtcgctaaatcagttctctaaattctttctcttcttagtgctgcgtggttttgatgttcttaaggtccagtttgaagtgatcaatgttttctcggtaactggttcgtttaatctacgatgttgtagtgttgtttccttttggattgattctgaataaatgtaacaccatatgaaaaagaagatgtttaatttctttggatttatgtatcttcatggggaatgaaatattagtataattcagctatgtttcaaaaaaaaaaaaaaaagggcggctgctcgcgatccccacgcgtgggcggacgcgtgggcggacgcgagaaa

SEQ ID NO: 193749 - DNA, 526 bp, Gossypium hirsutum
tcttttcgcgtccgcccacgcgtccgcaagatggcttcaaaaagaacagcatcgcttgccctcttctttgccctcaacgttctcttcttttctctagtcagtgcttgcggttcttgcccttcccccaacccaaaaccaaagcctactccttccccatccccctcaggcaaatgcccccaagatacccttaagttaggtgtctgtgctgaggtgcttggcttagtcaatgtaactgttggttcgcccccagtgcaaccatgctgctcccttctccaaggccttgctgatcttgaagctgttgtttgcctttgcacagcactcaaagctaacgttttgggcatcaaccttaatatcccagtttccctcagcttgcttcttaacgtctgctcaaagaaagttccatctggcttccaatgtccctaattattgtttccaattctttgtcttcttggtgttttgtgtggctttgaaggtctaagtaagttattatggtgattggtaattgcttgtttcttagtggattgag

SEQ ID NO: 193750 - DNA, 502 bp, Gossypium hirsutum
agacattatacaaccctaacttctacattaggcaagaagctcctaaggtttgagagagatggcttcaaaaagatcggcatcggttgccctcttttttgcactcaacattctcttcttttcacttgtcagtgctaattgttcttgcccttcccccaagccaaaaccaaaccccactccctccccaactcctgctgcggaaggaaagtgccccataaatacccttaaactaggtgtatgtgctgaggtgcttggtttagtcaatgtaactgttgggtcacccccagttcaaccttgctgcacccttatcaaaggccttgctgatcttgaagctgctgtttgcctttgcacagcgatcaaaggcaacattttgggtatcaatcttaatatcccagtttccctcagcttgcttctaaatgtctgctcaaaaaaagttccatccggcttccaatgtccctgatcactcttccaaaatcttttttttctcagtgtttttcatgcttag

SEQ ID NO: 193751 - DNA, 880 bp, Gossypium hirsutum
aggagaatgctaccttgctttttaacatatttctctcaataatcaaattcttccccgtactatatggatgcttctctccgcctatgcgtgatttaattactattataagaggagaaaaaagatcagattttatcgaacaaattctcagcaagtgtccgtcaatgctactccaaacgaatgctaaaggccaaactcctttgcacgttgcagcaaggtatggtcattctgctattgtgaaacttctaatcaagtcttgtgcaaaagctagagatggagatttagagaagctgggaatggatgaagtaaatgcagtgagggggatgctgaggattagggatcaggaatccaacacggctttacatgaagcagcacggtgtggcaatgttgaagtggtgaaagcattgttggagtttgaagaccctgattttccgtattctgccaataaaaaacaggagactccactttacattgctgctaggagaggagacggcggcgtgctgagtgtactattagagaaatcaaaatcaacagctcatggcggcccccacggtagaacagctttgcatgcagcagccatggctggagatgcagaggcaataagggtaatattaaagacgaaggggaatttgacaaaggaaagagatgaagatgggtacacccctcttcattatgctgcacacttaggttacatttctgttgtggaagaagtgttaaaatgggatgtatcagctgcctatataggtgataaaaagaaggggatgacacctcttcttatggcagccaggcaaggtcattttgaaacagtttcaaagattcattctttatgtccagattgttgtgaaaaagtggacaacaaaggtttgagtttacttcattatca

SEQ ID NO: 193752 - DNA, 1043 bp, Gossypium hirsutum
tcgctccacgcgatatgactattctttaactcctctgggttatttctttgtctaacgaagaaaagaaaatgacaatatctgcttcatttttgcttgcttttaccttgctgctcactgggtgtgttttgggtcctatatctcttgtttcagccaaacatggtgttccatcttatgctcataagaaaatcgcttctaaaccttttgaagggtatcttgaaaatggcaactttgaagaacagcccaacccgactgccttaaagaaaacagtactcataggagcacacgcacttcccaaatggactatcacagggttagtcgagtacatctccggtgggcctcaacctggtgggatgttttaccccgtcgctcatggcgtccatgcggtgaagctgggaaacgaggccaccatttctcaaaccatacctgtaaaaccaggggtactgtatgcgctgacatttggggcgtccaggacttgtgcgcaagacgaggtgttgagagtgtcggtgggtactcagtcaggggacctccccttgcagaccttgtacagtagtatgggtgatgacgtttatgcttggggtttcattcccaaaaccaagtatgccactgttaaattccataacccacgtgttcaagaggatcccacctgtggtccattgttggatgcggttgctattaaggagcttgtccgtcccagagctaccagatataatctggtgaagaacaatggctttgaagagggtcctcatcgcctagtcaactccaccaatggtgtcttgctcccccctcggcaagaggatttcacatccccactcccgggctggatcattgaatcacttaaagccgtaaaattcatcgatgcaaagcacttcaacgtcccggcgggacactccgcagtcgagctggttgccgggagagaaagtgccatcgcccagatcctcaggaccatccccaacaaatcatacaacatgacgttcatcatcggggacgctcgcaacggttgcaacggagaaatgatggtggaggcattcgctgccaaacataca

SEQ ID NO: 193753 - DNA, 561 bp, Gossypium hirsutum
tccaaattcaatcaataaatctgaagttttggatgtaaaaccagtgcgtaccttggttcctatattcccggagccatacgagggtcctccatttgtttgcgtgcctcctaacggccctttcccatctggattttccccatttttcccatttagtggatcaaacccaaatcctaatcctaaccaaaacgattcctccccgcctccggccccggttcggccatttacagctgaaacttccaatggccaaaatgtgtcaccgatgggtacacatgttaatcaaggacaaaaaccggctccttcgtatcctgtcaagaaaaggggaaggggaagaccgaggacctcggtttccttagtaaccccaatcggttagtttcaatcctggaattagtttgtctgaacaataaagatgttaacatggaataagtagaaaaatgtgcttttgaggtttgatgctagcaggagaaaagcttagccaaatggaaaaggcggatgagtcgaattccggcattgtttaacgtgcagaagttgaaagctggcaacatgagaatccgggctgtttga

SEQ ID NO: 193754 - DNA, 560 bp, Gossypium hirsutum
gttccaggtatattggtaccagaggccttattgttaggaaactgggtaaaagctcaagaatgggcagcaattccagggggccgagccacttacttagggaacccagtcccatggggtacccttcccaccatcttggtcattgaattcctatccatcgccttcgttgagcaccaacgaagcatggagaaggacaccgagaagaacaagtaccccggcggcgctttcgaccccttgcgattctccaaggaccccaaaaagttcgaagaatacaacgtcaaagagatcaagaacggccgtctagcattgttggcattttgtgggatcctgtgttcaacaatcagcttacccaggcactggaccattggagaatttggctacacatttggctgatccatggcacaacaacattggagatgttatcattcctagatcactttacccttagatgatgatagattgatggaatattttaaatgtaatgtccgttcttgcattgcgtaaaacatatgtaatgaaatctaatttgaaggctttcgtaatgggaattataatttttttta

SEQ ID NO: 193755 - DNA, 482 bp, Gossypium hirsutum
tcgcctgcggtacgcggttcgcaattcgacctacgcgtacgcattcgcgcgagcggaaaagcatttcatcgtcaggcaaaaacagggaattttagtcttcaggggaacgatcgaacgatgtcgtacctactaccgcacctgcactcaagatgggccgtagatcaggccatcttggcagaggaagagcgtctcgtcgtcatccgattcggccacgactgggacgaaacttgcatgcagatggatgaggtgcttgcttctgtcgctgaaacaataaagaactttgctgtgatttatcttgtagacataacagaagtacctgattttaacacgatgtatgagctttacgatccatcgacagtgatgttctttttcagaaacaagcacattatgattgatcttggcactggcaataacaacaagattaactgggcactcaaggacaaacaggagttcatagacatcattgagactgtataccgggg

SEQ ID NO: 193756 - DNA, 642 bp, Gossypium hirsutum
  unsure (1)..(642): unsure at all n locations
cccacgcgtccgcccacgcgtccgcccacgcgtccgcccacgcgtccgcccacgcgtccgcccacgcgtccggtttttgttttttgttttttcactttcacaccacattcttcagtgcaggcaccatggcagcttcctcagctttgttcacccctatcttctccaccgtccaaaagaagaatggcattgttaccccctccagcatctcattccacggccttagacccctaagcaagggcaaatcttcatccaacgccatctccttctcaagaaactcagctgctagtgccaggcttgcaatcaaagcagagctgagcgcccaagttgtgataagcgtcagcactgctctctcccttttcttgggtagatttgtgttcttcaacttccaaagagagaacgttgccaagcaagtgcctgagcaaaatgggttgacccactttgaggctggggacgcacgagccaaggagtatgttagccttctcaagtccaacgaccctgtgggattcaacatcgttgatgttcttcttggggatctattggccatattggtgcttactacatcttggccaccacaagcaatggctatgatcccaaattttttggctgaacatcagcttcgncttcttaattattctctatttt

SEQ ID NO: 193757 - DNA, 557 bp, Gossypium hirsutum
ctgaatctcaattaatcaaccacacactcaggcagccttggcatcagcctcagctttgttaacccccatcttcaccaccaccctccaaaacaaacatggcagccgccacaacatcgccactccatcgttccaaggcctcaggcccctacgcaaggccccctcctccaagctcgcccccttgtcttgtggtagaaaggttggtggtgtgaaggctgagctaagcgccccagtggtgataagcctaagcacaggcctctcccttttcttgggtcggttcgtgttcttcaacttccaaagagagaacgtggcgaagcaagtgcctgagcaaaacgggttgacccatttcgaagcgggtgacactcgagccaaggagtatgttagcctcctgaaatccaacgatccggtgggattcaacctggtggatgttctggcttggggatccctgggtcatattgttgcttactatatcttggccacctccagcaatggctatgatcccaagttctttagttgaacaatcttgtccttagtttatgtgtttatgttgtacaagatta

SEQ ID NO: 193758 - DNA, 692 bp, Gossypium hirsutum
gtttgtttcaacagctttgagctgttcaaagggtgtttcattggtggtgggcttattttcattgttgatcccttccatggcatttacttcaagcaaggtcccaaatgggtcagttgtgactaagactattggtaacactaaccatcgtggtaaaatctatcctataactcgagggtttgatcatcggagactgagaaatacaggtcttttgatggcaaagttgaggtttccaaacgaacgtttgggaaacatatatgaaaaacctggtggtttcggtgccgctcgaggatcttccctgatatgcttgtcctcaagaactcaaaagtctgaaaccgattgctcggatgcatctagtgcacagattgccgaaggcgaagttggtcattcaagcatgcatgggagaactatacattcaagtcccggcttggctgaagcttgtagattcgcttgtaatgatgcaaaatttgtaaatgaaagggctcgtaacgacattgttttgctttctcgtggaataatgaggctggatgctcgtgctcgtcaggatgtcgctattctcgggtcaggatttcttaaactcgatgctagggcaagagaagatacagaaaaaatcgaccgaggtgtgaagaaaaaggccgaacgtcttcaccatattgccactatcttaaaagccaaggccgaatctagattgaaaa

SEQ ID NO: 193759 - DNA, 694 bp, Gossypium hirsutum
tgccaatcttcatccaaggttgaattttgacgttccaggtcttctcctatccaggtacatgtttttcttctttcgcaagagctttctttgctagaccatgtgcatgtgtgttttccgatctatggatgtgctgaaaagtaagatcttgaaaataggatttcttgttctgaatatcttttataatggcaccgatcaccgatttggctgttgaagtcgccttgctcttctttatgacggtttttgagtctcccattgattctaactgactgggatcctattgcaatccctaatttcatgccttctaatcatgcatatgcctctacctgcgaatggtgaggggacattatctgtggataactatatttaacaccattagatttcccatcattttctaacctactagaccgtctttgattaaaagtctattatctgtgttgaataaattgatgaaattttattcatttcttgaatctggattacgtatactctcattctttaaactttgttacatttacttactgttagtaaatttctagcttcctatcagatattcttctattgagattattttaagtcttattcctttgatttttaatatattgtgcttttgtcttttcttgtcatttaaattttatctatatttatttaattcattataattctatatattcctgagtttcctgtcccatattat

SEQ ID NO: 193760 - DNA, 598 bp, Gossypium hirsutum
tatgcaccggttaatgcaatgaagctattacattcaagtgatcagaaaagccaatggccggccaccggagcaaagggttcactgttaaggtacgcactcgcacaccagcagctcgaggccgtcattcaattggaatacaccattggattccatgatgggtacattcaagtgaacgcacgtgtcgataacttacgcttccacgtggccagactagggttcagcaaaaaaaacgacgaaatggatgattgcttgaacgagaaacacttcccgtcgaggatccgagtttgggtcggaccggaagtcgggtcaacgtacgtgtccgggttaaccttgggtcggtccacgaacaatggtgaaaacgaagtcgaaacacaaaggatccttaaagggagattcgggaaatattcaaaggattccttccatgttaaagcaagagcaagggtttccatgaagaacaagatgaaaaactggaggtgggatcaagacgcggaagggaacgccgtggtgttcgacgcggtgctttgcgacaacgtgacgggccacgaaatcgcaacttggaaatcgttgaacaaaatagcaacggcagcagccatggttt

SEQ ID NO: 193761 - DNA, 667 bp, Gossypium hirsutum
tcgcccacgcgtccgcccactcgtccgcccacgcgtccggaagagcagaattttattgcaatgatgaatgaagcaagagagaggcgagctaagttgaatgcggatgccccaactcttcccatggagattagagccgaaaaggctgttgatgccatttacgtctgttgcttcggcagagacccgatagaagaggaagacgagagcttgctaaatatcatgctatgtgcagctttcccaaccgtcaagcgatcaatgatacaaagaatcatcaaggacaaagcaataaaagtagcagaaggtggtgatgatgcagacatcgttccagaaccaaagccattatcaaaggaagctgtacaaatgcaaatgaaagaccttgaattccttaaacaaaacacggagacatgaaagagctgattttaatgaaaaaattggagtcggttcgcttcttcgaactgcacttggatggtatcagaaaatgaagctaaggaaatggctccatattgaaaccatccaacacttgattttcagattgcactcaatggcagataaatcataggtttactgggtcttcagtatgttttgtttcttggaggttgagttgaaactcatttttagggtgtaaccattaaaggcaacagtttgtgagtgaaatacacattcatagcaa

SEQ ID NO: 193762 - DNA, 628 bp, Gossypium hirsutum
cccaactccaacaaaacatcaatggcggcagctaagccattgccgtcatctcttcacactcaccaaattctctcttcatgcaaccaaattttaccttcgctcctccatttccgtcaacattacagcaacccgaaatgccaacaaccacaaaggcgaagaaaacactcaagctccttagatggcgcctacgacttggctatcaaagcttacatggaaaacccaaactccatctctggtttcgcaaacaaagtcattggctctctccctatagtcggccttgtcgctaggatttttagtgatgaaaggcggtgttggtggggatatcattgattttgctgagtttagaagaagggtgggcaagaaatgtactgttactgattctagagccttttacgagttccaagaaaggagaggccggggaggggatcctttgtatgttctgctatcatgttggctagcagctgtgggtgctggtcttcttaaatctgaggagatattggagggggtggcaaggcttcggatttccaatgatatcgaattcgaagagcagaattttattgcaatgatgaatgaagcaagagagaggcgagctaagctgaatgcggatgccccaactcttcccatggag

SEQ ID NO: 193763 - DNA, 1072 bp, Gossypium hirsutum
aacagaacttacccacacccaatgccacaaacaagctttgcttatatgaatcacctccacttcaactaactaccttcttccaccacccaaaataagaagaaaaacaaaaatggccatggcaatggcgcttcgacgactctcctcttccattgacaagcctctccgtcctttcttcaatgccccttccctctattacatgtcgtctttgccaaatgaagctgtgtacgagaaggagaaacctggcgtcacttggccaaagcaactgaatgctccacttgaaaccgttgatcctgaaattgctgacatcatcgagcttgaaaaagcgcgccaatggaagggacttgaactcattccatcggagaacttcacttcggtgtcagtgatgcaagcagttgggtctatcatgaccaacaagtacagtgaagggtatcccggtgctagatactatggagggaatgagtacatcgacatggcagagacattgtgtcagaagcgtgctttggaagcattcaggttagatcctgaaaaatggggagtaaatgtgcagcccctttctggttctccttccaattttcaagtttacactgcactcttaaagcctcatgacagaattatggcacttgatcttccccatggtggccatctctctcatggttatcagacggacaccaaaaagatatctgctgtgtccatattttttgagacaatgccatatcggttgaatgaaaacactggctatatcgactatgatcagttggagaagagtgcaactcttttcaggccaaaattaatagttgctggtgccagtgcttatgcacgtctgtatgattatgcacgcattcgaaaggtttgtgacaagcagaaagcaataatgttggcagacatggcacacatcagtggtttggttgcagccggtgttatcccttcaccttttgagtatgccgatgttgttaccaccacaactcacaaatcacttcgtgggcctcgtggagccatgattttcttcagaaagggagtgaaagggattaacaaacaagggaaagaggttctgtatgattatgaagacaaaatc

SEQ ID NO: 193764 - DNA, 706 bp, Gossypium hirsutum
cccacgcgtccgcccacgcgtccggtcgcccttgctatcacctgcaaataactctccctcccttcgtccgaatttctctgaaaaaaatctcaaattcccttatttgggttgatatatagtattatatatatatatttacaagaatggtagcttcggctatttcagcttctttcaatctctctctctgtactcaatccagacccacttctatttcatccctttctcccagaaactcgacgaagttgatagtctctgcattgccatccccttatggagactcttctacaatggggttatctagtagaactgctgggctacctatgaagatcaacaagaagggcttacttgaatccaatccaagctacgatgcaatacaagctaaaacggggaatccacctgtgatgccagcagtaatgactccaggggggcctttggacctttcaactgtgttattccgaaatcgtatcatcttcattgggcaaccagtcaattcacaggttgctcaaagagttatatcacagcttgtgactttggcaactgttgatgaaaatgcggatattctggtgtatttgaactgccctggcggaagcacctattcagtcttggcaatctacgattgcatgtcttggataaagccaaaggtgggcacagtttgtttcggagtagctgcaagccaaggagctcttcttcttgctggtggagagaa

SEQ ID NO: 193765 - DNA, 484 bp, Gossypium hirsutum
cccacgcgtccgcccacgcgtccgaaacatgtcggtagcattatcctcttctcatcaaactttcatagccaatgctttctcatttaatcgaaaacccaaagcaaagcttcccaattctcctactttcattacttgcaggttccactcagacgaccacgacgattcctcctggagaaatgagaaacagttagctcagctagcaatcgtgacattggcagccggggcagtgactctgggttcggtgggtgacgcatcagccgccaaatctggtggcagagctggcggtcaagcgctccggtcagcggctcctcgctcagcaccaagagccaacaacaattccaggaccaacatttacattaatccgcgggtcgccccacctctagtcggaggctacggatacggttacggcgtgccgttctatggtggttggggctggtcaccattctcattctttgctcccggccctagcgttgcggtcggcacc

SEQ ID NO: 193766 - DNA, 501 bp, Gossypium hirsutum
gtccgcacttcccttccctttctcgttgttcactcaaaagaaaagaactctcactttcttttttcaaccatcaaattctcatttctcaccaatttttttctcatccgaaatggagtgccagtaaacattaaacgcagaactcgaaaatctatcaccatgcggcagtggaaaaaggagtacaagcagccattcaagttcacccgagttcgagttctggatggtccgaaacccgccttttcccgaacccgacctcatctctgccgatgaactattcgttaatggcgttctccgtcctctccatctcttacccaacaaacaacccgaagagaacccacaaatagactcaaatcaacccgcatcacaacctcctatacccgaccctgaccctattataacatcggatccggttcctgtattgtcagcttcgaaacggtggagagatatctttaagaaagaaaaaggaaaaaacggtaaacaaagtaaaaaagacaaggataaaga

SEQ ID NO: 193767 - DNA, 740 bp, Gossypium hirsutum
tgaaactttgggaactctttttttaaaggctgaaactttgggaacgttgtcccagaacacacttagcatcagcctccaatggccagttggggtgtagcagaatgtagtttaagacccttcactgccgtcaaaatccaccataaacctagaccttcattaccttcaaacaccattaatgctttcaagttcaaacctttaccatgttctgcattcaaggtcccaactttatggtctaaaggtagaaacttggggggattggggctgttgagtgtgagtgctccattgaaagtgacaataactagtgaagaagataaaggtaaagaagagagcaccactgatggtgttaataatggtgagtttgaccctggtgcagcacctccttttaagttgtctgatattaaagctgcaataccaaaacattgttgggttaaagatccatggagatctatgagttatgttgtgagagatgttgttgttgagttaggattggctgctgatgctgcttatttcaataactgggttgtttggccactttattggattgctcaaggaaccatgttttgggcactttttgttcttggtcatgactgtggacatggtagttttttcaataatccagctttgaatagtgttgcaggtcatattcttcattcttcaatccttgttccataccatggatggagaattagccatagaactcatcaccaaaatcacgggcatgtcgaaaatgacgagtcatg

SEQ ID NO: 193768 - DNA, 437 bp, Gossypium hirsutum
cctcacgcgtccgcttttcttttccccgtgaaatctttgatttatagtataagtgctaacatggcagctgttatctcttgtaactcttactctcctttagctgcctctaaatggattaacccaacactccccactaaagcttcaacctttctagcaactcccaaatataatcctcacaagcatgttcagtgtaagcttcagaatgagcagaaagggaggccgttttccctgaaggaatgtgcaatctccatcattttggcagctgagttaataactggaatcccatcacttgatgcatatgcagctaatcctccattgccagatttatctggtttaatctctgggcctccaattaaagaccctggagctttgttgagatatgcattgccaattaacaataaagctggtagagaagggcaaaaaccacttggagatat

SEQ ID NO: 193769 - DNA, 731 bp, Gossypium hirsutum
ttgaaatcggatccgggtctagaaaataccgggaaacgagctaaaactgagtcgtcctcatcatcatcttcaacaactactcgtcctgttgtgttgattgactcacaagaagctggggttcgactcgttcatacattaatggcttgtgctgaagctgttcaacaagataatcttaaactagctgatgcattagtgaaacatattgggttacttgcttcatcacaaactggtgctatgagaaaagttgctacttattttgctgaagctttagctcgaagaatttatagaattttcccaccagattcacttgatccatcatataatgataagttacaaattcccttctatgaaacttgtccttatttgaaatttgctcattttacagccaatcaagccatattggaagctttttcaatggctagtagagttcatgttattgattttgggctaaaacaaggtatgcaatggccagctttaatgcaagcacttgcattaagacccggtggaccaccggcgtttcgattgaccggaattggaccacctcaaccggatgatactgatgcgttgcaacaagtggggtggaagctagctgaattggccgaacgcatcgggatcgaattcgagtttcggggattcgtggctaataatttagccgatctcgaacccgaaatgctcgatattcgtcctcccgagattgaagtagtagcggtgaacgctgttttcgagcttca

SEQ ID NO: 193770 - DNA, 635 bp, Gossypium hirsutum
caacaatgaaacaccattgttttctcctctaaatcttctccccactatctctcttcttttactttatttctctctttttctcatttcttttgtgtataattgttactcgctgaattatatatacaaatatatatataattgaaaacatttcattcgttaatttatatagctagccatgagatcgtttttaaagtttgtttcacgttgcgttaaaaaccctgaagtgtccacgacagaagagatggtggtgacggctcctgggagggaggaaacaaggtcttttatggctcctaaaatggtggcactgaagaagaagaagaagagggtaaaggtggggacgccattctctacgactcctgagtggaaaccttcgttgtatgtaatctcggaggataacgttttggcggagaagagagagaaaacaacgccggaagcttcaacaacgccggctgatagagcggtgaagaggaagagtggagcagggtcacgctccaaagttcacgttcgaagctacagcgacgacatcgggcgaaatcaagaaccagtggtcatcccaacattttctccgactccttttatgttttgataaccttttatttccatgtatcaaatttgtgttaaattagtaatatata

SEQ ID NO: 193771 - DNA, 753 bp, Gossypium hirsutum
tctacgcgtacgaccacgcgtacggggattttaagcttaaaaccctaaccctagaattttctttggaactcatcgctggtgctatttgacctcattcacaatgcctcgccgtagctctggaaggtctgcttctcgtcctgcttctgctcgcagccctccacctcaaccagctcatcatgctcctcctccagctcctgctcagagtggaagtggtggatccttgctcggaggcataggctctaccatagctcagggcatggcttttggtactggaagtgctgtagctcacagggctgtggatgctgtgatgggtcctcgtactattcaacatgaaaccgtggtttccgaggctgcagctgcccctgcaccagcaactacttccaatagtttagctggcactgattcatgcagcatccactacaaggcattccaggattgcctgaatagctatggaagcgaactcagcaagtgtcagttctacatggatatgttgactgagtgcaggaagaacacagggtccatgttgggtgcctaaaagtttattcaccattttccttgttatgctattgaaattgtcagcttcggacttgcgctgagatttacccttgtttttctttggttgattgatgaagctgaactcttccataaatctctatgaataaaaaacactctttgagtgatactgttttttaattggtgaacctttgttatcgctaatcaatctcaatatcatttgtactctttcagtaaatg

SEQ ID NO: 193772 - DNA, 662 bp, Gossypium hirsutum
cccacgcgttcggtcgctgccccatttgaccacatccaacatgcctcgccgaagctctggaagatctgcttctcgcccagcccctcgtcctgctccggcacgtagcccaccgcctcaacctgctcaacatgctcctcctccagctcctgctcagagtggaagtgggggatcccttcttggaggcataggctcaacaatagctcagggcatggcttttggaactggaagtgctgtagcccacagggctgtcgatgctgttatgggtcctcgtactattcaacatgaaactgttgtttccgaggctgcagcagcccctgccaatagttttaccggctctgatgcatgcagcatacactctaaggcattccaagactgcctgaatagctatgggaacgaaatcagcaagtgtcagttctacatggatatgttgtcagagtgcaggaagaactctggatcaatgttgggtgcctaaatttatgcctcatttgttgcttctacaatgcaatgtctttgcccttcacttctgtttctcttttattgatgatgatgatgaagctgaactcccttcaatgattcaataatatttatctttactggctgaaccttgatctttactggctgaaccttgatattgttaaactttacagttgaaaatgtgaatg

SEQ ID NO: 193773 - DNA, 594 bp, Gossypium hirsutum
cccacgcgtccgcccacgcgtccgctcccgagtcgattcaaacacaaatgatgtggtttgacaagtatttggagagtgaaggttgtaaagatccagaatcggatcagtgcaaagaagcgtttgatgatgctctgttttgggttggtgaaattggcgtcaatgattatgcatatactattggatcaactgtgtcaggcgacaccattcgaaagcttgccataaatacttttactgagtttttacagggattgctgaagaaaggtgcaaaatacgtggtcgttgaagcactgccgacgacaggttgtttaccgttggcgatgacattggctccttcagacgacagagatgacatagggtgcgtgaaaagcgtgaacaaccaaagcaacgcccataacctcgtcctccaatccaaggtgtcggatctcagacaacagtttccccaagccatcattgtttacgctgattactggaatgcttatcgcacggtgatgcaaagcccagaaaaatacggattcaaagagagcctcaaagcatgttgcggaacatgggagccgtacaacttcgaggttttcaatacgtgcgggaatccttcgg

SEQ ID NO: 193774 - DNA, 540 bp, Gossypium hirsutum
cccacgcgtccgccacgcgtgcgaaaatcagcaacctcaagctttagcagttggtttctctttctcctcaattcaagaactaataaagtatggcaaccatttcagctacctcatcaatcaccattgcagcttctctttcatacaagccatcatcactcaagctcacctccccaattgccattgggttgccaacaatggcgaagaaagggaaagtgatgtgttctatgaaggaggaggaggaaaagaatagctctagcgttggcatgagtgctgcatcgctgttagctgcagcagtcatgtcaagctcaccagctatggctctggtggatgagagaatgtccaccgaaggaactggacttccctttgggttgagcaacaaccttcttgggtggatcttgtttggtgtattcggcgtgatatgggctctttactttgtttacacttcatccctcgaagaagatgaggagtctggattgtccctctaaacccataaaagtgtaacttcactcaagctcaccaccccaattgccattgggttgc

SEQ ID NO: 193775 - DNA, 847 bp, Gossypium hirsutum
  unsure (1)..(847): unsure at all n locations
cccacgcgtccgcccacgcgtccgctttttttctctctcaaatttactactactctcttagctctcctctgtttcagtctcctttttatttccataataagatcacaatttttttctcatttattttttattttcacttcattttttctcagctttaacaaataaagaagaaaaagattcaagtaatttataccttatggaatatgatacagagaaaacatgaagagaattcaagccaatcgataacatttcatcacctacctgttcttcttcgtttcagaaacttctgttttttgaccggccatgggaaagaaagggagtggatggttctcgacggtgaagaaagtgttcaaatcttctcacaaagacttgcctgacaaaaaaagagagaataatgtggagaaatggccaaatgaggccccggatgtagtgtcgtttgaacattttccggcggagagttcaccggacatcacgaataatgagagtgccatgtcgactcctctgaatgaagataggaaccatgccattgctgtcgccatggcaactgctgctgctgcagaagcagctgttgcggcagctcaagctgccgctaaagtcgtccggttggcgggttatggacgacnatctaaggaaaaaagagcgtgcacgcttatacagtcgtattatagaggctatctggctcggacagctttgcgtgctttgaagggactggtgaggttgcacgcactaatgagaggttatacgtgcgcaaaccaacgccaatgacaatgcggtgcatggcaacattaatccgggtgcggggcaaagtgcgagctcgttgggctgcgctaactgatcgtgaaaagac

SEQ ID NO: 193776 - DNA, 785 bp, Gossypium hirsutum
  unsure (1)..(785): unsure at all n locations
cgctatcttctttttgtcacttccgctcttctctgttaaacgtttagccgtcgttgtctgccatcgatttgctaagaaaatagattgacgatgggattaccaaatgcgagcggtgacttgtcaactgaagttgaggtagatgctttcagacgcctctttccccttcgtttctacaagaaacatcttttagagtctatacgtcctgatgctcgtccgcttggaagagcaagagaaactaccattgcccttggggctgttgcatctgctaatggttcancacttgcaaaaattggttcaactactatgttggctgctatcaaaatggaggtcatgaccccttcattggaaacaccggatgagggttgtatagcgattgatttccacatgcctccaatttgttctccaattgttaggcctggcagaccggctgaggcagcaccagtcgtggcaaagcaattgtcagacactattttaagctctggcatgatcaatttgaaggaactgtccttggttagtggaaaagctgcttggatggcatatttggacatatactgtttggatgctgatggtgctctttttgacactgcattactctcagcggttgctgccttttctcatttggaaatccctgtggtatctctcaacgatgatggaaagaatcgttttatcagaggaacaaggactatctgacagggaaccagtcaataaggagaagagaaaaattaatctgagcagcgttccgttttcattgacatgtgtactttacaagaactacattttggcag

SEQ ID NO: 193777 - DNA, 551 bp, Gossypium hirsutum
ctgacgcgtgggccaaaactcaaatccctaggtgaccaccacttccaccgtccagttgtccgtcggccgatccacctcctagcctcaagctcagctcagcagcttcttcatttttgcttcttcatttgcagtctcggtagccgatccagttatctttcagcttcttcatttgctgtctgcctctagcttccgaatcggcttttagcatgggtaagaaagttatcacacctttgaggagttcacttaagccaaaaacggttcaagccgttgtttgcttggatgattggatgcgagctaagggattttcagcagaaattggttccaaaaaggacgatgaggacgctgaggccgacgacgacgatgaggacaatgaggatggtgatgtttctttggtagctttttaagatactttctttctaaatgtttaaaatttaatttagcttacaatttatattttgttatgaaattaaatatgttaatggattaatgtatgaatattatgttttgttgcttaattttccaaagtcattttggactttggaggtatgtgt

SEQ ID NO: 193778 - DNA, 613 bp, Gossypium hirsutum
aaatccctaaccctttccctccctttttttcccccaaatcggaaatccacctccaccgatccaccattccacctccggtcctccacgactccacctccgctctaacggtgcttctagccttcttcgtcttctacctttgaatttcaaagaaacaatcgacattgaaatcgatttggcttaccttagcttcctttcccgacttgaatttttatgactatggctagttcgaacactcttatacctgtggacgatggatttaatgagtatggaagtgctctcaaacgtcaaaagtctaccacttcaaaggtgtgggatgaaatgacaaagcttgaatgcgagaacaaaaacgaattgaaggcacaatgtaaatcactcttccgaatcggcttttagcatgggtaagaaagttatcacacctgtgaggagtccgcttaagccataaacggttcaagccgttgtttgcttggatgattggatgcgagctaagggattttcagcagaaattggttgcaaaaaggacgatgacgacgatgacgacgatgtttcttcagtagctttttaagatactttatttctaaatgtttaaaatttaatttagcttacaatttataat

SEQ ID NO: 193779 - DNA, 653 bp, Gossypium hirsutum
ttcccttttttatcttcagagacaaatccctaacacattcccttcccttttttttccccaaatcagaaacccacctcgcccgacccaccattccacctgcggtgaccggtcctccacgactccacctccgctctaacggtgcttccatcgaatctagccttcaacgtcttcaaagaaacaagttttttagtgaggcagaaaaaatagcaagcccaggcaggacttgagttttatgactatggctagttcaaacactcctatacctgtggacgatgggtttaatgagtatgaaagttctctcaaacgtcaaaagtctaccacttcaaaggtgggggatgaaatgacaaagcttgaatgcgagaacaaaaatgaattgaaggcacaatgtaatcactgtaagactatcttctctgctaagtcttctagtggaacctctcatttaagacgtcatctaaatagctgtttgaaaaaaagttaataaggacatcactcaatacaccatagccactcaaccatcaccgcgaggtcttccatctataaaaaactacaagtttgatgttgatgagtgtcgtcaagctatttctacttttcttgtgtgtggcaagcattcatttaggacagttgaagaaccgggatttagatacatgatgaga

SEQ ID NO: 193780 - DNA, 449 bp, Gossypium hirsutum
ttgcctcacgcgtgcgctcaatctgggatgaagcttccaagatgcttgattaatacagagacgaaacgctcgaccatgaaacaattcagagattcggttcgccggtgacggcgcacatcgaacccgacggtgattatgaagattatataagaactgagcttctttatcaaacggggttatctcaagaccccactaactccctcctcctcgccaattacgctcagtttctctaccttgttgcacatgattatgagagagcggaagagtacttcaagaaagcggtaacagtggaggcggtggatgcggaagcgtacagtaaatacgcgagctttttgtggaaagcgaggaacgatttgtgggcagctgaggaaaccttcttggaagccattgaagcagatccgagcaactcttattacgccgcgaattatgctcattttctatggagcact

SEQ ID NO: 193781 - DNA, 825 bp, Gossypium hirsutum
atttccaccacttattctctatggccaattctttgatcccatcatcttcacaaaaccgagcgttgtaagcacaaacaagcaaattcactagccacccatctccctattctcaatggcaatggcaacccaagcctccctcttcactccatcaaccctctgcaccccaaaatccggcgaccgcatcgccgccgtgttacggaaacaaccaccgttcctaaccgtccctagcttcaagtccccaaaaagcatcatcgccccacgcaccatcaaagcccaagcaaccgaagagaaagccgagacaaccgccacaaaggaagcaccagtcggtttcaccccaccagagctggacccaaacaccccatcaccgatcttcggcggcagcaccggcgggcttttacgcaaagcacaattggaagagttttacgtcatcacatgggagtcacccaaggaacaaatcttcgagatgccaacaggtggtgcagccatcatgagacaaggtccgaacctgctgaaattggctcgtaaagagcagtgcttggctcttgggactaggcttaggtctaagtacaagatcaagtatcagttttatagggtgttccctaatggtgaggttcaatatttgcaccctaaagatggggtgtaccctgagaaggtgaaccctggtcgacaaggtgtgggacagaactttaggagcattgggaagaatgttagccctatcgaggttaagttcactggcaaacaagtctatgatctgtaataaatttatgttcatgttttgagatgttttattttaatggtgattgttgcaatttaaatacacttttt

SEQ ID NO: 193782 - DNA, 438 bp, Gossypium hirsutum
cccacgcgtccgatttctcaaaaatgagctccattgctttcaagcccttccacggcctccgccgtagctccgccgtccccacccccacttccactaccaccaccctttccaaacctgctgtcaaattccatgtctcagccgccaaaacttctccaaaactaagcaaccgcaacctcagggtagccatcatagggggtggtccggcaggaggctcagccgccgaaactctcgcgaaggctggcatagaaacgttcctaatcgaacgaaaactggacaactgcaaaccttgcggcggagccatcccgctttgcatggtgggtgaatttgacttgcctttggatatcatcgaccggcgagtcaccaagatgaagatgatttcgccctccaacattgccgtcgacatcgggcaaacgttgaaaccgcatgaatacattggga

SEQ ID NO: 193783 - DNA, 509 bp, Gossypium hirsutum
  unsure (1)..(509): unsure at all n locations
gcgcccacgcgtccgctgagtttaagcatatcaataagcggaggaaaagaaacttaccaggctacttcggcaatgtaatctttacgactgcactaattgctgaagctggtgatctcgaaaccgaatcgtttactgacaccataaagaggattcatgaacgattaaatcagataaatgatgaatatttaagatcagctattgattacattgaaaaagtgcctgatttaaacaccttggttagaggaccgcatacttttcgatgcccaaaccttgttgttgttccatggaactggttgcctatatatgaggcagatttcggatggggtcgtcccatatatatggggccagggaatgtcgtccaagaaggtaaaatttacatgctaccaagtccagctaacgatgggagtttgacactggcagctcgtttagagatccctcacatgaaagtttttgaaaaacttatttatgagatttaatagttattttnnnaaacaaaaaaaaaataaaat

SEQ ID NO: 193784 - DNA, 1179 bp, Gossypium hirsutum
tctggatctataaattaagcgcaaaggcttcaccagggactgctcaagtctccctttgcgccctttacacccttgttcttctaacacgatttcaagatggagattactataaaggagtctgctattgttcgtccagctgaagacactcccaaacgaagtctatggaactccaatttagatatagtgaatgataagataccacatccctactgtatactattacaagccaaatggttcttctgatttctttgatactggaaggcttaaagaagctttgagcaagattcttgtcccattttaccctgttgctggaaggttggggtatgatgaaaatggaagacttgagataatatgcaacggtgaaggagttttattcgttgaagctgaaactactgcagtcatggaacatttgattggtgcttttgccgagaaccatcaagtgttacgtttagtccctaaagtcgactattctgaaggaatatcttcctatccacttattttattgcaggtaactaagttcaaatgcggtggagtttgtcttggagtagggattcaacatactttaggagacggcgcagcggctcttcatttcatcaatagttgggctgacacttcacggggcttgacgcctgccattgcaccattcattgatcgaactcttcttcgtgctcgggacccaccaacgcctaagctccaccatgttgaatatgacccttcaccggcattgaagtctgcattaaaatctcaatcagatgatcataagccatccattgtctccacctttaagctcacagctgatcaattgaacaccctgaaagccaaagctaatgttgcaaatgcaaacggtggtataaaatatagcagcttcaacatccttggctgcacatatatggcgttgggtaagtaaagcaaggggtctcccagctgatcaagataccaagctgtattttccagtcgacggtcgatatagattggatcctccgctcccaccaggctacttcggcaatgtaatctttacgactgcattaattgctcaagctggtaatctcgaaaccgaatcgtttactgacaccataaagaggatccatgaaggattaaatcagataaatgatgaatatttaagatcagctattgattacattgaaaaagtgcctgatttaaacaccttggttagaggac

SEQ ID NO: 193785 - DNA, 470 bp, Gossypium hirsutum
tcaagtaccaaattgggccaaacaaattttaggtatcaaaaaaaaaatgttaggtttaggtacccaatgttatattaagtcaaataataataatggttgatatttattatgtatgatttagcaggtaactaagttcaaatgcggtggtgtttgtttgggacttgggtttcaacatactttaggagatggcacatcggctattcatttcatcaatagttgggctgacaccggcccgaggcgtcccgcctgccattgcaccattcatcgatcgaactcttcttcgtgctcgagtcccaccaatgcctaaattccaccatcttgaatatgagccttctgctccgttgaaggctgttgaatctgatcttaagccatgcactgtctccacatttaagcttacagttgatcaattgaatgccctgaaagccaaagctgctgcaaacagtagtggtacatagtacagtagttacaac

SEQ ID NO: 193786 - DNA, 568 bp, Gossypium hirsutum
ctcatttaagtgtcttaaataacccatttcaaagttggtaatggctttgcagactgctgctttggttccagctactttcaccctacctaaagagggaaaatcaagtccatctttcaaggattcaactttctttggggtctcactttctgaacatgccaaagctgatttcagctcttctgcattaagatgcaagagggaattcaacccaagaaatggagctgtgagagccgaaacaacagctactgcagctccagcaatcagcagatctgcggtggatggcaagaaaactctaagaaagggtagtgttatcatcaccggtgcctcctccggattgggtttagccactgctaaagccctggctgaaactgggaaatggcatattatcatggcttgcagggactttctcaaggctgaaagagctgcaaagtctgctggcatgtctaaacaaaactacaccatcatgcacttagatctcgcctcattggacagcgtccgccaattcgtcgaccgttacaagcgatcggggaggcctcttgatgtgcttagttgcaatgctgctgtttaccag

SEQ ID NO: 193787 - DNA, 397 bp, Gossypium hirsutum
cccacgcgtccgaaacaagtcatggctctatctttcacagctgcaacaacactatacatttctggcaacaacattcatgcctcaaccccctaaaacgcctccttattctcaaattctaccatcagcttttcagcatagcagagaagaagactaagcatcaggagctctggtgatgtatcatccgtgacaccaacgaccgaaacagaatctgaaaagtccatcgatgaagctcctaagggacctccttctttgatctctgctcttaatgttgaacgagctcttcgtggcatcgcaatcacagacgcacatcactatggtagactcggccttcaaagagggtgtgcttatgaacaggtcactgtggcctacagaaacatggttgatgaactcctgaatc

SEQ ID NO: 193788 - DNA, 978 bp, Gossypium hirsutum
cccactcgtccgcccacgcgtccgagctttctcagctttttatatattcctacttattttctataaaaatcaaaatggcttctttccttactcaaagtgtcctcaaacttttccttgtcatctctttgtttcaaatctctttggccgttaggaagctgagtgaagtggtgcaagaccagcctcagctcttgacataccacaatggtccccttctttctggcaaaattactatcaatttgatttggtatggcaagttcaagccttccgagagggctattgtctctgattttgtcacctccctttcctccacgcctccatcgcaaagcaaccagccgtcggttgcccaatggtggaaaaccaccgagaaatactaccacctcacctccaagaaatcttccctttccctgtctttgggaaagcagattcttgacgacaagtattcgcttggcaaatcactcaaaaacaaacaaatcgttgagctagcctcaatgggtgaccaaaagaatgctatcaacgttgttttaacagcatctgatgttgctgttgaagggttctgcatgagccgctgtgggactcatggctctgccttgggctccaccgatggtctcgtcaaggccaagaagcactccaagttcgcttacatttgggtgggtaactcccagacccagtgccccggtcaatgtgcctggccgttccaccagccaatctacggaccacaaagcgcgcctttgattgcaccaaacaacaacgtgggtcttgatggcatggttataaacttggctagcctctttgccgggaccgtcacgaaccctttcggaaatggttacttccaaggcccagctgaggcaccattggaggcttcatcggcttgtcctggaatttatggtaaaggggcttatccaggctatgcaggaaacctacttgtagaccctacaactggcgctagctacaatgctcatggtaacaatggaaagaaat

SEQ ID NO: 193789 - DNA, 996 bp, Gossypium hirsutum
gctctcttttcactctccaggcttattggacttggaaattccaccttactatctctcacaattcaatcgactatggaatccattggagttctcatggcttgccccatgaactcttacctcgaacaacaactcgagaaccgtttcaagctattcagattctggacagtgccggacaaatcatcctttctggcttctcacaaggactcaatccaggcggtcgtcggaaacgcctttgccggtgccgatgctatgctgatcgaggcgttgcccaagctggagattgttgccagcttcagtgtggggcttgataagatagatttggccaagtgtaaagaaaagggtatccgagttaccaacacccctgacgttttgactgaggacgtggcggatttggcgatcggtttgatgttggcggtgttgaggaagctctgtgagagtgatcggtttgtgaggagtggcaagtggaagagagggcaatatgtgttgactactaagtttactggaaaaagagttggcattattgggctgggaagaattggcatggcaattgctacgagagctgaagcatttagctgccctattagttactactctagaacagagaaaccagagatcaaatacaaatactatccaagcgttgttgagctggctgccaactgcgatatcttggttgttgcttgtgcactgactacagagacccaccacatcatcaacagggaagtcatcgatgcattgggtccaaagggtgttctcatcaacatcgggagaggccctcatgttgatgaacccgagctggtttctgcattggttgaacaccgattaggaggtgcagggcttgatgtgtttgaacatgaacccgaagtaccggaagagctttgggcgcttgataatgtggtgctcttacctcatgtaggtagcggtacggtggaaacccgccaagctatggctgatcttgtcattgggaacttggaggcacactttctgaagaaaccacta

SEQ ID NO: 193790 - DNA, 482 bp, Gossypium hirsutum
ggtgaccaaggaaaagttaacttgccaatagtacctgtgaagccacctgctcctgttacacatcggaaagcattatcaaattctcatcaggcccagcagattatttctttaaatccgttacctctcaagaaacatggttgtgatcgagccccgatacaggtttgctcagaggaggagtttctgagagatgtaatgcagtttctgatttttcgaggacatactcggcttgttcctcaaggggggttagctgagtttcctgatgccattctgaatgcgaagcgtcttgacctttttaacttgtatagagaggtggtgtcaagaggaggctttaatgtcgggaatggcataaattggaaaggacaagtattttcgaagatgcgcaatcacacattgacgaatagaatgactggagtgggccacactctgaaaagacattacgagacttaccttttaaagtatgaattggctcacgaccatttgga

SEQ ID NO: 193791 - DNA, 595 bp, Gossypium hirsutum
tgttcaattgcccctctgaattcgtaaatcatggtaagttcctggttcttaagttacttcggttggattaacatctgcacgttacagctcgatacagggtaaaattttggaacggtttaccttcctatctggatagtctgctcggagaccccttttagcttgcatgagatgacgattctgcgtggttcccggcccttcttctctggaatcgaactaggcagcagtgggggggaaacaagaagtctgaaaatcggcctcaaaaggttcgggaacccaaactgagttggaatgcgagttacgaaagtttactcggaaacaacaaaccattccctcaacctatgcctctccctgaaatgatcgattttctggtcgacatctgggaacaggaaggattatatgactgagcatacagtacagcatagcacattcgggaaaaaaaaaaaaagggggttagatattaatacccttattgttgtaacattttactagcttcattatgaaaaaggcattagagcattttaaactggcatgtattgtcgaccggaacggtcttggtcttgtctgtccgtggcttgctcatttttcactttttttt

SEQ ID NO: 193792 - DNA, 585 bp, Gossypium hirsutum
agccttccgcggccccttggccggccccgtgggttctggaccaacggtattaatcattgtaaattctgggtttcaaagtatatgaaataaacaaactggtaaccctttggatccaactcggctttgttgcaaaaaatcaatctgtcatggcaaccatctcggctaccaccacccctgcagctcttgttcacaagacattgcccaggattgcatccccagtccccattgggtcgccaacaatgggaaagagggggaaggtgatgatgatgtgtagcatggagaagaagagtgagaatgggtcaaacatggggatgagtgcatcattgctggcagcagcctgtgcagcaaccatgtcaagcccagccattgctctggtggacgagagaatgtccactgaaggaacaggacttccctttggtttgagcaacaacctcctcgggtggatcctgtttggtgtgttcggcctgatctgggctctttacttcatctatactgcctccctggaagaggatgaagagtctgggttgtccctctaaaacccaaaccttatttccttcctttgttcttcattgcaaatatcatgta

SEQ ID NO: 193793 - DNA, 684 bp, Gossypium hirsutum
ccgcaccaaaaaagaaacgcgcatttacgttgagagtagttcagcgaaaatggcaggcgaagcagctgcggcggcgaatttctggggtgatatgccggaggaagactattacaggtcgcagggtgtacgcaacaccaagtcttacttcgacactcccaacggaaagctcttcacccagagcttcttacccttggataaaaaagtgaaggcctccgtctacatgacccacggctatggatccgacactggttggctcttccagaagatctgcatcaacttttccaattggggttatgctgttttcgccgctgatcttctcggccatggcagatccgagggtctccgctgctacttaggtgacatggagaaagttgctgcaacatccttatcattcttcaagcacgtccggaacagcgatgaatacaaaaacttacccgcattcctgtttggggaatccatgggaggagcagcaacaatgctcatgtgcttggaatccgaccctgaaacgtggaccggtctaattatgtcagcgacgctctttgtgatgcctgagaacatgaagacgagtcaggtgcatttgttcgcatacggactgctcttcggattaactgatacatgggcaactatgccggataacaagatggttgggaaagcactcatagaccctgctaagcttaagatcat

SEQ ID NO: 193794 - DNA, 600 bp, Gossypium hirsutum
ctggagcaccttggattgagggaatatttctcagagatcgactccaatcctagctgtgtcgacgaggaagagaaactaaggatcttcccttatcatgatttcaccgagagttcccatggctgcaatctctgccccccaaatatgtgcaaagggagggtgattgaaaggattcaagcttctttagaagggaagaagaaaatcatataccttggagatggcagcggagattactgcccaggcttaaagcttggagaggcagactacatgatgccaaggaagaattatccagtttgggatttaatttgcaggaacccaatgttgatcaaggctgagatctatgaatggaccgatggtgaagagctagagaaggttttgctgcaactaatcaacatgatttctcttgaagaagacgatgccaattcttcccaattcatcttcgttgactgcaaattgcagaccatgtcggcatccaaaagtgccttccctcatgccctcccggttcctcagtagatcggtgccattgctcatatatattagctgagttggtcgaaacggttttcattggtcggctgcttgtttttcttttttctttttaaatat

SEQ ID NO: 193795 - DNA, 1619 bp, Gossypium hirsutum
  unsure (1)..(1619): unsure at all n locations
ctttgagaggcttcactccacagagctctttgctctatccccttccaacgatggaccgcttctctcttctcttcctcctcctttcctccgtcgttgcttcggccgtcgtctccgacgttaatagcgacggcgatcctctcatccgtcaagttgtttccgatggtggtgtcgaggaggactccgatgaccatctccttaacgcggagcaccacttcacgctgttcaaatccaagtatgggaaaacctacgcatcccaggaggagcacgattaccgactgggagtcttcaaggctaacctgcgtcgggccaagcgtcatcagctcctggaccccagtgccgtccatggcgtcacaaagttttccgatttaactccatcggagttccgccgccagtatctaggcttgaaaccgctcaagctcccagccgatgctcaaaaggctcctatccttccgactgacaacttaccggatgactttgactggcgtgaccacggcgccgtcactggcgttaaagaccagggttcctgtggatcgtgttggtcgttcagtgcgacgggggctttggagggagcccattatttggcgacaggagagcttgtaagcttgagtgagcagcaacttgttgattgtgatcacgagtgtgatccacaacaatatggtgcgtgtgactcagggtgtaatggtggtctaatgacctctgctttcgagtacaccctgaaggttggtggacttgagagagagaaggattacccttacactgggaatgaccgtggtccctgcaaatttgacaagaccaaaatcgctgcctctgtttctaacttcagtgtcatttctgttgatgaggatcaaatcgctgctaatttggtgaagcatggtccccttgctgtgggtatcaatgcagttttcatgcagacatatatgggaggggtttcatgtccttatatttgctttagaactttggatcatggagttcttctggtagggtatggagctgctggttactccccaatccgctttaaggacaagcctttctggatcataaagaattcatggggagcaaactggggagaggacggatattacaaaatatgcagaggtcgcaatgtttgtggagtagactccatggtctcaagtgtggcggctttgcatacaaagtctcagtagcattgccctgtaaatgactgatataagtaacggtaatattagtatccgtcagtatgtcttatctctggatttatgccatctgctagaacgggtttattccaatcctggtttatgcagccacctttaaaaggctgcatttagtagctttagaatttgaatctcagcatatgaacctcttttttcttgggcaatgattttcattgtaccaaagaaaaggggtgtatgctagagatgattattacttatttgtgttgtaaccaagtgttgtgatgtatatcagtctacctatatatgaatttggaacttggtatttanaaaaaaaaaannanntnnaagaaaaaaaactcaaaaaaaattttaaaagaaatttaggggttttaaaaaaaaaaaatggttttacaaaacaaaggaacttaaatttttttttgccacaccccctttttttttttataaaaa

SEQ ID NO: 193796 - DNA, 507 bp, Gossypium hirsutum
ctttttattgcttacctttgaagccaaattcaccttcttcttcctcttcaatccccctaacgtccaagttttcatccagtccttttcccccttccatttcacgttttcatccttctcagatccaaaaacccaacccatatatccctttcttttctttataaacaccataggtcccccccccccaaaaaaaaagaaacccataaagttttccccctttttatttggttgttgatgagaagatgtgttgtgggagagtatgcatgctgtgcacttgtttgattctagtcgtggttgcgattgggctgctgttcggctttggggttttcaagaatgggtttcacaagctcaaagatacattccatgaagattattgtgatcctaaattgtcttcttcttgtggaagacctttcttgggttatgcagctcctcctcctttctaatttcattgttgggatatttctctactataattccattcttatttggttgtttatatgattatcttat

SEQ ID NO: 193797 - DNA, 450 bp, Gossypium hirsutum
cccacgcgtccgcccacgcgtccgcttcttcaatttccaatttcgaaaacctcagatttccactatgatttaacacccaattccaaaaacccaacctttcccaaaaaatttccccctttttctgtacatttatacagagtcaacaatacccgtactgatagattcaaaacccaatggcggccgtcagttccctgtctttcccggcaatcggccaaacttccggcgacagaaaacttaatgtcccatcggctcgttacttggcttccaatttcgaaggattccgtttccgtacaagccttttatatcagtccgtaggacttcgagcttccactactgcttctccttccgttttttactgcatgtctactgctactgataccccgactgtttctgaaacgaagtcgagctttttaaaagcgtataagcgttccattcccagtgtgtacaaca

SEQ ID NO: 193798 - DNA, 401 bp, Gossypium hirsutum
aaaaaaactctcttcttcacttttagaaaaaaagaagaagaggcgttcgcctgcgctttagttgatattcagatagaaatcatgccggcgggtggattctcttcgggtacaccggcgggggtggaattcgaagcaaagatcactcctataggcatcatttcctgtgtaatggccgccaccggacgccttatgttccgttacgacgtcggcgtttctggtggcgttacgtccatgcccgacttcttgaaaaaattctttccggttgtttaccggaaaaccagaaaccctggaatcgatggaaattactgcaaatacgacaatcaaggccttcaattgttcacttcatcgctttatttggctggtttaactgccactttcttcgcatcctacaccactaggag

SEQ ID NO: 193799 - DNA, 466 bp, Gossypium hirsutum
ctttaatcatcttattttggtataccctcttctttttttctttttttttctcagttcctcttcttgcaaagatggcagcatcgtcagcatgcttgctaggaaatggtccgtctactcacagaactaaatcgaagttgagtaaagacttttatgggaggaatattgtatttacccccgccatttcatcgttgggtcggaaatcgaatgccgtactcgtaaaggcatctttaaaacttaaacaacatgaaggaagaaggggattcttgaagtcattactcggaactgctggaattggagttccggctttactaggaaatggtaaagcgtatgctgatgaacaaggggtttcttcctcgagaatgtcgtattctaggtttttggagtatttggacaaggacagggttaaaaaagtggatttgtttgaaaatggaacgatagctattgtggaagctgtctctcctgagtt

SEQ ID NO: 193800 - DNA, 590 bp, Gossypium hirsutum
aaatgaactcagccatggtctgtaactgaaaaagaaaaagttcatcactccatcatcgtcctcaaaaaaccaaaacaaaactgaatacacgaatctatgtcaatatccatggccttgttttctcctccttgtcctacctcctctgtcaaccccaatttcacccacaaacccactctttttctccctcttaagaaaccctttctttcgctttccactcctaagtctttaccagacaatggagctggagtttcagcttctgttcctgccgttgaagacccaaaacccagtcagaatgaccccgtcctcgaaaaggccgtggagggatcttctgggcctaacggggcggctaccagcactgaaattgaggttttgagcaagtttgaggatcctaggtggattggaggaacttgggacttgaaacagtttcagaaaaatggcaccactgactgggatgctgttattgatgctgaggtcaggaagagaaaatggctccaggataatccagaaactaccagtaatgacgaccctgtagtgtgtgacactgccatcataccttggtgggcatggatgaagagattccatctaacctg

SEQ ID NO: 193801 - DNA, 660 bp, Gossypium hirsutum
  unsure (1)..(660): unsure at all n locations
cggaaaaccggggccgaccacacgcgtccgcccacgcgtccgattttctctacctttggttgttccttttcttgtctcttctaatcttttatatttccatatatttttttagaaaaaaaattgtaaatccctcttgctgtttttctgccatgggtgttgctgttctaaaaccagaagactgtttaaagctacctaatcccatgaaacaacctcaaaacccttggcataatcctaatcccaacactaaccgcacgaatcgttcacaagggaaccgtaagaagcgttctcccaacacctcccctccttctcgtcccaccgtcggtcgccccaaagctccggccaagaatctcgtcatgggtcaagtcaagatcctcaaacgcggcgaagatcttaaaccatctaagccggataagcatgtgaggttcgcgaaggaaaatgttgatgtagatctggtttccaccgactgtttgggtccacatcccgggtccgtcccgacccagatccgactcaccgagtcagaaaccaacggaagtaaggttctcccggtctcgttctacgctgggtctgcctttataacatcgcccctccagttctgttcgttgcgccgtttcacaagaggacgggttgcttgaagatacgtnctacatgcctgagagattt

SEQ ID NO: 193802 - DNA, 525 bp, Gossypium hirsutum
attggagggccgggcccggcccacgcgtccggatcccttggcggcaataatgtccacggctttggtctccggcttctgcctcacttccaactccacctctccttctaactcactccggcaacccacattgcggcggccgtctatcgtcgccaacctcaactcttccacttctcctcctactctcattcgaaatcaacccgttttcgcagcacctactcctttgctcactccttccaattggaaagaaaacatgggagaccagtcatacgaggaagccattgaagctctcaagaaactgctcaatgagaaaggagaattgaagagtgcagcgacggcaaaggtagagcaagtgacagctgagttgaagactgctgcttcttccgatgagtctgttgaccgcttgaaacaaggcttcatttacttcaagactgaaaaatacgaaaagaatcctgctctgtatggtgagcttgccaagggtcaaagcccaacgtatatgatagtggcatgctcggactcaagggtgtg

SEQ ID NO: 193803 - DNA, 424 bp, Gossypium hirsutum
cccacgcgtccgcccacgcgtccgcccacgcgtccgacggctttggtctccggcgtcgtgcctcacttccaactccacctctccttctaactcactccggcaacccacattgcggcggccgtctatcgtcgccaacctcaactcttccacttctcctcctactctcattcgaaatcaacccgttttcgcagcacctactcctttgctcactccttccaattggaaagaaaacatgggagaccagtcatacgaggaagccattgaagctctcaagaaactgctcaatgagaaaggagaattgaagagtgcagcgacggcaaaggtagagcaagtgacagctgagttgaagactgctgcttcttccgatgagtctgttgaccgcttgaaacaaggcttcatttacttcaagactgaaaaatacgaa

SEQ ID NO: 193804 - DNA, 696 bp, Gossypium hirsutum
cggacgcgtgggcaaatttccaaacactagttttcttttactgcattttgctaagacaagccgagaaacaaagtgaaatattgctgagagtttgtggagatgagtgccttgagtgagggtcttacccaaattgtgatccctttagcttccttggtgggcattggttttgctttgcttcaatggtttttggtctctagggtgaagctattatcacaggattcaagcaatggatataaacaaaaactgattgaatctgatgaagaagaagagggtattaacaatcttgagatttccatcaagtgtactgagattcaacatgccatttctgttggtgcaacctctttcctctttactgaatacaagtatcttggtatcttcatgtgtgtatttggtgctatcatattcctcttccttgggtcagttgagggcttcagcaccaaaagcgaaccatgcacatacagccagggaaacacttgcaaaccagccctggcaaatgccatctttagcacaattgctttcttgctaggggctcttacttcagtcctctcaggttatctagggatgaagattgcaacttatgccaatgccagaacaacattagaagcaaggaaaggtgttggcaaggcatttataacagctttccgctctggagctgtcatgggtttcctgcttgcagccaatggccttttggtgctc

SEQ ID NO: 193805 - DNA, 689 bp, Gossypium hirsutum
tttcacgcgtccgttcgaacttcttctctttcaatcaatttttacaacaaagatggtcccgctcaatacggtccgaccgtcgatttcttgttgttctttttcttccggtttcgatgccggaccgccggtaccggttcccaaagttggtttctttaagttaccaaggtcaaacggcggtaaccatgccaagttgagcttagttcaggcgacggaggaatccaccgttgcgacgacgaatggtcgtgttgctgcagtttccggtgaaaatgcccatcagatggccactaatggaaaggcagggaacatagtatggcacaaaagttcagttgataaagttcatcggcaagagttacttcagcaaaagggttgtatcatatggattacgggtctcagtggttcaggaaagagcacattggcatgcgcgctgtgccatgccttgtattcaaagggaaagttaacttacatccttgatggtgataatgttcggcatggcctaaaccgtgaccttacttttaaagctgaagatcgtgcatagaacattcgaaggattggagaggtggcaaagctctttgttgatgctggcatcatctgcattgtcagtgtgatatttccctaccgaaaagaccggcatgcatgccgcgcgctgttaccagatggagatttcattgaggtgttcatggatgttccaa

SEQ ID NO: 193806 - DNA, 786 bp, Gossypium hirsutum
gcccttaaaaatattagtagaactgatcccaacccatagcagaaagaatcaaagacagctaagagggtttcttccaacaatttcccttccaatgtcaaaagtttgttgtcaactggtatgcttgatggggttgttgtgaagtatgtttcctggtcgcgggagaaaagtcttaaagggtacatacaagggactgggtatatgtgtggctgtaaagactgcaactttaagaaagctttgaatgcatatgagtttgagcaccatgctaattgcaagaccaaacaccccaacaatcatatttactttgagaatggaaagaccatctatgctgttgttcaagagctcaagaacactccacaggagaggctttttgatgtaattcaaaatgtgacagggtctcaaatcaatcagaagaactttcgcatctggaaagcatcatatcaagctgccacccgcgaacttcagcgtatctatggaaaggacaatgctggtgtgtcatcttgagatgaagactgcctttcgacgcttgtgaggcaagtcacatttgggcagagcagtatgcatcttatactaaattatagacacgttttgggaattgaatcaagctcggtaaatggatctgaacagttatcatgggtctcgtgacattttctagctgtgacctctatatttgtgtgcaatcatagaatctagcttttctaaatgtttatgattgaaatctagagtttctgcatattgtccatcatgttgggcaaagcattcattttacaatgtctcttgtcgacttca

SEQ ID NO: 193807 - DNA, 516 bp, Gossypium hirsutum
gttcaataagctgatataccaagacaaaccaagactgaaaacagcattggaagtgctcagaaccagcatgagcattgaaaatggtttgaatgaggtgagactccccttctttgtgttgcatggggaagcagatacagtgacagacccagaagtaagcaaggcactgtacgagaaagcgagaagcactgacaaaaccataaaattatatccggggatgtggcacggcttgacagccggagagcccgatgagaacgtggaaatggtgttcgcggatatcataggttggcttgacaagcgctgcaatgctgtaactttagaccaaagtctggatcctttcgatcaaggtttggaagaatgcagtgataatatagtgatttcgatggcaaaagccactggcggaacacaagcaaacgggagatatttgtgtggtttgaagggaccacgcgcacggcctcactcggcaatgtatgctgatcgtatcaagctaactaaacgttgtctttgaaagggggaatt

SEQ ID NO: 193808 - DNA, 736 bp, Gossypium hirsutum
cctcgtgccggcacgaggaaaatggttcgggccaaacatgtttcaaagggagtttgaaagctgcggatttggataaggacgtctcggcaaaggaaaaattaattttgttatggagagaagcattcatgaagtcatataaggccatggacaaagagttgaggtctcatcctaatttggactgcttctgcagtggtagcactgcagtcactatagtgaaacagggctccaatcttttcatggatacatcggggattctcgagcggtaatgggatcaaaagacaacaacgacttgatggtggcaatccaattgacagtcgatctcaagcctgacttaccaagggaagctgagtggattaaaaggtgcaaaggaagggtatttgcattgcaagatgaacctgaagtatgtacagtatggttgccatttgacgatgcaccagggctagccatggctcgagcgtttggagatttttgtttgaaggaatacggtgtcatctccatgccagaattttcccatcgtttactcacagaaaaagatcaattcattgtcctagcatcagatggggtatgcgatgtattgagcaatgaagaggtagttgtgattgcatcatcggctccgtcccgctcatcagcagccaggatgttgggtctctcggctgcacgagaatggaaactgaagtaccctacttcaaagatggatgattgtgcggttgtttgcttttcttttggatgggaaaat

SEQ ID NO: 193809 - DNA, 896 bp, Gossypium hirsutum
cccacgcgtccgcccacgcgtccgcccacgcgtccgcccacgcgttcgtcatttttctttggaaacaaaaaacaaaaaatagaaaaaataaagagcaagagatatggcaagcacattctcttataattcttttggattccttctcattcttgtcgcctttagttccttgataaatataagttcagctggtaggcaaattgcccctaaaactagcattgagtttatcagaacatcttgtagttcaacgacttaccctaaactttgttacgaatctctcttaacacaggctagcatgatccaaacaagcccccaactcatcgcccatgcagccctaaacgtgaccctttcaaccgccaagtcaacctcggccatgatggtgaagcttgccaaaagccaaggattgaagcctacagaggtgggcgccatgcaagattgcgtggaggaattggaggacacgatagatgagctgagaaagtcaatcagcgagatgggtcagattaaaggctccaattttggactaatgattaacgatatacagacatgggttagcgctgctttgacggatgagaacacctgccccgacgggtttggagggaaaaacatgaacggcagtatagagactgcggtgagatccaagattgtcacaatcgctcatttgacaagtaatgccttggctttggtcaacagctatgcttcatttcatggttagctatttaatcaactgtacagggaaatttagtcattatttacggtagcaattgtatttatggatttttagaaactacttctgctttcctggtaaatgtaaaatatatatgtggtccaaagaagggaatggagatgtgtgtgtgtgtgtgtgtgatcttgggggcttaatgaaaatgaacggagtgatc

SEQ ID NO: 193810 - DNA, 854 bp, Gossypium hirsutum
  unsure (1)..(854): unsure at all n locations
agtttgaacagatatgttatttacattaagaagggtttatataaagagaatgtggagatcaagaagaagaaatggaaccttatgatgattggtgatggaatggatgtcactgtaatatctgggaatcgtagcttcattgatggatggaccacatttcgatctgcaacatttgctgtaagtggaagagggttcatancaagagacataacattcgagaacacagcaggtccccaaaagcaccaagcggtagcgttacggtccgactcggacctctcagttttcttccgatgtgcaatcaagggataccaagactcgctctacacccacacgatgcgtcaattctaccgggaatgtaagatcaccggcactgtagacttcatattcggcgacggcgccgttttgttccaaaattgccaaatcttagccaagcaaggcttaccaaaccagaaaaataccatcaccgcgcaaggtcgcaaagacccgaaccaaccaactggcttctccatccagttctgcaacatctcggccgatacagacttattaccttcagttaactccactcctacatacttgggaagaccatggaaactatattcaaggaccattatcatgcaatcctacattagtgatgccataaggccacaagggtggcttgaatggaaccaagattttgccttggatacattatactatgccgagtacatgaataatgggccaggggctagccttagggagcgagttaagtggcctggttaccatgttttaaataactcagctcaagctgttaattntacagtagctcaattcattgaaagagacttgtggttgccgtcaactggtgttaaatacacttc

SEQ ID NO: 193811 - DNA, 1267 bp, Gossypium hirsutum
tttcctcgcgtcccatctcctgtctctgttttgctcccatttctttcttcaactatcttttctcttcaaagatttcaactcttttctcagaatgggaagtaccgatgggaccagctatggtgcttacacctatgatgccctggagagggagccttactggccatccgagaaacttcgaatttccatcaccggtgctggtggcttcattgcttcgcacatcgctcgacgtctaaagagtgaaggacattacatcattgcttctgattggaagaagaatgagcacatgacagaagatatgttctgtcacgaattccatcttgtcgatcttcgagtgatggaaaattgcttgaaggttaccaatggagtggatcatgttttcaacctcgccgctgatatgggtggcatgggcttcatccagtccaaccactcggtcattatgtacaacaacacaatgatcagtttcaacatgctcgaggctgctcgaatcagtggagttaagaggtttttttacgcctccagtgcttgtatctatcctgaatttaagcaattggaaactaatgtgagcttgaaagaatccgatgcctggcctgctgagccacaagatgcttacggcttggagaagcttgcaacagaggagttgtgcaagcactacaccaaagactttggaattgaatgtcgcattggaaggttccacaacatttacggcccttttggaacttggaaaggtggaagggagaaggctccagctgccttttgcagaaaggctattacttccattgacaagtttgagatgtggggagatggtcttcagactcgatctttcactttcattgatgaatgtgttgaaggtgtacttagattgacaaagtccgatttccgtgagcctgtgaacatcggaagtgatgagatggttagcatgaacgagatggcggagattgtgcttagctttgaagataaaaagcttccgatccaccatatccctggtccagagggtgtccgtggtcgtaattcagacaatacattgatcaaagaaaaacttggttgggcccctacaatgaggttgaaggatgggctgagaattacatatttctggatcaaggaacagattgagaaagagaaggctcaaggcattgatctatctgtttatggatcatctaaggtggtaggaacccaagcaccggtccagctcgggtcacttcgtgctgctgacggcaaagaatgaagtaaacttgctttggaaccaagttttattatgatatagctatgc

SEQ ID NO: 193812 - DNA, 486 bp, Gossypium hirsutum
ccctcgcgtccgcccacgcgtccgcccacttatttcagaatttgcttcctttccttcttccattattttctctcgtcaaagttctcaacttttaactctttttcaggatgggcagtactgatggaaccagctatggtgcttacacctatgatgctctggagagggagccttactggccatctcagaaactccggatttccatcactggtgccggtgggttcattgcttcccacattgctcgacgtctgaagagtgaaggccattacatcattgcttctgactggaagaagaacgagcacatgacagaagatatgttttgtaatgaattccacctcgttgatcttcgagtcatggagaattgcttgaaagtttccaaaggagtggaccatgtcttcaacctcgctgccgatatgggtgggattgggtttcattcagtcaaaccactctgtcattatgtacaacaacactatgatcagtttcaacatg

SEQ ID NO: 193813 - DNA, 768 bp, Gossypium hirsutum
cccatgctatcgcccacgcgtccgcccacgcgtccgcggggctttttaccacgcgttcggtgttgtggggagacggtctttagacccgatctttcaccttcattgatgaatgtgtcgaaggtgtacttagattgacaaagtcagattttcgcgaacctgtgaacattggaagtgatgagatggtcagcatgaatgagatggcagaaattgttcttagctttgaggataaaaatctttcaatccatcatattcctggcccagagggtgtccgtggtcgtaattcagacaatacgttgatcaaagaaaaacttggttgggctcctacaatgaggttgaaggatgggctgagaattacatacttctggatcaaggaacaaattgagaaagagaaggcgcatggcatagacctatctgtctatgggtcatccaaggtcgtgggaactcaagctccagtccagctgggctcacttcgtgcagccgatggcgcagaatgaagaagtaaaggtcttgttgttgctttaaagccaagttttattggcagatggggggaatgcataaaccagtttcaggtttagtatttaattctggcattgtagtgggtgtactgttggttaaaggggattgtattccaagttagctttccatgatatgcaaggcttaaataaatgccattggtgttccgctttatgtaataaattatgaaaaacctatttctactagaataataataaaagtagcacgtttgatgtaaaaaaaaaaaacaagggc

SEQ ID NO: 193814 - DNA, 537 bp, Gossypium hirsutum
cgactactaaaacatacttcgtagaatttgctttgcactttgcaatggcattcgagataacaaatgaaatgctggttggcagtttaatgccagttattgtttattgggtttatggtggactgtatacaattttaggctactcttgtaacaattacaggttgcatcctaaagaagatgaggatgagaagaactttgcctccaaaaagaccgtcatcaaaggcgtccttgggcaacaatttcgtcagttcatcgccactaacctattatatatgataacaagaggaaatgatcccggagcttcttcagggcagtcaacttccttctttgttatagcaagacagtttattgtagcaatgttcgtattcgatacttaccaatattttcttcacagatacctacaccagaacaagttcttgtacaagcacctccattccaagcatcatcgactggtggtttcgtacccatttggtgctatctacaggcatccgatcgagggacttctttttgacatcatatgcggtacaatggctatttaca

SEQ ID NO: 193815 - DNA, 373 bp, Gossypium hirsutum
gtttatttcttaattttcaaattaccgcaatcagggtttgatatttcccttttttgcatggttcacatttttgaagaaaatacttagagagggtaatttagaatttcaatctgaggtaggggtttttaaagcttccaatggcgtttttaggcgacgcgctacggcaagcgtttatgccgaagcacgagtacgagagcctacgggaggaagataaagcttggacgaagctacaaaggccgatcttaatcggttccatagtgatcatttgtgttgcgatcttcgttggcatgattataagcttgaagattgtgtttccgggagatgatttgaagcgaccgttttgcgatgaccggagactgcagcctttgccgtt

SEQ ID NO: 193816 - DNA, 359 bp, Gossypium hirsutum
cgttggtggaagcttatcccctattttcccgagaaaaaattgtggtcagtgaaaatgaagtcgctgccattgtcagcaggaacttacatccccaaaatcctcaaccctaaaatcctaaacaagaatgtggaaaacccagtgattagatggtcaaaaacgaagccgaaaatgggttcaatagcaattgttgagcaacaaaatgataaagccatagtgttgttgaagaggagagaagcggttggtcttggtttatatgttgggattgctgatgtcttgttgcagttgctgccacaaccttgtcccagtggtgcagctgttgaagtagccccagcggcttgtgaattgactgttagtccttc

SEQ ID NO: 193817 - DNA, 1155 bp, Gossypium hirsutum
cctctctaagctgccacctcagcttccgacgccaaaagggaaaaaatactgaaggattacaactcgtccttgttgactcggttccccgcctttttttgttgtctcgaatcggtctcgagtttttggaactcagttcgtgcttggatctggtaagacttttaaggtaaatcagaaactgtatcagaatgaaggcacttattcttgttggaggatttggaactcgattgaggccattgactctcagtgttccgaagccacttgtcgaatttgctaataaacccatgatcctgcatcagattgaggctctcaaggctgttggtgtaagtgaagttgtattggctattaactaccaacctgaggtgatgttgaacttcttgaaggaattcgaaactaaacttgggatcacgatcacgtgttctcaagagactgagccgcttggcactgctggtcctcttgctttggctagggacaaactcgttgacgagtccggtgagcccgtttttgtccttaacagtgatgttatcagtgagtatccattcaaagaaatgattgaattccacaaagctcatggtggagaagcttccataatggtaaccaaggtggatgaaccatcgaaatatggtgtggtggtgatggaagaatcaacaggacaagtggacaaattcgtggaaaaacctaaattgttcgttggaaacaaaatcaatgctgggatttatctgctgaacccttctgttcttgatagaatcgaactgagaccaacctcgattgaaaaagaggtcttcccgaagattgcagccgagaagaagctgtatgcaatggtcctaccagggttttggatggacatcggtcaaccaagggactatattaccggactaagactctatctagactcccttcgaaagaaagcttcacctaagttggccagtggtccaaacattgtaggaaacgttttggttcatgagactgccaaaatcggagaaggatgtttgatcggaccagacgtggcaattggtccaggctgcgttgtcgagtccggagtcagactttctcgttgcacggtgatgcgtggagtgcgcatcaagaaacacgcatgcatatccagcagtatcatcggatggcattccaccattggtcaatgggctagagtagaaaaca

SEQ ID NO: 193818 - DNA, 534 bp, Gossypium hirsutum
cggacgcgtccgcccacgcgtccgcggacgcgtggggggtaaatccattcattctttccaggtagtacgtaatattttaacccccaacccccactatctgtccatctttcagtaagagaaaggaaatggagtttagttcagaggctaaccagcgcattgccaggctcgcagcccatctccaacctcagatggaggaaagttctattttgaggcgagctgactgtagagcgaaaggagggtcaccagggttcaaagttgctatcttaggagcagctggaggcattggccagcctcttgcaatgttaatgaagatgaatcctctcgtctcggttcttcatctttacgatgttgtgaactctcctggtgtcacagctgacctcagtcacatggatactggtgctgtggttcgtggtttcctagggcagccgcagcttgagagtgcgttgaccggcatggaccttgtgatcatacctgctggtgttccaaggaagcctggaatgacgagggatgaccttttcaacatcaatgctggaa

SEQ ID NO: 193819 - DNA, 648 bp, Gossypium hirsutum
  unsure (1)..(648): unsure at all n locations
cttcaacacttttttttttctttcacaaaatcgaacagaggttaaagtgacggcgccaattggctgtccgccttgactgagcttccggcatcgtcttggccctcgattttgcactttaaaaccttttttttttaccactaaacgttttttgtttttagaaatggcagtgaaaccatccaaggccgataagaaaatcgcctacgacgcgaaactatgccagcttttagacgagtacacccaaattttaattgccgccgccgacaacgtgggttctaaccagctccagaacattcgtaaaggtctccgaggtgactcagttgttcttatggggaagaatactatgatgaaaaggtcggttaggatgcatgctgagaagaccgggaaccaagcttttcttaaccttatccccttgcttcagggtaatgtgggtttgatctttactaagggtgacttgaaggaagtaagtgaggaagttgccaagtacaaggttggagctcctgctcgtgttggtctagttgcaccaattgatgtggttgttccaccaggcaacactgggcttgacccatcacagacctctttcttccaggtgctgaatattccaaccaagattaacaagggtactgtcnanattatcacccctgtcgagct

SEQ ID NO: 193820 - DNA, 485 bp, Gossypium hirsutum
atcagaggttaaagagacggcgccaatcagctgtccgccttgactgaccgtccggcatcgtcttggccctcgattttgcccttttgtaaaccttttttttcaccaattcccgaaatggcagtgaaaccctccaaggccgataagaaaatcgcgtacgacgcgaaactgtgccagctcttagatgagtacacgcagatcttgatcgccgcagccgacaatgttggctcgaagcagctccagaacattcggaaaggtctccgaggtgactcagttgttttaatgggtaagaacactatgatgaaaaggtctgttaggatgcatgctgagaagactgggaacgaagctttccttaaccttatccctttgcttcagggaaatgtgggtttgatctttacaaagggtgatttgaaggaagtcagtgaggaagttgctaaatacaaggttggagctcctgctcgtgttggtctggttgcgcctattgatgt

SEQ ID NO: 193821 - DNA, 507 bp, Gossypium hirsutum
gctcaggatgaacgctggcggcatgctaaacacatgcaagaagccctgcaaaggcggcaagaaaatggcctacgatgattaacgctgaagaacctgaccttgggacgcgcacatcttatttgcgggggtcgaaataccccgtacgctgcggcgccagaacacttcgcaaaggtcttcgaggtgagctcagattgttctcatgggtaaatacacagtgatgacacggtcggcccctgtgcgcgctgagaaacccggaaacccggctttcctttaaccttatccccttgcttcagggaaatgttggtttgatttttaccaagggtgatttgaaggaagttagtgaggaagttgccaagtacaaggttggagctcctgctcgtgttggtctggttgcacccattgatgtggttgtcccacccggcaacactgggcttgaccctacacaaactttttttttccaggtgcttaatattccaaccaagattaacaagggtactgttgaaatta

SEQ ID NO: 193822 - DNA, 685 bp, Gossypium hirsutum
cccacgcgtccgcgagaaacttcactggaccttaaaaacatctcttatcctcttctgtttggaatatggagggatagatagatagcccaacacactgtaaaagaaaaaagctctcacaggaaacagcgccaatggctacttgtaccaccacaccttcatcatcgttgatgataacatacgccgccgcatccactgtacacgcccaagccctcactccttccgttctatccttcaagtccaacaagcctaccttttctattaacccacttgctctcaagacttctatagacggaaaatccggcatcaaatgggctaatctatacccccagagtgattccaagcaccatgtcatggctgccgtggctgcggaggctgaggtggctgaggctacggacgaaaatgatggagtggcagctgagggtggcaccgctaccgctattgctactgctccacccaagcccaagaaaggaaaggctgcgttgcctcttaagagagacagaacgagatcaaagagattcttggagattcaaaaattaagggaaaccacataggagtatgatctaaagacagcaatatctttgttaaaggaaatgtccagtacaaagtttgtacagacagctgaagcccatttccgccttaacatcgatcccaagtataatgatcaacagctgatagcaactgtgat

SEQ ID NO: 193823 - DNA, 529 bp, Gossypium hirsutum
  unsure (1)..(529): unsure at all n locations
cccacgcgtccgcccacgcgtccggcaaattatcatctctttccttaaacacatcgtctttgttaagctcttcttcatcttctccaaaaacaagggtcaccatggctatgattccagtacgtttcaaattgccttataaagatcaaaattgtgactgcaaatgcattggttggcaatcgcgtcaagctgagattgggaataaaaatggaggttttaatggacatcaatggcgtctttggacattcactagtgttcatccaagacccttctccatgaaagcattgcccaaagaaaattcacacctgatctctttggattcttattttcgaaagcttcaagaagattcaaataagggttcttccatggtgttggttgatagaagtggagaaagtagcataaaggaggggcttgctggaatctctggaagcttatcttggtaaacttgatgaagattcaaattctaaaatccaagagaaaaccccggaagacaaccaaaccgtacttncattttctgtcggcgaagatgcga

SEQ ID NO: 193824 - DNA, 518 bp, Gossypium hirsutum
cccacgcgtccgcccacgcgtccgtcttcttctattgtatgctcagcagtggtgtccgcctctacccccaattaagcttaatatcacccagaaatgtttaataacagaaagtagcagaatgaaaattcaagtacgaaaatggctatgctgggagcaagtccaattaggttctcaagctttccaccgtcttcttcatatctcacttccaccttcaaacccacctcctcttccacactatcattagttgtggtggggaaatcaattatctatcgtcgatgtgtcgcctgctccgctgttcaggaatcttctactcctacagccactgctgaaaccaagggaaccactccaccatcagccggcgttgctggtggtgaggaggaagtgaaggctgccccaaaagcagctgcagcaaagcctaaacctgctgcaaaggctcctgccaaatctttgccggagttgatgtcggaggatgtcatcccttcattgaaaacaatacttgaagctcaagatgatatatc

SEQ ID NO: 193825 - DNA, 389 bp, Gossypium hirsutum
cccacgcgtccgcccacgcgtccgattttcccacgctttctttctcaagtaagctaaaaaccgccacggaaatggagatggagctttctccacctgtttcattcactgctcctattattcttctcacacttgctattgttttcgctggcacctttgcactaagacccaaacccaaatcgagtctcgccaaagagcttccaccagggagcttagggtggccaatcgtcggcgaaactctcgagttcctgtttgggaacccggaaaatttcgtgtttaatcggatgagaaaatatgctcctcgtattttcaaaacaaggattctcggcgaagaaaccgtcgtcatatgtggtccggaaggacacaaatttttgttctcaaacgaacaaaag

SEQ ID NO: 193826 - DNA, 514 bp, Gossypium hirsutum
tgctccccaatggtacgatgctggaaaattcgaatacttcgcatcctcctcccccctaggggtgatcgagttcatattgttccactacgtcgagatcagacggtggcaagacatcaagaacccaggatgtgtgaaccaagatcccatcttcaagcaatacagcctgcccccacacgagtgcggataccctggtggcgattttcaaccccctcaactttgctcctacacttgaggccaaggaaaaggagcttgccaatgggagattggcaatgttggccttcttgggattcataattcaacacaatgtgactgggaaaggaccatttgacaacctgttgcagcacctctctgatccatggcacaacaccatcatcaacacaatcaggggttattaaattcaatttcccagtttttgagtttccttttttgttttttaattcaagatttcaatcgtcttctcattgcaaacaaagtagctccaatttacaagttaaaaaaacaaatttttggtttt

SEQ ID NO: 193827 - DNA, 441 bp, Gossypium hirsutum
aaaaaatagagattaattaatgaattcattagtgagaggtaaactttatgataaagataaagaaacacaggaggaacccatatactacttcagacgaagtatacgctttagggcgacatatatgtatgtctgctcacaaagcacgaagaataattgatcagattcgtggacgttcctacgaagaaacacttatgatactagaactcatgccttatcgagcatgttatcccattttaaaattggtttattctgcagcagcaaatgctcgtcacaataggggtttcaatgaagcgagtttaatcattagtcaagtcgcagtaaatgagggaactactctgaaaagactaaaacctcgagctcgaggacggagttatctgataaaaagacccacttgtcatataactattgcattgaaagatcttgaatttgaaccacttgaca

SEQ ID NO: 193828 - DNA, 415 bp, Gossypium hirsutum
cttttgtttgtggcttcatttctgatttggttggagatatatggagccgatcaagtagcgtaattcaacttgcttcagcttctgaagctacagtgagcagcacgtatgaggtttctgtatggcgttcactttggaatgaccttttttcccaggtttttcgtgctgtcagaagtatattaaatggatttgttgccttcttcgcggcctgcaacagacatcgcctaagcatttataatcacgtacaggatgtcattcaaagacgctttggtggagtcccaagatcacagacctcagatcctagacgaagcaaatcaacctgtggaaatcaatatcaatcagaagtaaggagaagagtccatagtaaaaattgtagtcctgcaacattgtcattttgagtccaaaatattcaagaaag

SEQ ID NO: 193829 - DNA, 856 bp, Gossypium hirsutum
gcgcccacgcgttcgaccacgcgttcggcaaaatccaaaaaggaaaaaaagagaaaaaagaaaaaggaatcctccaaaaatggcgacttcagctactacactcacttcactttccttcttctcttcttcccttttcctctcttctccttcccctaaactctcaacttccctttccttctctttcaaaccttcttcgaacccgtctctttccatttcttcccaactttccaatctccccattttgtccttcaccggcgaaaaaatcggcgaaacttatctcgacctcaaatcagcccctcccgaaaccgctagagccgtcgttcaccgagcaatcatcactgacttacaaaacaagcgtcgtggcacagcttctacactcactcgtggtgaaagtccgtggtggaggaaaaaagccttaccctcaaaagaaaaccggacgtgctcgccgtgggtctacgcgcaccccgctccgtccgggtggtggtgttatcttcggacccaaacccagagactggtcggtttagatcaatataaaagagaaaaggttggcgatttcgacggcgttatccagtgcggctgagaacacgatagttgttgaagattttggggataaatttgagaaaccgaagactaaagagtttattgaggctttgaagagatggggattagacccaaagcagaaatctatgtttttgagatggaagtgccggaaactgtgaataatcgagtcggataatggaacctgaggatggtacgccgagacccttaattggtgaattttgatggtgatatggtgggccttcgaactgggtaattcaatgagatagggagatttaaaggtcctgtgagctataag

SEQ ID NO: 193830 - DNA, 591 bp, Gossypium hirsutum
tcggaaaaaagccttaccctcaaaagaaaaccggacgtgttcgccgtgggtctacgcgcaccccgcgcgtcccggtggtggtgttatcttcggacccaaacccagagactggtcggttaagatcaataaaaaagagaaaaggttggcgatttcgacggcgttatccagtgcggctgagaacacgatagttgttgaagatgttggggataaatttgagaaaccgaggactaaagagtttattgaggctttgaagagatggggattagacccaaagcagaaatctatggttttgatgatggaagtgccggaaactgtgaataaatcgagtcggaatattgggactttgaggatgttaacgccgaggacccttaatttgcttgatatttttgaattgcgataatttggtgttgactccggatattgtggattatcttaatggaagatatggtgaagattatgaaggtgatactgaggatgataatgaagaatatgaagaagaagacgaacaaagcggtcaagatgagaatgttgatgcagctcaatgacctggcttttcccccttcattagcatataagccatacatatatgct

SEQ ID NO: 193831 - DNA, 532 bp, Gossypium hirsutum
acccacgcgtccggagatagcaattgtcctcaaatatctcatacaaggaattaaattgaatcaatggctcaaaccatgttgctcatgtctagccatgcagtgagcttgaagagagatcaccctttactccatttccaagctcaagggctcaagcctaaacctgcctctcatctcttcttcaatccattgtctaacggtgtccatacttcatccaaagctttcaccactttagctatctttaaatcaaagaccaaagcagctcccaagagggttgagccaaagtcaaagccaaaggttgaagatgggatctttggcacctctggagggattggttttaccaagcaaaatgagctctttgtgggacgtgttgccatgcttggttttgctgcatcattgctaggcgaagcaataacagggaaaggaatcctagcacagctgaatttggagacaggaattccaatttatgaagctgaaccccttcttctcttcttcattcttttcaccctcctcggagcaatcggagctttgggcg

SEQ ID NO: 193832 - DNA, 451 bp, Gossypium hirsutum
gttttgaaaccaaatatatacttttctccccatcacaaacatatctcagaaattttaatcaagggctcaaacaatgctggtaatgtcaagtaccagcgtttcaaccagccatgttgtgaacttgaagagagatcaccctttactccattttcaagctcaagggttaaagcctaaaccctcctctcatttcttattcaatccacactctaacactgttgctgcttcatcatctaaagctttcaccacttttgcactcttcaaaccaaagaccaaagcagctcctaagaaggctgcacctaaaccaaagccaaaggttgaagatggaatctttggcacctctggagggattggttttaccaagcaaaatgagctctttgttggacgtgttgccatgattggctttgctgcatccttattaggtgaagcaataacagggaaaggaattctagca

SEQ ID NO: 193833 - DNA, 579 bp, Gossypium hirsutum
tcgaccacgcgtgcgcaactccatttgcaatctaccgttccttattccttctaattccctacacaccccatttcagggcagggcacattgtctctccgccttcattctccgcacggagaacatgttttcactacccataagcatgcaatggcttccgctgcaaaaggcgagccaacgttcgggtgaataactgctcgtgaaatcggaacctcatcgtgggcatttcttgctattatgccagagcacaatctacatctctctttctcaaagacaccatcaaaattgattttaacaatcgatccagttgggtgtctccatttggccatcgttctactcctgaccaaagagtccacaaagcacatccaaacattcgactctgatgctgagagctctccacaaaaacctgggacactctctaaagatatggtccacagacttcatttctgcaccacatcgaggacatcctatgttcaccatcaatcttctttgtcttaaatttgggaaaataggaataaaatctttcgtaattctccatattggaacttttactttagttcgaagctgtaagttccacaactt

SEQ ID NO: 193834 - DNA, 489 bp, Gossypium hirsutum
cttcactgcatcatcgttcttatggagcatctaaagcctatggagccgaccagaatccactcaaatggcgtttctctgtttcaggacatgacctttgctccggatattccaggctacgcgacatcagctgcttacaacatggacccctgccccaataagctgcatttgggtattggcgtttaccgaacagaggacggaaaatgccatacattaaatggtgttaaacaagtggagcacacactagctaatgatctgtcatgctgacaaggagtatcttcctatgacaggaatgccggaatttaataaattaagtgctgacctaatcggtggctctggcagccctgccatcaaggaaagtcgagtggttactggccaatgtgtttctggttgtctatcactgatggttgcagctgacattcttagcaaaacattaccaccgacatgtgcgttaccttcctgagccaacatatggaaatcatgctaatctga

SEQ ID NO: 193835 - DNA, 961 bp, Gossypium hirsutum
  unsure (1)..(961): unsure at all n locations
cgaggatggtgaacctaatacagagatcataagaaagttgttcgagacaatcgatgagaacggtgacggtcgtctttcaccttccgaattgaaagcattgattataggaatcagatttgaagagatagacttcgacatggatgacgctgtgatgaaagtaatggcagattttgatacctccctcgactcttatattcaagaagaagagtttgtaagaggaatcacaaagtggattaatgaagcaaagcaaactgggggtgcttatctcgaacctaacgccggaacgtttaagtttattgaccaatttcaccagcaaaccaagagagaacatgctttgttggggtcagaggaacaaagtgatgaggttgttgaacatgttgaaaacccaaggtggatctccttcaaagcagtactgatgctcctactaggcaccttgattgcagctgcatttgctgatccactcgtagatgctgtcgataacttttcaaccgcaacaagtattccatcgttcttcatctcatttattgcattgccattggctacgaactctagtgaagccgtatcagccattatcttcgctacccgcaaaaagcagagaactgcatcattaacattttgcgagctttacggagcagtaaccatgaataacgttctctgcctgtcggttttcttggcactcgtttacgtccggggattgacatgggacttctcatccgaagtgctggtgattctcattgtttgcatcgtgatgggcgctttcgctagtttccgaactaccttccctctttggacatgttcaatcgcttacatcctttatcctttctcgttggcgctcgtttatgttctcgattatgtcttcggctggtcgtaggttcaatgaatagagatggtagtttaggagggtaaagcccaattgtttgtgagctttcatggtttttcccaatgtatgaactngtcactc

SEQ ID NO: 193836 - DNA, 464 bp, Gossypium hirsutum
attcctctaaaccttcctatattcctattcctattcttatcatcactctctcagtcctttgcttattacaactaatcctttttcttctttatttttcacctttcagttcaaatcatcaaacccagaaagcgtggctacaacaaactgcaaaaaaaggaaacaattagagaaagaagctatggaagttggcttaaagatgacgatgaaaggaggcggaggagatcatgttggaggttgcgacaaagagaagatggggtttgaagagactgagctgaggctagggttgcctggtggtggtggtggtggtggtgactgtgaagttgtgaggaaaagaggcttctctgaaactgttgatttgaagcttaacctttcctccaagcaagacacctatgtgatcgatcccaatgatgagaaagtgaaaggcttgcaccatgagaagaatcttctcctttctgccattgatg

SEQ ID NO: 193837 - DNA, 1440 bp, Gossypium hirsutum
cggggcggaccaacgcgtccggttttctgctctgtttttcagtgacaagtttcaatggcaaaaccagtttccattgaagtgtggaacccaaatgggaaatacagagttattagcaccaaacctatgcctggaactcgatggatcaacctcttaatcgagcaagattgccgtgtcgaaatatgtactgagaagaaaacgattttgtccgttgaggatatcatttctttgattggcaataagtgcgatggggtgattggacagttgactgaagactggggggagactttatttgcagctttaagcagagcaggaggcaaagcatttagtaacatggctgttggttacaacaatgttgatgttaatgctgccaacaagtatggtgttgctgttggtaacactcctggtgtactcacagaaacaacggcagagctagcggcttctctttctttggcagctgctaaaagaattgttgaagcagatgagttcatgagggctggcttatatgatggatggctccctcatctgtttgtgggaaacttgcttaaaggacaaacagttggtgtaattggagctggtcgtattggatctgcatacgccagaatgatggttgaagggttcaaaatgaacttaatttactatgatctttaccaatcaacacggctagagaagtttgtcacagcttatggtgagttcttgaaaagcaatggagagcaacctgttcactggaaaagagcatcaagtatggatgaggtgctccgggaggcagatgtgataagtcttcacccggtcttggataaaaccacctatcatctgatcaacaaagaaagccttgcaacaatgaagaaggaagcaatacttgtaaactgtagcaggggcccggtgattgatgaagtagctcttgttgagcatctgaagcaaaatcctatgttccgagttggtcttgatgtctttgaggatgaacctttcatgaaacctgggcttgctgagatgaagaatgctgtcatcgtaccacacattgcttctgcttccaagtggactcgtgagggaatggcaacgttagctgctctaaacgtcttgggcaagatcaaaggatatccaatttggggtgattcaaatcgcgtcgaaccattcttgaatgagagtgttccacctcctgctgcatgtccaagcatcgttaatgcgaaagcgttaggtttacctgtttcaaagctataagcaccaacggtcggtccgggttgcggtccgagtagtttctcctatgaatgtgaagtttggggttgtactgagtttagtttatgctagactgaaaatggcaattaccatgtatatgttgcatggggaaagtactccttttatttacttacattttgctgtcttgtatgtaatagagaacagctttataatttcatcaaaaaaaaaagaatagtatatgtacattta

SEQ ID NO: 193838 - DNA, 897 bp, Gossypium hirsutum
  unsure (1)..(897): unsure at all n locations
accaaagctccctgtaagaattgcttgaaagatgctggcatttccacaaatgatgttgatgaggttcttcttgttggagggatgacacgtgtacctaaagtgcaagaagtagtttcagggatctttgggaagagtccaagcaaaggagtcaatcctgacgaggctgttgctatgggggcagcaattcagggtggtatacttcgtggggatgttaaagagttgcttctgctcgatgtaactcctttgtcacttggtattgagacactaggtggaatattcactaggctaatcaaccggaacacaaccattccaacaaagaaaagtcaggtgttctctactgcagctgataaccagactcaagtaggtatcaaggtgcttcaaggtgagcgtgaaatggctgctgacaacaagcttttgggtgagttcgacttggtaggcattccccctgctcctagaggtatgcctcagattgaggttacatttgacattgatgccaatggtattgtcactgtttcggccaaggataaggccaccggtaaagaacagcaaattacgatacgttcctctggtggtctctcggaggatgagattgagaagatggtcaaagaagctgatttgcatgcgcagaaggaccaacataggataagtctgattgatgtataaaaccatgcggacaccactatttatagtgtagaggagagcttggatgagtacatggacaagtttcctagtgaaattgcaaaagaaatcgacggtgctgttccgtttttgaggggccacgcatgatagatgtaactagatcaagccaagatgatgcccgattaactgtttcaagatgggagcaattttgtngtctgtgttcccaggagtctctgaagtctcagtgtaccgcccaag

SEQ ID NO: 193839 - DNA, 679 bp, Gossypium hirsutum
ctcccccacacattcaaaatcctattccttttctcctttttctttttctcagacaagatgggttctcagggatcggttatggcgatgcttttgctgatgatgttcactttatcatcagcttccgacatgtccattatatcctacgatgaaacacatcccgacaagtcaacgtctagttggagaacagacgacgaagttatggccatgtacgaggagtggcttgtaaagcatggaaaaacatacaacggtttgggtgagaaagagaggaggctccagatttttaaggataaccttaggttcatcgatgaacataacgccgatgagagtcagagttttaatgttggtttgaaccgctttgctgatcttaccaacgaggagtaccgagccatctacctgggaatcaagaaacccaaccggaaagtttccaaggccagtgaccgatactccgcgcttctcggcgaaaagttgcccgattccgttgattggagggaaaaaggggctgtcgctggagtcaaagatcaaggaagttgcgggaggtgctgggctttctcgactattgctgctgtggaagggataaaccagattgttacaggcgaactcctttcactatctcagcaggagttggtggattgtgatacatcttacaatgaaggttgcaatgggggtctcatggattatg

SEQ ID NO: 193840 - DNA, 682 bp, Gossypium hirsutum
cctgctttgagctgggagaagtgtgtagggaggttgatcttcctgctggtgtcctcaacattctgcccggactaggccctgaagctggtgcatctttggcatctcatccacatgttgacaagatttcatttactggaagcacagtcacagcggttaagataatgacagctgctgctcaaagggtcaagcctgttaccttggagcttggtggcaaaggtccaatagttgtgtttgaggatgttgacattgataaggctgttgagtggaccatattcggttgcttttatacaaatggccagatctgcagtgcaacatcacgccttattgtgcatgaaagtattgcggcagaatttttggacaggcttgtgaaatggagtgagaacattaaaatttcagatcccttggaagaaggttgcaagcttggccccattgttagtagagggcagtatgagaaagtaatgaatttcatttcgaatgctaagagtgagggagcaactattttgtatggtgggaatcgtcctaagcatttaaagaaaggattctttgttgaaccaaccatcatcactgacgtaacaacctccatgcaaatatggagagaaaaaagtttttggacctgttctttgtgtcaaaacatttaccaccaaaaaaaaaagccattggaatggcaaaatgatacccatta

SEQ ID NO: 193841 - DNA, 628 bp, Gossypium hirsutum
cttctgactcaagagtcactgaacgagtcgagttcgaactcagattacccaaaatggcattcacattgaggagtgtgaaagtaccgcccaactcaacgagtttggaagaagcaaggagccgggtcttcgatttcttcagaaaagcttgtcgatcaatccccactattatggatatctataacctagacgacgtcgtcaccaaatccgagctccgttcttccatctcctccgagatccgtaagaactctcatgttactaaccctaaggtaattgatttgctgctgtttaagggtatggaagagctgaacaacattgttgaacatgcaaagcaacggcaccacattatcgggcagtatgtgctgggtcgtcaagggcttgcacaggatttggacaccaaggatgaaggcacgtctgagttcctcaagaatttctataaaagcaactacttttaaacattccgctttcatggacagcttctagagatttgctttcgaccttttgacttccttcataataaatgttcctatccgggcctattggttctgtaattccatcgaatttttctcgtgttggttttcagtaatttggtgaaatgcataagtgaatcttgtgaaaaaaaaaaaaacaa

SEQ ID NO: 193842 - DNA, 773 bp, Gossypium hirsutum
  unsure (1)..(773): unsure at all n locations
aaatctcgttatcaaatcttaatactttcttttcggttttttaattgttaccgctgaagtgaaagattggaattgggaggaaaatccaagattttgaggttttgagacggataagagtttggttcctggttaaaaaatagaggcctggaaataagaggagagaattttggggatttaagatcttggattctctccatagatagaaaaaatgttgaaactttgtttaatggcttctcatgggtacactcccagcccgggacttgtttttcaccgggaaaaaggtgttagcaggatgatcaaggaatgtcaaaccttgttgccaagtaaagcaataaaaaatgacatggtacaaacgggtccctttgatctgaagtgcaatggaatcaaagagcagccaaaaccagttacccttctttgtgagcctaaactgattgtagattgtcgatccaaaagcacaaaagcctatggctattgataaaccagacacagctctctttggctctgggatactgaanaagtgcacaagacatgaaaaacttntaaagtntcttgtgtnttggataaanggatgtggataaaggggaacttgatntatcattgctatcagatntgatgaacgnntgtgtttnggtgtgcatcagcagccttatgcttctctaattatccaagtgntgagtttgatgaccagagccgcttcagacattgtagaaagatgtacaagattcaaacttattgtaaatcagatgtctagttgaattacagtagtggaacag

SEQ ID NO: 193843 - DNA, 645 bp, Gossypium hirsutum
atccgttaaaagatcccttccatttccctctcctccaatcactcttgcactaaaaacgatggtggtcgcaatcccgggctccgctaatctcaccgcctcaaaaccctctctaggactgggaggtaccaccacacgcctctctctctcccgcccgatcccaaacctccacgtcaccaaaaaacctaactcctccattgtcgcttccatttccgcttcctcttctccatccaccggtcaaaccaattggtctctcgattcctggaagtcgaagcctgcccaacaactccctgaatatccggatgccgatgagctcgattcggtactcaaaacgatcgggtccttcccgccaattgtgtttgctggggaggcaagaagactggaggaaaagctagccagcgccgccgtcgggaaagcgtttctgttacagggtggtgactgtgcagagagtttcaaagaattcaatgggaccaacattagagacactttcagagtccttttgcagatgggaattgtcctcacttttggtgcccatatgcctgtcatcacttgtgggaggatggcatggcaatttgcaaagccaaggtcagatccatttgagataaaagatggcgtaaagttaccgagttatcgaggagattacataaa

SEQ ID NO: 193844 - DNA, 380 bp, Gossypium hirsutum
gcgttgagattgacgatgtgaaagcatggacttcagttttaatatctgtcacttcctatgcattggggatcttcatgattgcaaaagccccatggtatctacttcctttagcttgggcatggacaggaacagcaataactgggttctttgttataggccacgattgtgctcacaaatcattttcaaaaaacaaattattggaagacattgtgggaactctggcctttctaccactaatatacccatatgagccatggcggtttaagcatgacaggcaccatgcaaagacaaacatgttatcagaagatacagcttggcaccctgtttgggaaaaagagtttgagacttctccttttctacgcatagcaatcatgttcggt

SEQ ID NO: 193845 - DNA, 376 bp, Gossypium hirsutum
cggacgcgtgggcggacgcgtgggcttcctctttccattttcaatctcttctttcacatctgggcgaaagatatggaccccgggctattcacttccgaatctgtcaatgagggccacccccacaagatttgcgaccaggcttcacatgctattcttgatgcatgcctagaacaagatccacatagcaaagtagcttgtgaaacttgtaccaagacaaacatggttatggtctttggcgagatcacaaccaacgctaaagttgactatgagaaaatcgttcgtgatacttgcagaggtatatgggtttacatcagctgatgttggccttgatgctgacaactgcaaaggtctagttaacattgagcaacagagccct

SEQ ID NO: 193846 - DNA, 635 bp, Gossypium hirsutum
ctaatttctggagttttagccccgattagaaagggtccagaaaaactttctagttatgaatcgggtatagaaccaatgggcgatgcttggttacaatttcgaatccgttattatatgtttgctctagtttttgttgtttttgatgttgaaacggtttttctttatccatgggcaatgagtttcgatgtattgggggtacccgtattcatagaacctttcattttcgtgcttatcctaattgttggtttagtttatgcatggcgaaaaggagcattggaatggtcttagttcctgaatattcagataataaaaagaaagaaaaaagtcaaaataataataacattgagtatgaattccatcgaatttcccttacttgatcgaacaacccaaaattcagttatttcaactacattaaatgatctttcaaattggtcaagactctccagtttatggccgcttctttatggtaccagttgttgctttattgaatttgcttcattaataggctcacgcttcgactttgatcgttatgggctggtaccaagatcgagtcctagacaggcagacctaattttaacagctggaacagtaacaatgaaaatggcgccctctttagtgagattatatgaacaaat

SEQ ID NO: 193847 - DNA, 564 bp, Gossypium hirsutum
  unsure (1)..(564): unsure at all n locations
cttatggtcgagcaggtagtataagtgagggtttgcgcagtatcatgcagtctantcctggagaagttggcgttaatcgcgccttagtgaaccgagatagcttccagcgctacaatatggatggaattgctgagatattattagcacttcagaggatcgaacaagatgaagagttgacatatgagcaattacttgttctagagaccagcttgttccttaatggcctagacttttatgaccagcatagagacatgagactggatatagataatatgtcatatgaggaattactagccctagaagagaggatgggtaatgtgagcactgggctatcggaagaagcattgtcgaaatgcctcaaaaaaagcatctatgacacagcatcttcggagtttgcaaatgtgagctttgagggcgaaaaggatgatgtaaaatgcagcatatgtcaggtactttttctatatgactttccactaccatgctttttcatttcttctactcatctatgtatggaaagggatgattttgcacatttgcaggaagagtacgtgaatggagatgaaa

SEQ ID NO: 193848 - DNA, 893 bp, Gossypium hirsutum
ggaatttgccaggatggcttttcctctattgtactaaagagaccgcttcttttgcgcttaacaaacttcattcattcattcaatcacctactctttctttttattttttttctctcaaagaagcaagcaaaaattttagggagcacaactccccccccccaagtttcgctgttcagtgacaatggcgattgtgaagatggtgatggctgtggttatcatggcagcgtccctcggagggaaattgggtgcagcacaagtgcaccatgtggtcggaggtgaccgtgggtgggacgtttcctctgacgtggcatcttggtcctccggtaggagcttcagggttggagacaaaatttggtttgcctacgccgcagcacaggagagcattgctgaggtgaatagcccggaagaatatgagtcgtgcgatgtgagcaaccccataagaatgtacacggacggcatagatggcatcccactggatggggaagggatccgttatttcgtaagcggcaaggaagagagctgcaagaacggtctaaagctacacgtggaggtgatgccttttgggaaccccgagcccgaaaggcccagagttgcagtggctgctgcggcgcccaccactccttctggatcagcccggctttacggaagctccgtgctattattggctgggttatggctttgccatatggctatttaattgtaccagttatgtagttatgacctctctgcactctttttcctctttagacttttaaagcctagtgttcttaccttctgctttatattgttgtatgagaatctactttaaatttcaaattatgtgtatcacttgatatcttcaagaattgaacttgaaggaccataatattaaattatgaaaaagttgcttcccc

SEQ ID NO: 193849 - DNA, 670 bp, Gossypium hirsutum
ggaacgtcacagttactggtgtggaaatgtttcaaaagacattagatgacgccatggctggtgataatgttgggttgttacttagaggtgttcaaaaggccgatattcagagagggatggttttggctaatccagggacaatcactccccataccaagttcagcgccgttgtctatgtgttgaagaaggaagagggtggcagacattctcccttcttcgcaggttataggcctcagttctacatgaggaccactgatgtcactggaagggtggcttccattatgaatgataaggatgaggagtctaagatggttatgcctggtgaccgtgtaaagatggtagttgagcttatcatgcctgtggcttgtgagcaagggatgcggtttgctatcagagaaggagggaagacggttggagccggcgttattcagtctattattgagtgatcttaggatactttggcgttgcaggatatggtatttgctgttgcagtgatgtcaaagaaccttcatatgccaaatgtcaaggtcatgcaattagtttcgtcaccatttatagatcctctttcattccaatgtcatatatttggaggtttgtatttcttttgcttcagactcatgtctaatctagttggattggtaatattcatgtcacaattcgatatgaattt

SEQ ID NO: 193850 - DNA, 538 bp, Gossypium hirsutum
cccacgcgtccggcggccctttttttcctctaccaggtgattttagctttgtgttagttcctttaagcaattcgccaagatgcagaacgaagagggtcaaaacatggatctttacatccccaggaagtgttccgccactaacaggctcatcacctctaaggatcatgcttccgtccaaatcaacgtgggacacttggatgagcttggcagatacactggcacattctccacttttgctctttgtggatttgtccgtgcccagggtgatgctgacagtgctcttgacaggctttggcagaagaagaaagctgaagtccgacagcagtagttggatacctttttaccctagtctatctccgagcttgggaaagaaaaatctcatggcagcgactattatgttctaggttttttcaggttaaactatgtcaaatttatatttttgttgattggatgacatttcagacttggttttcttatatttgaacctaatatatatgccttcggtcatgttaatcgacaaaaaagaaaaaacaaatga

SEQ ID NO: 193851 - DNA, 512 bp, Gossypium hirsutum
tcccacgcgtcccagcagcctctctttctcatcttgtgatttgagcttcgtgtttgtgttgggttaagcaattcgccaagatgcagaacgaagagggtcaaaacatggatctttacatccccagaaaatgttcggccactaataggctgatcacctcgaaggatcatgcttctgttcagattaatgttgggcatttggatgagcttggcagatacactggaactttctccacttttgctctttgtggttttgtccgtgcccagggtgatgctgacagtgcacttgacaggctttggcagaagaagaaagctgaagtccgacagcagtagtgggagttggattgctttttactacttgcttggtctctgaattttggagggaaaatgtgttttttttttaaatcagtgacctttaagttctatcttggtttttttaaaatggattatgttgaatttgatctgatgatgtttcgtacctaatttgctcgcattgaacctaatatattatctttt

SEQ ID NO: 193852 - DNA, 400 bp, Gossypium hirsutum
cggacgcgtccgcccacgcgtccgaaaaaaaaaaaggaaagaacctagggcgctctctcaattctgcgccgaccaacagcctttcaaaggtctgttcctctgcccatccttttgactcatgtgagagtcaatcaaggcctccttgagtcgaagggctcatgagcttcgtttgtagccccgaatcgccacttagcttcaatcatggtgaaacaagcgtggattcaagggcctcaaatgcaggtgagcgtcgctttccatttttatttacattcaatcaagaaaaggggcagatgggaagataagagagaaataagggacgaagattgcgagtaaatcaccttctttttcgttttctattgcttctgtttgcgtaaatgcgcgtaacccgttacaagcaatt

SEQ ID NO: 193853 - DNA, 815 bp, Gossypium hirsutum
cggacgcgtgggcaaacccccatctacaattatctattcttcttttgcttttttgttcgttttttttttctctcagatcataaattattttttgtttagagaagtaaaaggttgatccaatgagttccagtacgccatcatctagcgctggaggtgttggatccgctgattctgctgctcctagaagaaattccaagcgacccggatacgctaagttcactcagcacgagcttccagcttgcaagccaatcctcacgccacgatgggtcatatcagcctttatgcttgttagcattgtcttcattcctattggagtggtctctctgtttgcttctcgagatgtcgtcgaaatcattgatcggtatgaaactgcatgtgtaccggacggctacaaaaatgataaggtcacattcatacaaagtaatttgaccaaacaatgcaacagaacattgacagttaagaagcgaatgaagaagcctatctatgtctactaccaactggacaatttctaccagaatcatcggaggtatgtgaagagccgaagtgactcacagttgaaagaaaatagcagttgggatgatgttagttcttgtaagcctgaagatatgtctaaggaccagccaattgttccctgtggtcttatagcttggagtttatttaatgatacctatagtttctccctcaacgatcagcaattggcggtgaacaagaagggcatctcctggaaaagtgatagggacagtaaattcgggaaagatgtatttccccaaaattttcagaatgggagtcttaaaagtggtgcaacgcttaatcta

SEQ ID NO: 193854 - DNA, 805 bp, Gossypium hirsutum
cttccacttcactctgggtcacttagtttctttgttttttgctcttggagtgaggaaatccataggaaacaagtacgtttcgtctctttttaattttcataatggctgggactggagtgttttcagacatattggatggagatgtttacaagtactatgctgatggtgaatggaagaagtcttcttctggaaaaactgttgcaattatcaaccccaccaccagaaaaactcagtataaggttcaagcttgtacacaagaagaggtgaacaaggttatggaatcagcaaaaactgcacaaaaatcatgggctaagactccactttggaagagagctgagctccttcataaagctgctgctatcctaaaggagcataaagcaccaattgctgaatgcctggttaaagaaattgcaaaaccagccaaagatgccattaccgaggttgtgaggtccggggatcttatttcttacactgctgaagaaggggtggggattcttggtgaagggaaattcttggtatctgatagttttcctggaaatcagagaaccaaatattgcctcacgtccaagattccgcttggagtgattctggccattccaccattcaattatccagttaacctggctgtttcaaaaatcgcaccggctttaattgctggaaacttccttgtactcaagccaccgacacagggtgctgtttctgctcttcatatggtacactgctttcatttggctggttttcccaaaaggctaattagctgtgtgacagggaaaggctccgagatcggggactttctcaccatgca

SEQ ID NO: 193855 - DNA, 421 bp, Gossypium hirsutum
tcgtccacgcgttcgtccacgcgttcgtccacgcgttcgcattattgtaacaaaagctagagccttgaaggtgacggaagaggttgaaaggctagtgtccgtgagccggccggtgaggatgcattggaccggttgccccaacacgtgtggtcaagtccaagtggcggatataggtttcatggggtgcatggcaagggatgagaatgggaaaccatgtgaaggggcagacatattcttgggagggagaattgggagtgactcgcatttaggagagctttataagaagggtgtcccttgtaagaacttggtaccctgtagttgctgacattttggtggaacactttggagctgtccctaggcaaagggaagaagcggaagattgattcaaaatcaacttcatttgattacattacttctatat

SEQ ID NO: 193856 - DNA, 509 bp, Gossypium hirsutum
cggcgagacgagccgtttatcattacgataggtgtcaagtggaagtgcagtgatgtatgcggctgaggcagcctaacagaccggtaattgacttgaaccaattctgattctctcttgcatactatcaaatggcagctactgcagcaatcaccactctcccccagttcagtgggttaagacccaaagtttctactgctccagttaggagcctggcagcagttcaaccaatgaggcgcaaggggaagggtgctctcggtgctcgatgtgatttcatcggatcccccacaaatttgataatggtgactacaacaaccctgatgctgtttgctgggaggtttgggttggctccatcagcaaacagaaaggccaccgctggattgaagcttgaagtaagggactcaggcttgcagactggtgaccctgctggttttacacttgctgacactttggcttgtggtgttgttggccatatttttggtgttgggatcgttcttggtctcaagaacatt

SEQ ID NO: 193857 - DNA, 696 bp, Gossypium hirsutum
tcgtccacgcgttcgtccacgcgttcgaagagacaccatctacgatgtcccgggggggcggcgctggtgccgcagtatgaggcatggagtttgatctgtcggaagagatgctggcggtgataccgacggatccttacgagcaattggatctggcacgtaagataacgtcgatggctatcgcctcgagagtatcgaagatggaaacggagattgggaggatgagagcaaagattttcgaaaaggatcgtatgatttacgaattggaagagaaagtatcaagattgcagcaagcgaatcatgaggccgaatctcgattaaagcttgtttttgacgaaaatatgaagcttgcaaaggagcgtgattcattggcaatgaccgcaaagaaacttagccgtgatttatctaagttggagacttttaagcggcaattgatgcaatcgctgagtgatgataattcatctcaggctgaaactgttgatattgggacctgtgaccagtcagtccctaaagcctatccggacaaggatgatggggcgagtgactacatgtcgcttcgttcttccaatggttcgacggacttgggaagcacaactgatgaagcttcaagatatgctggacaaagattttctataactccatatatcacaccgcggctgacacctactggaactccaaaagttatatccacaaatgggt

SEQ ID NO: 193858 - DNA, 449 bp, Gossypium hirsutum
cccacgcgtccgattttagatagttcttgagctttcttccatatttcccgaaagcaaggaacatatatttctttcctttgttttccaatcttgtttctttttgtactttgttcggtttgttttggttttgtttcagagagaaatggctgggattgttgtgatttttgatttcgacaaaactattattgactgtgacagtgataactgggttcttgatgaattgggtttcaccgatttgttcaaccagcttcttcctaccatgccttggaatcctctcatggacaagatgatgaaggagcttcatgctcaaggaaaaaccattgatgacattgttgaggttctgaaacgagctcctatccatcctaggatagtccctgccattaaagcagctcatgctttagggtgtgaactcagggtggttagtgatgcaaacatgttcttcattgaaa

SEQ ID NO: 193859 - DNA, 476 bp, Gossypium hirsutum
  unsure (1)..(476): unsure at all n locations
cccacgcgtccggagcagcaaagtatgaatgaatgtgattatctactgtacaaatatacatagtaaaggctagagtatgaatcgaattgctatgagcagcacatttagggataaaatgtcacactaaattgctatgagcagtaaagaaaatttttttaattgcagaaaaccaacttcccttctttcccatactgccagaaaattgagggaccgcacgacacttaatttcttgtggttgatttcgataggtggtggactggtgaggaatctgtgaatgttctcttagaatccgcaggtcaagcatgacactgatggttttgataaacaaggaatgaggcttctgcttgcgacacttaacaggatatttgattcattgcagacaacttatgaaggatttcagacttcaacggtaaaggcaatatatatnattgatttatctgcacaagtttcctttctgtcgaaaatgcatacttaca

SEQ ID NO: 193860 - DNA, 744 bp, Gossypium hirsutum
  unsure (1)..(744): unsure at all n locations
cggacgcgtgggcttttctctggccgcaaacaagcctctggcttcaagttccctatacatctggaaattgaataagattaggtggggtgtaaacgaagcaatgaatcgcggtcaatacccacaattcatgatgctgctcagtattctaatactggtcctactgtcttagtttgcgtcttgtcttttgaactggatttgccgacttgaactgcgttgttgatggtttccaaaacccgagcctgcaaatccagtcaaaagttaaaaccgggctgagatttacgagtctgatatatattgggaggtattatgtgttaaaactaattcaggtgagcttcttctttttctggtatatgtatatgtatatgtataatgagtgtgnnnggtgtgtgaaaatctttgctatagtggatatttgtacagcctttattgaagttgaacattatactgcaaacaggacttgtaataattaatgagcttgcaagatgtgagcatgatagcgtatttgaagagtttagctagagttctttcctagtgctatatataatctgaatatttattantagtgctntttatatantaatagttnggattttttgtgcaaacatataaccagacctaaatgaatttaaccaaanatctannatttgatatcatatctactcctacatggagtnttggaattgatcaaatctatttggctggtcgaaaacaacaaccatggcacctttcatattatggatcccn

SEQ ID NO: 193861 - DNA, 846 bp, Gossypium hirsutum
gaggtttgagaatgtacattgcagcaaccataaagagatatcgtgcagttaaggagagttgggaagattaaaatgagcattggtgttattgcatactatcaattagttcaagtttgtcaggccgagtatttccgtcagttgctaaaaccagttacgtagtctagtagttagcaactcttggaaattgggatctgggggagtcttccatttggttgttttatacatagggctttcaaagaatgagggatctgatattgttgatgggaaattggggatagacagctcttgtcttgttttgatggcaatccactagttttagtctgtagtctttccgtaattatagctataaacctccttccaacttaaaaataaataattttaagttcaaagccaagttttaaacttctcgttaagtagaaaatcagatgcagagtgaccaacaattttacccccaaaaagcagtgcccatacttgcagatcaagtgggcaataattacatgcatataccagttgcatctgcttttggaccagtttttcctccatgtgcaaaacccttgccgcccctccatggcattgagtttcaaccctctgaggtttgtcccaagaactttgttattttcaatcagactgataataggaaccaagtcttgttcaacccggctatcacaaacaagtttcatggtaatggattaaatgtttttgcaaattacaatgatggaaaatatgagaggaaagatgtttatgatgtgggagaagaaacatcctcttttctgaaagaggattcggatgatattgatgcactcctcagctcggaagaggaagaacaagttgagtacgatgaggaag

SEQ ID NO: 193862 - DNA, 1678 bp, Gossypium hirsutum
ggctctctactctacaattctgcttcctatcagtcagaacctgagatagtgaggtagctaaacaatggcagtttgcccagtatacaccacccaatctctcaactcaacatgttcaatctccacaccatcaaaaacccacttcagttctcaccacaaccacctagttttctacagaactagcaagagaactagcaagagaggtggcagcagctcatgtgtgataacctgctcagctggtgactcacaaacagttgtgattggtttagctgctgactcaggatgtgggaagagtaccttcatgaggaggctaacaagtgtgttcggtggtgcagctgagccaccaaagggaggcaaccctgattccaacacactgatcagcgatatgaccactgtgatatgtttagatgattatcattcacttgacagaactggaaggaaagagaagggagtgacagcacttgacccaagagccaacgactttgacctcatgtatgaacaagttaaggctctcaagagcggtattgctgtcgacaagcctatctacaaccatgttactggtctcttggatcctcctgagctaattaagcctccaaagatccttgtcatcgaaggactgcaccccatgtttgatgaacgtgtgagggatctgttagacttcagtatctatttggatatcagcaatgaggtcaaatttgcatggaaaattcagagggacatggctgagagagggcacagccttgaaagcattaaagctagtattgaagccaggaagcccgatttcgatgcctttatcgatccccaaaagcaatatgctgatgcagtgatcgaagtgctgccaactcagctcatcccagacgacaatgaggggaaggttttgagagtgaggttgataatgaaagaaggggtggagcatttcagtcctgtttacctgtttgatgaaggctcaaccatctcatggataccatgtggaaggaagctcacttgctcttaccctggcatcaaattccactatggccctgacacttactttggcaacgaggtttctattctggagatggacggccaatttgatagattagatgaacttatttatgttgaaagccatttgagcaacatctccaccaagttctatggagaagtcacccagcaaatgttgaagcatgcggatttccctggaagtaacaacggaactggcctcttccaaaccattgtcgggttgaagataagagatctctatgagcaaattacttccagcaaaactgcatcttcactagaagcaacaaaagcctaagactattccggtttcttcatacattggactagaccttgggtccataacaaattatcctctttccagctttcctctatcaaaggtttatttgagtgtttggctgttgttgctttcataagaatcgagtatgatcctatgcaatttattttatgttcgtaattcagtggagatatgtaatatagagaaacaaaatcagagttcaatttcaactttgagaagttcatataagacaaagcctttctacatcatctctccacttctatttccccatattgctgcttcttggtgtaagttggaaccatttatgatgtcatgatctttggtttttttactccaaataaagaggattggctatggaagcgtggccataatggggacgtttccttg

SEQ ID NO: 193863 - DNA, 508 bp, Gossypium hirsutum
aaaaagctctctaaattccctttcccgagctgaaagataaacaaggtgagcctaaaagagctgaagcaatggcagtttgctcagcatacaccacccagtccctccattcaacgtgttcaatctccacaccagcgaaaacccatttaggttttcaccaaaaggaagtagttttctataggagaagcagcaagagaggtggcagcggcagcggcagcagcagcggcccatgcgtgataacatgctcggccggtgattcacaaactgttgtgattggtttggccgcagactcaggatgtgggaagagtaccttcatgaggaggctaacaagtgtgtttggtggtgcagccgagccaccgaagggaggcaatcctgattcaaacacactcattagcgatatgaccactgtgatatgcttagatgattaccattcactcgacagaactggaaggaaagagaaaggggtgacagcacttgacccaagagctaacgactattacctcatgtatga

SEQ ID NO: 193864 - DNA, 378 bp, Gossypium hirsutum
ctctctttgagctttcttcttcggtttatctctgaagtcttatcatttcaatcactgtgctatgcacacacacacacatactttgaagaaaaaaaaaacctttaaagctctctttgaaactcaagcatcactgtataatctgatcatctcttcaaatatgccacgcccttttttccataagcttattctctcctctactctccaagataagaaactgaggatccctgataactttgttaagaaattcaaggatgaactttctgttgcagctgctctcactgtccctgatggtcatgtttggcgtgtagggattaggaaagtcaatacaatcatgggaaatcgtatccgttcgatgaactcgaagaccaagaatgcatg

SEQ ID NO: 193865 - DNA, 491 bp, Gossypium hirsutum
gtgaagatggggaaacctattattaaggggaaggcatgtgtttgagaaatggggatgatggcaagtgtttcttcaatggaattttggtgcatccttaacctcagagccactcttattactcttcttcttattctcttttttcatctttccaagaaactttactctaaattctttcctcctccttccgttcttcatcttccttctccttcttcatccacttcccttcctgaatctcaatcaagaatcccagagattgtatctgattcagacttgaagtttttgattgataatctggatgagaagctcgatgaggacgagaaatgggagactgtaattgataagaaaaccaactctttatcctacaaggcaaaatgctgcagacctaagaataaaccactaaaatacctgagcacgactgtatttgagggttgctctccggagcttctgagggacttctatatggacaataattatagaaagcagtgggataa

SEQ ID NO: 193866 - DNA, 968 bp, Gossypium hirsutum
  unsure (1)..(968): unsure at all n locations
atccctctctctctctacctcgtccgtacgggatctctagggtttcaaccttcgacttcgattgaatcgctagggttttgattatatcctctctcctttgatcgtacattaaattgaatcaagaaattcggaaaaaaatatggtactttctcagaggattcatgaggcattcaaaggaactgtggaaagaataacagggcctcgaacagtctctgcttttaaagagaaaggagttttaagcgtctccgagttcatcctggctggtgataatcttgtatccaaatgccctacctggtcttgggaatctggagagccaagcaagaggaagtcctatttaccgcccgaaaagcaatacttgattactagaaatgtgccctgcctaaggagggctgcgtcagtggaagaagaatatgaagctgcaggaggagaggttcttcttgataatgaagacaatgatggttggttggcaactcatggtaaacccaaagataaaagtgatgtggaggaaaacctgccttcaatggagactctagaaataaggcagaatgctgtaagatcaataccttcttattttggggttggtgaagacgaaaaagatatacccgacatggctgattatgaagaagctgacaatcttgtggagactgatgcggctactttacaaccgacatatcttgtggctcaagagcctgataatgacaatattttacggacccgaacctatgatgtccgcatcgcgtatgataaatactatcagactcctcgtgtgtggcttactgggtatgatgagtcaaggatgctcttacaaccagagcttgttctggaggatgttagtcaggatcatgcacacaaaacggttactattgaggaccatcctcacttacctgggaagcatgcatccgtacatccatgcagacatggngctgtcatgaaaaagatcattgatgtgcttatgtcacgtggagtag

SEQ ID NO: 193867 - DNA, 400 bp, Gossypium hirsutum
caagtattgccatgcttaaagtctgtcaagcaattcatgtcagcttctcctgatattattttggggccagaatcatatggtctaaggcgagtcggaaatcttttacataagttcaagacctggaggattgacagttgtggtcagttaagaaagatatgggaggacaattcaagagcattacattcagtaattctagactggcttcaagaaagtttccacaaacattttgaaaagctttggtcagagatgctttctgaaggcttcctagagccccaagaacgttttcccaagagattgaagagaggataaaggaaaaggtggggtgccttatttgaaagtagggaatgaaaaataccccaatttaattaatttaattatgaatcttgcgaatctaaaatga

SEQ ID NO: 193868 - DNA, 630 bp, Gossypium hirsutum
aaaaaaaatggcagctgcccggtctctctcaaatccatcttccaccacctcactaatttcccaatccagaaaccaatcaaaacccacttctcctccttcatttctaaagccccacagtctacaaagtccttggcttggcttcaaaatttcctttcagccatcaaaaaccagaccctacttgcccaaccatcgcaccatcactgcaactatctccttaagtctccccacttcgaaaacagatagggttgcttcagctgggaaagttcccaaatggtcaaggagagcgataaagtcatttgctatggctgaattggaagctaggaaactcaagtatccaactactggaactgagtcgttgctcatgggcatattgattgaaggaactaatctggctgcaaaatttttgcgtgcaaatggtatcactctttccaaggttcgtgatgagactgtcaaattattaggaaagggtgacatgttctttttcagtcccgagcatcctcctttgacagaagatgctcaaagggcacttgattgggctgttgatgaaaaactaaaatctggtggtgatggggaaattacaacaactcatttgcttcttggcatttggtctgaagtggaatcacctggtct

SEQ ID NO: 193869 - DNA, 573 bp, Gossypium hirsutum
atcactgtcacctcagctgatccttgttcttgacctgccattactcaaagatttcttagtgattcaatccgtcgatcaaattagggggaaaaaatgggagggggagagcatgggcatgggcatgggcatggagttcaagatttcagggagaaggtgtggagcatgtcggggggtccgtactgccggcccaagcactggcgccgcaacactgccattgccatgttcggcgttttcctcatttgcatccccattgccatgaaatcaaccgagctcgagcaacgacctcatcagcctgtccgtccgattccttcacagctttggtgcaagaacttcggaaacaaagattattgaagtctgcctggggctgttggagtaccgatggcatatcagagcagcctatgatctgtatttgagaccctttcaccaatttagctttgttcgtgatcaataagttgtgcttgttttgccttcactgtgttattgacaaattttgaagttgatttttttttcaaactgaatcaacttaatatctgtttattccatcggttaagtggattaaatcattttttttcc

SEQ ID NO: 193870 - DNA, 639 bp, Gossypium hirsutum
atttgcctcaggcaacccaaatattcattcctcgttcgctctcaatcctcgccactaaattttacttcttaaatttcattttcttttgaaatatttcaattttcttactgatctaattgctttactggttagacttgtaagagttttcgatagatccgtcgagtaaattaagaaaaaatgggaggagcagaacatggagggcatggagcagaggatttcaggacgaaggtgtggagcatgtctggtggcccatattgccggcccaagcactggcgtcgcaatactgcgattgctatgttcggcgttttcctcatttgtatcccgatcgccatgaaatccgccgagctcgagcaaaggcctcatcagcccgttcgtccaattccttcacagctgtggtgcaagaactttggaaacaaagattatagatgaagcagcaatgatagttcagacaaacctacgggtgggcagttcagttgtgtatttgcaagtggatttggtaacatgccctatgatttgaatttgagactctgatcggtttagatttctatatgatcaataagttgtgaccgtaactttgccggtcaccttcacaaaatcttaaaactggcttttgtaagtgtttcatggttttggtatggt

SEQ ID NO: 193871 - DNA, 795 bp, Gossypium hirsutum
cccacgcgtccgcagcgattccacgatttccaccccttattctataaggttgatttaactgctagacacaccacgctcatttctgagttctgttttccttgttctcttctacattcagcgaaggggtgctctgagatcacataccaaaatggtgaaggccgttgccgtccttggcagcaatgaaggtgttagcggaactgttttcttctcccaagaaggagatggtccaactaccgtgactgggaacctttctggtcttaagccgggactccatggcttccatgttcatgcccttggggacacaactaacgggtgcatgtcaactggaccccattttaatcctgctggcaaagagcatggtgctccagaagatgagaaccgccatgctggtgatctagggaatgtcactgttggtgatgatggctgtgcaagcttctccatcaccgacaaacagattcctctcacaggcccaaactccattatcggaagagctgtagttgtccatgcagatcccgatgaccttggcaagggcggccatgagctcagcaaaagcacaggaaatgctggcggcagagtagcttgcggtattattggtctgcaaggctaaaatccgagccaagatgcggttgaaggatgcaatgggctttgagaactctttatgtgaagtagaaagaacttggttataataataaaaaggttaaaagaatccttagtttgtgtacttttgttgtgtgttggttgtcatgtgtaactcagtgtcctttgaatcttaaaataccttttgttgaatgcttt

SEQ ID NO: 193872 - DNA, 560 bp, Gossypium hirsutum
cttctgttttccttgttctcttctacattcagcgaaggggtgctctgagatcacataccaaaatggtgaaggccgttgccgtccttggcagcagagaagcagttccgcacagaggtcagcacaattgggacgatccagcatgttaatctagtgcggcttcgagggttctgctctgaaggtataaggaagctgttggtgtatgattacatgccaaatgggtctttggatgcccatcttttccatgaagagaaatctaaagctctaacgtggaaaacaaggtaccagattgcacttggtacggctagaggcttagcttatcttcatgagaagtgcagagattgtattattcactgtgacatcaagccagagaatattctcttggatgctgaactctgtcccaaagtcgcagattttggcttggcaaagcttatcgggcgggacttcagcagggtcctgacaactatgagagggacaaggggctatcttgcacccgagtggatttcaggagtcccggttacagctaaagctgatgtctacagctacgggatgatgttgtttga

SEQ ID NO: 193873 - DNA, 450 bp, Gossypium hirsutum
ttttaatcctgctggcaaagagcatggtgctcccgaagatgagaaccgccatgctggtgatctaggaaatgtcactgttggtgatgatggctgtgcaagcttctccatcgccgacaaacagattcctctcacaggcccaaactccattatcggaagagctgtagttgtccatgcagatcccgatgaccttggcaagggcggccatgagctcatcaaaagcacaggaaatgctggcggcagagtagcttgcggtattattggtctgcaaggctaaaatctgagccaagatgcgtttgatggttgcaatgggctttgagaatgaagtagaaagaacttgggtataataataaaaaggttattatgaatccttagtttgtgtacttttgttgtgtgttggttgtcgtgtgtcactcagtgtcccttgaatcctaaaataccttttgttgaatg

SEQ ID NO: 193874 - DNA, 1016 bp, Gossypium hirsutum
  unsure (1)..(1016): unsure at all n locations
cccacgcgtccgcccacgcgtccgcccacgcgtccggaaattacgggtaagaaacggaaaacacaaaaaatcttgaagccctcaactctgagatggcatcgacgacagccaccgctcgagccgtcgtcttctcccgcatcaccaccttgtccgcaaaacctctcacaccttctctatctcgtttcttccgtaaccgtcacaaccgcgcattttccgccctaactgtcagctgcttaaacagtggcggagtctgcgacgatgactacttcgtatcaacgcagaatatcgtattttagatcgtggatggctagtaattgctaatatgttgaagaacattgagcctctcgacaattccgttgtttccaagggggtttctgattccgccaaggaatccgggaagcggactatctccactatgctagggattcttccatctgatcacttctccgtttcggtttccgtctccacccctgctcttcatcgccttctattctcttctatcatcactgggtatacgttgtggaacgcggagtatagggtttcactgatgaggaatctggaaagagcagcaccgggcgaggaggtggcgggggagacagaggaagctattaggaagcggcagggagaggtgtttgaggagaaaagggaggagagagcgagtcaaagtgatggctttcaagaattcgagaagattaggccgagggtttccggggaattgtcgccagaggctttgaagtatattgaaaaactgcaagcggagttatctgatgcggtggaggaactgaatgtggagaaggagaatgtgcaaatagaatgtgaaaaggaaaacaggaatgatttgttggagtatttaagatccttggatgccgacatggtcactgagttatcccaaccatcatcagtacaagtccaggaaacaatccaccagcttgttcaaaacatattgcaaaggccctctaagaatgagcttaagagggactcanggatagtgaacaaaggaaatcatcatcaagatg

SEQ ID NO: 193875 - DNA, 635 bp, Gossypium hirsutum
caaaacaacagccaattactcttcagtctcagccgatcttaaaccatgggtcgcgttcgcacaaagacggtgaagaaatcgtcccgtcaggtaatcgagcggtactattctcgaatgaccctcgattttcacaccaacaaaaagattatcgaagaagtagctataatcccatccaagaggctccgtaacaagattgccggtttctcgacccatcttatgaaacgtatccagaaaggaccagttcgcgggatttctcttaagcttcaagaagaagagcgcgagcgtcgcatggattttgtccccgatgaatcggccatcaaggtcgaccaaatcgaagttgataaggaaacacttgatatgctttcggttattggaatgggtgatattcccggccttgttaaggttgacccggttgctgtttcggttcctcaagttgggttcggtcgcggtggtggacccgggaggaggttttgagtggtgggtcttcatggatttaatgggtttcatgggttttttttttaagcttctatgtttttttcttctgttttggggtagtttctaattttgtgttttttatggaacagtactagttaagtggaactgaaattttatcaattgtgatgtgtactttattt

SEQ ID NO: 193876 - DNA, 442 bp, Gossypium hirsutum
cttcattgctcttccacctccgcaaatccccgcccaactctccgccgccgccaccgccaccgcaaccgccaccgccacagatccaagcaatgggccgcgtccgtaccaaaacagtgaagaaatcctcccgtcaggtcatcgagcgctactactctcgcatgaccctcgatttccacactaacaagaagatcatcgaagaagttgccattatcccatccaagaggctccgcaacaagatcgccggcttctcgacccatttgatgaaacggatccagaggggtccggttcgcggcatttccttgaagctccaagaggaagagcgtgagcgccgcatggatttcgtccccgatgaatcggccatcaaggtcgaccaaatcgaagttgataaggaaactcttgatatgctttcggttcttgggatgtctgatattccggggcttgg

SEQ ID NO: 193877 - DNA, 772 bp, Gossypium hirsutum
cccactcgtccgcgaacatcatcgtttctaattgttagacggcatcgacatggatgttcccgcccacccggccgcccgtgtcgtgaccaatgctttctcaaaatccatatgggttatcttccaactcttcttctatgcgctccgacctttgtttctcaaaccgaaaccccctggttgctgggagttcataaacttattcgctcagctcgccctcgatgcgaccatggtttactttcacgggtggaaatctttcgcttatttgatcctttcgacattcgttggtggtggaatgcacccgatggcacgccattttatctccgaacattatgtgtttaaacccgaacaagagacttattcttattatggtcctcttaatcttttgacatggagtgttggctatcacaatgaacatcatgatttccctaggatccctgggtataagctacataaggtgaaagaaatcgcacccgagtattacgaaggcttggaatcgtataaatcatggagccaagttatttacatgtatatcatggatcaaaccgtcggaccatttagccgaatgaagaggaagatctcgaaaaaatccgaataggtgatgagttttttccccctacccatttgggatctttctgttttctggtttgcctttctgtgtttcagtatggggtttacttgcattttaaggctcaaatatgttattcgtttcccaacattgttgaagtattaagattctattatgtagtttttaaaaaaaaaaaaaaaaaaggcggtc

SEQ ID NO: 193878 - DNA, 714 bp, Gossypium hirsutum
aagtagcttactactgcattatttttctcattctgcttttgctagctagctagcctgcttccatggcaccctcaattgttcttgtttcatggatggttttaggccttgtaatggcaacttcaactattcaagttgaagctgccagggcattttttgtattcggtgattccctggttgacaatggcaacaacaacttcctagcaaccactgctcgagctgattcccctccttacggcatcgatactcccaggcgtcgtgccagcggtcgcttctcaaatggcaaaaacattcctgattttatcagtgatgcacttggttcagagccaacattgccctacttgagtccagaactcaagggagataggctacttgttggggccaactttgcgtcagctggcattggaatcctcaatgacaccggagtccaatttataaacatcatcagaatgtacaagcaattaaaatactttcaacaataccagaccaggttggctgatcttgtcggattcgaggaagcacagcggattgtaaacgatgcacttgtgctcatcactgtcggcggcaacgatttcgtgaacaactactatttggttccattctctcctagatctcgccagtttagtctaccagattatgttcgatatctcatctctgagtacaggaaacttctaatgaggctatatgatctaggagctcggaaggttctggtgactg

SEQ ID NO: 193879 - DNA, 432 bp, Gossypium hirsutum
agaatcctgaagtgaaacgaaccattttcatttattttacttgtctcgctgtaccaaaaagagcaaatcaaaagaatcagcaatggcttcaatcccgtgtacttttcaaataccctttacttcaaaacccgtgaattctcttccatctctgccaaaactcagctccaagtttctgggctctcaaaaaactctatcttggtcaaggccctcacgaattggaccctctaatggttcaagaactcaatgctggttcaagtttggtaagaacggcgttgatgctgaacgtgctggcatttatggcagccagggcagggatgattttgacagggatgatgttgagcagtacttcaactacatggggatgcttgccgtcgaaggttcctacgataagatggaagctcttttgaaccaaaacatacacccagtagacat

SEQ ID NO: 193880 - DNA, 803 bp, Gossypium hirsutum
  unsure (1)..(803): unsure at all n locations
cccacgcgtccgccaagtttgatttaagttagtgagtttcttagtttccctagaagttaagcatggctcaaattaagaggatggagtgccaactcgagatcaagtcctcagctgataagttctttgatgcctacaagaccaaagcccagcttatgccaaaaatggccaatcaagtcgttagagatgtaaaacttgttgagggtagtggttgggattccgagggttcggttagacaatggtattttgttgccggaggtaagcttgagacttgtaaggaaatgatggaaaaggtgaatgataaagacaggactattgtttacaaattggtggaaggtgaaatcatgaaagctttcaaaagctggaactccatcctcaacgtgatgccgataggggagggaagtttggtgaaatggactatggaatttgaaaagcaaaatgatgatgtccctgatcctgtcaagtacggcgagtttttaactacctgggctaagaatgtcgatacttaccttcttaatgtctaattaaataattaaggaaactacatatatgaataatttgatcatatgtctcgttcttaaataaattatacaaataatcataataaacatgcatttaaatattttataatagctgattaagcattagcttagttggcaacgtttgctgagttcaaacgtacttatgaaagcacaagtatgtatgttattgtcatgaaaattaatgtaacctttgctttgtgtatgaaagtngaaaaaaaagaaaaaagaaaataaataaaaaaaaataataaaaaatattgagat

SEQ ID NO: 193881 - DNA, 1029 bp, Gossypium hirsutum
gtccgcccacccgtccgaaaatgtcgaaggctggtgcattggatctggcatccggtctcggcggcaagatcgagaaaaccgaagtcctttccgctgttgaacagtatgagcgatatcatgtcttttatggaggcgaagaggaagagagaaaagccaactacactgacatggttaacaaatactatgatcttgttaccagcttttatgagtttggatggggtgaatctttccattttgctcccagatggaaaggggagtctctcaaagaaagcataaagcggcatgaacattttcttgctttacaacttgggttgaagcctggacacaaggtgttggatgttggatgtggaattggtggaccacttagagaaattgctcgattcagttccacatcggtcactgggataaacaacaatgaatatcaaataacaagagggaaggaattaaaccgcattgctggagtggaaaagacttgcaactttgtgaaggctgacttcatgaagatggcatttcctgacagcacctttgacgcaatttatgcaattgaagctacttgccatgctccggatgcgtatggctgctacaaggagatttacagagtactaaagccaggacagtattttgctgcatacgagtggtgcatgacagattcatttgatccaaataactcagaacatcagaaaattaaggctgaaattgagattggtgatggtcttccggatatcaggttgactggacagtgcctggaagctctaaaacaggctggttttgagataatttgggagaaagatcttgctgttggctctccactcccttggtacttgcctttggatacaagccacttctcattgagtagcttccgtctaacatctgttggacgcttcatcaccagaaatatggtaaaggctctagaatttgtgggattagctcccaaaggaagtcaaagagttcaagattttctagagaaagctgcaaaagggttggttgaaagtggtaggaaagagatatttacgcctatgtatttctttt

SEQ ID NO: 193882 - DNA, 440 bp, Gossypium hirsutum
tttacgcgtccgcccacgcgtccgcccacgcgtccgcccacgcgtccggtcaagtacggcgagtttttaactacctgggctaagaatgtcgatacttaccttcttaatgtctaattaaataattaaggaaactacatatatgaataatttgatcatatgtctcgggcttaaataagttactccaaataatcataataaacatgcatttaaatattttataatagctgattaagcattagcttagttggcatcgtttgctgagttcaaacgtacttatgaaagcacaagtatgtatgttattgtcatgaaaattaatgtaacctttgctttgtgtatgaaagtacatgcttctcctatgttatatgataattttcgtggtaaacacaaaaataaataaaaatatgctctctttttttgtgaaaaaaaaaaaaaaaaagaaa

SEQ ID NO: 193883 - DNA, 346 bp, Gossypium hirsutum
cccactcgtccgcaccaacctgcattttattatatttttagctggaggaactttactggccagggaaacctccaatctcgttcatcattcacctcacatgttcccacattttctttccctttctgtctttaattttgagtgacaaagaccagcgtccccagatttctcttcttaggtaaaagaaaacgtcactgtgcctatctttcaatgccttcactgttcactcaccaaagtcccgaactcacaaaacacgtttcagttctcagttcatcaatcaaatccagggtaaaccagctagttgtacttcaaaatcaataccctttaatgtaaaaagggttaaacttgt

SEQ ID NO: 193884 - DNA, 442 bp, Gossypium hirsutum
cccacgcgtccgcccacgcgtccgctttactcaatcatctccttcctttcggaacataatatacaagtctccttgtttcagcttaaatttccagccatgaatcacaaccagcaacacttcaatcaatcatcagcagctgcatacccaccaccaccaccctccacggcgccaggaccctacgtgactgcaccgccggccggttacccgatgagcaaagacgagtacagtcagcaaaatccggctgctgtcgaaaccaagtccagaggtgatggattctggaaaggatgttgtgctgccctttgctgctgttgccctctggatgcatgcttttgaagcttttatttttgttctttccattggagttcatatattagtttccattgttgtatagaaattatgggtttctttttattgatttttacagattcagatttgattgtat

SEQ ID NO: 193885 - DNA, 445 bp, Gossypium hirsutum
cccacgcgtccgctcaatcatctttttccttttttaacataatatataagtctccttgcttcagcttaaatttccagccatgaatcacaaccagcaacacttcaatcaatcatcagcaggtcggttctcttcttcaatctttcctttcttatatagcttacatgaaaaacccagaaatattaatgtggtttagtacttgtttaatgatcaaacagctgcatacccaccaccaccaccctccacggcgccaggaccctacgtgactgcaccgccggccggttacccgatgagcaaagacgagtacagtcagcaaaatccggctgctgtcgaaaccaagtccagaggtgatggattctggaaaggatggtaagtactacctaatacctatacatacatacatacatacatatatacccaatgaaatcttctctttcttgtatatatt

SEQ ID NO: 193886 - DNA, 465 bp, Gossypium hirsutum
ataaaagttactacagaccacggttttgagttgatagcagatgttgtactctttgccacaggcaggttaccaaactcgaagaggttgaatctggaagctgtaggtgtggaacttgataacactggagctgtgaaggtggatgagtgctcacgtactagcattcccagtgtatgggctgttggtgacgttacaaatcggatgaacctgactcctgtggccttaatggaaggaacctgctttgcgaaaactgtttttggtaaggaacctagcaaaccagactacagccatgtaccttgtgctgtttttagcatccctccactttctgttgttggtctcagtgaagagcaggcaattgagcaagcaaatggtgatgttctggttttcacatcaaccttcaatccgatgaagaacactgtatctggacggcaagaaaagacggttatgaagttagtcgttgatgcagag

SEQ ID NO: 193887 - DNA, 427 bp, Gossypium hirsutum
aaaaccgggccacccacgcgtccgaagagaatacaacagattggtttccgttcaagatggagatgggcatatgggggggcggtgaacttcttaacgacgtaatccatgagagtgacccccacttggatgaacctcagattgaacacttgctgcaaacagctgaggctatcagaaaagactatcctaatgaggactggatgcacctgactggccttatccatgaccttgggaaggtgcttcttcatcctggttttggggagcttcctcagtgggctcgtgtagggcacacattccctgttggttgtgcttttgacaaatcaattgttcaccacaactatttcgaggaaaatcctgactatcataactccgattacaacactaaatatggggtgtacttagagggatgtggacttaacaatgtgatgat

SEQ ID NO: 193888 - DNA, 441 bp, Gossypium hirsutum
cccacgcgtccgaattcccataagtccgctcagctcccattgttttcttccctcttaggtcagtggagggcattgagcttctctcttgatcacaatgactatcctcattgatcaacccgagcttggtgttgaagcaggggttaacaagctcgataatgcagacaatgaactggtgttggatgggggatttgtggtgccacagacaaactcttttggccaaacttttagagattatcatgttgaaagtgagaggcaacagggtgtggagaacttctaccggaccaatcatattaatcagacttctgactttgtcaagagaatgagaacagagtatggtaaactgaacaagatggagatgggcatatgggaatgctgtgaacttcttaacgacgtaatcgatgagagtgaccctgacttggatgaacctcagattgaacactt

SEQ ID NO: 193889 - DNA, 1927 bp, Gossypium hirsutum
  unsure (1)..(1927): unsure at all n locations
agcctacattttgctctctttctcaccctaaactcttcaaagaagcagcagcaactaaagctttgaggaaatggcgttggctttcgatgagtacgggagacccttcattatactcaaagagcaagaccagaaaaccaggctgagagggatcgatgcccaaaaagccaacatttccgctggcaaagccgttgcccggatcctccgaacctctctcggacccaagggcatggataagattctccaaagccccgatggcgatgttaccatcacaaatgacggggcaacaatattggagcagatggatgttgacaaccaaattgctaagttgatggttgaactatctcggagtcaggattacgaaattggggacggaacaactggtgttgttgtcatggctggagcactactaaagcaggcagagcggctattggaacgtgggattcatcccatccgtattgcagagggttatgaaatggcttctaaaatagctgttgagcatttggagcgtatagctcagaagtttgattttggaccaacaaatatagagcctttggttcaaacatgcatgaccactctgtcctcaaaaattgtgaaccgatgcaagcgtcctttggctgaaatttctgttaaagcagttctttctgttgctgatctagagaggaaagatgtcaatttagatctgattaaggttgaggggaaagttgggggaaaattggaggatactgagctaatatatggaatcactgttgataaggacatgagtcatccacagatgccaaagcaaattgaagatgcaaaaattgccatattaacttgcccatttgagccccctaagccaaagaccaaacataaggtagacattgatacggtggagaagtttcaaactttgcgtctgcaagagcaaaagtattttgatgacatggttcagaagtgcaaggatgttggtgccaccttggttatctgtcaatgggggtttgatgatgaggcaaatcatttattaatgcaccggaacttgcctgctgtcagatgggttggtggtgtggaattggagctcatagcaatagctacgggtggaaggattgtaccaaggttccaggagttgaccccagaaaagttgggaagggctggtttggtcagagagaagtcttttggcaccacaaaagataaaatgttgtacattgaacactgtgcaaattccagggctgtaaccatatttattcgtggaggaaacaagatgatgatagaagagacaaagcgcagtatccatgatgcattgtgtgtggccaggaatctcattcgcaacaattctattgtctatggtggcggctcagctgagatttcttgctcaattgctgtggaggcagctgcagataaatatccaggagttgagcagtatgcaatccgggcatttgctgatgctttagactcagtccccatggccctggccgagaatagcggactccaacccattgagacactatcagcagtgaaatctcagcaaattaaggacaataatccacactatggaatagactgcaatgatgttgggactaatgatatgcgggagcaagacgtctttgaaacactgatcgggaagcagcaacagatcttactggcaacgcaagttgtaaagatgattttgaaaattgatgatgtcatttctccatcggactactgaggtataatttctgtactgcctcactctgaaggttaccctgttttgattgttttgtatggttcactccaaaacaattgttcacttgtgaggaacatgttttgcttatgtatttttcaactgccaagctctttgttggttggaaatagaatgataaacccttcgtattgacaacggttgtttatgtttttttttnnnnnnnnnnnnnnnnnnnnnnnnnnnnnnnnnnnnnnnnnnnnnnnnnnnnnnnnn

SEQ ID NO: 193890 - DNA, 443 bp, Gossypium hirsutum
ttcacgcgtccgcccacgcgtccgctcaaatcgcagaacagtttgtgacttctcttggattaaagtttaacccctatgttactcagattgagacccacgattatatggcaaaactttattatgcaattatccggtttaataatatattgattgactttgacagagatatatggggctacatatctgtaggatactttaagcagattaccaaggcaggtgagattggttcatcaacaatgcctctataaaagtaaaccctattgattttgaaaacagtgaaggtaatcttggtaaggctaatgaagacctaacttacctgagcatgaagttgcctatttcccgttggcagcgagatttaactgattcgacagtcttgaggaacatggggggaggacttgggtcattcccttcttgcttacaaaagtgcgctgcaaggaatagga

SEQ ID NO: 193891 - DNA, 343 bp, Gossypium hirsutum
cccacgcgtccgctgcggcatatgggaaatgggcatctgctatagctaccagattaaatgctggaggcctctcttgcaaggttcttgacaaagaagcatttcagaagcagatgttggagaagctcatatggatttgtgcattcatgcttgttggagctcgtcatcctggggcaactgtaggcgttgtagagaaggaataccgctctgagagctcgcatctgctgctgcagcggagaaaggtataacatttgaagaagctatggaggataggctatgtgcttattctcgagctgtggcccacttcccaacagcagttaaagagttcaagtggaaggaatggatg

SEQ ID NO: 193892 - DNA, 924 bp, Gossypium hirsutum
cattaacctactctgatgcagaccctcgagggaacccctgttcttgttcatgctggtccatttgcaaacattgctcatggtaattcatctattgtggctgataaaattgcactgaagctggttggaccacaagggtttgtggtcacggaagcacgttttggtgctgatattggaacagaaaagttcatgaatatcaagtgtagatacagtgatctaagacctcagtgtgctgttattgtggcaacaataagggccttgaaaatgcatggtggtggcccggaagttgttgcagggaagcctctcgaccatgcctacctaaatgagaatgttccgttggttgaaactggttgtgtgaatttggctatgcatattataaacacaaaggcctatggtgtgaatgttgttgttgctgtgaacaaattctcaaccgacactgaagcagaaatgaatgctgttatgaatgcagctatggctgccggggcatttaatgctgtaatttgtactcaccatgctcatggtggtaaaggagcggtcgaccttggagttgcagttcaaagggcttgtgcgagtgggaatcagcaactcaaatacctgtatcctttggatattagcattaaagagaaaattgaggcaattgctaagtcatacggtgccagcggcgttgaatacaccgaacaggctgagaaacagatcgagatgtacaccaaacaagggttttcgggtctaccaatctgcatggcgaaaactcagtactcattttcgcacaatgctgctgagaagggagcaccaggtggatttatcttaccgataaaggatgtgcgagccagcataggagccgggttcatttatcctttagtgggtacaatgagcacaatgccagggctaccaacaaggccatgcttttatgaaatcgatcttgacact

SEQ ID NO: 193893 - DNA, 428 bp, Gossypium hirsutum
ttcaaagcaaaaatcccagcatcatccatagctgtaagaaaatttgaaaaaaaaaaaaaccagacatggaagccactgctgtttatagcagcaaaggaagtccatttcttttttcctctaggattacaactaaaaaatcatttaaatcatcacaaaatgctgcaactttctcaccttttctcattcaatccatggctactcagaaaccattgccttcagttgccaaaactgttggttctagaaagggctcgaactcgaccgtttttccgctcggcgagccagggccaaggaacagcacagtggtgacacaaccagtgaagctactgacaaatgtagagaaactgaaactgctaaccaaagcagagaaagcagggctactatccgcggcagagaagttcgggttatcgttatcgtccatagagaaactc

SEQ ID NO: 193894 - DNA, 780 bp, Gossypium hirsutum
gaagcctacgatgttgtgtacgacataaatggacgataggcggccgaagttgaaccgatactggatgcactcccgaacttagaacagttcatatattgctcctcagcaggtgtttaccttaagtctgatatgttaccacattgtgagatcgatgctgttccgccgaagagtaggcacaagggaaaacttaataccgagagcttactggagtcgagggatgttaactggacatctgtgagaccagtctacatatatggacctttgaattataaccctgttgaagaatggttcttccaccgattgaaagccggtcgccctattccaattcccaactctggagtgcaaataacccaacttggtcatgtcaaggacttggcaacggctttcattgcggttcttggtaatgaaaaagccagcaagcaggtgttcaacatttcgggagaaaagtacgtgaccttcgatggattagcaaaggcgtgcgccaaggctggtggatttcccgaacctgagattgttcactacaacccaaaggagtttgacttcggtaaaaagaaggcattcccgttccgagatcagcatttcttcgcatcactcgagaaagcaaagcatgtgctaggatggaaaccggaatttggcctggtctaaggactcacagactcgtataacctatatttcggcaggggaacattcatgaaggaagcttatttttcgaccgatgacatgattctgggcaaaacttttgttctccaatcataaggcatttatctcatcatcactttc

SEQ ID NO: 193895 - DNA, 1036 bp, Gossypium hirsutum
caaccacaaccatccatctcagctttcttatccttcctcccaccactagtctctcccttacccgaatctaaaagaataaaaccgatccctcaccttcctctctttcctccccacgcgcccggaaatataccagaaaatcaaaaagaagaagaaaagagatccccatgatgtctcttacaatcccaactaatctctcaaaatcaattttgaagccaaagctggagacccaagtgatccccaaggcttcatccagatcattgattgtatgctcctccagcaatccttcctcctccgacaaatcggcttcatcactccaggccttctcagcggctctcgctctttcttccatccttctttcggctccactccctgctgttgcggacattgcggggctcactccttgcaaagagtccaagcaattcgccaagcgcgagaagcagcagatcaagaagctggaatcctcgttgaagctttacgcccccgatagcgcaccggctctcgccatcaaagccaccatcgagaaaaccaagagacggttcgacaactacggcaagtacggcttgctctgcggctccgatgggttgcctcatttgatagtgagcggcgatcagaggcactggggtgagttcatcacgcccggcctgttgttcttgtacatcgctggatggatcgggtgggtcggaaggagctacctcattgctattagcgatgacaagaagcctgccatgaaggagatcatcattgatgtgcctttggctaccggtcttatatttagaggctttatttggccagtcgctgcttacagagagcttatcaatggtgaccttgctgtcaaggacgtttaatctcctcagggatcgaatggaaggacttgaactccaacgaatagctagggaagaagatgggagtgcttttagactgaatattcttggtgggaaatttcttgtacttaaaaatgttgtttaaaaaaacatacttttgagtcttatgtaatgctaatgttgaaacatttgttaactgaacgactttccatttc

SEQ ID NO: 193896 - DNA, 531 bp, Gossypium hirsutum
accactcgacattgaaactcatccttccccttctctctcaaatcctcctcccgtccttcttcaccacacaccacaactactatactcccaaaatgtctcttacaatccccactaacctctccaaatcccttttgaagccaaagctaaactccaaactcacccccaaagtttcacgatcattggtggtatgctccaccgacaagacttcatcgccactatcatcagcttcatcactccaagccttctcagcagctcttgctctttcttccattcttctctcagccccacagcctgccgtagctgatattgcaggcctcacaccatgcaaagagtccaagcaattcgccaaacgtgagaagcagcagatcaagaagctggaatcgtcgttgaagctatacgcccctgacagcgctccagctctcgctatcaaagcaaccatcgagaaaaccgagagacggtttgacaactatgggaagtacgggctgctgtgtgggtctgatgggttgcctcatttgatagtgagcggtgatc

SEQ ID NO: 193897 - DNA, 758 bp, Gossypium hirsutum
gcgcttgctcctgttgttattggtgtatccatggcatcactgactgagctgtcattcaattgggcgggtttgattaacgcaatgatttccaacatctccttcacttacaggagtatctattccaagaaagccatgacggatatggacagtacaaatgtctatgcttatatttccatcattgctctcttcgtctgtattcccccagccctcatttttgagggtcctcaattgttgaagcatggtttcaatgatgctattgctaaagtgggtatgactaagttcatctcacatcttttctgggtgggaatgttttaccatctctataatcagttggctaccaatactctggagcgggtggcaccactgacccatgcagtgggcaacgtgctgaaacgtgtatttgtcattggcttctcaatcattgtctttggaaacaagatttcaactcagactggtataggaacagtcattgcaattgctggagtggccgcctactctttcatcaaggccaagatggaagaagagaaacgacaaatgaaagcagcatgagaagaaaaaaggaggcaaggaaattggaggaagtcctgatgaagaccaaatttgattttaccttgctgttattgtgaagtttttatttttccctctttcttctcttatcatttcattttattttttcttttaaaattcagagaacaacctatttataactgtggatcagccagtgttgactctgaaataatgtgtactgctattactta

SEQ ID NO: 193898 - DNA, 487 bp, Gossypium hirsutum
cccacgcgtccgcagagaaaagcagtttccgaatcttttacgactcgtaaaatagttgaattgactcatggcttccgccgttgcttccgttgcgaagaagaaaactgctggctctaagaagtctaaatcagctccttcacatcctccatttcttgagatgatttcagatgcaatcgtttcgttgaaagagaggacagggtcgagccaatatgcgatcgcgaaattcatcgaagagaagtataagcaattaccggcgaatttccgcaaagtcttacttgttcagacgaagaagtttgttgcttctggaaagcttgtcaaagtaaaagcctcttttaagctgccttcggcttctgccgcagctaagaaaccgaaaccgaaggctactacaactaaggccaaagctaaaccagcggctaagccaactaaggtagcgaagacggcgaagaagagttcgccagggaagaaagtaaaggatccagcaaagaag

SEQ ID NO: 193899 - DNA, 633 bp, Gossypium hirsutum
aaaaaaaaaaaaaaacagttccgaatcttttacagctcgtaaactcgttgaattgactcatggcttccgccgttgcttccgttgcgaagaagaaaactgctggctctaagaagtctaaatcagctccttcacatcctccatttcttgagatgatttcagatgcaatcgtttcgttgaaagagaggacagggtcgagccaatatgcgatcgcgaaattcatcgaagagaagtataagcaattaccggcgaatttccgcaaagtcttacttgttcagacgaggaagtttgttgcttccggaaagcttgtcaaagtgaaagcctcttttaagctgccttcggcttctgccgcagctaagaaaccggccgccgtagctaagaagcctgccgccgcgaagcctaaatctgcagctaccactgccgcctcaaagtccaagccgaaggcgactaaaaccgcgtcgaaaccgaaagccaaagccaaagttgcaacgcctgtgaaggcaaaggctaaagttgcggcgaaaccgaaggctactacaactaaggccaaagctaaaccagcggctaagccagctaaggtagcgaagacggcgaagaagagttcgccagggaagaaagtaaaggctccagcaaaga

SEQ ID NO: 193900 - DNA, 449 bp, Gossypium hirsutum
tccattcgtccgcccacgcgtccgcggacgcgtgggtttttggttacttctctctccaccattatttccaatccttttcactttatctccccccccccctcctctctctatctcgctccccattgttggacgtagccatgattaccttgcgatagcaaaaattatctgtgcggaaaaaacatggacataactaatgtcactgaatatgaggccattgcaaaagagaagttacccaagatggtttatgactactatgcatcaggtgcagaggaccagtggactctcaaggagaatcgaaacgcattttccaggattttggttcgaccccgcattcttattgatgctagcaagattgacatgaccaccactggcctgggatccatgatttcaatgcctatcatgattgctccgactgctatgcagaaaatggctcaccctgaaggagaata

SEQ ID NO: 193901 - DNA, 975 bp, Gossypium hirsutum
ttcacgcgtccgctccatttcccgtccgcttgatttccatcagacggtgataaccatgccgatccgaaacatagccgtgggccgacccgaagaggcgactcaaccggacgcactcaaagcagctttggctgagttcatctccacactcatcttcgttttcgccgggtcaggctccggcatggcctttaacaagttgaccgacaacggagccaccactccggccggtcttgttgccgcttctatagctcacggcttaggacttttcgtcgctgtatccgtcggcgctaacatctccggcggtcacgtcaatcccgccgtcactttcggcgctttcgtcggcgggaacatcagtcttttacgcggcatcctctattggatcgctcaactacttggctcaaccgtcgcttgcctcttgctcaagttcgctactagtgacatgaccgtaccggctttcggactttcatcgggagtaggtgtgtggaacgccgtcgtttttgagatcgtgatgactttcggattggtctacacggtttacgccacggccatcgatcctaaaaagggagacctaggagtgatcgcaccgttggcgatcggttttattgtgggagccaatatcttggcctgtggtgcctttgatggagcttcgatgaacccggccgtttcgtccgggccggctttggtcagctggtcctgggacaaccactggatctattggctcggaccgcttatcggtggcggtctggctggtctcatttacgagttcgccttcattaaccaaagccatgaacaactccctcccaccgattattgaaacctgtttaatttatcatgaaaacgggtttttccttttcttttcctggtgtatgtattttgttgagcttttcttttgtgtttaatttgtgaccgttgatcatgcttactttatcatgatcatcatccaatggcggatgttgtttgcgaatttgtgttaatgct

SEQ ID NO: 193902 - DNA, 428 bp, Gossypium hirsutum
tcgcccacgcgttcgcccacgcgtccgcaacatcagtatacccatcagattagcttagcagtagcgggttcatggctctccaagcagcttcattgctcccacccaccatctccattcacaaagaggccaaatccaatgcttgtcttaaagagacaactctgtttggtgttccattttcaacccatttcagctttcctcttcatttaactcaggaactcaggaaaaagggagtagctgccggaattgttcgagcacaaacagctgctacaacaccggcagtcgatcgggctgctccacaagggaagaagaccttgagaaagggtactgtgataataaccggtgcgtcgtccggtttaggcctagcgacggccaagggctcttgccgagacaggggaatggcatgtaatcatggcgtgtagaaattttct

SEQ ID NO: 193903 - DNA, 574 bp, Gossypium hirsutum
cggacgcgtgggcggacgcgtgggcggagcgtgggcgatgatcaacgagcactgtttcgacagggagttcactacaccaaaagccttcccttatggctacaactacaactgtaactacaaccctcactgtcttagtcacagcgtatcatcttcttctctggatgttggggtagttccagatggcggtagtacgattacggatgtatcagtcccgtgcgcgaaagtgacggagacgacttatcagactgtgcaactctcgttggcggagagagaagcgagggtgctgaggtacagagagaagagaaagaacagaaaattcgagaaaacgatacgttacgcttctaagaaagcttacgcggaagtgcggccgaggattaaaggaagatttgcaaagcgcagtgacgttgaagtcgaagtcgacggcggtaacatgtatggatttggcgtcgttccgtcgttttgaaattaactaaggtagccatgtagtaatattctacgttaaattttggaattgtaattttccaagtgtttttttttcttcttttctttcttttttacttcattgctcacttaa

SEQ ID NO: 193904 - DNA, 445 bp, Gossypium hirsutum
ggaagacgaggcggacgaagtatcttttactctctacctaagcttatttgtgtgcctatgcaatggcacttgatcctcaaaacgcccccatggaagggttcccggccacacctaacatccgggaagtgaggcctgagtccggttttgagaatttcgggttttgcactgacccctgtcgtgtcccgggcggtgaacccaactcgggaataagaagagtgagtttgagggctgagattgacacttcacctcctttcggatcggttaaggaggctgtgacccggtttggtggcaacggacattgcgtgccattgaacaagtttggagaatatcatggaattgaagagtttgatttaaagaaagtggaggaacaagcagcggaattggagaaagatctgattgtgaaagaattagagacccttgatgtgcttgaagaactggggactac

SEQ ID NO: 193905 - DNA, 931 bp, Gossypium hirsutum
aaagaaagaaaaaaagcagagaatcacaataatggttgcagcagtggcagcaacagcatcatctcaactactggtatcaagttcccgctctttgtcacggctgtcaccatttcagctatgcgtatttgattccaagtccctcgtgtcatgccccagcaatggcaatggcattaacaacagtatcaagagaaggcatgttaggtgcctggctgtggggacagcaccagaggcagaaaccaagaaaagtgggttcgaaatccagacactaacaggttggttgttgaagcaagaacaggcgggtactattgatgctgagctcactattgtcctttccagcatttccatggcctgtaagcaaattgcttctttggttcaaagggctagtatttcaaacttgactggtgttcaaggagctgtcaacgttcaaggagaggatcaaaagaagctcgacgttgtttctaatgaggtgttctctaactgcttgagatcaagtggaaggacagggattatagcatcagaggaagaagatgtgccagtggcagtggaagagagttactctgggaactatattgtggtatttgaccctcttgatggatcatccaacattgatgctgctgtttcaacaggttcaatttttgggatatacagtcccaacgatgaatgcctagcagaaatagatgatgattccactcttggttcagcagaacaaagatgtgttgtgaatgtgtgccaaccagggagtaatctattagctgctggatactgcatgtactcgagctctataatctttgtgctcacgttagggaatggagtgtacgcgttcaccttggatccaatgtatggtgaattcgtgttaactcaagagaaaattcagataccaaatgccgctaaaatatatgcattcaatgaagggaattaccaattgtgggat

SEQ ID NO: 193906 - DNA, 434 bp, Gossypium hirsutum
  unsure (1)..(434): unsure at all n locations
taatcactgattcttttgatctgccattttgaacttcccccctttcttccatctccttccggctttagcctagtcctctctggctgccgcttttcctctggttttgggcttccatgggaccgctttcaatcaggttgcctttctacatgcaatccctttgccagcgaaggcggaaagtcctctgtggtggatctcagtgcatgaaaggagaaggaccccttcgctatttttgacaactacctcgaaagccaattgacgattacgctcattatatgctccattgaagtttattttcactatctgatcagatgggggtttccattttttaatctccttagaaactctggaagtactgttctcaaaccattcacttcttttaaataactaagaacaaatcttgacatctnctgaccagatctgcttgtttatcatgt

SEQ ID NO: 193907 - DNA, 491 bp, Gossypium hirsutum
gtgacaacctcagaacacactccactccagagtccagacaaactaaattcagccatgaaggcaagctaataaaaacactcatcacttcatcaataacccaacactcaaaaagcccatatccatggctacgttttctcctcctcctctacctacatctttctctgtcagaccacacttaacccacaattcaactctttctctccctttcaagagaccctttcttctactatccactattcccaagtctttaccagacaatggagctggggtttccgcttctgttgctgctgtcgaagacccagcatccaaccagattgaaaacgccgcggaagtctctgctgggtctaacggagcggctatggccacatcggctgcaaatgctgaagttttgagcaagtttgatgaccctaggtggattggaggcacttgggacttgcaaccagtttgcaaaagatggaaccaccgacctggattcttgtatttaatcctaa

SEQ ID NO: 193908 - DNA, 528 bp, Gossypium hirsutum
cccacgcgtccgacaaaccgaccatggcttctataaaacccagtttttattttgaacccagtaatggagtcgacacctccgtggctttattcacatcagcattgttaaagcccaactccttacctttttcacctcttcaaagagtaacaccaacagccaaaactagacgtttctcttgcaaagtcctaaactctggccatccagactcggaattaaatcaaatacagagaaagcagagtcctttggattcaagttttgtaactcaattacgtaggaagttgcagcaatgggaaagtgtcggctttgggctaatggggtgtcagttgtagcaaaaagaaccagaccattgatttgaaaaccccagggtagaaattttgttcttctgaatggtggtggtgcaaaaagagggaagggaagtgttttggaggggaaactggaacgctttggatatagcctctgcaggtattgtcttggccatgcatttactcagcctttgcgcacctttttacttcaattggcctgcttttt

SEQ ID NO: 193909 - DNA, 796 bp, Gossypium hirsutum
  unsure (1)..(796): unsure at all n locations
gttattcatgacataaattgtctgggcaaggaaatttctggtgcttacctggatcatgtacttagagttctatcttcatgttccactgaagtccttgaccttgtaaagcagagcattttgcactgtggaaaatcattggatgatttgttacccttagttatcaacacaattaaagaggctttagttcagaagtctgttgaggacttgagacagttgaaaggaataactgcaacttacaggatgacaaacaaacctcttcctgtcaggcattcgccttatgtagctggggtattgcgcccattgaagactttcttggatggtgaacaagctacaaagtatttgaccaacgatgcgaggaatagtctactgctaggtgctgcaacagacataactattcgctattatgaattagctgctgacctcgtcagtgtggcaaggaagacagagtcatcacttcaaagaataagacaaggcgcacaaagacgagctggggcaagctcagatgtcttggatcataatgtgtctgatactgacaaaatttgcatgccattgttttcttgatattcaggagttatgggcggaaccttgctgtcttgggagtgaaagctgctgatattgatgcataccgatctttatggcattgcgttgcacctgctgaatagcaggatgagatcaagttttanaatcagtatcgcattgcatctggttctttcacatgtaaactgttttcccctatctttaacttgatcttatggtgattttctttcccctcctttttgttattaaaaaaattaac

SEQ ID NO: 193910 - DNA, 675 bp, Gossypium hirsutum
  unsure (1)..(675): unsure at all n locations
ttatagctctctcctgattagaatttgtacaataaaaagaagcttttttgttttttgttaacattttcagatccaattcattactctcttcaaaggaccaaaaagaagatggcttcaacattcagcggcgatgaaactgctcctttcttcggcttcttgggtgctgctgctgccctcgttttctcttgtatgggagcagcttatggtacagcgaaaagtggtgttggtgtagcatcaatgggtgtaatgagaccggagctggtgatgaaatcgatcgtcccggtggtaatggctggtgtgctgggtatttatggtttaatcatcgctgttataatcagtactgggattaacccaaaggctaaatcttattaccttttcgatgggtatgctcatttatcttctggtttagcttgtggacttgctggtctttctgctggtatggctattggaattgtaggtgatgctggtgttanagctaatgcacaacagccaaagctttttgttgggatgatcctcattcttatctttgcggatgcattggcactatatggcttgatcgtcggcattattctctcatccaaagctggtcagtcacgatccgagtgatagataaggcctaattactcattgtgactcttatatcactggctgtggtttaccgaaagaatttgttca

SEQ ID NO: 193911 - DNA, 1035 bp, Gossypium hirsutum
cccatgcgtccggtaatttccaagttccttcttcaattcattatctctcttgtctctgcctttcattccatcactcacgaaatccagcgatcaaggtttccccaaactcccttcaaatcctcgtctcaacaatttttttttaaagcctagtaaaatggcgtccacatttagcggtgatgaaactgctcctttcttcggcttcctcggagccgctgctgccctcgttttctcctgtatgggtgctgcgtacgggacggcgaagagcggtgtcggggtggcatcgatgggagtgatgaggccggagctggtgatgaaatcgatcgtgcccgttgttatggctggagttttaggtatttatgggttgattattgcggttattatcagcactgggattaacccaaaggccaaatcttactacctgttcgatggctatgctcatctttcctctggtctcgcttgtggcctcgccggtctctctgccggtatggccattggaatcgtcggcgatgctggagttagagccaatgcccaacaaccaaagctttttgttggaatgattcttattctcatttttgctgaggctttggctctctatggactcattgtcggtatcattctctcttcccgggctggtcaatcccgagcagaatagagtgcaaagttccgaaacttgggtcattgctagtaggcttcacttggttgtttctccaattcttgccgctagtgcagtatgaaacatttgtcaagttgttcttttgatctcattcatgaattttcttttcaatggttctctgctgtttgtatgattagaagacggattccgtttgaaataaattcttattttacattacattttttttttcagatctagtgttgtaatatgcaagttcaacataatgtaaacaccatttagtttcaaaaaaaatattcttatatattttttaataatataattaataattatttaatattaattttttttattattatattatattaatttttttatttttataattaatttatttttttttt

SEQ ID NO: 193912 - DNA, 457 bp, Gossypium hirsutum
cccacgcgtccggtgaaaagaaattttgaagaaaaaaaaatccatcaccgatctaagttccccaaattctgttcaaatcgccggcgaaattttgatctgaaaatctaaaaatgtcgtccacattcagcggcgatgaaactgctcctttttttggcttcctcggtgccgctgctgccctcgttttctcctgtatgggagctgcgtatgggacggctaagagcggtgttggtgtggcgtcgatgggagtgatgaggccggagctggtgatgaaatcgatcgttcccgttgttatggctggcgttttgggtatttatggtttgattattgcggttattatcagtactgggattaacccaaaggctaaatcttattaccttttcgatggctatgctcatctttcctctggccttgcttgtggtcttgctggtctctccgccggcatggctattgggatcgt

SEQ ID NO: 193913 - DNA, 396 bp, Gossypium hirsutum
gttcgttttccatctctgctgctctttcttctctaattattgaggaaatccaccgatcaaagttgttcaaatcgtgggtgaaagttttgagaaactaaaatggcgtccacattcagcggcgatgaaactgctccattctttggcttccttggggccgctgctgctctcgttttctcctgtatgggagcggcgtacggaacggccaagagcggtgtcggagtggcgtcgatgggagtgatgaggccagagctggtaatgaaatcgatcgtccccgttgatatggctggtgttttaggtatttatcggttgattcttgcggttattataagcaccgggattaacccaaaggccaaatcttactaccttttcgatggctatgctcatctttcctctggt

SEQ ID NO: 193914 - DNA, 550 bp, Gossypium hirsutum
  unsure (1)..(550): unsure at all n locations
cccacgcgtncgctctaattccctgtcaaagacccagcagcaatgaaacaagctcttaatagatgagttgagagttgagacccatcttcaaaatcaaactctaacactgaaactttgtcaggcggttctaattggaaccaaaaacaatgtcttgtacctcagtttcttcttttactgcttctctctttgtcccttcaaaaagttcatcttttgccaatcataagcgcagattcatccaatgttctcttggtggggctgtggtagaaccaaaagctttagcagaacccctgttgctcaatgctgttcgagggcaagatgttgaaagaccaccagtttggcttatgaggcaagcagggaggtacatgaagagctatcaaataatatgtgaaaaatatccttcctttcgtgaaagatcggaaaatgttggtcttgtcgttgagatttccctgcagccatggaatgttttcaagccagatggggtcattttattctccgatattctcactcctctctcagggatgaacatacctttcgacattatcaagggtaa

SEQ ID NO: 193915 - DNA, 594 bp, Gossypium hirsutum
  unsure (1)..(594): unsure at all n locations
cccacgcgtncgcccacgcgtncgagctggatgagaagaaactctcatgtccagttctgtagtagagatggaattcataaacaacaaccatcaactataaccccaaaagaaaccgatttcgtaaacaacatagaggaagaatgaaggggatatcttatcgaggtaatcggatttgtttcggtagatatgctcttcaagcacttgaacccgcttggattacatctagacaaatagaagcggtgcgccgcgcaatgacacgaaatgtacgccgtggtggaaaaatatgggtacgtatatttacagacaaacccgttacggtaagacctacataaacacgtatgtgttcggtgaaaggatcttccgagtattgggtagctgtcggtaaaccgggcagaatactttatgaaatgagcggagtagccgaaaatatagccagaaaggctatttcaatagcggcgtcaaaaatgcctataaaaactcaattcattatttcaggataggaatatagaaccaaaggaaagaagtcttgtcttgggaataaaaaaacaattgcgagtttgcttttttttttttggacaacaatatttttttttt

SEQ ID NO: 193916 - DNA, 885 bp, Gossypium hirsutum
ctggactctagactatatatagtttagataacccgcgaaaattttcgacatatttgattgcgatcttgagatagacagggcgctccttcgtctcaaaatctgaatagaacaatctttattatttgaagcggttctttcgggcagttatcaaaagagggcaattgcttcgaatttgatcaattgagatatatggaaacaaaaacaatatcaatataacaataatatatatatttcattcgaattcaaagtggattcttattttctatattctgtattctttttagattcaattagattcaagggctaagcactgaatcaaaaaaaaaaaaaaaaacagagaatagattcatgggcccctactttataatataatgaaaggcatgcttgatagaaagattacatcacataaagtcaacgaatgaggtgggttcattaacaactcacagatgaaaaaatggcaaaaaagaaagcattcactccccttctatatcttgcatctatagtatttttgccctggtggatctctctctcatttaataaaagtctgaaatcttggattactaattggtgggatactaggcaatccgaaacttttttgaatgatattcaagaaaagagtattctagaacaattcatagaagtagaggaactcttcctgttggacgaaatgataaaagaatacccggaaacacatctacaaaagcttcgcataggaatccaaaaagaaacgatccacttcatcaagctgcacaatgaggatcatatccatacgattttgcacttctcgaccaatctaatctgtttcgttattctaagtgcctattctatcttggggaatgaagaacttcttattcttaactcttgggttcaagaattcctatataa

SEQ ID NO: 193917 - DNA, 339 bp, Gossypium hirsutum
atcagaatcaatggaacaatcaaattgttagtggttcaggaaaaaaatgaagtaaatggggattttgcaagcgtcccaagtgccttttgcatcgacttgttcatcttcgtcttcttggccccctgctgcacctaaaacctttatccgcatgcaaatcatgggctgtgaatgtcaagttgagcaacgcatgcagttcgacgagtctgcgactgcgtaagatcggtggtggagttgttggggtcggtaaggaaggcgtacaaccagtgcgcattggtgaggatgataatggtcatgatacttctttatcagcaaccgcccaaccggaggaagatgaggacc

SEQ ID NO: 193918 - DNA, 354 bp, Gossypium hirsutum
cctatgcgtccgcttacactccttatttctaaaaggggagaatcctttaaccctcttggggctgctttactcttcccatagtcatgggggctcacccttgttttcaacctgtttcgaaatgtagcatcgagggaagatcaaatcagacggtggctgctgattgagatggaaccctgcttgtgtcacgtagtgctttcccttactacatgcttattgccctcgaagctggcagcctgttaagagcactgcttctcttactatccgttccagtcgtgtattctacctaccttgttcatctctgaatcttttgccattaataccttcattttcatctcctttgccgggttaaagata

SEQ ID NO: 193919 - DNA, 669 bp, Gossypium hirsutum
cccacgcgtccgcttttcttcactaaacccattaatggcttcttctctcagtctttcaagccacacagtggcttcattattcccttctcacacttcaaagccgcagttgtcactttctaaatccatcccaattctcaccaaatcatcacagtctcaatttcatggccttaaattctctcacccttcttctcttaaaattcctcgtttttccacttttaaaacctcgatttctgctaaggtgaataaaggtacagttcctccagcatttactttgaaagatcaagatgggaaaaatgtaagcctttcaaagtttaaagggaagcctgttgtggtttatttttaccctgctgatgaaacccctggttgcaccaaacaggcatgtgcttttagagattcttatgagaagtttaagaaagctggagctgaagttattgggattagtgttgatagtgcagaatctcacaaggtaaaatttctatgattttgagttgaaaatgtatatggttgtgtttcaaattttcgcgggaaaataaattggtgattaattggtaaaacaaccatggacatggtctttggggtaattgaattgagtgttacattgtattttattttttgtacttaaaaaatgataaattaattgttttattatatatcaaaaaataaattgat

SEQ ID NO: 193920 - DNA, 466 bp, Gossypium hirsutum
gattttcgtacggttttccaccttccctcatctccctcccttccttccttccaattcttagaggttgctttttccttccaattcttcttctttcttttttcttttgggaattttttgaattcgaaaattgattccatttttccatgatttcaaggtattgttgaggctgcatatttgaatagcacttaggaaaaatattaagccgaacatgagcacaatagaagtgagggggccttctgttagagggtatcgacgaaggaaggcactcctggatctcaatgttcctcccactgaaatcagggaacaggagggtacttcgcagcaggctggatctgagcaactgactactcaacccgtacagcctccaccatctgcaactattgatgttgaagctattgatgttgaagctattgatgatgatgtaattgaatcttccgctatagcattcgcagcggctaaaaacaat

SEQ ID NO: 193921 - DNA, 740 bp, Gossypium hirsutum
ctcggaaacaagtctgctatcaccgggggtagcgggaaggttgtcgatagtggccccgatgatcatatcttctatatactacactgaccatgggggtcccggtgtccttgggatgcctaccttcccttatctttatgctgatgactcgattgaggttttaaagaaaaagcatgcttcggggacttataaaagcatggtattctatcttgaagcttgtgagtcaggtagtatctttgagggtcttcttcctcaggggttgaatatctatgcaaccacagcatcaaatgcggaagagagtagctggggaacctattgtcccggagagtacccaagtcctcccccagaatatgaaacctgcttgggagacttgtacagtgtcgcttggatggaggacagtgacatgcataatctgcggacagagactttgcaccagcaatatgaacttgtgaaaaagaggactatcaatggtaattctgcgtatggctctcatgtcatgcaatatggtgatgtagggcttagcaaggacagtctctttgcatacttgggtacaaaccctgcaaatgataacttcacctttgttgacgagaactccttggtgccacctacaaaagctgttaaccagcgtgatgctgatcttgtccatttttggtataagtatcgcaaggcacccgaatgctctgttaggaagactgaatcccaaaagcagtttgttgaagccatgtctcatagaatgcatatat

SEQ ID NO: 193922 - DNA, 1063 bp, Gossypium hirsutum
agccattccaccattcaattaccctgtcaaccttgccgtttcaaaaatagcaccggctttaattgcaggaaactcccttgtactcaagccacctacacagggtgctgtttcagctcttcatatggtgcactgctttcacttggctggctttcccaaagggctcattagctgtgtgacagggaaaggctctgagattggtgatttccttactatgcatcctggagttaattgtataagcttcactggtggagacactggtattgctatctcaaagaaggcaggaatggtccctcttcaaatggaattgggaggaaaagatgcttgtatcgtactcgaggacgccgacttagatttggttgctgcaaacataataaaaggaggattttcttatagtggccaaagatgcactgctgttaaagttgtgttggtgatggaatctgttgctgatgttctggtggacaaagtgaaggcaaaaatcgcaaagttaacggttggaccaccggaggatgactgtgatatcactccggttgtgtcggaatcatctgcaaatttcattgaagggctggtcaaggatgccaaagagaaaggagctatattttgtcaggagtacaagagagatggcaatcttatatggccattgttgttggacaatgttcggcctgatatgaggattgcatgggaggaacctttcggcccggttttgccagttataagaatcgactccattgaggaaggaatccaccattgcaatgctagcaacttcggtctccagggatgtgtgttctctaaggatgtcaacaaagcaatattgattagtgatgcaatggagaccgggacagttcagattaattccgcaccagctcgaggaccggatcatttcccatttcagggtttgaaagatagtggaattggatcacagggagttaccaacagcattaacatgatgacaaagatcaagagcactgtcatcaatttaccaaccccatcttacactatgggttagtattgccaatcagggaatacaaacatacatacatacataaatataaattagttaaaatct

SEQ ID NO: 193923 - DNA, 542 bp, Gossypium hirsutum
  unsure (1)..(542): unsure at all n locations
aatnccggggcggaccaacccgtccggtttgttccggtttaaccggttttatggttcaactccattgaggaaggtatccaccacggcaatgctagcaactttggactccaaggatgtgtcttcacaaaggatgtcaataaagcaatattgatcagtgatgcaatggagacgggtacggttcagataaattctgcaccagctcgtggaccagatcatttcccatttcagggggggaaagacagtggaataggatcacagggggttaccaacagcattaacatgatgacaaagatcaagagcacagttatcaacttaccaaccccgtcttacaccatgggttaggcatttcataaatatcagaataacaaccagggttatcttagttaagatagtatttgtgttttagagcttatttccatatgatgtttagtgaaaaaggataaaaaatggagacaagcaaataatgaagaccagtacatatgcataatatattggctctgntatcgaatggatcaaaagttcttcgagtgatggttttgagg

SEQ ID NO: 193924 - DNA, 786 bp, Gossypium hirsutum
tttctctttttgttgcctttttacctgaaaatatactccaattttaccataatcagtttctttatactctgaagaagcctatctcccgggattgtttctataatttacaaaagaaaaataataatatctggttaatttcgtcaggggctaagcttatttgcttccataaattgttctatttagttcttctttcaatttattggttctgggtattcttggttcttgttcgatcgtttattttcaatttgtttgaggatggtttgcatggtttctcgcactggaaggcacttgcagcgatacgataacctaggccgccgccaagttgtcgggtgcattccctatagatacaaatctagcagtgatggaaccatgactgatgacttggaggtacttgtgatctcctcccagaaatgtcaaaaaatgatgtttcccaagggtggctgggagcttgatgaatctagagaagaagctgcattaagagagtcacttgaagaagctggtgttctaggcaatgttgagtgtgaactggggaagtgggacttcataagcaaaagccatggcacattttatgaaggttatatgttccctttgcttgtgaaagaagaacttgatttctggcctgagcaaaatctgagacaaaggacgtggatgaatgttaaagaagccagggatgtgtgccagcattggtggatgaaggaagctttagacatattggttgaaagactcaactcattgaagcagcaaaatgaacaaaattatccaaacatctgctctgatttagtggca

SEQ ID NO: 193925 - DNA, 428 bp, Gossypium hirsutum
cccacgcgtccgtgtttacaggatgttcatttcctcctgcaagaggctgagaatcatgaaaggaggagaagctagagggttgggctgtgtatgagccaccaaattatttaacaagaaagaaagttttctttggctttggataatccaaattctgcaaggaagatcaatttggtcttcctggaaagtgagggggctatttgctagagcaaaatttctcaaagatttgacgacatggctggcctttttagcctcctctatgcatgtcaaatatctatacttgttttatagcacaaaaccaaaaaggcacgatattaaagaatagttaagatccaatccaattgtacaaaacgacagtacactattgctttatcattttttccagtatacgaagaagattaaataaaaaggcaatagaatacagtttatgc

SEQ ID NO: 193926 - DNA, 421 bp, Gossypium hirsutum
cccacgcgttcgcaaaaggaccaaggcactgttggtaaagcttttaacaaacccctctttgggtgggtgtttaaacaaggaaactcaccgaagtgaaagggttcaaaacaaaaggaaaagaagagagaaagcaacttttttttttccttcttgtgcgtgtggggaacttatttttgaaggatcagaggcatatgaaattgaactaaatttttgttggtcttttttttttgcaacaaatgatggcaggaaaccctagctggtggagcatgcatttgcatccaccttctcaacacccttcaactttgttaaccacaccatccccatccctcttccctcaatatgttgttgaatattcagctacttctttgcctgataaccaagagcttcctcagtcatgtagccaactactctcgggtggatt

SEQ ID NO: 193927 - DNA, 653 bp, Gossypium hirsutum
  unsure (1)..(653): unsure at all n locations
gttccagtaaggataacagagtttgaaataatgtctgggtttttctttacattgctgctttgtttcatcatttttaatggttactcagagggtagccatggatatcagcaacagcaatctgctgttgttgttggaactgtgtactgtgatacatgtttccagtctgacctctcaaggccaacccatttcatttcaggtgcaactgttgaagtggaatgcaaagatcggaagagctcaagggcaagctttaggcaacaagtgaaaaccaataggcatggggaattcaaggttcatttgcctttttcagtgagcaaacatgtgaagaaaatcgagggatgtgaagttaaactgattaaaagcagtgaaccatattgtgcagtggcctcatctgctacttcctcttcactccatctcaagtcaaggaagcaaggaacccatgttttctcagctgggtttttcaccttcaagccattcaaacaaccaaccttatgcagccaaaaaccaagtgttcatcccaaccagcttcttccgccgcccattcttcctccaaacccattgcagcctccaccagctccactagttccagacccattgcagcctcctccacaacctgcagcaccatccttgccgccggttccangaatatctcctcc

SEQ ID NO: 193928 - DNA, 766 bp, Gossypium hirsutum
gttccacataaaggttaaacaacaacagtatataaagttataaacaacatattcttattgagagctgttccagtaaggataacagagtttgaaataatgcgcaactgttgaagtggaatgcaaagatcggaagagctcaagggcaagctttaggcaacaagtgaaaaccaataggcatggggaattcaaggttcatttgcctttttcagtgagcaaacatgtgaagaaaatcgagggatgtgaagttaaactgattaaaagcagtgagccatattgtgcagtggcctcatctgctacttcctcttcactccatctcaagtcaatgaagcaaggaacccatgttttctcagctgggtttttcaccttcaagccattcaaacaaccaaccttatgcagccaaaaaccaagtgttcatcccaaccagcttcttccgccgcccattcttcctccaaacccacttctgccgccgcccattcttcctccaaacccacttctgccacccccagtgctccctcctaacccatttcagccgccaccagctccactagttccaaacccattgcagcctccaccagctccactagttccagacccattgcagcctcctccagaacctgcagcaccatccttgccgccggttccaggactagctcctccaccatcgtccccgtctccaccgccagacttcccatttccacttccaccattccctttccttcctgtaccccccttcccaggtgtgcccccatcgaaatcttctccttga

SEQ ID NO: 193929 - DNA, 1143 bp, Gossypium hirsutum
catttctctctataaacttgtacggccaaagattccttcccagcaaaaaatcggaaagaaagaaaaaacatggggatgccgcctgccacgtgcgcctccgcctcttcctcctccatcgtcaactcttctccgatcggtggcgctggcggaggaggtggagagatcatgctttttggagtcagagtggtggttgattccatgaggaaaagtgtgagtatgaacaacctttctcaatacgaacaacctcatgagtcgaacaagcataacaacaagagcaacaaagatcaaggcgatgataacctcaccgctggttacgcctccgccgacgatgccgttcctcactcctctggaaatcgagagcgcaaaagaggggtgccgtggacggaggaggagcacaagctgtttctggtaggactgcaaaaagtagggaaaggagattggagagggatttctagaaacttcgtgaagactcgaactccgacacaagtagcaagccatgctcagaaatactttctccgacgaagcaatctcaaccgtcgccgtcgcagatctagcctctttgatatcaccaccgatacggtgcaggcaattccaatggaagaagagcgagttgatcgacaagaaaactcaactcagccatctgaaaccaatgtgtttcccattatgccggcgacttttcccatggcctttaaccaggtagttccgccggttccaattcagaatccgactgaaaatctcacattagcacaggggaatcaattgaataacaatgttccaacggcaaatctcatccgtccggttccaaatttcccagctcttcagagatccgatctcaacacagacttaaatcctgcgacggatcctttatcgctgtcactcaagctgtctttgcaatccgatcaaatggattcatcatcatcttcaacttccaggcattctccatttcaggtgatgccaaactttagcagtggagataacaataacatcatcagtgttgcttaagaatgacaataattatataataagcaaaagcgacacaaagcttattattattagagcttaaatttggatttagagaaaataaaaaaaaagacataagtttaaattaggtaactggtttttgaatcccttttgttttcatgt

SEQ ID NO: 193930 - DNA, 436 bp, Gossypium hirsutum
  unsure (1)..(436): unsure at all n locations
cttctctacattccctccaaaactttctatcanactgaaaacaaccgtaacaacgcacgacagtcgcggccattccacccttatccaccgctacatcggttaccgacctctccgttttggatagcaccactgttgctctcataggtggaggttcagtcgctgccttagcagcggttctctccttcactgacccggaacgccgacgtcgtcttcaggcggaagatggccgggcgcgcgggaaggaagtcgttaggaattacttcaatagttccggtttccaaaggtggaagaagatttatggagagaccgatgatgtgaataaagtccagcttgatattaggttagggcattccaaaacccctgaaaatgtgatgaaaatgttgaccgatgatggctcactgaatggcgtcactgtttgcgatgctggctgtggcac

SEQ ID NO: 193931 - DNA, 433 bp, Gossypium hirsutum
cccacgcgtccgaccacgcgtccgagaaaatggaagtttcatctttacgccattggaaggtgatcccaatcctgcttattacccttcaattcactactaacatggtcttgagcttaattgatgcaccatttgacaaccaaagaaacattgagtacatcaaatcttcatgcagctccacaacttatcccagactgtgctatcgctcactctcaatctacgcaaacaaaatcgacaccagccccagattgttagtggatactgccctcaatgttaccctcaaggccagcaaataacctcaaggttgatggtgaagatctctagaatccacggtttgaggcctagggtagctgctgccatggcagattgcattgaggtgatcggggactctgttgatgagctccaacagtctatagaggaacttggtcacgttagc

SEQ ID NO: 193932 - DNA, 448 bp, Gossypium hirsutum
cccacgcgtccgcacgaatataactcatttttcggaattgcttttctttgcgctttttagcaggttttttcatggcttcccttactgtacacctgcttccgccattgcttttacaagatagaaagacccttttcgggacttttccaaaactcccagtttcttataccggagggaggcgaaactgtgctgtttttgtgaaggctaccggtgatagctcagagtcttctacctcacttagtattgtcaagtctgtgcgaaatgtttgggataaatctgatgaagatagggtaggtctcattggtctgggatttgcagctattgtggccctgtggacttcaactaatttgatttcggttattgacaaattgccaattatcccaaatgtgctggaaattattggcatacttgtttccttggggtttatttaccggtatctattgttcaaacc

SEQ ID NO: 193933 - DNA, 1275 bp, Gossypium hirsutum
caaggactcaatcatggactcaactgtgaattgcagggagaatggtggactgtttgatgtatcccatatgtgtgggctgagccttaagggaaaggactctgtttcattccttgaaaagctcgtcattgctgatgtagctggccttgcccccggaactggaactctaactgtttttacaaatgagaaaggaggggcaatcgatgattcagtgattactaaggggaaagatgatcacatatatctggttgtgaatgcaggctgcagggataaggatctggctcacattgaagagcatatgaaagcattcaaggccaaaggtggtgatgtctcgtggcacatccatgatgagagatctcttctagctctccagggtcctcttgctgcccctgttcttcaacacctgacaaaggatgatttgagtaagttatattttggggaattccgaatattggatatcaacggtgcaacatgttttctcactcggacagggtacaccggtgaggatgggtttgaaatctcagttccttcagaaaatgctctggatcttgccaaagcaatcttggagaaatcggaaggaaaggtaaggttgactccgcttggagctcgagacagtctccgactcgaagctggcctatgtttatatggcaatgacatggaacaacacatttcaccagtcgaagctggactgacatgggccatagggaagaggagaagagcagaaggtggattcttaggagctgaggtaatcctgaaacaactggcagagggtccgtcgatcaggagagtcggcttcacctccaccggcccacctccaagatctcacagtgagattcaggacgagaaagggaacaacattggtgaaatcaccagcggaggatttagcccctgcctgaagaagaacatagcaatgggatatgtgaaatctggattacacaaggcaggcaccaaagctaagattttggtaagaggaaaggcctatgatggagtagtcacaaaaatgccttttatacccacaaaatattacaagccatcctaagatggaatttacgctttcagctcctcagttttcctgcgttgtttcatctgcaatcaaatgccaatgccctgtttctcttttaactggcatgacattacttgaacatgctggtgtttattgcttgtattctgttcaattccaatttctcgaataatgacaatgaatgttatatatcactaataaagggaaagattgaaacctggcaaagcttcattaaaaataaattatttctgatttca

SEQ ID NO: 193934 - DNA, 405 bp, Gossypium hirsutum
gcgattctgtttaaccaaaattgattctttctctcccaatttgtgagatcttgttctttggcagtgatgagtaagggaccgggactgttcgtcgatatcggcaagagagccaaacatctcttgaccaaagattatacgtcccagcggacgggcacggcttccacttatactggcgctggagtggccatcacatcaacttctctaaagaaaggaggactttctactggggatgttgctgccctatacacgtacaagaacactcaccttgatgtcaaagtcgataccgactctaatatctcgacgaccatgacattcactgatattcttccctccactaagactattgcgtcatctaacgcgcctgattataacgctggccagctggacgttcagcattttcatcac

SEQ ID NO: 193935 - DNA, 736 bp, Gossypium hirsutum
cccacgcgtccgatcataataaattgcaaaatttaagtctttccccaaactgaaaattgaagcttgagagcccaggcccggaatccgaactgactgtaatgaagttaaagccaatagaagcaaccccagaaagcttcaaagaattcggtcaagtcattgaagcatccccagacggagcagaattcggtccgactgatgctcagctagacctttccaaaggaattcccaggttttacatcatgaaccttcagaaccggccgctcaagttttcaacgattacgcatcatgccagtgtgacacaatgccttggatctatagggggtcatgtttggtatctcggaattgctaagccttccttggtggactcggaagaagttgagagtgagaaagggaagatagcggtgcagcctcgttgtggtcatttctacgtgcctccagccattgaagatgttcgtgtttttagaattgcaggtcctaagtttatcaaacttaatcgtggaacatggcacgccgggcctttgtttaaagctgatgctatggacttctacaacttagagctaagcaataccaatgtggtggatcatacaacacatgtgttcaagaaggaaaacggagtcatcttttcaattgatgagtagctttgttcgtccgatgccgaagatgttgagagatgtgattttggagagtgaaaacttttccaacactatcaaatatgttgattttgcgttttattttt

SEQ ID NO: 193936 - DNA, 406 bp, Gossypium hirsutum
aaagatggcaagggaattggcattgaaagaggggcttatggttggaatatcatcgggggccaacactgttgcagcactcagacttgcaagaatgcctgagaacaaaggcaaattgattgtgactgttcatccacgttttggagagcgttacttgtcatcggtcctgttccaagaactaaggaagggagctgaaaacatgcagccagttgcagtcgactaaatgccttttcaggggacatgttaggaagctccctcgggaaacaaaagccctgtctgttaataccaaatgtttccaccgaaacattggtatccattgttattatgaatccgctgtgcacccattcgttttagtttcaatgtttaactctgtctgaaatgaaatcagtaataattggaatttgcattg

SEQ ID NO: 193937 - DNA, 1491 bp, Gossypium hirsutum
ctttgattataatttttccacgaatatttttccgacttttttgttttccttttggctatttaaaaagtccaccaaacaggtctttccttcacccccaccttctctccctctcttcttaggtctgctgtatcttagttcttgattaattagccaatcacagcagccatgtctctcctcaatgatctcatcaacctcaacctcagcgacaccactgaaaagatcatagccgaatacatatggatcggtggatctggtatggatctgagaagcaaagcaaggactttgcctggaccagtgacggacccttcaaaactcccgaagtggaactacgatggttccagtaccaatcaagcacctggagatgacagtgaggtcattctttatcctcaagctatattcaaggatccatttagaaaaggaaacaacatcttggtgatgtgcgatgcttacacaccagccggcgaacccattcctaccaacaagagatttaatgcggccaagatctttagccaccctgatgttgttgctgaggagccttggtatggtattgagcaagagtacactcttcttcaaaaggatactaagtggcctcttggatggcctgttggaggattccctggaccacagggtccgtactactgtggtgtaggtgctgacaagtcctttggtagggacatcgtggactcccactacaaggcttgcctttatgctggcgttaacatcagtggaatcaacggtgaagttatgcctggtcaatgggaattccaagttggtccatctgttggaatatctgcaggtgatcaaatatggattgcacgatacatactcgagcgaatcactgaaatcgcaggagttgttctttcttttgatcccaaacccattccgggtgactggaatggtgctggtgctcatactaattacagcacaaagtcaatgagaaatgatggtggcatcaatgttatcaagaaggcgattgagaagttgggtctgcgccacaaggagcatattgccgcctacggagagggtaacgagagacgtctaactggtcgtcatgagactgcagatatcaactcattctcatggggtgttgcaaacaggggagcctccatccgtgttggtcgtgacactgagaaggatggaaaaggctacttcgaagacagaaggccagcatcaaacatggatccttacgttgttacatcaatgattgctgagaccaccattatctggaagccttaagagggggtggaaattgaaggttgtgaaagacgagaaggaaaaacctcattcagattaataaaaccccctctctcatctttctttgttgggccactggttgaacttgtattttattgctttggtttgctggtttgcaatttaaattgtgcgacttattattattattatcattttagtttatagtcttatgctgctgctgatatgttcacatgaacgaatttatcgcgttttaaataaaattgtagttgattgttc

SEQ ID NO: 193938 - DNA, 693 bp, Gossypium hirsutum
tctggtttcagcgaactgagtcagtcacccggacgagttaacgaacgaaagaaagttcaccatggggtcggtccccaatccgggtgagttaaccgagttaactcagcctagtttagatgagttccagcatcaaacatctcttatggcgggctgcactcttatgtggaaagaactctccgatcacataagttcacttgaggcaaatctgatgagacaatcggaggccttgaaacgcaaaatcgaagcactagactcggagaccaagacctcactcgactcactcaagaagagagaactcagcatcgacgacagcgtcaagattgcagtcaaccgagtcgagcttctaaaaaaagatgctttgaaaaccttaaacgacgacaatcccgacggagaagttgacaacggagacggccttttgcaaatcctgaaatcaacgtgtttgagaatggaagctaaagagttctggaactttgtctccggccggaagaaagatatcgaattattaagagagaaaattccagaagctttatcggaatgcatcgatccggcgaggttcgttatggaggccatatcggaggtatttccggtggacaaaagagggaatgagggaggaagtgatttagcttgggcttgtgttttggttctaaaaagcttgattccggcggtggttgatccagtgatcggaaaatcgag

SEQ ID NO: 193939 - DNA, 769 bp, Gossypium hirsutum
cccacgcgtccgcccacgcgtccgcccacgcgtccgcccacgcgtccgcttttttttcttttcgactttcggctactgagtcaccaaacgagttaaggaaaagagagacaagtttcaccaaaccatggggtcgatccccgatcctggcgagttgaccgagttaacccagccgagtttcgatgagttccagcgtcaaacgtctctgatgaccagctgtactctcctctggaaagaactgtcggatcacataaattcacttgagcagaacctgatgaagcagtcggagaccttgaaacgcaaaatcgaggcactggactcggagaccaaggcttcactcgactcactcaagaagcgggaactcagtatcgaggacagtgtcaagatcgcactcagccgagtcgagttcaacaccaaagctgccatgaggacccttggagacgacgttgaagacaatccggacggtgaggtcgacgacggagacggacttttgcaacacttgaaatcaacgtgcttgaaaatggaagctaaagagttctggagcttcgtgatcggaaaaaagaaagaaatcgatttgttaagagagaaaatccctgcagcgttgtcggaatgcatcgatccggcgaggtttgttatggaggccatatcggaggtatttccggtggacaaaagaggaaatgagggaggaagtgatttagcttgggcttgtgttttgattctggaaagcttaatcccggtggtggttgatccggtgataggaaaatcaaggatc

SEQ ID NO: 193940 - DNA, 546 bp, Gossypium hirsutum
gcttctgcttctgatatttctttaggttgtgtttggtatcgtcattttagatttatcatcaatggcggagactgaaacgtttgcctttcaagctgagatcaatcagcttctcagcttgattataaacactttctacagtaacaaggagatctttcttcgtgaactcatcagcaattcttccgatgccttagacaagatcagatttgagtctttgacagacaagagcaagcttgatgctcagccagagttgttcattcatattgtgccagacaagactaataacaccctatcaatcattgatagtggtgttggcatgaccaaggctgatttggtgaacaatttgggtaccatcgcatggtctggcaccaaggagttcatggaggcatcggctgcagaacctgataaagcagtcagagaccttgaaacgcaaaatcgaggcactggactcggagaccaaggcttcactcgactcactcaagaagcgggaactcagtatcgaggacagtgtcaagatcgcactcagccgagtcgagttcaacaccaaag

SEQ ID NO: 193941 - DNA, 392 bp, Gossypium hirsutum
  unsure (1)..(392): unsure at all n locations
gncaccactcaccacccaccattcttagctttcttatctttaccggaaaagatcgtcatggattccaatccccaatcttgtgaaaaccctgaaatcaaatcagccgaggtgcaaacccaaaaccaaaatcaagtttctcaatccccatttgctactgcatctctttctttatcttccttgcccccaaccctacctactcagttcttcatccaacccaaaatcttatctttattctctgctcaatgtccctccaaagttaaagttccaactcaagcttcctctctttctcatctctccctttcttcaacttccccttccccttccaaactttccttcaaatccacctttgccaataaccctttccagtcccctctctccttaggtccgggccg

SEQ ID NO: 193942 - DNA, 435 bp, Gossypium hirsutum
caatcttgtaacggtctttgcctgatatcatatcaagaacgaagggcaaagggcgcggcggcttcggtcggagtagttgcttatctgcgactgagctttctcgacgctccaccatcatcacaaaccgccatgggtctactatccctctcatcttctctaaccccttccttcccctctcttcatctcaaacctaaacataaactctctcttactttcccaaacccttcctttgcgtgctccgcacccacatccaaacccctctcctcatctctcaaactgaaacctactgcgaattccctcaacttttcatcccctcagagccccgccaccgccatgcgaggggccgaggccgacgctgtggcgttgttgctcagggagcgaatcgtctttctaggtaacaacattgatgactttgcggccgatgccattataagt

SEQ ID NO: 193943 - DNA, 483 bp, Gossypium hirsutum
ccggcccgcatttccggggcggacgccacgcgtccgaatacaaatacccattttcaccaccatcaaaccacatcccacagacatgggtgcccacgaagaagaagccggaggtgaagagtacttgtttaagatcgtgctgatcggtgactcagctgtgggaaaatcgaaccttttgtcacgttttgctaggaacgagttcgacaataactcaaaggcaactattggagtagagttccaaacgcaatgcgtggaaattgatgggaaagaagttaaagcacagatctgggacactgctggtcaagaaagggttcgagctgttacttctgcttactatagaggagctgttggtgctcttattgtttatgatattactaggaggagtagctttgacagcattaaacgttggcttgatgaacttaccactcattgtgaaactacattgacaagaatgctggtggggaacaaatgtgatttggagaacat

SEQ ID NO: 193944 - DNA, 1001 bp, Gossypium hirsutum
gtgatttgggacagacgtataactcgctgtccacacttgagcattacatggagagtggagcacagagtgtgttgtttgtaggagatctttcttatgccgatagatacaagtacaatgatgttggtatacggtgggattcatggggtagattcgtggagaaaagtactgcttatcagccatggatatggtctgctgggaatcatgaaataaaggacatgccttatatgaatgaagttactccattcaaatcgtatctacatcgatatcctacgccttatttggcttctaaaagcagtagtcctatgtggtatgctattaggcgtgcatctgctcatataatcgtgctatcaagttactctccgtttgtgaaatatacacctcaatgcaaatggctcgaggaagaattaaacagggttgacaggaagaagaccccatggctcattgtgcttgtgcatgttccgatctacaacagtaacgaagcacatttcatggaaggtgaaagtatgcgagcagtgttcgaagaatggttcatccatcacaaagttgatgtaatcttttctggtcatgtccatgcttacgaaagatcctatcgaatctcaaatataaggtacaatgtatcaagtggtgaacgtttccctgtaccggacgaatcagctcctgtttacatcactgttggagatggtggaaatcaagaaggtttagcaggaaagtttagagatccccaaccggattattcagcattccgggaagccagttacggccattcgacactggagatcatgaacagaacacatgcactctatcactggaaccgaaatgatgatgggaaaaaagtggcaattgactcatttgtattgaacaatcagtactggtcaagtaacgtgcgagaaaggaaactgaagaggcattatttgaatgggatgaggatgattgcttcttaatgaaaagaaaatatgaaaaatatcatctctggtagtgcttgatgaagtttcattgcaaga

SEQ ID NO: 193945 - DNA, 744 bp, Gossypium hirsutum
gcgaccggtcgcttattgcatctcatccctacaagtttttttgggttacctattatgaacttaaatggaatgtaaatagatattaatggccccgactagtataaattgatttacttgtataaagcccaatacttgcttttgtgttttttacttagttttttgcacttaaatctcttttgatggcagatgctattcgattattatcatcgccgtcgtcttctttaattcattcgctgcgtttctcttcgccttcactgctcaccactttccacttcgcttcgaattatccactatcgtctcttggaccaaccaatcagaattcggataagattttttcttattcttcttctattggtcttgctccgcttgctctgattcccagaaaaccatcgctctctttcaaggtgcatgcaacagtcgaagaaactgagcagccaaaatggtgggaaaggaatgcgggaccaaatatgattgatattcattctacaaaagaatttatcagtgccttaagtgaagctggggatagattagttattggagaattttatggaacttggtgtgcttcctgcagagcattatttcccaagctctgcagaacggcgcaagaacatccggaaattatattcctcaaagtaaattttgatgagaataaacctatgtgtaaaagtttgaatgttaaggtgcttccttatttccacttctatcgcggagcagacggacagctagagtcctttttttgttcac

SEQ ID NO: 193946 - DNA, 647 bp, Gossypium hirsutum
  unsure (1)..(647): unsure at all n locations
cagtatactgttttttttttttccccattctcatagctttcatcatcttcaaatggctaaatcacttgtcattgttatgttatgttttctcttagtaattgttttacttggagaaatccaggcatcaagcccttctcaaaaacaaagacaaggcaaccatggaaatggaatgtatggtgccacccaagggagccttcgtcctcaagagtgtggtccaagatgcacacagagatgctcagctacagcatacaagaaaccatgcatgttcttctgccaaaagtgttgtgccaagtgcttgtgtgtgcctccaggcacttacggcaacaaacaatcttgcccttgctacaataattggaagaccaagagaggaggccccaaatgcccttagatccctaactatatctatgttgttctctagttaaagtgcttaattatccaattataggccatcgatcttcttcttttttccctaaatgatggtaaattgtactagtatttncttttaaaaggaagtatgtgctttgcatttaaaaacttggctttttgggtaaaggtatctaaaaagaatggaaagtggtatgggttaccttttttgtaaacgcaactaatatgaaaaatgaattagtaaaaatacattttctctattt

SEQ ID NO: 193947 - DNA, 596 bp, Gossypium hirsutum
aggattttcaatccattgatctttgatttccatttagaggttaattgggtcatatcttatgttggagaagggcgttcgtatttaggttctggtaagaggaaaagccatgagggtatgataaagcttggtttcagcctagtaaaagggaaagctaatcatcctatggaggattatcatgtcggtaagttcatgcagattctatagcatgagttagggcttttttctatctacgatggtcatttggtagatattatatcatcttacctaaagaagcactcgcttgccaatatcctaaagaaggtgggatgtgccatatcattttcgaatggcttgcttttattatttttaaaacatcatatgcttacattttctcacttattattggaagagttttaggttgacccctttagacttatgagaaaacagatcaggcaattctttcacaaagctcagacttggtcgtggtggatccactgttgtaactacaacattgataaatggaataaaactatgtgtggaaaacgtaagagattcacgtgttgttctttctagagggagtcaagcaatacagatgacaacagatcatgaacccatca

SEQ ID NO: 193948 - DNA, 608 bp, Gossypium hirsutum
  unsure (1)..(608): unsure at all n locations
cccacgcgtncgcaaacatcaaagtgtaaagcatttgagcattaaaatcatacatgacatagctttttacatgtcatcttcaacatcttcactgcaatggcaaccatgctctcactctctccaaatcctcccatcacaactttaccctctcttcgttccagtttcaagggaaatctgaggaatttaaaaccaaacccttttcacattattcgtatcaggaccaagcagcaaggggtagaggcacgaaaggggacacggtctttagtggttgtgaaccaagcagcaacaacccaagtgtcggttacagcttctaatatgaggtttcggttggacaacctgggacctcagcctgggtcaagaaagaaagggaagagaaaggggagaggaatatcggctggacaaggtgggagctgtgggtttggaatgaggggtcaaaaatcacgttctggcccaggtgttagaaagggatttgagggtggccaaatgccactctataggcgtatccccaaattgagaggaattgccggaggtatgcatgcgggattaccaaaatacataccggttaactcaaaagacatcgcaacagctggatttcaagagggagatga

SEQ ID NO: 193949 - DNA, 597 bp, Gossypium hirsutum
aaaaaataccccaaaccatcaagcaaaatcatatagccgctccttttcgcgctttctctctctctctgaaagtttcagctctagagcctctggcttcctcttctccttctttttgcttaccagataatgtaaaagaatataacaaagcttttcccatttataagcccaaaaggagcctttctttcttgtccttgaaaaagaatgactttgagtaggttctggggttggtttcttatccacattgctctgtttttaagcttgtgttatgctgaggatccatttgttttctatgattttgaggtcacttacatcactgcttctcctttgggtgttccccaacaggttattgctataaataacaagttccctggccctactatcaattcaactaccaacaacaatgtcgtcgtcaatgttcgaaacaaattggacgaaagtttacttatgcattggtctgggattcaacagaggcgtagttcatggcaagatggagttcttggcactaattgtccaattcctcctaagtggaattggacttaccagttccaagttaaggaccaaattgggagtttcttttatttcccatcactgcatttt

SEQ ID NO: 193950 - DNA, 608 bp, Gossypium hirsutum
  unsure (1)..(608): unsure at all n locations
catatgttcaattactggaattgactgcatgggaggttttcacccttcattggatgccattcttgaaggactcggttatgcagctcctccaatcatggcccttcttttcatattagatgatgaagtagtgaaactttctcctcatgctcgtgcaataagagatgtcgaggatgaggaattaaggagcttcttttatggaatggcaccttggcagttcatacttatggtcgctgcaagctcagttggagaggagcttttctatagggcagctgttcagggagcattggctgatatattccttagaggcactgaattggtttcggatgctcgaggaatggcagctttgactggtgtgctacctccctttgttccatttgctcaagcatttgcagcagtaataactgctgctcttaccggttctctatattatgtggctgcctctccgaaagatcctacttacgtagttgcaccagttcaacgatcccgttctgctcgtgaagatctgaaaaaactattcgcagccttgtatgagacgagacaaatgaaaaagatctactctncgcttttggaaggaatattggcccttttaccttggatttgaatggatc

SEQ ID NO: 193951 - DNA, 1340 bp, Gossypium hirsutum
cgaccgattcgtccacgcgtccggaaaaagtctctgacacttgcaacacaataaactacacataaaatctgtgcctgcccttttctctgcacacctcgggatatcagtttcaactccactcatcccacgggttgagtaccgagtccatatatcgttaagttcaaggaaggaacttgggcatcatgggtcttaaggcattagactatgagacaatgaatgaaaacgtgaagaaagttcaatatgcagttagaggtgagttgtatcttcgagcttctgagcttcagaaggaagggaagaagattattttcacaaatgttggcaatcctcaagctcttggacagaagccactgactttccctcgtcaggtggttgctttgtgccaagctccatttctgctagatgatcctaatgtaggacttatatttcctgctgatgccattgcaagagcaaaacattatctttcgttgacttctggtggtctaggtgcatatagtgattccagaggtattccaggcgttaggaaggaggttgctgaattcattgagaggcgtgatgggtatcctagtgacccagagctcatatttctcactgacggtgccagcaaaggtgtgatgcagatcttgaattgtattatccgtggtcaaggggatggggttttggttcctgttccacagtatccactttactcagctacaatatctctctttggcggttcacttgttccttactacctagaagagactgcaaactgggggctggacgtaaacaatcttcgtgaatcagttgcacaggctcgcttcaaaggaataactgtgagagcaatggtaattattaaccctgggaaccctactggtcagtgtctcagtgaagctaatttaagagaaatattgaatttttgttaccaagaaaacttggtattacttggagatgaggtttaccaacagaatatataccaggacgagcgcccctttatcagttctagaaaggtgttgatggatatggggccaccaattagcaaggaagtccagctcgtttctttccacactgtgtctaaaggatattggggtgaatgtgggcagcgagggggatactttgagatgaccaacattcctccaaagacagttgacgagatatacaagattgcatcaatatccctcagtcctaatgttcccgctcagatatttatgggattgatggtcaacccactcaaacctggagatgtttcatatgatcaatttgttagggaaaagcaaaggaatccttggatcattgagaagaagagcagggataatgactgatggatttaacagctgcaaaaatgtggtttgaaatttcactga

SEQ ID NO: 193952 - DNA, 414 bp, Gossypium hirsutum
  unsure (1)..(414): unsure at all n locations
cccacgcgtncgcccacgcgtncgaaaagtctctgacacttgcaacactataaactacacataaaatctgtgcctgccctttgctctgcacacctcgggatatcagtttcaactccactcatcccacgggttactctcgtttacggagttttttttctgttctgcacttccctgtttagttttaagggtgaactgtttggattttctggttgagtaccgagtccatatattggtaagttcaaggaaggaacttgggcatcatgggtcttaaggcattagactatgagacaatgaatgaaaacgtgaagaaagttcaatatgcagttagaggtgagttgtatcttcgagcttctgagcttcagaaggaagggaagaagattattttcacaaatgttggcaatcctcatgctcttg

SEQ ID NO: 193953 - DNA, 446 bp, Gossypium hirsutum
cccacgcgtccgcccacgcgtccggaaaaataatcccatcatcatcaacaacagcaatgcttcacattttcctccttttctcccttatcttctcttccaccaatgtcctcgcccaggacttttgtgttgcgaacacggcttcgggcattgttaccccatcaggttacccttgcataatggaagcaaatgtaacctccgacgacttcgctttttcgggtctcggtctcccaggtaatacgtcgaacatcataagtgcagctgtgacaccagcattcgttggtcaatacccagccgtcaacggactaggcctgtccgccgcaaggctggacttggctccgggtggtgtaatcccaatgcacactcaccctggtgccaacgagctcctttacgtggtccatggtcacatcacttgtggggtcatttcatcggctaataaagcttacttg

SEQ ID NO: 193954 - DNA, 656 bp, Gossypium hirsutum
cccacgcgtccgacttttaacccctgccgacactctcaccattttctcagcaaacttagcctatgaaaatcaccattacaagtcccaaagaagacccccgctaattctaaaagaaagaaccagagttttctttctctttagtttacgtttattgtccttttggaatttttgatactaaaaaaaggaagcaacgaagaagggaaatggagggcaaagaagaggatgttagattgggagccaacaagttcacagagaggcaaccaattgggaccgcggctcagagtcaagatgacgggaaagactacactgaaccaccaccggctccatttttcgagcctggcgagttaacctcatggtctttttatagggctgggattgccgagtttgtggcgactttccttttcttgtatatcactattttgactgttatgggagttgttaaggaaaaaactaagtgcccaactgttgggattcaaggaattgcttgggcttttggtggtatgatctttgctcttgtttactgcactgctggcatttcaggtggccatatcaacccggcagtgacttttggactgttcttggcgaggaagctgtcgttgacgagggcaattttctacatggtgatgcagtgtttgggcgccatatgcggggcgggt

SEQ ID NO: 193955 - DNA, 441 bp, Gossypium hirsutum
cttctattctactaccacttccacacaacaacagcaatggcaattagaaaaccatccaaactgcctcaaaccgcagttctgaagcaaatcctgaagagatgttcaagcttaggcaggaaacatggatatgacgaagatgtgctcccacttgacgtaccaaaaggtcactttgccgtttacgttggtgaaaacagaagcagatacatagtccctatctcattcttgacccaccctgagttccaatgtttgcttcgacgagcggaggaagagtttgggtttaaccatgatatgggccttaccatcccttgtgaagaagttgtttttcgctctctggcatctatgcttagatgaaaatgggaaaaatgaatttattgaggtgcgacatgaaggggttctgcctttgcatctgttgagaaagatgaccaatataagcatagcaac

SEQ ID NO: 193956 - DNA, 421 bp, Gossypium hirsutum
ctttcttacaattttaccattttcttatcttcttcttcttcttcttgagacttgcctagaagatcactgagaaacaaatacagatagaaaaaatggcggcctcaataagtggaattggaattgggttaggtctttcttgttcttccaacctttctaaatcacttcattcttcacaatcctctggttttcgtgttaagatgactgcttctgttgaagataaaaagaagaattatacccttcaaaaatctgaagaagctttcaatgctgccaagaatttgatgcctggaggtgtaaattctcctgtccgtgcctttaaaaatccgttggtggacaaccgattgtgattgattctgttaaaggttctcatatgtgggacatagatggtaatgagtatatcgactatgttggctcctggggtccg

SEQ ID NO: 193957 - DNA, 436 bp, Gossypium hirsutum
cgtccggcgatgccaaaggttcgaaggtttgagagcttgactcagctggagccagtggacttggagaaacgaattgcaatggcagagcttgaagatgaatcatcactcctccgctcagtctctgtcaacaacaatggcatgtctgaagagaaactgcttaagttactgaaagcgaaattcccatcagagattttcaagtttagggctgataatctattgttagatttcttttgggagacattcatggtggaagataaaggcgaacgacatgacatggcgtttgaagattttggggtcaaatctttgaaggtggtagaagattgcgttaatgggaattctcaggaatttttctaggatgggagctgcatgatagcagaaaagcatccctgaaagatatggaaagaaatgaaaactggagaaacttcaatgaagaaaa

SEQ ID NO: 193958 - DNA, 448 bp, Gossypium hirsutum
cccacgcgtccgtaataagcaaggcaatggtttcactatgcttgaattcattgccacttccaccttcttcatgcccccaaaaacttactgaaacttcctcttcttttagtaatggtagtataggaacagccttgaaacccattgtcgtcaatggaaatcctcccacttttgtttctgctcctggtcgccgtatagttgcagttggagatctacatggagaccttgatcaagcaagatatgcgcttgaaatggctggtgtcttgagttcggatggtcaagacctatggactggagaagatgcggtacttgttcagctaggagatgtgcttgatcgaggagatgatgaaatagctatcttatccttgttgcgatcattagatatacaagccaaggctaaaggtggagctgttttccaggtcaatggaaatcatgaaactatgaatgtgga

SEQ ID NO: 193959 - DNA, 627 bp, Gossypium hirsutum
ctttcttaacactcttcaagcttttcattacagactctttcaagaatttcctgaaagaaaagaagagaaagaagaagaagatgttgctggggaagaggccaaggccacctatgaaaagaaccacaagcatgacagagatcacttttgatctaaacaccaccaccaccaccaacgccgaacctccaccctctgatccacataacccttttaacaactaccccaaacaggcttcccctttcggtggcgcagcaccttctgtagctgttgctggcggtggtgttggacttgaagggttggatcaacggttgttggcgacggtgtcacctagagttcatagaaggcattcagctgattttatggaaacacctcatttcttaaggtcttgcggtctttgtagacgtcgccttgttcctggccgtgacatctacatgtataggggtgatacagcattttgcagcttagagtgcaggcaacagcagatgaaccaagatgaaaaaaaggataaatgttcattaccatccaagaaacaagccgccgcctctcctgccgccagatccagtgtctcaaccaaaggagagacggttaccgccgtataaatattaatccccgtggcccaaaaaggttgtt

SEQ ID NO: 193960 - DNA, 506 bp, Gossypium hirsutum
attcatcatcttccatctcgtaagacccttccatttgcctgctatggccggtctcctcaaggcgctgtccgttaaatccactcctcttcctcctctatctccatccctaagacccatttccttgaactctccaaggcccttttatgtctgcttcaaacaaagacttcctcgtacacccggtgccctccggttcagcccctctccttctcttcggttcgtaaagttggttccttttgcttctaatggtggtgaaactgaaaccgctgagacccaagaagaagttgaagaacctcaaattgaggactcttcagatggtgctgtcagtgttgaagaggacaccactggagatgagagtaacgattttgaggacacaccatctccaactatcgtgtcattgctccaaacatacaaagaagctttggccagtaatgacgagtcaaaagttgccgacatagaagcgtttttaaatttcattgaagatgagaaagttgatcttgaaaagaaaa

SEQ ID NO: 193961 - DNA, 409 bp, Gossypium hirsutum
cgatacatgtatgggtgtagtgcccctgtcgcattattgatgggactaggaatgtggaggctcccaccatcaccacgttggttaattctcagagcggttcaaggtaaagggtctttacaagaactcaaagagaaggccatccttgccctaagcaaacttcggggtcgggctccgggtgatgcagcatctgagaaacaaatagaagataccctaatctcagtgaagtctgcctatatggaacaggaatctgaaggaaatatcttggaggtatttcagggaccaagtttgaaagccttcataattggtggaggtttagtcctttttcaacagataactggccaacccagtgttctgtattatgctggtccaattctacagagtgctggattctctgcagctgctgatgcta

SEQ ID NO: 193962 - DNA, 578 bp, Gossypium hirsutum
tcatgggaaggccgagagtgtgctgaaggcttgtttaggaaacgcctttggggtggtacttttggtgaagtctataaaagacctctatgctgggtggagcacatgtcattggataatgaaaccggattagaaccttgtggtataagagtaaggcctgtctctggcctagtggctgcagattacttcgctcctggatattttgtgtggggagttctgattgctaacttggctcggattggatatgaggataaaaccatgtacatggctgcttacgattggagactctcatttcaaaacaccgaggtacgtgatcaaacactgagccgtattaagagtaatattgaactgttggttgctacaaatggagggagaaaagttgtagtcattccacattcgatgggagttctgtatttcctacactttatgaagtgggttgaagcacctgctccgatgggtggtggtggtgggccagattggtgttctaagcatattaaagcccgtgttaacattggtgggccatttctcggcgttccgaaagctattgctgggcttttctcggctgaagcaaaggatattgc

SEQ ID NO: 193963 - DNA, 625 bp, Gossypium hirsutum
  unsure (1)..(625): unsure at all n locations
ctggttttttcttcccttttcttctcagttctcccaccgccgcggccgtcgattttcgccggatctgatccataaccagtgtcagattccgtatcgaaaccgatacggtacccctaactgccgattccgtgtaacggagagatggcggagctggcagttgacaaacattttaagtacatcttatctgttgaaaagaacaaggatagttttgaatcggtggtgatggaccatcttagaatgaatggtgcatattggggattaacagccctagaccttctggggaaacttgattctgttaatgtagatgaagttatttcatggatcctgaagtgccaacacgaatctggtggtttttctggcaatattgggcatgatccgcatatactgtatacgcttagtgctgtacaagtgcttgccctattcaacaagctagatgttcttgacattgataaggttgcaacttatattactgggttgcaaaatgaagatggatccttttcaggcgacatgtggggtgaggtggatacncggttctcttatattgccatctgttgcctttcaatattatgttgtctggataaaatcaatgttgagaaggctgttagctatattctgagttgcaaac

SEQ ID NO: 193964 - DNA, 541 bp, Gossypium hirsutum
cggactggcccggtagacccacgcgtaccgaactaacagaacgaatgctgtggaccaaataaaaatcccaagttcttttataagggctcaaaagcttataaaaagaagtccgatttcccatttccggtgtttttgttgtggtgagtgttttgatggggaaggaacagagcttagatgagacttcaaactccatttctaattctggaagtgaaagaacgcctcttttgaacaaggaggcaagtaagcaaacaaatgggcaacaagcagctgaaagtcctctgtcagaccttgagcaaggcaatgcagaagaggcagtcaatgttggattttggagagtatttgcactggcaaagccagatgcttggaagatatttgttgccacctttgcattattgatagcatccactacaaatctcttgattcctaaatatggtggaatgatcatagacattgtttcaagagatataaggacacctgaacagcaatcagaggccctggaagctgtcaagaatactgtaacatacattgtgctgatcgttgt

SEQ ID NO: 193965 - DNA, 504 bp, Gossypium hirsutum
agcaacattcgccattaattctccatatttcattgcaaagaacatcaccttcaagaacagaagcgaccattaccgccgtcaggtgcattaggaaagcaagcagtggcactgaggatatcagcagatgcagcagcctttatcggttgcaagtttattggagcacaagatactctttacgatcacattggcaggcactacttcaaacgctgctacatccaaggttcagtagatttcatattcggaaatgggctttccctctataaacactgccacttgcatgccgtaaccaacagctatggagccttgacagcccagaaaagggaaagcatgcttgaggaaacaggcttctccttcgttaaatgcaaggtcacggggtcgggcgccctctacctcggtcgggcttggggcgttttctctaggggtggtctttgtttatacttacatggacaagatcatcacccctagaggatggtatgactggggagacaaaaatagagaaatgac

SEQ ID NO: 193966 - DNA, 416 bp, Gossypium hirsutum
aaaacagcaatggtgaccactctttaccatcgaccgcaccgccttctcctcgatacgcaaccgaacgcatcgccatcgctaccgaatggaagcaggacgcgcaacgctttcgccaatgaagccaactttgacaccaacatggtgatcatcctagcggctttgctttgtgcattgatatgtgctctaggactaaactccattatgcgttgcgctttccgttgcggcagaaggtttggtttggacgccacggaagagaccgcggcgcgtttggctgccgcgacgggcctgaagaagagcgcgttgcgtcggcttccggtggccgtgtatggttcagggaatggatatgaaaggctactgagtggtccaattggccttggagaattcatggattgtgaaaaaggtaagggtttggcaaa

SEQ ID NO: 193967 - DNA, 654 bp, Gossypium hirsutum
ggaacaacatgaaaacctccctttttttcttgtacttattatctctctcatatttcaatgtaggaaactaaattccctagtcttgtttttgctctatattgtcttttctacattttcatttgatatacttacattctagactttgttgctttaatttatttatttctatttccaggtggtgcaagtatccggtacaggcagaagcgagggtaaggagaacccatttacagccaaagcctcgttgattcgttactggaacaatcacatttccaacaatcttcccaagccaccatttcttatctccaaagcttccccactaaacgccattgacttggccaagctcactcaacttgccaatcataactctctgtcttcccacattgaatctttttgttccttagccaatcttttctgctcattccaggaggaatcctcgaaactagacgcagttggcaagggtaaaggggatgcaaacttcgcagtgtattccagtaaaaactttaaaggttatggctcgttaagtcgcggagggatcgactccttcaagaactactccgatgggttaaatactcccaatgagtcttttaagaaatacagcaggggatccaatgcccatagtgaagacttcacaagctatgccaaagatgccaacgt

SEQ ID NO: 193968 - DNA, 572 bp, Gossypium hirsutum
  unsure (1)..(572): unsure at all n locations
cgaactaatcatctactaaactttaaccctttttccatttgcaacagagagtgaatacatggctacctccagcatggcatgagctgcttcagggttcttgctcacacccaatgtcgcagcgaattcaagctccacttctaagaccaccaccgtgtttttcccttcaaagaacaacaacaattccaggcttgtggtgacgagggcagctgacgaggctgctgcaccagcaccagctaccaccactgcaccatcagaaggcggtgaagcccctaaacctaagccaccaccaattggaccaaaaagaggaaccagggttaagattcttagaagagagtcctactggtacaacagctttgggtcagttgttacagtcgaccaggaccctaagactcgctatccagtggtggttcgattcaacaaagttaattacgccaatggatcaaccaacaactatgccttggatgagattgcagaagttaactgagtcatttaattcttaacattttttcgngcattaatattgtccttcttccctttcatctctagaattaagcttaatatttgtacccccc

SEQ ID NO: 193969 - DNA, 631 bp, Gossypium hirsutum
ctcattgcctttcaataaaaattgcattttgattttgatccaaagcccttttttttctttgtttaatttgaccttctttttgctactgggcatttgaagtggataatcaatcaatcaaagaaatatcccaaaaccatgtcggcactcttcaatttccgttcattcttaacggtagtgctattgggaatctgcacctgcacttacttgaagatgcaatttccagctatccttgaacagagaactgggttccgtggtttcttttggaaggcagccagaataggtgaacggttaagtccctgggtggctgtaggatgcttcacaatgggtgtctcaataatatttttctgaacaaggagcacaccctctactgttcggaggagggatccaatctttgccgtgtgagctaatgttcttgttgaaatttaacatgtttaaaagtgtttggatgatgaaaagagttttgttaccactgttggaagaactatgttacaaacttatttcaaaagcaccctagcatttctttggctgattgttctttattgatgatttttcagttagcattttgcattgtcatctaacattacctgcggtgtgcctacaatttatggtgaatggattactccaattgcgt

SEQ ID NO: 193970 - DNA, 437 bp, Gossypium hirsutum
ggggttcaacttttccttttagctttttggtatttccaatcccacgctgctcaaaaacacgctctcctccccctctctcaccctctaatctgatcactgatttcttcgatttcaagttgaagtcaagctgcagctatactgtgatttggttaatatagaattgaaacaatgggggagctgttgggactgctaaaagtggtggttgtgcaaggtaaaaggttggttatccgggattttaagagcagcgatccttatgttatagccaagctcggtgatcaggtagcaaagactaaggttatcaacagttgcctcaatccagtatggaatgaagagctcactttctccctcactgaacctgttggagttctaaatttggaagtattcgacaaagatcgtttcaaggctgatgacaagatgggacatgcttatctgaacct

SEQ ID NO: 193971 - DNA, 1175 bp, Gossypium hirsutum
tcttcacccatagcttaaacgaacattttcacagcttaaaacacaatatgactaaggatattgagaccacggcggagcaaggcggcggagcggagttctcagcgaaggactaccaggacccaccaccggcaccgttgattgacttggaagaactcaccaaatggtcgctttatagggcggcgatcgctgagttcattgccacccttcttttcttgtatgtcacggtgttgactgtgatcgggtataaagtccaaaccgacccggtaaagaatactgttgacccggattgtggtggtgttggtatacttggtattgcttgggcttttggtggcatgatctttatccttgtttactgcactgctggtatctctggaggacacatcaacccggcggtgacgtttggactgttcgtggggcggaaggtgtcactgatccgagccctgttgtacatggtggctcagtgcttgggtgcaatctgtgggtgtgggttggtgaaggctttccaaaagacttactacaatagctatggaggtggtgccaacgagctccaagatgggttcaacaagggcaccggcttgggtgctgagatcattggcaccttcgttcttgtctacactgtcttctcagccactgatcccaagaggagtgcaagggattcccatgttcctgtgttggcaccacttcccattggatttgccgtgttcatggttcaccttgccactatccctatcactggcactggcatcaatccagcaaggagctttggagctgctgtgatttacaaccaagaaaaagcttgggatgatcaatggatattctgggttggacccttcattggtgctttcgttgcagccttttaccaccaatacatcctaagagcagcagccattaaagcccttggatctttcaggagcaatgcgtaaaaacatttcaccttcattacaataaggaaaacaatgatgtaataacaaatgaggaatgagagcaagtttatgtcttgtgggaggggttcccttttgcagtttattttctataccaattgagatagggggccatttgaaaggtaattatataagaataaaaaaaatttttggataagggtggttctttcaattccctgtttttatattaatttttaggaggcttttttaaaaaggtatatattcattatttaa

SEQ ID NO: 193972 - DNA, 436 bp, Gossypium hirsutum
aactctccctattcccttcctttctccgcaccactctttgcattacattcccatcttgtgagcgttattttctccagaaactaaatttcttctctcaaatttcccacatttttgttattctgttcttttttttctctaacgcttaaaccttgcgtgacgactcactagtcgcaaatctatcagtatattgggtcagtcccaagcaacaaacactgaccactccctcttgaccgctaatccccccgccatacccccggttcatcacttttaacggagcatcatgaacccagggggtgttgccaccacaaatggtggctccggaagcggctcagtcggtgttcggatccaacaatcccgaagtctaccggatttcctccaaagcgttaatctcaagtacgtcaaattgggttaccactatctaatttccaatctttta

SEQ ID NO: 193973 - DNA, 671 bp, Gossypium hirsutum
tcgctacgcgtccgcggacgcgtgggtttttattttattttaattcactctcagaagagagcattttggggtttagttttagagttctcaaagaatgagcttttcgactaagcataataatagcagagccatgaatccttgggttcttcatctccaaaaactgggtctcgagcttaagtgtcctctctgtttgaacaatggccggctcatgtcgcattctcaaagattatggtattccatctgaaagatctgatgatcttttagaaccgtatgttgaatcacttggagacaaccaagcgatagagcacgactttggggagagtcccgtttcgaatttggagataggctttgatggactcctttgggcttaattattaacgattgtgaattgagttcgacaaaaggtcaggggataaaagaaaatcatcactcggaaattatggtcggttttgcgagcagcttcagttcgcctttgccaagtcaaagtttcagagtagcttatgatgctgatttccatggagcccttagcagaataacagagtgccatatcttccttcctttaacccttgtacttggggttatcccttttttctaaaaaaaaaaaaaagaaaagaatttggttgtaacagttttccagaattcttgaatgattaaagggagaataatagcat

SEQ ID NO: 193974 - DNA, 501 bp, Gossypium hirsutum
cttaattttctttgtttctccgtctgcttatccacggccgagaataaatgaaaaaaatgagctccgatgatccgaaccaacccggtctcgtgataactgtgaccgaatccattcgctcgtttcttctcgcagcctccaatgaccgtcgtctctctgaagaactccgagaactcgctctcactctttcctcagcagccaatgctccgtacaagcagatccgaagcatatggatggaatcagcttttgactccaggcccggattgattcctctcttctccggatctaatttcgttttcaccagtcctaaacccagagagaagagcgaagaattgaaggagaggttaaggaagcttaaagaactagcagagaggaaagagtatcaagagcttgttaaagatatcacgccgaagaaggatctcaatgaacctttctctacttataaggatcaaattggctttggtttacatgttgctctgacaatgtttactgggtatttggttg

SEQ ID NO: 193975 - DNA, 289 bp, Gossypium hirsutum
cataggcttactgccatggagcttctaagagtcccttttcttcacatcgatgattatgggtgggatttgagactaattgagtaccaaagggacagctatgacgctggacctctcatgagacaacctctttatgatgttcatgttagtaacaagagttctttggtcaatggatacagcaattatctcggttatggacatgagagcaatatcggctataactcgcatgaatacgaaacaagtgaattacatctcgaagatggtcatttgggagatgttggaccttttattc

SEQ ID NO: 193976 - DNA, 507 bp, Gossypium hirsutum
cccacgcgtccgcccacgcgtccgttcactcttccgcccacgcgtccgagctcgtctcgtcagagtcatttgggatatccggcggccatggcagcttgttccctcactctatcgtcctccttgccccaacctaaacccgcattttttggatcgaaaccctctcatctatccctacacagcacttcgtttgcgctcaaatcccagtgtttcagggtttcctcaagttccgtttccatctccagtcgccccgccgatgatctagttgcatctcttctctccaaggtgatacaaacggatggtggagtttcactcaccacaaaacagcaccaagaggtagctcaagtggctaatgagttgaacaaatattgcgttgatgaaccagtcaaatgccctttaatcttcggagattgggatgtggtttactgctcgaatcccacgtcaccaggaggcggctacagaagtgcattggggcgccttttcttcaagaccaaggacatggttcaggct

SEQ ID NO: 193977 - DNA, 345 bp, Gossypium hirsutum
ggaaaaaagaaaaagaaaagatcaagtgagaggtggcatcaaccataccatggctggtttgcgaagatctgcagtgtcgtttaggaggcaaggatcttcagggattgtttgggatgacaggtttttgtccgagttaacccatgcaaatcaagaacaacaaggagacaccaagcaagaagaacatgcccaggttgcgcaagacaacaataaccctgaaaaactcgatgctattaaggatgttaagcccacaagaaacctcccacccatcaacaccatcgaaaggagccgatctaatggtgaaaggcgaggttaccgtaccggtaaagtatcccctgctattgagcc

SEQ ID NO: 193978 - DNA, 784 bp, Gossypium hirsutum
cccacgcgtccgcccacgcgtccgctttgcttaagaagttcaatgctccagactctccttattttatgtttctattaagcactcgtgctggaggtcttgggctgaacttgcagacagcagacactgtaattatttttgatagtgactggaacccccaaatggatcagcaggcggaggatagagcccatcgtataggacagaagaaggaagtcagggtttttgtgctggttagtgttggatcaattgaagaggttattttagagcgtgcaaagcagaagatgggtattgatgctaaggtcatccaggctggattgtttaatacaacttccacagctcaggacagaaaagaaatgctggaagaaatcatgcggagaggaacaagctcacttggaacagatgttccaagtgagagggaaatcaatcgacttgcagcttcggtcacgatgatgcagttccgcgatggtttgagcacaatggattgaggaaagaagagtaaacggagaattattcggtctcgtctcatggaagaccatgaggtacctgagtgggtatttgtacttaatgatgataggaagggcaaaatttcagaaagctatgttgaattagggaagcgaaaaagaaaaggtgggaactattatccagatacattaagtgacttacagttcatgagggctgtggaaaatgcagaagacatggcaaagaagttaccaagcaaaaggaagagaaaagaccatcttccagctgatgaggactccgagttgcctattaataacataggagtaga

SEQ ID NO: 193979 - DNA, 423 bp, Gossypium hirsutum
cccacgcgtccgagaaaattaatgaacatcttctgggcatagtaaaatgcggggaactgggcatcaatgaactgctggctgccaaacttagtagaagtggtaacgatgcacgccatgcagttgaagaaagggatttatgcgagaagttactaaaacagattgaagcgaaggcctctgagttggtagctgagaagaagaaaataagacatctccttgatgcttacaaaaggctaaaatctcagtacaactacctctgcagaaagaatggccttactaccgagaacatgtctttttcaaataaactggaagatgaaagtgactcagccaggcatcatgacaaatccaaaccttctcttgatgctgaaaacagcattctgaagactcctatggttgtttttggcacaaaaagcatgaaagatgtaa

SEQ ID NO: 193980 - DNA, 813 bp, Gossypium hirsutum
gtctttggaccacctccctccctccgagcagctctgttacgttcattgcaacatctgcgacactgtccttgcggttagtgttccttgcacaagtttattcaagactgtgacggttcgatgtggccactgcaccaatcttttgccagtgaacatgcgtgggttgcttatgccctcggctaatcagtttcatttgcctcacaattttttcactccttcccataatcttctggaagagatctcaaatccttctcccaacattttgctgaatcaaggcaacaccagtgacatcaccttacccactcgtggagtagttgatgagcttccaaggcctcctgttatcaacagacctacggagaaacgacagagagtcccctcagcgtacaaccgattcatcaaggacgagatccaacgcatcaaggcaggaaaccctgatataactcacagagaagccttcagtgcagctgcaaagaattgggctcacttcccacatattcacttcggcctaatgcctgatcagcctgccaagaggactaacgtgcgccagcaagaaagcgaggacgttctcatgaaagatgggttttttgcttcagctaacgtcggcgtcactccgtactaatcagtgagctaagccatgggggcttccattcattgtctttttctccatgtttccaccattaagtctctctctcttactccttttcttcttcttcttcttcttcttcttcttcttcttcttctttctctcagtgcagcaattaggcaaagcttgtgattagcagttgatggagagctaagaactgagaaaaactcgct

SEQ ID NO: 193981 - DNA, 383 bp, Gossypium hirsutum
cccacgcgtccgcccacgcgtccggtgcgccagaaggcgaggacgttctcgggaaacatggcggttttgcttcagctaacgtcggcctcactccgtactaatcatgcagcaattaggcatagcttgtgattagcagttgatggacagctaagaactgagaaaaactcgctgctcaagtttggctactctgttgttgctattaattattataacccattggctactgctgaaccggcctttatactttcatggctggatatcaagctagcaatatccaacaatgcatgtaattttagtcttagataatatcctgtgtctaccttctccttgcatttgaaaaactaaaactcgctcctttaaataactactattagtttaagctc

SEQ ID NO: 193982 - DNA, 557 bp, Gossypium hirsutum
cccacgcgtccgcccacgcgtccgtgatttcattctttttcgttcttttttcccctaaattgtattttctcaaaaatgtcgctcctccaatcctccgtctatcctccgtcaacacttcgttcttcgccgtcactgtcatgcacagcggcacacccgatcgcttcctcccatagagttccttccacttcgaattccttcgtcgcgttagaatcgtcatcgttaaagaccgttaactctatttcgagcgctaagaacaacagaaggaaaggcgttgtcggaaaggtgaggtcgagcctggagacagcgggagcaactgtggggcaggtgacggaggttacaaaggacaccttctggcccatcgttaacgccgcgggggataaaaccgtcgtcctcgatatgtacactcaatggtgtggtccatgcaaagttatagctcccaagtttcaagaattatctgaaaaataccttgacgttgtctttctaaagctcgattgcaatcaagaaaataagccattggcgaaggagcttggcataagagtggttccaacgttcaagat

SEQ ID NO: 193983 - DNA, 438 bp, Gossypium hirsutum
tctttttctttagctgccttgttttcctctttgacaatggaggaacaaatactaccttctgcttcagctgctgctgctgctgctgctgcttctgcttctgcttctgctactcagcacgatctatcgccttcagctgcttctagtggagctcgctacaagctggtggctccggctaagctaccgatctcaaggtcggcttgtattacgatcccgcctgggcttagtccttcttcttttttggagtctcctgttcttctttcagatgttaaagcagagccttcaccgactactggttctctcattaagcctcacgcagtgcatggctctgttaattctagtacatattcagtgactgctgcgtgttctaatgcttttgatgaaagaaatccaagctgctttgagcttagaccccatcctagatcaaatctggcacctgca

SEQ ID NO: 193984 - DNA, 697 bp, Gossypium hirsutum
ccataacaagggatggaaaacacacgccatccgtctcaccactaaaccccaaccattgtttatcatggcttcctcaactctctcccctgcagctccttggcagctatgctccagcaagagtggcatgttctgcccatcacgagcgtttcttgtgaaaccagcgaggacccatatggtcaaaaacgaaaagggaatgaggatcacatgccaggccactagcatccctgctgatagagtgccagacatgggcaagaggcagctcatgaatctgcttctgttgggggctatttcactcccctcaggtttcatgttggttccttatgcagccttctttgtgccatctgggggacggggtaccggtggtggcaccgttgccaaggacgcaatcgggaatgatgtaattgctgaagaatggctcaagactcatggccctggggaccgaaccctgactcaaggattgaagggagacccaacctacctagtggtagagaaagacagaacccttgcaacatatggtataaatgctgtgtgcacacaccttgggtgtgttgttccgtggaatcaagccgagaacaagttcatatgcccctgccatggatcccaatacaacgatcaaggatgagttgtgagaggacctgccccccttgtccttggcattggcacacgctggtgttgaagacaggaaggtaaatttttt

SEQ ID NO: 193985 - DNA, 685 bp, Gossypium hirsutum
cggacgcgtgggtctttattgctctgaaaaccttctctcttccaaactccaaactccatctctcgaggcttccctaatctggttcgctcagctcatcatgccgtgcttgggtctctgcataatcaggaacgcccatttccaggtaaaattcctctcctcttcttagcgtctctgttgcaaggatatgtgcaaggttgtttgcagatcttggtgtgtgaagaaatctgatatttttaacttctagtattttctgttggatatcataaatatatgcccctaccattgatctatcctgatcctttttgttgcatttcttgattattgcgagggaatctccttcaaaaatgagtgcctgccaaccatggtcaactcctacttggactgctttcctacaggcaattgcttcagcagcaaaagcagatggaactccattgtggatttctgagcaggataaaagaatttttccttccgagtctctggtcacaacacctgaggctgaccggttctgaatctgattatatgcaccatcaaaattaatctttatggattcccactgtggtgcacagcaaaagagtcgactttgatttgggtttaactgctctagcgcccagcacagtcacggaataagtgattcatcgtttcagctccttctccacatccgggacacctttgtgtgactgtaatt

SEQ ID NO: 193986 - DNA, 734 bp, Gossypium hirsutum
  unsure (1)..(734): unsure at all n locations
cccacgcgtccgattttcaaaactttccttgtagatcgttctattttctttttggtttgaaactttctctcttccattcttcatctcctgaggctttcctagtctggctcgctcaccccatcataccgtgtttgatcctcagcatactcgggaactcccatttccaggtatatttcctctcttcttcttagcgtttctgttgcaagaatatgtgcaagattgtttgcagatcttggtgtatgttgaaatctgatattatttagtccatgtattttctgttggatatcataaatgtatgcccctaccattgatcgatcttgaccctttgtgctacatttcttgattattgcgagggaatctccttcaaagatgagtgactgccatcccttttcaactcctacttggactgctttccgacaggctattgcttcagcagcaaaagcagatggaactccattgtgaatttctaaacaggataaaaggatttttccgtccgagtctctagccacaacacttgaggctgaccggttctgaaactgattatatgcaccatcaaaattaatctttatggaatcccactgtgggtgtgtccatctcttatnttctttcattatttctgagcttctttgttcaagaccagttaactcaatgatatagttactaacaaaagttgcaacttctatgcccatactaactatgccctcatgtatatttctgttctggctcccatatag

SEQ ID NO: 193987 - DNA, 386 bp, Gossypium hirsutum
cgaccacgcgtccggaactttaagctttttctcattgagaaaccacatcagagggaaaaaaactaatgatttcggggattctcgatatatgtctgtggtgacaatgaccactgttggttatggagaccttgtccctcacgatttcctttcacaactggtctgcactggtttcatcaccgtagggatgcttctgtttggaatagtagcgaaactagctgctaaatacttggttttcaagcaacaaaaggtgctgattaatgccctgcacacagctaggataatgggtccgatggaagcccttaacgagattgaaagcatagaaatagactacaccaagtgtttaatatcattgatcgctatggcggtgcattttgtcatcggaatct

SEQ ID NO: 193988 - DNA, 458 bp, Gossypium hirsutum
gccatgcgtttgcctctcaatactccaagggatgggtgttgcccagttcgcctgaatcgacgtctatgtgcgttaaggagcggttgtggctgcaagcaagggcctattcatggaagctttaactgtcaatctcgagtttcatcgccgctgggaaggcgggattatgcggcggtggcaggggaagtggcaagcatgcgagagaatagagaatcatcgtacggtggattcaccaacagaggtctcttgggtccaccggcaagaaagtccattgatgtttctggcttttacccttctcaccagtcactttctcaccgcaatttgcaggccagtcaagttcaacaattgaagcaacaacagctaatgaaacaactgaaacatcaacatcagtatcagcagaactacagcctcgtgttccaaaacaaaggaaggaatagtaataataataggcccttgggtat

SEQ ID NO: 193989 - DNA, 708 bp, Gossypium hirsutum
  unsure (1)..(708): unsure at all n locations
gcgcgtcnnttcttcnntttcgtccttataacatgttgtcgctttgaggnngtttttatgtcatggtgtttagtgtcgtcnntctgaatgccttttatgcatatgtgcgtnnttttctttcttcttcttcatgtatccatccgtccgtcctgcctctccgcctcttctcattcgatggcctgccttccgattcgagtctgacctattctctctcaccctctgatcgcctcaaggtttccagccttggttttggtggaaatttcaactccttttttggtgcctctgtttcaactagatcttcttcattacagaaatgcaactcaaggagtatccaacccatcaaagctacagctactgaaattcctcctacaattccaaagtcacggagcagtggcaagaccaagattggaatcaatggttttggtcggattggaaggttggttttacgaatagcaacttcaagggatgatattgatgtagtagctgtcaatgatccttttattgatgccaagtacatggcttatatgttcaaatatgattcaactcacggaccctttaagggaactatcagagttgtggatgagtccacattggaaattaatggcaagcaagtacaggttgtaagcaaaagggaccctgcagagatcccttggggtgagtatggggctgagtttgttgttgagtcatctggtgttttcaccacattag

SEQ ID NO: 193990 - DNA, 464 bp, Gossypium hirsutum
cggacgcgtgggatttcattttcatattttccatattatatatttcacaattgttctcgtgctttgctctctacagcaaaagccaaaagcttctcttcttttttttttttttccttaaacagtatcctttagggtttttattcatttttgattcgactctgaagcttttagcaatggctttttcttctctcttcagatccaccgccgctgcctccgcctctctcatcgaggccgcctccgatcggtctgacctatatctctcaccctctgatcgcctcaaggtttccagccttggttttggtggaaatttcaactccttttttggtgcctctgtttcaactagatcttcttcattacagaaatgcaactcaaggagcatccagcccatcaaagctacagctactgaaattcctcctacagttccaaagtcacggagcagtggcaagacaaagattggaatcaat

SEQ ID NO: 193991 - DNA, 421 bp, Gossypium hirsutum
gcggagggagaaatgaaggtttagcagattacatccgaaactctactcggggtaaaacaggctaaatacgtcttggttcttttctgggaagacattgttcattgtcttaaaatgatgatgtactttgagctcaacgtcggtggggtgattcgatacttatttctttccactttaaattgatcagcgcaacagattcaggttggaagattcgactatctgaagaatgtaactgtggtgataacagagtgcatgcctttcaatttcatagacatgcactgcatctgactgctctggtggacatatattcaacttagctataagcttaatctagaaatagccttgaggttcaatcactgaactgccatcgaacatctgtgattctcattgttgacttctacatttctacaatattttggtatct

SEQ ID NO: 193992 - DNA, 673 bp, Gossypium hirsutum
cccacgcgtccgatgagaggccaatatagagggaaagaagaggcatgaagaacacaatccggtgctgcatctcttgcattctgccctgtggagcactcgatgtgattcgaatagtacactccaatggccgcgttgaagaaatcagtggctccatcaaagccagcgacatcatgaaggcttaccctaaacacgttctaaagaagccttcctcttcttccgatgatgggatggtcccaaaaatcgtcatcgtcccacccgacgccgaacttcaacgtggcaagatttatttcctaataccactcccttcaacacccgataaaacccgttccaaaacttcctcaacaaccaagaagaaaaaaagagacaggcttgacaccaccaccaacaacaacggccgcggcgccagcagcaacggccgcacccgccagcataatcacagccgaagcatgagcaacgccaacaagaacaacaacacaatttcaatgtcgaatcttttgatatcggatcagtatttaagtgagatactttcagagaaactatcaacgcaaagggatcgaagaagaggccgagttggggtgtggagaccacacttagagagcatctccgaatctccaaacgatggatgatcatcatccacgtcactctgttatattactactactactattttcta

SEQ ID NO: 193993 - DNA, 581 bp, Gossypium hirsutum
atttttaacatctcctatgagaataatcacaaactttttaaaacacacacaaaatgtattttttttaaaataaaattttaaaaatcaataattgaataatatccttagttcccttgatttctacgaaaattttcttttatttttattttcattgaatcaccaaaatgggcggaggagctatgagagcggcggcgaaagttgccggagcgggaattgttaacactggccttcgtggcggtgttcaggtggctccgtcgtctgcggaatactccgtcatgtgcgtcgccgcttctcgttcggcttcttccggaatttctgtttctggcggtggggtgtcttccgtcgctgacatgacggcgtcgcccaatcagatgatgtcatgggagatggtggacgattgggagtttgctggtggtgttgaagaggaggtgcccaccgccatttccggcggaggagagccgatgcctaggctgttgtttggagttgctgcaaccctggaggatgctaaagcagccgctagtgatttgaaagatgcattggataaggcttatctatcatctctggattcgacggatgatacc

SEQ ID NO: 193994 - DNA, 636 bp, Gossypium hirsutum
gatttctacccagttgggcaaacatggagcttcaattgctattatgggtcgacgcaaacatgtccttcaagctgctgtttctgctcttcaatcccttgggattcatgctgttggctttgagggggatgttcgtaagcaggaagatgcaaaaagagtgattgaatcaactttcaaacattttggccatattgacattcttgtgaatgctgctgctggaaactttcttgtgcctgctgaagatttgtccactaacgggtttcgaacagttatggatattgattctgttggtaccttcacaatgtgccgcgaagcactcgagtatctcaaaaagggaggacgtggaaggaactcaccgagtggaggatcaatcttgaatatcagtgctactttacattatacagcctcttggtaccaaatacacgtctctgcagccaaggcagcagttgatagcattaccagaaacttagcactcgagtggggaactgactacgatatccgggtcaatggtattgctcctggccctattgccgatacacccggcttaagtaaactcgcacccgacgagattaccatcaaggctcgagagcacttgccttcgtataaaataggggacaaatgggatattgctatgtcagc

SEQ ID NO: 193995 - DNA, 443 bp, Gossypium hirsutum
cccacgcgtccggttttcgccacatagaactgtttgacactgttaaaaacgagtttactgagctaactcggcatgtttctcctacaacccatcacttaaacccgttcatatcacccgactcagcccgagttgggtaccataagtgtaggggagaaagtaatggagcaaaagctactcaattattgcttgaaaatgttaaaagcccagtgccgtatctctctcttttcagaatgtacggttcattcccatcgttctcacccgcgggtgaccgggtagcctacgtggatttccccggtgtttatgtagtgaaccgggacggttcaaacctgcgccaggttttccacttgaatgcttttggaagcgcttgggacccggtccgaaagggaattgtatacacaagtgctggaccggagttttcaagtgtgagtactgaagttgatatt

SEQ ID NO: 193996 - DNA, 627 bp, Gossypium hirsutum
  unsure (1)..(627): unsure at all n locations
cccacgcgtncgcccacgcgttcgcccacgcgttcgcccacgcgtccgcccacgcgttcgcagattctctgaacatcaattccccacattaccccatcaatcataccattcattttcattctttctctaagaaacaagctctcagagaagacaatggtgggttttgaacaatgaagaagaagagaaagtgtgggttatgcttgttccatggcctgccattatgcttactatgcttccttttcaccttcagtaacattgagaggctttggtgccaagaacagagaacccaggccttttcaagtacatctttcttccattagcagtcctgttagagcctcctacaatacccttgtctctgaggctgcaaggcttttggttcctacagcaattttcgaagcttcaaaactcaaagttgtcttcatgggagaggcgctaaaaagttattctgcaataatcccaagaacctacatcctctcccactgtgacttcactgctaacttaacattgaccatctcaaatgtcatcaaccttgatcagttgaaagggtggtataacaatgatgatgtggttgctgagtggaagaaagtgaaagaaaccatgtttctgaatgtgcattgttttgtaagc

SEQ ID NO: 193997 - DNA, 849 bp, Gossypium hirsutum
gccagggcttattcagggaagatttggctcgcatatatgctgcagagatagtatcagctgtgtctcatctccattctaatggcataatgcacagggatctcaaacctgagaatattcttctagacgcagagggacatgttatgctgactgatttcggcctggcaaaggaatttaacgaaaatacaagatccaattccatgtgtggaactctggaatatatgtccccagaaattgttcttggcaaaggccatgacaaggctgctgattggtggagtgcgggaatcctactgtatgaaatgcttactgggaagccaccctttactggtggaaacagacagacggtccaggataagataataaaggaaaagattaagttgccagcttttttgtcaagtgaagcacactcaatcctcaaggggctgctgcagaaagaagcaagtaagcgtctgggttgtggaaaaggaggtagtgaggagatcaaacgccatacatggttcaaggccattaactggaagaaattagaggctcgggaggttaggccgagttttctccctgatgttgcaggaaaccactgcgtatctaattttgaggagtgctggactagcatgccggttattgattctccagttgccagtcctacattcggtgagaatccctttaaggggttcacatatgtgaggcctgtcgccttatttcttcagagaaatgcttgatgttcgatggctgtgctatctagcttctctcctttagtttatagaaacaggtaactatatatgaactatatatttatgcttttggacttgtttaaaacgactctgctttctgcatttcgtgttgcagctgatgtta

SEQ ID NO: 193998 - DNA, 481 bp, Gossypium hirsutum
cccatgtgtccgcggacgcgtgggtctctctctagagattttctaattatatttccatttctctctccctcttttgtgaaatctccgggcttccaaatataccccccgtgatctcaaaactccggcgatttaaaattctcgtttcgatctcgagatcttattatcattgccggtttctttctggaaaaacggggattaaagacgaagaggagggatagaatcggaaaaagaaaggaaatcgcatgagctggttgggaaatctgggttttacttgcttctcttcggtgaattcttccaaccattttataacgtgtcttttaatttttattcttcattactcccctcaattacctccttcgttatttaaattcgaaaaaaaatcaactgagcctttattattattgcctaattctaattccaaacatagtcctcccttacatcttaaatctaaatcctaatcccgatcttaatccatggagtc

SEQ ID NO: 193999 - DNA, 508 bp, Gossypium hirsutum
  unsure (1)..(508): unsure at all n locations
ccgatctcttccttccttattatctaaaacatagatcctccacctttagtggacgaagccaacaccgtcacttcgattgctccatctttccccatgacttctagtaattgttaggcatctctttatccttttcctggtgacctaaacgaagatgatcaacaccaacaccaccagcttttcaacttaatatctcaaccttcttcttcatcatcatcatcatcttcttcttcgtcgccttctacttcacttacttgtcctttttccttcagcccaactgttcaacaccagcaagcagctttctatcagagcctaccccagcagttccatgatgatcaacaagatcaggaaaaaatacatgttccacaagatggaccattgaagagggactgtgagctcangttatctatatggaaaaaggaagaaagggttgaaactcatcatcaaagtcatgattctgctaagtgggatgccttcaagatgaggatgatgagctccgatcacaccaatt

SEQ ID NO: 194000 - DNA, 526 bp, Gossypium hirsutum
cgtgcgttccttagagagatggcagccgccatgaaagttgtatgcatgatgtttcttgttgccatatttcataaacaccatgcccatggcgcaatatcagcagatacacaaaaacttatcgatgaagccaacatgaatggaccttacttaggcttgctcattccaaaccttttcgaaatgaaccctcttcttcaacatccaaactatacttccaccaacttcaccattgatattgctggaaggagatttcggttcgggaaaattgttgagaaaaatgttatattagtcatgacgggactgagcatgataaatgcaggaataacgagtcagctattgttaactctattcaaaatcgaaggagttgtccattatggaatagctggaaatgccaacccctccttacacattggctttgtcactattcctcaatattggtcacactctgccctttggagttggcagagatatggatatggaccctctgacgagctcccccttgaaccaaatggagactatacaagaaaca

SEQ ID NO: 194001 - DNA, 1131 bp, Gossypium hirsutum
cctcagcctattaagtatcgtggagtggatcatttgtctgacatgctgttccactacaatgagacatgtgatattttatactgtgaaggtttagacatccctctgccagaactacaaggtttgaaaaccctgaaggtagcatttcatcatgctgctaaggatgaagttgttatccatactattaggcttccaaaacagagcactgtgggcgatgtgattaatgatcttaagacaaaggtggagttgtctcatcctgatgcagaactgcggttgcttgaagttttctatcacaagatctacaagattttcccacctagtgagaagattgagaatataaatgaccagtactggacattacgggcagaagagattccagaagaagagaaaaatcttggtccaaatgatcgcctaattcatgtttaccacttcactaaagaaactgctcagaaccagatgcaaattctgaattttggagagccctttttcttggtgattcatgaaggtgagactttggctgaaataaaagtccgaatacaaaagaagctgcaagttcctgatgaggactttgctaagtggaagtttgcattcctctcacttggccggccggagtaccttcaagattctgatattgtatctagtcgttttcagagacgagatgtttatggtgcttgggagcagtatcttgggctggagcactctgacaatgctccgaaaagagcttatgctgctaatcagaaccggcacacctttgagaagcctgttaaaatatacaattagggactattttagattttacctccctttggtgacattgcacaaaagagtggcactctacatgaactaaaagcaaatgacaatgtgaggcaacaagttagcactgaaatggcatctgtgacctttgcttgttgatttgttggataaatgtaattctttcggtagtgtcaatttgaaggactacttccttttacgtaatcaaagtgtgcatctgcaaatgacaattacgatccgctgagatttttgctactactttccgtctttaaatccaggttggttggttggttcaatcttcaatcaaaacgtaaatgggggcaagttgcctgtgttatttgtccttacataaaccacattttt

SEQ ID NO: 194002 - DNA, 451 bp, Gossypium hirsutum
gaattatcaagtataaagaaacagcttcttgagggcttttcacccgatgatgcatgttcatgaggtgttccggtgtggagaccatgttctcctcttgcgcagatggagtttcagtcatttgatgagatgcctctagctgcagtaacagatgaagccaatggaagtcagtcaggtcgcaaagcatcagtatccataagtaaactagatgtcttaagtgccaatgagctattggattcagctctggaaacagcccggcaagttgtaagcttttcggtttccccagcaccgattccttatgaccagatgaagagtcagtgtgaagctagtgtaatgggtaaacagcagaagatgtcaatacttcatcacttcaagcatcaacaggaagccagtgcaacctcagaggaaattgaaaatgaaattctctatttaccaagtgagaaagcggagtcta

SEQ ID NO: 194003 - DNA, 713 bp, Gossypium hirsutum
aaacttcaccgttacctcaaaaggaggagatgatggagaattttccgaactgtggctattcgggtggacatctttgttgattccccccatgacattgttgatcatcaacataatcggagtcatagtcgggatttcagatgccatctctaatggatacgactcatggggccctctattcggtagactgttctttgcattctgggtcattgttcatctttaccccttcctcaaggggttgatggggaaacaagacaggcttcccaccattattgtggtttggtcaatacttttagcatcgattttctctcttttgtgggctcgagtcaacccctttatatcgaaaggaggcattgttttagaggtgtgcgggttgaactgggaactaaaaataaattgtggaagaaaaaccaaaggagtagaattagatgttcagtgttcaaagcaagcaaggctgtctgaaaattgcataaatcggctacgattttggtcaaagatgaagacatctcccaattcaacatggttgccctcaaggtgaggaaaagaggaaaacgtgttggaaggtgtttgtagatacatatatatatacaaaactgtgatccaatatttgtcagtgttttcctccgttttgattctttctatacttttgtgggttttgtgggttagaagttattgatttcataaagtcttttgtattatctcttaagagaagagac

SEQ ID NO: 194004 - DNA, 497 bp, Gossypium hirsutum
gaaaaatgttctcccctggaaatttgagagctacatttgataaccccgaatatgacaagttgatcaactattatgtaagagagaaatacacattgaggtgcactgggggaatggtacctgatgtcaaccagatcattgttaaagagaaaggaatatttacaaatgtggcctcgccatctgccaaggccaagctgagattgttatttgaggtagcaccattggggttcttgattgagaaagcgggtggttacagcagcgatgggcaaaaatcggtgctcgacaaagtgatcgagaacctcgacgataggactcaagtcgcgtacggttcgaagaacgagattatacggttcgaagaaacgttatacggatcctcgaggcttaatgcaggggtccctgttggagctactgcttaagcaacaatgtttttacttttgtttgccttttcaagacattttgttttcgttgtaccttaatgatctcaaacaaaacttttaagt

SEQ ID NO: 194005 - DNA, 695 bp, Gossypium hirsutum
gaaaattaagcgcgtggtttggacctgacgtagaaggccactaccaataattcttctataaatttcgattccttccaccacctctgcttcatactaacgccaatcaatatcctcttcttcctcttccctcagatttttttctcttttcccaaagcaaaacaaaagccatgtctcagactgttgtgctcaaggttggcatgtcatgccaaggatgtgttggagccgtgaagagagttctggggaaaatggaaggtgtggaatcatatgaagtagatttggagcaacagaaagtgactgtgaagggcaacgtccagcctgatgctgtgctgcagaccgtgtcaaagaccggaaagaagactgccttttgggaagcagaagctctggccgaaaccgaggtgaagccagccgaaaccgaggtgaagcctgcggaaactgaggcgaaaccagcagaacccgaggcaaagcccacggaagctgttgctgcagcttaatctgttccccagtttgattcattgaatggtaaacttaatgcagtttacatggattgtagagtatgtatacttccctttaacatggaagctaaaataaggtgtggggtgcatgtcactatgctttctaggctaaaacatactggattggcttgtttgttgtatcagcaatagcatgaaatgaacatttccgcttgattttctttt

SEQ ID NO: 194006 - DNA, 487 bp, Gossypium hirsutum
ccctctcgtccgcttttctctcccgctctttgagtgttccaaacaaaagccatgtctcagactgttgtgctcaaggttggcatgtcatgccaaggatgtgttggagccgtgaagagagttctggggaaaatggaaggtgtggaatcatatgaagtagatttggagcaacagaaagtgactgtgaagggcaacgtccagcctgatgctgtgctgcagaccgtgtcaaagaccggaaagaagactgccttttgggaagcagaagctttggctgaatccgaggcgaagccagccgaatccgaggtgcagccagccgaaaccgaggcgaatccagccgaaaccaaggtgaagccagccgaaactgaggcgaaaccaacagaacccgaggcaaagcccacggaagctgttgctgcagcttaatctgttccccagtttgattcatggaatggtaaacttaatgcagttcacatggattgtagagtatgtatac

SEQ ID NO: 194007 - DNA, 410 bp, Gossypium hirsutum
cccacgcgtccgcccacgcgtccgatttcttcttctcctttgctctcccgctctttgaatttccgggcttaaaaagctatgtctcagactgttgttctcaaggttggtatgtcatgtgagggctgcgttggagccgcgaagagagttttggggaaaatgcaaggtgtggaatcatatgaagtagattcgaaggagcagaaagtgactgtgaagggcaacgtccaacccgatgcggttctgcaaactgtgtcaaagaccggaaagaagactgccttctgggaaggagaagctccggcagaagccgagacaaagccggccaacggcttaaaatgtcttaagcccttattgattgattgattgaacatttcaaactatcctattcctatgaactgtagaattcttggatgatt

SEQ ID NO: 194008 - DNA, 854 bp, Gossypium hirsutum
cacagaggagttctcaggggaaaatggagaaatctttcttgtggtatactccattgcttggggaatatagtttgggaatctaatgttacagtattctatgcgataaaaagcttacagcatcctttgaatatactatctgatgaggcataatatgctaatgctttgtaacaaatttcatttacatacaacttacgattattcatgattaatctctgctttttatattgtgttgaatctcttctgatgtataatttcagctcgactaattttttattccgattgcagtttcaagagtagctatccttcatgggaaccagattctcaaggaaagcatttcttgtcaaatattcgaactttccgggatcaaatgttgcaagggcagggagctagacatgtatattcttctgatagactgtggcgaggtagcccgctgagagcctacagtgatagaaatgactttttatcaaaggaaatgcagcagaatattccaggcggctacaatatggattctttatggctaattgatgctaatcaaaagaatcacccatatcttctagattggtactatacctctcgagcgcaacagatgcctagttatagaagagacactgcagcaaggccatttgaaccagctgaggaacagcataagaattactggggtccgatcaacacaacgcatgatgaagcaagagataaagaataccggccacggcttaaaatgtcttaagcccttattgattgattgattgaacatttccatctctccctttcctatgaactgtagaattcttggatgattgtgatttacttcctgtgttggtaactaaaaacggaagatgatttcttatgatatt

SEQ ID NO: 194009 - DNA, 466 bp, Gossypium hirsutum
ctagcctatccatctttttctcctcagccgaaccctatccctttagcactagcgccgatctgccttcacaaacggcaaccgacaaattcgggcttttgatgataattttcggccttgtgattcccctttcaactccgatttcaacgaagccaagaggaatctgtggccgattcgcaaggtaagatcgcgccctttattttctctgttggtatcttacatacaatagcgttataaaatcaaaaaagaaaacaagataattcgacggagaactttaaggaaaatggaaaatcaccttcaagaatatctttcaaaatgccttttctaaatatttagtgtgcgtaatatgcgtatttcagagtgcgtgcgtagtatgcgtacactgtgcgtaagattacagagatgaaatcgacgactttttatagccagatttttttagaataaataaaaataaaaattacatttattt

SEQ ID NO: 194010 - DNA, 677 bp, Gossypium hirsutum
ctactcctttttctacttaaaaatacataaaataattagtaaaataacataataaacaacaaatcacccaaaggccaaaaccttcccatcccagagcaaattttgatgtaagaacatcatccatctcttcttttttttgaatgcaaatatagcatgtcccgtttgcaactgggggatttctattacatggctgaagatatcattgatgatatggatgaagacgactatggtagagctggtggagacatggatgcccatgaatatgacatgctgaccaaggtgactgatacatcttctggtcaagcacggaaggggaaggacattcagggaattccatgggaaagattgaacataaccagggaagattatagattgacaaggcttgaacagtataagaattatgagaatatcccggcctctggtgatgctgttgacaaggaatgcaaacagatggaaaaaggtgggaactactatgagttcttccccaacactagattagttgatccgacaatcctccattttcagcttcgagacttggtttgggctacttccaagcacgatgtgtaccttatgttcaattattcatttatgcatctggtcagcattgtcatgtcgtctctcggagatgcttaagttctccgggggcgttggcgctactgagaaacatccggggaacg

SEQ ID NO: 194011 - DNA, 451 bp, Gossypium hirsutum
attggaacagtcgatttctttttatttcatatttatttggactccacaagaatgcggcgagatttccgattcaatcgtcttggtcctaggaataaattaatattctattcctttcgagataaagagaaacatttatttcaagttacaacctaagagcctttttcaacatcttatctttctttgattccagaacacaacaagatccatttctatctatatattctatctattctataatagatagaaacctaaatcaaatcatgtcttcacatatcaaatatttccatatcgatacatatgacacttttgttctgccaatgtgatggagagtgagtgcgaaaaagaaactttcattttgagtctcctattatttaatttaatattattaaatattgtattagattgaggtataggagcttcgaatctttttctaatacaccgaacgcgtggg

SEQ ID NO: 194012 - DNA, 732 bp, Gossypium hirsutum
cttgattggtggaatcccaattgctatgcccactgtgttgtctgtcaccatggctattggtgcccacaggctttctcaacagggggctatcacaaagagaatgacagccattgaggaaatggctggcatggacgttctctgcagtgataagactgggactctgactttaaacaagcttactgttgatagaaacctcattgaagtatttacaaagggagtcgaaaaagagcatgttattctttatgcagcaagggcttcaaggactgaaaatcaggatgctattgatgctgcaattgtaggaatgcttgcacatccaaaagaggcacgggctggtgtccgagagattcacttcctaccattcaaccctgtagacaagagaactgctctaacctacattgattctgatggaaactggcatcgtgctagcaaaggtgcacctgagcagattatagatctttgcaaatgcaaagatgatgtcaggaaaaaagttcattcagttattgataaatttgctgaacgtgggacttcgatctttagctgttgcaagacaggaaatacctgagaaaacaaaagagagtcctggatccccgtggcagtttattggcttgttgccactatttgatccaccgaggcatgatagtgctgaaacaatcagaagagctctaaaccttggagtgaatgttaagatgattactggggatcagctggccattgccaaagaaactggcagga

SEQ ID NO: 194013 - DNA, 514 bp, Gossypium hirsutum
cccacgcgtccgcaaattcagagcttcctccaaacatggtcttagctcaagtctcagcttccctttctcttaccgttcatgatgtctcccctatcatctctccaaaaacaacccacaaactttctcgtgtacccatttccagtttttcaggaactggttccatttttgccactggttcccctttcttgataagggaatcatttaaccaaaggaaacctgtatgtaaagcaacaacatttaccattacatgtgagcaaagcaccaaggggggtagcaccaacagtttggatgtatggcttggcaggcttgctatggttggttttgcagtagccattactgttgaaatatccactggcaaaggactcttggagaattttggccttacaacacctttgcctacagtggccttagcagtgactgcgttggttggtgttttgacagctattttcatctttcaatcaacctctaaaagttcttaagatttatatgtttaatgctgggttctttttttggg

SEQ ID NO: 194014 - DNA, 743 bp, Gossypium hirsutum
cccacgcgtccgatcgagctgatgaagcatttagtatgcggtgaggttgtcgacattcgagatatcatcaatgtgagaaacttggatggaagaactgctttgcatatggccgtaactgagaatgttcagtctagtctggtggaactactcatgtccgtgccatctattgacctgaatgtttgtgatgttgatggcttgaccccgttagatctcctcaagagaaggcctaaatctgcatcttcggaaattttaatcaaagaactacttgcagctggaggaatctctaggggtcaagacaatgtagcaaggagtgctcttgtttctcatctgaaggagcacggtgtaggtgctagtcctggaacatcattcagagtccctgatgcagagatatttttgtacaccggtgtggagaatacatacgatgcacgttgtgataaagaaagcgtggaatatagctcgtgcctgagtgaactaagcgacttgaacttgagtacttcgtttgatactaagaagtcgagctccgtaaatcatactgcgagacgactgaagaattttctccattggcctatgaagaaggaaagaaaagctactagcacggaatcgggagacactgatgatcctgtggaggttacgagtgcttgtcgaaactggccagacattcatattccgcttcgtgaaaagtacactaaatctgtatctcttccaaataacaaaaggacccttgctcttcacaatgatctttc

SEQ ID NO: 194015 - DNA, 777 bp, Gossypium hirsutum
cccacgcgttcgcccacgcgtacgggtttcctttcttgtcgttgtaatctcaacaaaccccgtccaaatgcctcgtaacatggtcgtgaaccgtctaatcacttcgctgcctccacaaatggcgacccaatccctctctcgctatctcctctccaaacccaaatccctaacctccttcctcttcccttcatgccgccctttctcttccttttccccctcccgccgccgcttcccccgtcaaaacccttataacctcatcgccatccccttccctctctttcctccgtcgcctccgtgccccactttgctactcgctcctccttcgcgactcactttcccccactgtcaaatcgttctccactcgagcagccaggtcctccctcaatgacccgagtcctaattactcgaatcggcccccgaaggagacaatattgctcgacggctgtgattttgagcattggctcgttgtggtggagccccctaaagaggatgctactagggatgaaattattgatagttatatcaaaaccctagctcaagtagtgggcagtgaagacgaagctagaatgaaaatttattcagtttctactcggcattattatgcctttggagcccttgtttctgaagagctctcgtacaagatcaaggaacttcctggagttcgttgggttcttccagattcttacttggacgtgaaaaataaagattatggaggtgaacctttcattaatgggcaagctgtgccttatgatcccaaataccatgaggaatgggtga

SEQ ID NO: 194016 - DNA, 464 bp, Gossypium hirsutum
cggacgcgtgggcaaacctctggtggctaaaaccaaaaaacctgttggggttcgtcaaaggaagtggggcaaatgggctgctgagatcaggcatccactcaagaaaaccaggatttggttgggaacttacgatacccttgaagaagcagccaaggcttatgaagctaagaagctcgagtttgaggctctcactgttgctgccgccgcctctgcttcatctgataaaaccaacgacctttcatgttctgcagctgcttctcacaacaacactgttccctctgcttcagaagagtctgagagccttgtatcgcatacttcaccatcctcggtgcatgaattggatacttccgcatcttgtatcagtctctaataacaatgatgattgcggtgatgccaacaaagaggtgttcgatgcgaactttgctgatataccgatacctgacctctgtttcattgatgatcca

SEQ ID NO: 194017 - DNA, 1204 bp, Gossypium hirsutum
tacaagatcaagtgggggttctactcccttgagatccccatctgttcagcctccattgccaagctttaatactgcttctgctgatgcactgaattctgtaccagtgcctcttcgtgatgctctaactgaagttttctcaaagctttccgtagaagttgcttcgaaagcttcatctgccagtccattgttgggtgatcttttggagtccttgtctaagatgggacaatcctacttgagtcctgcttcccaacctggagttggtgctgattctggcattcctgttggatcttctgagagcccttctggaccatatgctccaactggtgttttaccaaaatttacagctgttgattcaagcttcaagactggcaaggaagccaacactgaaaacgcagcagatggtgtggatgtacctgctgtttctgatccagctgctgttgatttgaatgctgaccctctttatgatgccaaccttactggatatactaccatgccctctggaccatctgcatcgaacatttgtgctcataatgacaagaaaaacacataggagaacaatggacgtaacaaggggaagagtgtgagcatggatgcatcaactcccttctttgatactacaaggaaagattatccttcaaatgaatgtcccttcagtggagtgcctgtagcaaatggccctactgtgcctccggtttcgtaccatcccttcagtccaagtaataggagccttggatcgactgatggaaatgtcttgtttggtacattccacaagggagttcagtgtgatggttgtggggttcttcccattactggacctcggttcaagtctaaagtaaaagacaactatgatctctgcagcatctgcttttctaaaatgggaaatgaagctgattatataagaatggacaagcctatgcattaccggcatccatggtgtttcagggcatcaaatgatcatgttccaagagttggcccagcactccctcatgtcttgaggaatcgtgtactaaagttgtctcggcctaaactagaaagtcactttatcttggatgtcaatgtattggatgggactgtaatggctccatctacaccatttacaaagatctggcgaatgcgcaacaatggtactctgccctggtatcgtgggatgcaacttgtctggattgggggagacaagttaacaaatgcaatctcggttgatata

SEQ ID NO: 194018 - DNA, 752 bp, Gossypium hirsutum
gacgtcaacgtcttctgtgaatggtgaatatcctgttgttattattccgaagtggccagacaggctaacaacagctccttcaagggccttgggcgtgaaaaacgggattgacttgtttcgggcagacacgaggcggtgggcaaggagagttgcctattataagaatactctgaacctgaagcttgggactccagcagtacgcaatgtcatggacatgaatgcattttttggaggttttgcagcagcacttgtatcagatccagtatgggtgatgaatgttgttcctgctcggaagccattaactcttggtgtaatatatgacagaggccttattggagtataccatgattggtgtgaacctttctcaacatacccacgtacttacgattttattcatgtagctggcattgaatcactaataaagcttcctggttcaagcaagagcaggtgtaaccttgtggacctaatggtggagatggatcgcatgttgcgtcctgaaggaacagctgtgattcgagattcacctgaagcaatcgacaaagtggcacgcatagctcacgcagtaaggtggacggctaccataaatgacaaggaacctgaatcacatgggagagagaaaatcctggtagcaacaaaaaccttttggaagctaacttcatcccattgagacagacttgttctttataatgtaggtattttccttttcgtttcaatttttttattatctcgagccaagttgtcttcctcatgca

SEQ ID NO: 194019 - DNA, 605 bp, Gossypium hirsutum
ctttttctttttcatttgcttaaaactatagagccacggtttagcagagagagagagatggggagctgcagcggcatggcatcggctgcctcggggttcttgttaatgcccagtctcaccggcactgctgcttctaagaccaataacatcagcatgctcttttccccttccagaaacaactactacaatggctcaaggctcgtcgtaagggcggctgaggaggaggcttcgccaccagcaccaccaccagcagccaccactgcgctcaccagaaggtggtgaagcccctaagcctaagccaccaccgattggaccaaaaagaggaaccaaggtgaggatccttagaagggagtcctactggtacaatggctatggatccgttgttacagttgaccaggaccccaagactcggtacccggtggtggttcgattcaacacaggcaaccatgccaatgtatctaccaacaactatgcactggatgagattgaagaagttaaatgagattagtccatcaagtctttgtaattttatgttgtattttgtatcgtattacaacctcacaattcatatactaatgtaatgtatatctgcctttcaaatctaa

SEQ ID NO: 194020 - DNA, 592 bp, Gossypium hirsutum
gtgcataggtgtcagcttcctagtggatgtataacgtaaaaaggagtccactttctcaatatgagataaaattcattgataaatttttttttaaaaatattccaaataattcaaggcctctcaatcattccttttctttttctttttcatttgcttaaaacgatcgagccacagttttaagcttagcggagagagagagagagagagatgggtagctgcagcggcatggcatcggctgcctcggggttcttgttaatgcccaatctcaccggcactgctgcttctaagactaataacatcagcatgctcttttccccttccagaaacaactactacaatagctcaaggctcgtcgtaagggcggctgaggaggaggcttcgccaccagcaccaacaccagcaaccaccactgcgccaccagaaggtggtgaagctcctaagcctaagccaccaccgattggaccaaaaagaggaaccaaggtgaggaaccccaagactcggtacccggtggtggttcgattcaacaaagtcaactatgccaatgtatctaccaacaactatgcactggatgagattgaagaagttaaatgag

SEQ ID NO: 194021 - DNA, 505 bp, Gossypium hirsutum
cccacgcgtccgggaaaatccaaatttccctttcacaatttttctgccacactatcccttggttacagacacagaaaagatcagagcgtggagacatggttagctgctgcaacatggcatcggctgcttcaggtttcttgctaacacccaatgtttctgcagggacttctaagaccaacaacaacaacatggtgtttttcccatccaagaccaacaacacctcaaggcttgttgtgagggcagctgatgaggaggcttcaccaccaccaccctctccaaccccagcaaccaccactgcaccacctgaagggggtgaagctcctaagcctaagccaccaccaataggaccaaaaagaggcaccaaggtgaagattcttaggagggagtcctactggtacaacagctatggatcagttgttacagttgaccaggtcactctttctctctttcttcttccagctccatttgcatgcatgcatgcatgtatgaaggaactatggatcta

SEQ ID NO: 194022 - DNA, 403 bp, Gossypium hirsutum
gcgccaaggtgaagattcttaggagggagtcctactggtacaacagctatggatcagttgttacaggtgaccaggatcccaagactcggtacccagttgtggttcgattcaacaaagttaattacgccaatgtatctaccaacaactacgcattggatgagattgaagaagttaaatgagtcactgtttcattttgtaataattttgggtttcaatgatcctatggctaatatatatatcgtcttcccccctctatctggctttgagcttgtttctaccaaaaacgacgtgtacaatactatcatctttctcttgaggtctctcatttattaatgccttactttcctaaaaaaaaaataaaaatttataataataatatgtaaaaaaaaactatatttttttt

SEQ ID NO: 194023 - DNA, 423 bp, Gossypium hirsutum
cttttggaggaaaaaaaagaaaaatgcgctaccccattctacaagccaaatatgagcttcaccatggtaaaaccatggattcactggagttatcttcaacctaccaaattcggcaactacccatcttcaagcagcaccaggcttttcaacaatggctgccagcagattgatgaaggcaacaagagtaaaagaaggggagcttttgttaaagtgaatgctctaccagactggcctctaatggcagttttagttcatcatgttcaacaacttgatgcccaaagagaaattataaccaataaatctatttggcatcttagtgatgaagccattaaaaaaggttatgctttctacattatgttcacttgctggggatgtttgttttttgggtccaccaaggatccatactatgattctgaagtatac

SEQ ID NO: 194024 - DNA, 468 bp, Gossypium hirsutum
aaatttcagaaccctaaatccatcccctttcattcctttttcaatcccagttcacaaatttccctttgaattttgattttgtggagccttttaggacgcggtggaatcaggcgtaccggaaaatcgacgatgcggaggcaggagcaaggcccctgtaccccatgatgttagagccgccggagatgagatgggcttttatccggaaaatttactcaatcgtcgccattcaattgttagccacaatcgcggtggccgccacggtggttaccgtccatccgattgctcttttcttcgtcagcactggaactggatttgcactttacatagtcctaatcatcacgcctttcatcactctttggcctttgtattactatcaccagaggcatcctggtaattatcttcttcttggggtttttacgatttctttggcgtttgctgttggattgacgtgcgcttttaccagtggga

SEQ ID NO: 194025 - DNA, 745 bp, Gossypium hirsutum
cccacgcgtccgcccacgcgtccgagaatcataaaaataaacagagagagggaaaaaaacaataaagagaaaaaatggatgaagaggagcatgaggtgtacggaggggaaatccccgacgaaggagagatggagggcgaattggaccctcagaacgccgacgtcgacatgtccgccgccgatgaagacgctgtcaaggaattggacgagatgaagaaacggttgaaggaaatggaagatgaagcggcggcactccgggaaatgcaggccaaagtcgagaaggaaatgggtgctgttcaagatcccgctggtgcaacagctaatcaggcgagcaaagaggaagcagattcacgatcagtttttgttggcaatgttgattatgcatgcacacctgaagaagtgcagcagcattttcaatcttgtggcactgtaaacagagtaactattctgacggacaagtatggtcaaccgaaaggatttgcttatgtagagttcctggaagcagaagctgttcaagaggctcttgtgctgaatgaatctgaattacatggccgccagttgaaggttatgccaaaaaggactaatgttcctgggatgaagcagtaccgtccaaggcgattcaatccttacatgggctaccggtccaggaggccctatataccgccttattcctattctccttatggattcggcaagattcctagattcacgaggccgatgcggtatatgccctactactagaagac

SEQ ID NO: 194026 - DNA, 792 bp, Gossypium hirsutum
  unsure (1)..(792): unsure at all n locations
aaaaccagtgccataaacatgtttctcccaatctttttcattttctctttcctattttcctccaccaacgcagccgacttctgtgttggggacttgaatggccctgtaggccctgcaggctattcttgcaagaagacagccaccgaagatgacttctctttctccggcctcctccgtaccgcaggcaacacttcgaacctcgtaaaagctgcaataacaccagccttttcgactcaattcccgggtgttaacggactcggcatttcaatagctcgtttggatttagctgttggtggagtgatacctatgcatacacaccctagggcttctgaactcattcttgttatggatggcacactttttgctggtttcatatcctcagataacaaagtttactccaaatctctgaatgaaggagacattatgattttcccacaaggtttattacatttccaaatcaatacaggcaaaactcaatccgtggcatttgtatccttcaacagtgcagaccctggtgtccaaatcctggactttgccttgtttacaaatgacttgccgactgacattattgaaggaaccacttttctggatgctgctcagattaagaagctgaagggtgttcttggaggaactggttaatattatctgaacttgttgagagtccctttttttttcctatgctttcacgtttgcttgtgtcttcttgtcagtggtagtttggtggaaattactagcaaaaaaaaataccncngtngtgtntcnnttgtgtttctccttcaggtgccactgtcc

SEQ ID NO: 194027 - DNA, 613 bp, Gossypium hirsutum
caagctaaaagaaaaaacttcaaataaaaaaaaaccctcgaaatttctcgttctttctcggtcgatcctcaatactaatccaatcatgttgacagtgagtgtgaaatggcaaaaggaactcttgaaggctgtggaaattgataccagtcagcctccatatgttttcaaatgccagttgtacgatctgactggagtacctcctgaaaggcagaaaattatggttaaaggtggcttgttgaaggatgatgcagattggtcaacagttggtctgaagcagggtcaaaagttgatgatgatgggaactgctgatgaggttgttaaagccccagaaaagggccctgtttttatggaagatcttccggaagaagaacaagtggtatctttgggtcatagtgctggtctatttaatctgggaaatacctgctacatgaattctactgtacaatgcctccattctgttccagagttgaagtcttctttagtaaaatattcacattcaggaagaaacaatgacgtggatcagacttctcatatgttgacaattgccacacgtgatttatttggtgaacttgataaaagtgtcaagccagttgcacctatgcaattttggagg

SEQ ID NO: 194028 - DNA, 1175 bp, Gossypium hirsutum
  unsure (1)..(1175): unsure at all n locations
tccacgcgtgcgcccacgcgtccgcccacgcgtccgcccacgcgtncgggcttttacagaaggatcattggacttgattttctcaaactggctgttgatgtatctctcagataaagaggttgagaatttggccgaaaggatgctcaagtggttgaaggttggtgggcatattttcttcagggagtcttgctttcatcaatctggtgattgcaagagaaagaacaacccaactcactatcgcgagcccagattttacactaaggtctttaaagaatgccaagcaactgatgattctggaaattcatttgaactttctcttgttggctgcaagtgcattggagcttatgttaagaacaaaaagaatcagaatcagatttgctggatcttccaaaaagttgtttcagataatgataagggattccagcgcttcttggattctgttcagtacaaatctaatagcattctccgttatgagcgtgtctttggaccaggatatgtgagcacaggaggaattgaaacaacaaaagaatttgtggggaagttagatcttaagcctggccaaaaggtcctagatgttggctgtggcattggtggaggtgacatttatatggctgaggaatttgatgttcatgttgtgggcatcgacctctccgtaaacatgatatcctttgctcttgaacgagctactggactgaaatgctcagtggaatttgaagttgctgattgccccaagaaggtttatccggacaacagttttgatgttatctacagccgtgacactattctacacattcatgacaaacctgcactgtttagatctttctacaaatggttgaagccaggaggcaaactcctcataagtgattactgcaaaagttccaagactccatccacggagtttgctgcgtatatcaagcagagaggctatgatcttcatgatgtaaaatcatatggacagatgcttgaggatgctggttttgatgtgattcttgcagaggatcgaaccgatcagttcttacaagttctgcggcgtgaattgaaccaagtggagaaagagaaggatgcattcatctctgacttctctaaggaagactatgatgaaatagttggtggatggaaggcanagctgataagaagctcatcangggagcagagatgggccctttttcttgcca

SEQ ID NO: 194029 - DNA, 667 bp, Gossypium hirsutum
gtagaaattggcaattgctgtgtgtgagagagaaagtgagagtaatagtagtatcaataatttggcttaggttgcatctctgtgtctgatgcaacagagaggaagaactaacaaccgtagatcaaggtctttctccagatctcggcttgctgtcgaaggattttagttccccttttcactccccattaaaaaaaaaaaaaaaatcaattcctctcagagctcactagagatcttctctgttaaccatggcggctaacggatttgtaggagatgaacgcaaagttcaaaagaattactggattgaacactcggttgatctgacggtggaggctatgatgctcgactccaaagccgctgatattgacaaagaagaacgtcccgaagtgctctccttactccctccatatgaagggaaaaccattttggaactaggagctggcattggccgatttactggtgacttagctaagaaggctggtcatgttatagcattagacttcattgagaatgctataaagaagaatgaaaccatcaatgggcattataagaacgtcaaattcctctgtgcggatgtcactttcccggatttggcttttacagaaggatcattggacttgattttactaaactggctgttgatgtatctctcagataaagaggttgagaa

SEQ ID NO: 194030 - DNA, 415 bp, Gossypium hirsutum
tttataaccctaagccttacataaaatacaaggtattgaaagagaagttggacaaagaaagagaaatgagtctgctttcgaatgcagattggggaccaatcgttgttgcagtggtcttgtttatcctcttgtcgccagggatgatgttccaattgccaacgaggacaagggtgatagagtttggcaacatgtgcacaagtgggatagccatcttggttcacgccataatttatttcagcttattcaccatcttgatcatggcaattggtattcacatacatgtttactagttgatccaaaatctcaacaaaaagggtaggctcttctttggctcctttccgtaatttggcttcactggtatttcattgttgtttgtaagagaaaatttggataggagtatgatgaatctatttct

SEQ ID NO: 194031 - DNA, 654 bp, Gossypium hirsutum
  unsure (1)..(654): unsure at all n locations
cggacgcgtgggatcatctccgatctcttctcgaaatggcgtcgtttcggttcttcatagttatctccctcgtttctctcatcctcatttcaactctcactccttcaatctccaagaccgccaaaagcgacgacgtcgagcttgacgacgacgaggatctccgttttctcgaagaaacggagggaaaaaaagacgccgctccttctcactcccacttcaacgaagaagatgacggcgacgacgagtaccccgacctggacgacgaggagttcgggaactaccacgatttcgatgactccgattcggatccgtacaaggaacccgaaatcgacgacaaggacgtcgtcgttttgaaggaagggaacttcagtgatttcattgagaaaaacaagttcgtgatggttgagttctacgcgccgtggtgtggccattgccaggcgttggctccggagtacgctgcggcggcgacggaattgaagggagaagaagtggtgttggccaacgtggacgccacggaggagaatgagctggcgcaagagtatgacgtgcacggtttcnctactgtttacttctttgttgatggagagcataagccttaccctggagctagaaataaggatgccatagtgacctggatcaagaagatgatagggt

SEQ ID NO: 194032 - DNA, 888 bp, Gossypium hirsutum
tccacgcgtccgtttccttgaaaatcagctgaccatatttacgaccctagctcgtcgctctatggatttttagtcaaatttgatagtcattttcttctatgatatgaaccatacccagggtttgatttgaattaagacgaccatctttcacgatttcgagctcgacccatttcgattctcggtatacccagacccgaaccgtattaaaacgatgtttcttttggattggttctatggtgttcttgcttcccttggtctatggcagaaagaggctaagatcttgtttctcggtctcgataacgccggcaaaaccactttgcttcatatgttaaaagacgagagattggttcaacatcagccaactcagtatcccacatcggaagagcttaatattgggaaaatcaagttcaaagcttttgatttgggtggtcatcagattgctcgtcgagtctggaaagattactatgctaaggttgatgctatggtgtacctggtagatgcctatgataaagaaaggtttgcagaatcaaagaaggaactggatgcactcctttccgatgaggcccttgccaatgtcccgtttcttatcctaggaaacaagatcgatataccatacgctgcctcagaggacgagttacgttaccatccgggcctcacaaactttaccaccggcgaggggaaggtgaacctggcagactcaaacgtccgtccgctagaggtatttatgtgcagcatcgtccgcaaaatgggttacggcgacggcttcaagtggatgtctcagtatatcaagtagggtaaatggcctcaaagatgcagtaggacagatcttacagggtgccaaaccccaaattccataactcccaacttaaagggggggacaaagaaact

SEQ ID NO: 194033 - DNA, 797 bp, Gossypium hirsutum
gcctctttttttttttctaatgatacgatgatgacaaagcagaggccttgattactacaatcctaccgtcttccactctcgaagatcctcacaaattccatctccaaatcccagcccaaagctaaaaactatgtttcttgtcgattggttctacggcattcttgcttccctcggcctctggcagaaagaggctaagatcctctttctcggcctcgataatgccggtaaaaccaccttgcttcacatgttgaaggacgagagattggttcagcatcagccaactcaataccccacatcggaagaacttagtattgggaaaatcaagtccaaagctttcgacttgggaggtcatcagattgctcgcagggtctggaaagattactatgctaaggtggatgctgtggtgtacctggtagatgcctatgataaagagaggtttgcagaatcaaagaaggaacttgatgcacttctttcagatgagtccctcgccaatgtcccgtttcttattctaggaaacaaaatcgatataccctatgctgcctcggaggatgagttacgttaccatcttgggctcacaaactttaccactggcaagggcaaagtaaacctagcagactcgaatgtccgtccactagaggtatttatgtgcagcattgtccgcaaaatgggatatggtgatggcttcaaatggatgtctcagtatatcaactaaggtaacgatccgtgaaatgcgattgtatgatgttacagccttccaagctctgatcccatctgatcactcctgacttcaggaaaaa

SEQ ID NO: 194034 - DNA, 947 bp, Gossypium hirsutum
ttgtttctcgtgggcggacgcgtgggatttgtaggagcaaaatcacttgtaagctttacagggaaaaagggggaaaaaagtgaggatcaagcatagatggaaaacatgggagttctaggcaaggtggtggattaccttctattgttatcattcttcagcatcacattaacagctcagttggacatccccgagtccatcctcccccacgcctacaatcccttctatcaagtttataccacgttaacccaagattatttggtgcttgagcagcctgcttttttcaaggcacttatgacgttggaacttgtttaccaactccctctcgctttgcttaacatctatgggttgttatactctaagccctggttcaacaccacctgcctcctctttggtgcctctatcgttgcctctacgacagctatggtgggagacattctcaattcccagaaggcatcagccaatttgatggccatgtattatccaccgtttcttccattaggggttctggctatagtgcgaggggtggttggacaatcgagcaaggctgctccatccattggcaatggaccttcgtcggctgtgaaaaagagggcttaaagttgatccccgatcagtttcaaacgtcttctttaagagaccatgctaatacaataataagggagggattctaatctgtttgatccgcagctaaataaggataaaaaaaaaaatgaagtaggcaaattacaaatatattagcaatctaatagtatttgtaatacttgcttaggctgcattttcagcttgttttgtttacagtgtgtatcgcagtttttagtggcctacttgtctttgattaatgaaaatgttcctacaaaaaataatatatgccgttttactaaaacatacaatacacactcttttttcccaaagcataataaacacatttttttacggtggtccttttt

SEQ ID NO: 194035 - DNA, 793 bp, Gossypium hirsutum
ataaggcaaaaataatggcagccatgggctgcgttgcaaagctcaatgactgctcgttctctatcctcaaactccttcttgggccaacgtctctcaattcctccttctctctcccctcttcacatcaaaccaagagagaatccatgtctcattgtagtgaagcttaaacgatgggaacggaaggaatgcaaaccgaacagccttccagttttgcataaaatgcacgttaaggttggagataccatcaaagtaatatcgggtcgtgataagggcaagattggagagataagcaagatcttcaagcataacagcaccattgtagtgaaagatataaacctgaagacgaagcatatgaagagcagaggagaggatcaaccgggacagataattaagattgaagcaccaattcacagctcaaatgtgatgctgtattctaaagagaaagaagtgacgagccgggtgggtcataaagtgttagataacgggaaaaaggtccggtacctcataaagccgggagaaatccttgacagtgaggagaattggaagaaactgaaggaagctgcaaaagagaaaactgaagtagctgcagctgctcctgctgcggatacgggtgctgcctcttagaacctaaaatatcataaaacttgaaaaactaatgtggcttctggaaatttagattattttttatctgtagtcttccatctttatgcaccaattacttttaaaatatattggaaggttgtcaattctttttccaacagtaaaaaaaaaaaaaaaaaagtcgacgcggccg

SEQ ID NO: 194036 - DNA, 475 bp, Gossypium hirsutum
cccacgcgtccgcccacgcgtccgaacgcttttgccaaaaaaaaaaaaaaacctccattgaatatggctttatccatggcttccacttcattttcaagcttctcaataatcaggaggcatcccaaaaaattattttcgagaaaagttacgacattgttacgaggggaaactcgtacgaaagcaacgaaaggtggagtctcgagtgtttgtgaaccactgcctcctgatagacctttgtggttccctggtagcacacctcctgaatggcttgatggcagccttcctggagattttggtttccatccacttggattaggttccgatccagaaaccctaaaatggttcgcacaagccgaactaatgcacgcaaggtgggcaatgctggccgtggccggaatcctcatacccgaactactcgaatccttgggcttcatcgacaacttctcatggtatgacgccggctctaaacaatact

SEQ ID NO: 194037 - DNA, 666 bp, Gossypium hirsutum
  unsure (1)..(666): unsure at all n locations
aatttctccaaagttgaccgctgccgccggttctccgtagctgccaccgccactactactccacagagcgaggattctgacgtttccactaaaattcctcctgatactcgcattcccgccaccataatcaccggcttttcgggctctggctagacaacattactcaatcacatcttgactgcacatcacgggaagcgtatagcagcgatagagactgagtatggtgaagtagacatcgatggctctcttgttgctgctaaagctgctggggctgaggacatagtcatgctaaacaatggctgtctctgctgtactgtaaggggtgatcttgtgaggatgattgcagagctagtcagtaggaagaaagggaaatttgaccacattgtaatcgagactacagggttggcaaatcctgcaccaataattcagacattttatgctgaggatcangttttcaatgatgtcaagttagatggtgttgttactctagttgatgcaaaacatgctggctttcatttggatgaggtcaaaccaaanggagtggtcaatgaggcagtagagcaaattgcttatgctgaccgcataattgtaaacatgactgatcttgttggtgagccagaaattacgtccctggttaagcggataaggagcattaatggtatggct

SEQ ID NO: 194038 - DNA, 549 bp, Gossypium hirsutum
cctgaatttccctacgttcttcattccccttaccaaaccagctcgcctatctatggctactccactaaggagcaacagcaggctgtccactgccatggagaggaccggccagtgggttttctcccaagagattcctactgatgttattgtcgaagttggtgtagccaatttcaatctccacaagttcatgctggtggcaaagagcaattacataaggaagttgataatggaaacaaatgaagcggatttgacaagaatcaacctgtctgaaatccccggtggccctgagatcttcgagaaagcagccaagttctgctacggcgttaatttcgagattacagtgcataacgtggcggctctccgatgtgctgccgagtatcttcaaatgacggataaatactgcgacaacaacctggcagggcgcaccgaagatttcctctcacaggttgccctgtctagcctttatggcgccgacgtcgttcttaaatcatgcgaggatctgctttccatggctgaagagctcaagattgttcaaagatgcattgatgt

SEQ ID NO: 194039 - DNA, 1575 bp, Gossypium hirsutum
ctccatcagagagatttaatcaatctgagcgatagaggaaaatcacgaattcctgataaagtgacggaaaatatatacaatgcatagatcgcgatctccattgctaatagctttatcatttctcttcacatccttcaccatctctaacgctctttacgggccgtcgtcgccagtggttcagctcactccatctaatttcaagtccaaggttttaaattctaacggagttgttttggttgagttcttcgcgccttggtgtggccattgccaaactttaacacctacatgggagaaagcctccaatgtcttgaaaggtgtcgctacagtggcagccctcgatgctgatgctcataagtctctttcccaggaatacgggattagaggatttcctacaataaaagtgttcgtccctggaaagccacctgtagattatatgggagctagagatgtcaaacctattgccgaatttgctctccagcaggtaaaggcacttttgaaagaccgtctcgctgggaaagcatctggaggatcaagtgagaaatctgagtctagtgcatctgtagaattgaattcccacaactttgatgaatgggtgctcaaaagtaaagaactttggattgtggagtttttcgctccttggtgtggacactgtaaaagacttgctcctgagtggaagagggctgctaataacttgaaggggaaggtgaagcttggtcatgttgactgcgattctgagaagtctctcatgagcaggttcaacgttcaagggttccctaccatcttagtatttggtgctgacaaagacagcccagttccttacgagggtgctagaaccgcctctgctattgaatcatttgctctagagcaactagaaactaatgtcggaccggctgaagtgacagagctgactggcccagatgtgatggcggagaaatgtagttcagctgccatatgcttcgttgctttcttgcctgacattctagactcgaaggctgaaggaaggaacaagtacttggacatgttattgtcagttgcagagaaatttaaaaggagtccttacagctatgtttgggctgctgctggtaagcaaccggatctcgagaaccgtgtaggtgttggtggatatggttatccagctcttggagccttgaacgtcaagaaaggagcatatgctccactcataagtgcatttgagctcgagcatatcattgagtttgtgaaggaagcagggcgcggaggcaagggaaatttaccactggagggcacacccgagattgcaaagacagaagcatgggacggtaaagatggagaaatcatggaagaggatgagatctcacttgaagaactcatgggagattttacagcaagtaaagatgagttgtaataaaattggaattagtttagggtaaaaagaagggttttgatgttcgggcgtgtccgttattttggtttttactgattgaaacaattatcccaagtgaaacagattattagagatgatccaaatatttaaggagtgttatttcatctaccaacaatggttaataacctgggttggtagatatactattaaaa

SEQ ID NO: 194040 - DNA, 1195 bp, Gossypium hirsutum
  unsure (1)..(1195): unsure at all n locations
gtttcttgacaacctcacaaatatatatgtgagattcaaccgtaagagacttaaaggccgtactggagaggaagactgccgtatggcactctctactctttataatgtgcttctgacttcatgtaaggttatggccccctttacaccattcttcactgaggttctttatcaaaacatgcgaaaaatctgtgatggagcagaggaaagcatccattattgtagtttccctcaagaagaaggaaagaggggggagcgaattgaagaaagtgtggctagaatgatgaagataattgaccttgcccgcaacattcgcgagcgtcacaacaagcctctcaaaacacctctgagggagatggtagttgttcatccggatgaggactttcttggtgacatagttggcaaattaagagagtatgtactggaggagctcaatataaggtctcttgttacatgtaaagacactttgaagtatgcatccattcgtgcagagcctgattttagcgtattaggtaagcgactangaaaagctatgggagctgttgccaaggaaatcaaagccatgtctcaggaagatatcttagctcttacgaaagctggagaggtgactattgctacacactgtttgaagctgactgaaattaagcttgtgcgggaatttaaacatcctgatggcatgacagataaagagatggatgcagctggagatggtgatgttttggtggttttggatatacgtcctgatgagtcattgtttgaagctggtgttgcacgtgaggtggttaatagaattcaaaaatcacgaaagaaagctggccttgagccgacagatatggtggaggtctactttgagtcattggatgaagacaagtcagtcatccagcaagttttaaactcacaggaaaactacattaaggatgcaattggatctccattgctttcctctgacattatgccgctccatgcagtggtgcttagcgaagagattttccatggcatctataacatgtcatttaaaataagcttggtcagaccagcccttgttttcaaggcaaattctattctcgccttatattcaggaaattctaaatttgcacaaggcctgcagatttaccttctgtcaagggaccattcctgtttgaagtcggagtttcagcttggacgtggcaagataaaggttgattgcattgagaacttg

SEQ ID NO: 194041 - DNA, 802 bp, Gossypium hirsutum
  unsure (1)..(802): unsure at all n locations
gggaaatggcctcatccactgtcttcaccggtgtcagcctcttcaagtccaaaaactccactaaactcatcacttcaactcggttctccgactccaagcaacaactcagcctcaactcagtgaaatgttgctcaaaaacaaccgccgcaacaacggaggaggcgactggtcgtctagtcacggtgaagaacgggaacgattcgctcgaaatatgtcgagtccttaacggcatgtggcagaccagtggaggttggggcagaatcgaccgagacgccgccgttgaagccatgcttcgctacgctgacgccggtctctccaccttcgacatggccgaccactacgggcctgcagaagatctttatggcatctttatcaatagagtgcgtcgggagcgtccaccagagtacttggaaaaagtcagaggtctcactaaatgggtacctccaccagtaaagatgacaagtggctatgtcagggagaacattgatgtctcacgcaagaggatggatgtgccttcattggatatgcttcagtttcactggtgggattattcgaatcctggctaccttgatgctctaaaaaaccttactgatctgaaagaggaaggtaaaattaaaactggtgctttgacaaattttgatacggaaaggctgcaaataatactagagaatggaattcctgttgttagtaatcaggtgcaacattcaattgttgacatgcgcccccagcagaaaatggcagagctctgtcagcttacaggagttaaattgataacgnttctctctctctctctctctatata

SEQ ID NO: 194042 - DNA, 270 bp, Gossypium hirsutum
ggaaatttccagctctggactattgacttccagctcagttcctctctcgcactatgatctgtatttttaatataatatatgagagaagaacatgcaaccttcatccacttaaatcaatgacaccctctttcttcctgtatctctgcatctctttgtggtaactaccatctttgttcacgatggagattactgtacattctccattacatttcctttactaataaactatgttccatagacttgttctaaaaaaaaaaaactacattccaa

SEQ ID NO: 194043 - DNA, 602 bp, Gossypium hirsutum
gaaatcaaagtccaatgataagaaaaacaacaaagaggttacaaagcagatatatgctctagagaatattgaggaaggaattgaaggtattgacaatgagaagtcatcccttatgccgcaaatcaaatttgagaagaaatttggtcaatctccggtctgcattgcttcaacacttatggaggacggagggattccaaagggagcaaccactgcatcactcttgaaagaagccatccatgttgtcagctgcggttatgaagataaaacagattgggggaaagaagttgggtggatatatggctcagttactgaggatatattaacaggcttcaagatgcactgtcatggttggcggtcagtgtactgcattccaaaaaggcctgcatttaaaggttcagctccaattaacctctcagatcgtctgcaccaagttctacgttgggctctgggatctgttgaaattttcttgagcaggcattgcccaatatggtacgggtatggctgtggattgaaacccttggagcgcttttcttatattgcctctgtcgtgtaccctttgacatcagttccactgctcgtttattgtacgctgccagctatat

SEQ ID NO: 194044 - DNA, 843 bp, Gossypium hirsutum
cttcttctagtcctcgcactgtggaagagatcttcaaagactatagcgctcgacgctccggtcttgttcgtgctctcacttacgatgtagatgatttctactcgcaatgcgatccagataaggagaatttgtgtctgtatggacacccaaatgaggcttgggaggtagctttaccagcagaggaagttccacctgagctccctgagccagccttgggtatcaattttgctagagatgggatgaaccggaaagactggctttcactggttgctgtgcatagtgattgttggttgctttccgtgtctttctactttggagctcggcttaatcgcaatgaaaggaagcgcttatttagcatgataaacgatcttccaactgtctttgaagttgtaactggaaggaagcccgtaaaagacaagcccacagtagagagcggaagcaaatcacgaaacagcacgaagaggtcactcgatgggcagccgagaagcaatcctaagttagctgatgatagttacgaggaggatgaagaagagcagggcgacaccttttgcgggatctgtgggggaggatacaattccgatgagttttggattggttgtgacaactgtgaacggtggtaccatggaaagtgtgtgaagataacaccagcgaaggcagaaatgattaagttttacaactgtcctttgtgccaaaagaaggtaaggcaatagccgtcaatggagggattaaccccgattggttttattcaccgatggtgtttgtaaagcagctatgggcaaatgagtgcgtaattctgttgttactggcctatcctccctagaatcgcaagccagtcgctttggt

SEQ ID NO: 194045 - DNA, 748 bp, Gossypium hirsutum
ccttcttcctctgaaccacaaactaatacctccttaaacatcattttaatacaataaatatcaaattaaaatatttttaaaaagtgggcaaagccgcaaaggaaaacaaaacaaggggcgaaaccttaattccatcaaaataattcaaaggaaaatatctgcagaatcataatggagaattatctctttctgttctcgcttgttcttctctttggtcttttacccttttcctctcaaaccccaaaccctaaaaaccccaatcccaaacctccgctcacccaggcacacaccgagcttataaactatggttttccgatcggtcttcttccggcctcggtgacgaagtacactcttaaccaaacatccggtaacttcgccattgatctcggtggcacgtgcaagatcacgctcccgcctgacaactacctggctacttactcgaagcgggtaacggggaagattgaaaacggaaagatagcggaactcgatgggatcagggtacgggctttgttcaaatggtggtccataaccgggattcgatccagcggggataatttggtctttgaagttgggatggttacggctaaatatcctgctaagaactttgatgaaagccctctctgtgaaggccgtcattcgtcttcttaaaaagctaaaaccaaagtgaaaaataaagggcttctcagtttgctgcaaggattaagttattacgtacgtgtttctgaatcgtaagtatgtttgtctcgtc

SEQ ID NO: 194046 - DNA, 786 bp, Gossypium hirsutum
aaacggcagacgaaaccaaagaacacaaaacgaaaaacgcgatctttacaaacatggagatgagtttaacccaaatagccaagccaccaccatgtcttgttaacaaaaattctctttttacaaacaaaaatagagtaaaatccactgtagaagctctaaggaattcatatccaaaaagagcaacactatccagtaattgggatgtctctaatttatcccctctttcttcatcttcaacaactccaacttggtttcccagatttgaagagcttgacactaccaacatgcttcttcgtcaaaggattatatttttgggttctcaggtggatgacatgacagcagacttgattataagtcaactgttacttctcgatgctgaagactctgagaaagacataaaattgttcatcaattcacccggcggctctgtcactgctggaatgggaatatacgatgccatgaagatgtgcaaagcagatgtttcgactatttgtctagggctagctgcatcgatgggtgcgtttctcttggctaccggtacgaaagggaagaggttttgcatgcctaattcgagagtgatgattcatcaaccacttggaactgctggaggcaaagcaacagagatgagcatacggataagggaaatggtgtaccataaggttaagttgaacaagattttatcaagagttacaggaaagcccgaagatcagatcgaagtagatacagaccgggataatttcatgaatccttgggaagccaaggaatatggtctaatcgacggagtta

SEQ ID NO: 194047 - DNA, 567 bp, Gossypium hirsutum
ggggctgtgtgtccatggaagtgctagcaacctcctctgcatcttctacataccctcttttcactttagataaccccaacaaaccattttctttcacattcaaccccatcatcatttctcaggttcatccatggaaatcttttcctgttaagaagattgaagctcgattattgtgtcggattttgtgtaaacggacgaatctcgacaactctggaagttggcgcagcagtactaatgcgatttgcaagcacaagtttgtgtttcacgcactctgcggaccgaataaaaactttacatctcagtctggtttatttgcaataaggcatgggcacttacttagatcctggaatacaagtagtcatcaaaaggtgaatagtcattcgcaaaagatcagagaacatttctcggttgttttcgttcgcttagttgctgctatgttgctggttacttctgcttccgtcgctctaagcaacacgccctcatgggcgctttctgaagaaaatctcctctttctagaggcatggagaacgatagaccgtgcatatattgacaaaactttcaatggac

SEQ ID NO: 194048 - DNA, 466 bp, Gossypium hirsutum
gttcacttctgcttctgcctgcctgcctgcctgcctgtaatggcttcctacaaactctgtgccctctttctgctcttcactcttcttttccactcaacattcaccactgcttgcaattcatgcaaacccaaacctccaccatgccctccacctttcttgccctaaggacacattgaagctcggtgtctgtgctgacgtgcttggacttgtcaacgtgattgttggaacccctccttccagcaaatgctgtgctttgcttcaaggattggctgatttggaagctgccctttgcctttgcactgccattaaagccaatgtacttggaatcaacctcaacatcccagtttctcttagtctaatccttagtgcatgtcagaaggaggttcctccaggcttcaaatgtgaataaaaaagatatattatcatgttgttggctaaagtttggtctaaagtactttcatttcta

SEQ ID NO: 194049 - DNA, 957 bp, Gossypium hirsutum
ttcggcaacccttccgccaacccttccgttttaggaaaacgaaccggaagcgtcgttaagtcgtgtaaatattgaactcgtagactggttgaagtaaaagcgaaaatggaagggattggattggaaggagatgggtcaaacggggaagctcttgggaagtgcttgagtgggttggtggacgatggtagcaccgagagtcatcgatactacctgtcccggagaactgtgctggagatgcttagggacagaggctatgccgtacccaacactgaaatcgacctctctctccatgaatttcgtgccattcacggccaaagccctgattttgatcgtctcaaactctctgttactcataaaactgactcttccaagcggacgctggtagttttctatgggcctggtgtagttaaagtcagtgggattcggctcattgctggtctaattactagcaaagaaactttgacggggttgatattaatcgtgcaaaaccacataacaaaccaagctttgaaagctttagaccttttctcttttaaggtggagatattccagattactgacctacttgttaatatcacaaagcatgtgctgaagccccaggaccgggttactaacagaacatgagaaacaaaggctcttgcagaagtacagcatagaagaaaaacagctccctcgactgttaaaaaaagatgccattgcaagatactatggttttgaaaagggtcaggtgataaaagttacgtatgggggtgaaatcactgagtcacatgttacttatcgatgtgtctggtgatgaaacaaatcaatgctgtcgctgttctttatgtttcttcctgtaggaaaattgagtttgtagttttctgtccgaagtgttttcccgaacctttctatggggcttccgacctttgtttgctgttttatgaacactaattgagttggattcttctttaattttac

SEQ ID NO: 194050 - DNA, 573 bp, Gossypium hirsutum
tcggaaaactctgagagaaatggcttcttcaatgatatctttgcaaaccagcaatttgaggtctgcgtttttgggagagaaaactgggagctgtgcttctagcattcccataactcgcgtaagtttagtgaggaaggctatcgagtgtaaggagtcgagaatcgggaagcagccgataacggttccggccaatgcgacgattactatggagggtcaggacataaaccttaaaggtcctttgggagaaatggcattgacatatccacgagaagtaaaggtcgatagggaggaatccggagccctaagggtcagaaagtcagtggagactaggagagccaaccaaacgcatggccttttcaggactcttactgacaatatggtggtgggagtatcaaagggttttgagaagagacttcaactaattggtgtcggatatcgtgcaacgttagaaggaaaagacttggtgttgagtcttgggttttcccatccagtcaggatggcaatccctgatggcattcaagtaaaggtggaagagaacacgaggatcgtcataagtggatacgacaaaagtga

SEQ ID NO: 194051 - DNA, 376 bp, Gossypium hirsutum
gcgcgctgcaacagcagcaggcaggcgaagctcacgtatttcgatcccccatctttggcttattgcccaggatcgcccctttcattgtagtccgaaatgattttgaggagtgcatcaacgccgctactcaattcattgggtccacactctaaggagccatcgccggacctcgagtttccgtaccagatttctcgaacccgaaccctttcgttcacgggttcgcgttcgagctcgatttcggttgcatcgagcgacgattcgactcggaggatgacgagggcggtgtcggagacggatctcagggacctagtggttccgaaaattaaaaccgttcagaaaaatggcggcatcttgaatggggtttgcgttgaggaag

SEQ ID NO: 194052 - DNA, 493 bp, Gossypium hirsutum
acggaaaattcagaagaggattacacttttgggactagacatagagaatcatctacaaggcgttatgctaatggaggtggggaagatgaagaacagagactcgttggaaaaattaaggaaagtacatctttgaaagcccagacttgtgcatgatttcaactacccaacatcagatttcctcaggtcttggcatctttgtaagaaaaaattgcatggcaaagacatttacatgtataggggggaaaaggctccttgtagtgcagagtgtagatcaagtcaaataatgatggatgagaggaaagaacaatgtaaatcaaaagcttcaaaatctgggaaaaatcaaagcttgggttatgataaaacagagcaaattttctcaactgggattcttgcaatttagtccttttttccttttttgctctgtaaataaatatttatagaaaaatactatacaattttatgagggttaataattgaattttcccccaatctt

SEQ ID NO: 194053 - DNA, 933 bp, Gossypium hirsutum
cttttgcgctttcaaacgttttcatcttttacccctttttttcccccaaaattgataaattggttgtctgtttctgggagaatgaaaatgtattgaaatattaaataaaatatatattgggttctatatcattctcccactcgtagctctagcgttcatttaatttttctattcgtttgacaataactgactttatagttttcaaaccgcattgctggatgattgtgggcttgtagcacagcaatgagtggagtaaaaaagtctacctcagcaaaaataacattgaggggcttattgaatcaacctgataatcgcacttgtgctgattgtggtgctccagatccaaagtgggcatcagcaaatattggagtctttttatgcttgaaatgttgtggtgtgcacagaagcctcggtacacacatatccaaggttttatctgtggcattggatgaatggtctgatgaagaaattgatgccatgattgaagttggaggaaattcctctgctaattcaatctatgaggcttatatacctgaaggttatacaaagcctggcccaaatgctagtaatgatgagcggaggaaattcattaagtccaagtatgaacttcaagaatttttgaggcccagcttgcggatcacatcagggaaggattcttcttcttcttctactcaatcgaacatttctggaaagattttggatactatcctatcaaattcgacacagaaggaaggcatgctggcattcattcggttcctgtagggcaaagtagtaaaaggcacaaatttagctgtccgggatatgatgacgagtgatccttatgttgtcctgactcttgggaagcagactgttcagtcgactgtaatatcaagcaacttgaatccagtctggaatgaggaattaatgttatcggttcctagcaactatgggcct

SEQ ID NO: 194054 - DNA, 1073 bp, Gossypium hirsutum
attcccccaatttgttccccggaaaagttctcatttccacccaaatgcaaaaccccaattttctattctcccttttgttttctatatcgatcccaattctgttcttcaacaatttaatcgctgaatcaaccttcggccctgaaacaatggcgacaaccactactttgggcggagtccacccttcccaaggctcccaaaacagcgtcgagctcgaaaacctagcacgctttgccgtcgacgagcacaacaagaaagaaaatgcaatggtggagtttgtgagggttgtgaaagcaagcgagcaagttgtggcggggacgcttcaccatttgacggtggaagctgtcgacgccggcaaaaagaagctttatgaagccaaagtttgggttaaaccttggatgaattttaaagaattgcaggagtttaaacatgctggtgatgctgatagttccgcttcttttaccgcttgtgatcttggtgccaagaaagatgtccatggaccaatgctgcaagcggtggccacaaatgatcccgtagttcaggatgctgcggatcatgctgtgaagaccatacaacagagatccaattcccttctgccctacgaacttaaagaaatagttcatgccaacgctgaggtattggaagattttgcaaaactcaacatggttcttaaagtgaagagaggagacaaggaagagaagttcaaggtggaggtacaccataagaacgaagggacttaccatgtgaaccacatggagcaagaccagtcttgaaagctaacggtatggtaaaactgttaaaaagagtttgaatcttaatatgatgatatgactataaaaaagtgtgaaccttgtatcatgtgttcatctttactcctgttgtaaaacctatgtttgtaagaatgttcggagaacatacacgaataacatgtctttgtattatgtgttaacctcttggaatacagtgcagacctttggaatttacagtgctatagatttatgtttgacggcgaataaaataataaataattttatatttaaatttataatattttaatttttttaaattttttttta

SEQ ID NO: 194055 - DNA, 561 bp, Gossypium hirsutum
gcaaaggatttttcttcctgcaacatcaacgttgatgagaggttgctcctttgctacatatgaggttattccaaaaggacaaggaagagaagcacactgtgaccacgttgtgaaggatcaatgtaataaccaagtcgcgaatctctatcccaagccaaatgttggaggtcaacagaagctccaaattgggcagaatgtctcaagaaaggacaaaattaagtttcttgtcaccacacttcttgatcttaaagacagtaaagaagctgtctacagtgctcttgatgcgtgggttgcttgggagcagaattttcctattggacctcttaaaaatgtaatccttgctcttgagaaggagcatcagtggcatagagttgttcaggttggtaaatggatgctaagcaaggggcagggaaacacaatgggaacatatggacaactattacgagctttagatatggataatagagcagatgaagctcatcaattttgggtgaagaaagttagtgctgatctacattcagtgccttggcagttatgcggcctcatgatatcagtatacta

SEQ ID NO: 194056 - DNA, 432 bp, Gossypium hirsutum
cattcacacagcacatctcttccatacacatttaaagccaaaaaatatacttgctaatgcggattgcaaactgaaactgtgggattttggactcgctcggctgtcatttacggacgttccttctcctattctttggactgattatgtggcaactccatggtttcgtgctcctgaactgtgcggttcattttactccaactacacccctgcggccgatcatctcgtgtgtaggatgcatatttgctgagttgatcactggaaaaccatcgtttccagggaacaatgtggtggaccaattggatcttgtgaccgatttgcttggcactccctctgctgaaacaattgccaggattaagaatgaaaaagctagaaattatttgaatagcttgagaaaaaagaaaccaattcctttctcaaaaaaaatcccaaata

SEQ ID NO: 194057 - DNA, 432 bp, Gossypium hirsutum
cccacgcgtccgcccacgcgtccgaccacgcgtacgcccacgcgttcgcccacgcgtacgcccacgcgtccgattttttttcttttctgttttttcatttctgggaataggaatagagaaaagacaacaacaaagacaatgttgaatgtgaatagcatggcttctctatcaaactcaaagcggccggggcaatatttccattattataataagcattccagcacgtgttgtaaggtattaacacccaggaaatcagagctgcgactgcgaattgtaagggctccttcttcagctgctgctcctgatgttgatctcaacaccctcgaatgtgccatttccaagaaagacagtgaagcagtgaaagaagcacttaatcagctgagtgaaagtgggtgggcaaagaaatggagttcacagccgtatgtgtcacgt

SEQ ID NO: 194058 - DNA, 436 bp, Gossypium hirsutum
agccttccaaaaaccattgggaaaaagcctcctgagtcgctttttatgaaggagttgaagaggaggggggtgacgcccacttcactgctggaggatgccaaaagatccaattatgaattgaatgaggatatgaaaatagggaaagaaatggggtgttccactacaaggaatgctgtcgcaactgaattcgagaaaagctgatctaatcaaagggagcgatccatggaattgaacagtgaaggccttgaggggctagttccacgggctaaactgttgctaacacttggaggaactttcttccttgccttttggcctttgatccttttaactatcgcattcttttccgccctctacctttattttggaccatcattcatttataacggaaataagacattaggtttccttgcggaatacattgacccttacgaacttt

SEQ ID NO: 194059 - DNA, 675 bp, Gossypium hirsutum
ctaaactacatcgggcaaatgtgaattttctttctgaacctatcaaggatggaacaactggaacagtgatagttctcacaactccggatgctcagcgcacaatgcttgcttatcagggtacatcatcgactattaattatgattcttgcctggctggcatagtatccaagactaatatatttgttgttgagggttatttatttgaacttcctgatacgatcaaaactattatacgagcatgtgaagaagcgcgcaggagtggtgccctgatagctgtcaccgcatcagatgtctcctgcattgagagacactatgatgattactgggaaattgtagggaattatgcggatatcttgtttgcaaacagtgacgaagcgagagctctatgccatttttcttcaaaggaaagcccaatttcggcaacaaggtatcttagccactttgttcccttagtgtcggttacggatggacctaaaggatcttacataggtgtaaaaggagaagctgtatatattcctccttctccatgtgtaccagtggacacatgtggtgctggtgatgcatatgcatctggtgttttgtacggcatactacgaggtgtgtcggatttgaaaggtatgggtacattagcagctaggattgcagcgacagttgtggggcaacagggcacacgac

SEQ ID NO: 194060 - DNA, 913 bp, Gossypium hirsutum
atagtagagggaggtatccaccgggaatcggtgttggccgagggggcggagtgaacgcgaaccctagctttcagtcgaggccttcgcaacagcactacgtgcagaggaatttgttgcagaatcaccagcactttcaacaacaacaacaacaacaccagcaacaacaacagcatcagcaacagctgtggctcagacgagaccagttgcccggcggcaatgactccagtgtggtcgatgaggtcgagaagaccgtacaatctgaagccgtcgactctagttcgcaagattggaaggcgaggctgaacgtaccgccacctgatacccgctacaaaacagaggatgtgacagctaccaaaggaaatgaatttgaggactattttctgaaacgtgaacttcttatgggaatatatgagaagggttttgaaagaccatctcctattcaggaagagagtattcccattgctttgaccggaagggatattcttgccagagccaaaaatggcactgggaaagacagcagctatttgtgcattcctgccttggaaaaaattgaccaagataacaatgttattcaagttgtcatacttgttccaacacgagaactggctcttcagacatcacaagtgtgcaaggagctcgggaagcatttacaaattcaagtcatggtcacaactggaggtaccagtctcaaggatgatatcatgccactgtatcaaccagttcatttgctggttggaactactggcaaaattcttgaccttgctaaaaagggtgtttgcattttgaaagattgttcaatgctgattatggacgaagcagataaacttctgtctgcagagtttcaaccttctatagagcaggtgatacattttcttgcagcaaatcgtcaaattttgatgttttcagccacatt

SEQ ID NO: 194061 - DNA, 770 bp, Gossypium hirsutum
ggaaataggaacattaatcaaaatattattgaaaataaaaaaagggactcccttatagcaccaaacgaaaaacaaattattggattagagaatcgaaatcaagaagaaaaagaacccataggtgaagggggtcttgtatcagatgcacaaaaacaaggaaattttaaatccgttctctcaaaccaagaaaaagatgttgaagaagattatgataaatcagacaaaaaaaaaaaacgttgaaagaaaaagcaatacaagagcaacacggaagcagagcttgatttcttcctaaaaaggtatttgcgttttcaattgagatgggatgattctttaaatcaaagaataatcaataatatcaaagtatattgcctcctgcttagactgataaatccaaacgaaattgttatatcctctattcaacggggagagatgaatctggatattttgatgattcagaaggatttaactcttagagaattaatgaaaaaaggaatattgattatcgatccagttcgtctgtcggtaaaaaatgatggacaatttattctatatcaaactataagtattttgttggttcataaaaataaacaccaaattaatcaaagataccaagaaaaaaactatattgataaaaatcattttttatgaatttattgcaagacatcaaaagatgactgaaaataaagacaaaaatcattatgatttgtttgttcctgaaaatattttatcccctaaccaccggcgagaattgcgaattccgaattctttca

SEQ ID NO: 194062 - DNA, 359 bp, Gossypium hirsutum
cagtaacatatgcacagctcaagcattactagcaaacatggctgctatgtatcctccgcccccgggtccggagggcttaaaggccattgcacaacgtgttcatggtcttgctggggtatttgctttgggactgaagaaacttggcaccgtgggagtccagggccttcccttctttgatactgtgaaggttacatgtgctgatgcccattcaattgctgatgctgctcgcaggagtgagataaaccttcgggttcttgatgccaaaacaattactgtttcgtttgatgaaacaactactttggaagatgtggacaagcttttcaaagtattttctggtggcaaaccagtctcattcactg

SEQ ID NO: 194063 - DNA, 556 bp, Gossypium hirsutum
ttcacgtgtccgcaatccatttacaggacttgccttattaagcacgacagaagaaagaggccaaccagaggtacgaacaccattcatatcttcctcctgtcgacgtatctccaaaccaaactctacaatctcgacgatggctcactctcattctacccaaaacccagtgattgagcagcagagaatgataattccgaacaagcatggtgaaaaactggtgggattattgcatgaaacagagtctaaagagattgtaatcttatgccatggtttcagatccagaaaggattacaatactatgacgaaccttgccgctgctttagaaatagaaggaatcagtgtcttccgtttcgattttgctggaaacggagaaagtgaaggttcatttcagtatggtaactattaccgagaagctgatgatttacacgctgtaattcaacacttctcaagggaaagtcatgtcgtaagtgcaattcttgggcatagtaaaggggggaaatgtgcggcttctttatgcttctaaccatcaagatatacatataattgtaaacaattt

SEQ ID NO: 194064 - DNA, 402 bp, Gossypium hirsutum
ccctcatttctagggtttcaaccgcgcctctgctagatgatcggaggacctttactctccccccaaaggccaactctgacgatagagggagagtttctgacgagggaagagtgaatccactttggtgtggagaaacggcaatacggaggaatccgctcgaggaagccgtgtgtgggaatcactcgtgggatcgatctgctgctgctctagcgtcttccagaaacccctagggtttctggtgctttcacattattgggctcctttgggccgtttaggaattgggtcagggattaaattaggggtttgggtgtaatgggattttgggttggtgttttgggcctttattatttttttgggttaattgtaaatggactttttatggacatttattggatttttgtt

SEQ ID NO: 194065 - DNA, 463 bp, Gossypium hirsutum
cccacgcgtccgctacaaccccattttcagtctttcactccattcaccaaaaaccaatggctggcttatcggtcaacctgtgctggctgcagcacacctccatcaaccctcttatcctacgctgcacccctctgaacctacgcaccccatcccagaaaccattctccattaggtcccaagccgccccagtgctttcccaagatgatcttaaaaagcttgcagctgacaaagcagttgagtcagtcaaatcaggcatgatcctaggcctaggaacaggatcaacagcagcttttgtggtcgacaaaataggccaactcctttccacgggccaactttctaacatcgtaggtatcccaacttcgaaaagaacacaagaacaagctgcatcacttaacattcccttatctacccttgacttgcatcctcgtattgaccttgctattgatggtgctgatgaaggtga

SEQ ID NO: 194066 - DNA, 720 bp, Gossypium hirsutum
gcttgcgcctcgtttccaactgcccagttcttaactttagcggcaaagagagaaatttcggcgccagggccgcgccatgggtcgcctgcacagccgcggcaagggtatttctgcctcagctctaccttataagagaactccaccaagctggctcaagatctcttctcaagatgtcgaggagaacatttgcaaatttgcaaaaaagggcttgaccccatctcagatcggtgtcattcttcgtgactctcatggcattgctcaggttaacagcgttactggaagcaaaatcttgcgtatcctcaaggctcacggtcttgcccctgaaattcccgaggatttgtaccaccttattaagaaggctgttgcgatccgcaagcatttggagagaaacaggaaggataaggattccaagtttcggttgattcttgttgagagcaggattcacaggcttgctcgttactacaagaaaacaaagtagcttccacctgtctggaaatatgagtcgacgactgccagcaccctcgttgcttagattttgcatgtggatagtgcagttcggggtaactcggtggttcaatgcagatgctccgagcgagttagattgtgtttctttttctgttctgttgagttgtcctgttgcaagacttcattaatggatgttttaagaaatttgttgtctgaaaaatgagctcttaactctcttttcagacaacaaatttc

SEQ ID NO: 194067 - DNA, 989 bp, Gossypium hirsutum
gacatcgtttcggctttcgaagggaactccaatctgttctgggcggaacggtttggaaaacagtttttggggatgaacgatttgtgggttaaacactgtggaatcagccacactggcagtttcaaggatctgggtatgactgttttggtcagtcaagttaatcgactccgaaaactgaaacgacccgtcgttggagtcggctgcgcttccactggtgacacatcagctgccttatccgcttattgcgctgccgcgggtattccttccattgtctttttacctgcgaataagatctccattgcacaattagttcaaccaattgcgaacggcgcgttcgttttgagcattgacaccgatttcgacggttgcatgaagttaatccgggaagttaccgccgagctaccaatttaccttgccaattcattgaacagtttaagactcgaagggcagaaaacggctgcgattgagattttacagcagtttgattgggaagttccagattgggttattgttcctggtggtaatttgggtaatatttatgctttttacaaagggtttaaaatgtgtcaagaactagggcttgttgataggatacctagattggtttgtgcccaagcagccaatgccaatccactttatctgtattataaatctgagtggaatgagttcaaggcagtcaaggcaaatactacatttgcctcagctattcaaattggtgaccctgtttctattgatagagccgcgtacgctttgaaaaattcaaatgggattgtcgaggaagcgactgaggaggagttaatggatgcaatggcacaggcggattctacaggaatgttcatttgccctcatactggagtcgcattgactgctttaatgaagcttaggaaaagtggggttatcggagctggagacagaactgttgtggttagtacagctcatggattgaagtttacacagtccaagggttgactaccactcgaaggagattc

SEQ ID NO: 194068 - DNA, 444 bp, Gossypium hirsutum
cccacgcgtccggccatggattccctcacttgcacggcctctgacctcgtccccctcctctcctcctccgccaatgcaaccgccctcgcctccttcctttgcgcccgtttctccaccatctccagccaactctctgacgccactcacgccgttgacaacacttacctcctcttctccgcttacctagtcttcgccatgcaactcggctttgccatgctttgtgctggctctgtcagagctaagaacaccatgaacatcatgttgactaacgtccttgacgctgcagccggtgctctttcttattacctctttggttttgcctttgcctttggtgccccttctaatggtttcattggacgtcatttctttggtcttaaagcatacccttcacccgatggtgattataggttttttctttatcaaagggcttttgctatagctgct

SEQ ID NO: 194069 - DNA, 535 bp, Gossypium hirsutum
cccacgcgtccgcggacgcgtggggtaaaagtctctacttcgactcggacacgacagtggaagtgtgttgaatcaagaacagatagtaagcgcctttattatggacgctttattctgtctccacttatgaaaggccaagccgacacaataggcattgcgatgcgaagagctttgcttggagaactagaaggaacatgcattacacgtgcaaaatttgagaaaataccccacgaatattctaccatagtaggtattcaagaatcagtccatgaaattttaatgaatttgaaagaaattgtattgagagggaatttgtatggaactcgtaacgcctttatttgtgccaagggtcccggatatgtaactgctcaagacatcatcttaccaccttctgtggaaatcgttgataatacacagcatgtagccagcctaaccgaaccaattgatttgtgtattggattacaaatcgagagaaatagaggatacggtataaaaacgccaaagaactttcacacggaagttatcctatagatgc

SEQ ID NO: 194070 - DNA, 697 bp, Gossypium hirsutum
  unsure (1)..(697): unsure at all n locations
ccactttggaagtcgatgctgtgattggagctgatggcgctaactctcgtgttgctaaagccattaatgctggcgattatgattacgccattgcatttcaggagagaatcaaaatccctgatgacaaaatggtttactacgagaatcttgctgaaatgtacgtaggagatgatgtttcaccggatttctatggttgggtttttcccaaatgcgatcatgttgcagttggaaccgggacagtgactcacaagaatgatatcaagaagttccagctagccactagaaacagagcaaaggacaagatccttggaggtaaaattatacgagttgaggcacacccaatccccgagcatccccgtccacgcaggttatccgggagggtagccttagttggggatgcagctggatatgtgacgaaatgctcaggtgaaggtatctactttgcagctaagagcgggagaatgtgtgcagaggcgattgttgaggggtcagagaatgggaagaagatggtggatgaaggggacttgaggaagtacttggagaagtgggacaagaaatactggccaacctacaaggtattagatgtgttgcagaaggtcttctacagatcgaaccctgcaagggaagctttcgtggagatgtgcgcggatgagtatgtgcagaagatgacatttgacagttacttgtacanaacagt

SEQ ID NO: 194071 - DNA, 687 bp, Gossypium hirsutum
cccacgcgtccggtttatcagtttaggatggcacagagcgaaatcgaccggtatttgaagatcgttcctcttatcactctcgttgataatgctcgagtcagggagagactcgaagttatcgagaaagatcaacatgagtacacattagatgaagaggatagaagggtgcaagatgttataatgaaacccgaaccctcggaaaatgataccatgatcttgaaaaaaactctttcttgttcatacccaaacatgcgttttaatgaagcgctgcaaaaggaaaatgaaaagcttcgattggagctacaacgttcgcaagctaattacgatgtgaagcagtgtgaagtaatccagcatttgcttgatgtaacggaagttgcggcttctattcccgataagagttcatccccaaaagtgtctaagaaagtggagcgtaattactcagatgtcgataatgaaaacggtcattcgtacaatgataactctcctaagaaacctgattctcgcttgacttcaagaaacacttcttcagtttcatcgggacatgatctactctccgatagaggatcacatcggtatgaagaatggaatgctgatttgctcggttgttgctcggaaccatctctgtgtataaagacattcttttatccttgtggtacattttcaaagattgctaccgttgcgacaaac

SEQ ID NO: 194072 - DNA, 436 bp, Gossypium hirsutum
gaaaaatccactcaacctttaagatttcaaacatggctgcaacttcctcttacgtggcctgcacaaaattctccatgttgggttggagtggagggaaaagagacttgagaatgaaaagggttctttcggtttcggctcagcagcaagctgaagttggtgaaacacaagaagctaaagtgcaggaagagcaagaaaaggttaagcatcatcaacctacacaaccaaggccagtggaaaaacaactgaatgtaaagagcaaaaacatgggcaaagattatggaggacagtggcttagcagtgttacgaggcacgtcaggatctatgctgcctacattgatcctgaaacctctgagttcgatcaaactcagatggataaactcacccttatacttgaccctactgatgagtttgtttggactcctgaaacttgcaataa

SEQ ID NO: 194073 - DNA, 850 bp, Gossypium hirsutum
ctgtgtcaaagatccgtggtaggtggggaggatttgagacattagaaaaatgggtgactggagcatttgctggtcatactgcggtttgcttgaaggatgacatgcgtaatctatgggttgctgaatcacggcatgaaaatgaaaagggtgaagaaattatagtgggtattccatgggatgaatggtgggagctgtcactgaaggacaattctaatccacagatagccttgctttctttacatccagatatacgtgcaaagttgaactccaccgcagcatgggagtatgctcggagcatgtcaggcaagccatatggttatcacaacatgatatttagttggatagacactgtagctgacaactatccaccccctcttgatgctcacttggtcatttctgtcatgtctatgtggactagagtgcagccagcatatgctgcaaatatgtggaatgaagcgttgaataagcggttagggactgaggatttggatctgtatggaatattagaggagactgaaaggcgcgggataacctttgatcaattactcactatcccggaacaagatgaatgggtctacagtgatgggaaatcaacagcatgtgttgcctttatccttgagatgtataaagaggctggggtcttcggtcccctttcaaactcgattcaagtaaccgaattcactatccgtgatgcgtacatgcttaagatatttgagaacaaccaaacgaacctgcctagttggtgtaacaatggggatggccggcttccattctgtcagattctgggcgagtattggatggagttgccattttataacagcttagaaccatatgccaatatgaatgaaaa

SEQ ID NO: 194074 - DNA, 716 bp, Gossypium hirsutum
tcactcgtggggaaaatatgcggtttataacgtgaattatatacttaatatatgatatacctaatgtcatattcccatattctcgggaagtggcgacatacgagcccttgattcgatttatctctttatctccccgtgaattgtatgtttgtaacaatattgacagaatttcttcaattccaatcgactgggcgtattgtgtcgatttttttgagtaatatacctggaaatacccgttgattccttattaacgccgtttcgaacacaactggtacattccaaaataatcgttactcggacatctttactcttggccatgaacctcctttgagtttttaattcacccaacttttctattttccgatcaaaagcgaagaagaaaggaatgaaaaaaaaaagaaataaaagttgctaactcaaaaccaaatcttgaaagattttgttgcaatcaatatagtaaatcaatatagatttatagtaatagtaaataataagaataagaataagtaatacaacgatttcgaactctatttagaatcaaaccaccgtacggtattttctttaagtatcttgtaggatactgttgttccagccacatttctcttttcgctctactagtaatttaattggagcttgaacccgagtttcggtgaggttgaatccacttttttcgttctaccttccttatttattttatctaattcttatctaattct

SEQ ID NO: 194075 - DNA, 750 bp, Gossypium hirsutum
cccacgcgtccgtacagaccatccaaactcgaaacttgaacgtcgcttcttttgttagaaagacgttagtagcggaaaattttgaacgttactattaaggaaggataatgctatccttgcgcttcgctattcctaccgcgaatacattaactccgcccaagattaaaccaaaaccgggtttagtagtacaaaccgcttggaaccaaacggacctttttccttctcttcccaaacgaaatgattataagctacaagcagctaccacggacttatctgtggcgggagatataccggcggaggaggtggtggagcttccggcggagctgagcagagagttgatgccgaagcacgtagcggtgataatggacgggaacgggcggtgggctcggcagcggggattggcgacatcagcgggacacgaagccggtgtaaaggcgttgagggagctggtcgaactatgttgccagtgggggatccaggttctgactgtcttcgccttctcttacgagaactggattcgtcccaaggtggaggttgattttttgatgagtttgtttgagagagcgttgaagtctgaagtggagtcactttctagaggaggcattcgaatatctgtaataggggattcaacaaagcttcccacatcgctgcaaaagttgatcaacgaagttgaggagaccacaaaacataactccaggctccaactcattgtagccgtcagctacagtgggaaatacgacgtcgttcaag

SEQ ID NO: 194076 - DNA, 415 bp, Gossypium hirsutum
atccgtccacgcgttcgggaagtgaaaaaaaccagagttggcatccatggcgacgttggctactgtgggaagtagtgcagttctgcggttcaacaaaacagagcctctgtagacgaacccatcttcaccatttcttggtttcgttacttcccaactcagcggcatcaaaatctcttgcaacctccctgtcgtggtggcgcctttaaaacccatatctgcccctttcactcctgctctccagcctgttgctcgtaggatatgccctttcaccggcaagaaagcgaacaaagccaacgaagtttcggtctcaaatcacaagacgaagaaattacagtttgtcaacctccaatacaagaaggtttggtgggaagccggtaaacgctatgtaaaattgcgtttatcgaccaaggcgttg

SEQ ID NO: 194077 - DNA, 652 bp, Gossypium hirsutum
cccacgcgtccgctaaactgccactgaatttgtcctcctctctcatccaaccaatctggagatcctttcccatactttttttttgtcttttttatttcctttttcaatttggttctacttgactcaagttcttcctccacttgaaggccacaattcattcttttttttttcctgtgcttgtacacaatggctatgactgtaaatgcagcagtgtctcttccatcttccaagtcatctaccctgtcatttaaaaactcagtcactgtccctgaaagaatcaacttcaacaagagtgttttgtacccaaaaaatgtcagccttggtggaaatgtggtttccattagagctcaggtcactacagaagctcctgcaaaagcaccaaaaatttccaagaaagatgacgagggtattgttgtgaacaagttcaaaccaaaggaaccctacattggaaagtgcctcctcaacaccaaaattaccggagatgatgctccaggagagacttggcacatggtttttagtaccgaaggggaagtaccatacagagaaggacaatccattggtgtcatcccagatggtattgacaagaacggaaaaccccacaaacttagattgtactctattgctagcagtgctttgggagattttggcaatt

SEQ ID NO: 194078 - DNA, 360 bp, Gossypium hirsutum
atttctgtggggggacaatagacaagctgagaagagaatcagcatattgtaatttggaagggcaacaaaattttttaatggattggcagggagtcatgggcagagaatggaagcaactatataaaagacaatgctgatctgaatgtaatatttttggatgaaaaagataaataatcttttgtagtgtaatatttgttaacctacgtctgcagtgttttgtgaattttgtcatccccttgatctaaccacgagtgaattctattactttagtctcatcttggagaagtgtgtaatctagcttttcatcgacttctgtaaatttatcggacatataaaaatagaactgtttgcattcaaggc

SEQ ID NO: 194079 - DNA, 719 bp, Gossypium hirsutum
cggacgcgtgggcggacgcgtgggcatgggtgttgtaatcattgacggatcgacggtgagagccttcgtgactgacgaccaacagttcacgaagagcgtggatgagcgtttcgcagctcttgacctcaacaacgacggtgtcctctccaggtccgagcttcgcaaggccttcgagtctctgcgtctcctggagtcccacttcggtgtcgacgtcgccactccccccgacgagctcactcagctttacaactccattttcgagaggtttgattgcgatggcagcggcaccgttgacctccaggagttcagatctgagatgaagaagattctgcttgctattgctgatggattgggatcttgccctatccagatggttcttgaggatgatgaccaaagttttctgaagaaagctgctgatcttgaggctgctaagctcgatccaaaccatgctcaagcctcctgaatgatgctcccaggttgctgaacttgaatttatgcttttgtattttcttatcttttgcagctactttagcttgttggtatttggatccatccaagtatatatgaataaaagggttaacgctacgtttagccctcgagctttaggcgaatgtgaaatgcgtacttaaacttgaatttcatgatacatttcatccaacccttaattcggttaaaagtatgaacttatatgggtagcgtaagggtgagttgttgagatt

SEQ ID NO: 194080 - DNA, 959 bp, Gossypium hirsutum
cccacgcgtccgcccacgcgtccgttcttattgtgacttgaactcatagggaagaaaagggatgggtggaatcaaatatgtagtagttacagacaaaagtattcggttattggtgaaaaatcaatatacttttaatgtcgaatcaggattaactaggacagaaataaagcattgggtcgaactcttctttggtgtcaaggtaatagctatgaatagtcatcgactccccggaaagggtagaagaatgggacctattatgggacatacaatgcattacaggcgtatgatcattacgcttcaaccgggttattctattccacctcttagaacgaaaagaacttaaatcaaaatacttaatagcatggcgatacatttatacaaaacttctaccccgggcacacgcaatggagccgtagacagtcaagtgaaatccaatccacgaaataatttgatctatggacagcatcgttgtggtaaaggtcgtaatgccagaggaatcattaccgcaaggcatagagggggaggtcataagcgtctataccgtaaaattgattttcgacgaaatgaaaaagacatatatggtagaatcgtaaccatagaatacgaccctaatcgaaatgcatacatttgtctcatacactatggggatggtgagaagagatatattttacatcccagaggggctataattggagataccattgtttctggtacagaagttcctataaaaatgggaaatgccctacctttgaccgatatgcccttaggcacggccatacataacatagaaatcacactgggaaggggtggacaatgagctacagcagcgggtgctgttgcgaaactgattgcaaaggaggggaaatcggccacattaaaattcccttctggggaggtccgtttgaaatccaaaaactgttcagcaacagacggacaggtggggaatgttggggtgaacc

SEQ ID NO: 194081 - DNA, 606 bp, Gossypium hirsutum
agacaaaattgtttcaagcaccgacagaaccagaagcgccccttgtttcaaagagaggaggacgggttattcacatttcatttgatggtcagaggcgaattgaaagctaagcagtggtaattctaaagattccccgggggaaaaatagagatgtctcctacgttacccataatatgtggaagtatcgacgtaatttcatagagtcattcggtctgaatgctacatgaagaacataagccagatgacggaacgggaagacctaggatgtagaagatcataacatgagtggttcgacagatttggattcctatatatccactcatgtggtacttcattgtacaatatatataagaattatacgataagaattatacgaatccatctgtatagatatcatcatctacatccagaaagccgtatgctttggaagaagcttgtacagtttgggaaggggttttgattgatcgatcaaaaagaagaatctacttcaaccgatatgcccttaggcacggccatacataacatagaaatcacacttggaaggggtggacaattagctagagcagcgggtgctgttgcgaaactgattgcaaaggaggggaaatc

SEQ ID NO: 194082 - DNA, 862 bp, Gossypium hirsutum
gtgaaattcgtctccaccccacacccccaatcatctctctcatcaccaaatagattccattaccactctatttcacttcatcaaaatttcatttcatttttcttctataaattctcttctcatttctctcataaacctcttcccctttcatacaaaaatctctctcttctcttcctctgtgttatttgaagtcttatgtgttatgaaatttttcatgtttgagactcatgtctccggttgttagtgaaatcctccgttctgggtttatgataaattcttcacttagacgaaggactcatcttgttcaatctttctctgttgtttttctttactggttttatgttttctcataaataaattgtcctattttaccatatatacatatatatatataataagtagttatttagcttacaatttagtctctctttttttcttttttaatggcttcttctagtggaaactccatgtccaattcaggatccgaagaggatttgcacaatcaaaggaaacggaaaaggatggaatccaaccgagaatcagcgaggcggtctaggatgaggaaacaaaagcacttggacgagttaatggcacaagtgactcagttggttaaagataataatcaaatcttaaccaccatcaacttcaccactcaacactacatcaacatggaagctgagaactcggttttgagagctcagatgatggaactgagtcaaagactggagtcactcaatgaaatcctcaattatcttaatagtggtaccaatagcaacaacagcaacgatgggtttgaaacgagtgagggatttgaaacaacaagtgatgaaagcttcaccaccattatcagcaaccacaacaa

SEQ ID NO: 194083 - DNA, 732 bp, Gossypium hirsutum
gactttctccgttcatgttcaagtccaagggtgtacctgtctaccgctgtatccaatatcctagggagtttgttctggttttcccaggagcctatcattcaacatttgattgtgggtttaatgttgctgaggcagttacttttgctcctcttgattggttacctcatgggcagaatgctgtagcactctatcaatcacagggaaggaaaacatcaatttcctttgataaattgttgattggagcagcaagagaagcagtgaaggcacaatgggaactcattctgttaaagaagaatactattgataatttaaggtggaaaggttactgtggaaagaatgggatcttaactgaaacactcaagtcacgtgtcaagcaggaaggtatgagaagggaatacctctgtagcacctttcagacaaagaggaaggacaaaaacttcaattctactagcaaaagggaatgtagcatatgttactttgatttgcacctctcagcagtgcactgttcatgttcttctcatagatatttgtgtttaaatcatgcaaagcggctctgttcttgcacatggacagaaaagattttcctctacaagtacgaaatcaacgaattaaatatgcttcgtgaagcagtggaaggaacattgagtgcggtgcatgcatgggctagagaggacctgaatttgggtcttcgtcactacactccaaagaaaaatcattcagagaagatgaagg

SEQ ID NO: 194084 - DNA, 514 bp, Gossypium hirsutum
ccttacttcaccttatccatcatcatctatttccccatacaaaagtaaatccccatttttgttctcttcaactttattgcataccaaaaaaacttacaacaatggcaacagcctcagttacctacactccacccatgttggctgctgccaccactaaccccaagaagaagaccaacaccaatgtgaattacataacaggcttgaattcttttggtgggttgaaagctcataacaaagtggtctcactaggccaacgtgtatgcaccgagcaatcatttgcaaacgttgttagctcactcaaagctccgacaaagggcaagacaggtaaaagcagcggcggtgcactgtcttcaacctgtaatgctgttggtgagatattcaggattgcagcaatcatgaatggccttgttcttgttggtgttgctgtcggatttgtgctgcttcgaatcgaagcttctgtggaagaggctgagtaagagaattttaagacataacttgttttcatttccccaaa

SEQ ID NO: 194085 - DNA, 431 bp, Gossypium hirsutum
attattactattcctatgactaagtatttgactttcccacatcggtaaggagtttattacgtgaaagaagtgtttttttgagtctgtttacatgatgtaattgagtaaatttcatttcttgggggtataagaatgattcttgttgcatgtttagtagagggtctctcttattttttagaagtttttaaattcgtgttggatacatatttggatatggaggccggcatacgaatgatgaactacttgtacacgatccttgattaatgggggtccgtagctatattatttggattggcgtgtcaatgtcagatacgggtatgcgtcgattttttcccattggaggttaaatcctaatccatgtgtcggacatgattgttggacaagggtacttctagaaaaatgaaaagtccaactaaatttcctttcttggg

SEQ ID NO: 194086 - DNA, 459 bp, Gossypium hirsutum
cccacgcgtccgctagatcgcgagcggccgcccgctatctgctctccctcccccattgccactgcttctctctcttctcacattagctattgtgttcttcattttgcttcttgtaactatttaaagataaggagtaagttcttaagtgtttcatactttgatgtctacacctttggaacatgattacataggtttggcagcgacttcttcaatggaaagaagctctgagaagatatcttcttcttcttcctcttcaattccctccaatattgaagacaaaaccaccaacaatccttcccttggatctcaaagaaactgagctgaggcttggcttaccagggtctcagtcacctgggagaaagctggctctttttggcaaagatttggagaactaatgataaaaccaccgctttggttggtaagcccttgaagaacctggtgtctggagctaaaaggggt

SEQ ID NO: 194087 - DNA, 632 bp, Gossypium hirsutum
ctcagggcaaaattcagtctttagtctcaacattaacaaagattaaaatgaaatccctgcttcagagctcgatcggttgacccccaaaaccatcaatatataaaagaaaaaactttggttatggctttgtatttcatggctacttcacttaatccaaaaccctgttcaaattctaatgttattgttgttcctccattgctttactcaaaacccaaacaccctttcaagctcatctcttcttcttcttcttcttcttgcgggaaagcttttgctcaatctgaaggaaaagaagggggagttaaagaggaagaccctcccgctttctctggttcattgtcttccacacgcacacagctcgatcttttggaccagcttagttcaacgagcttcactggccaccgggtttaaaagtaacggtgggtttgggaactcacgattcgtgacaatttctgccgtaatcggggaaagaaccaagatttactattcattggcaaaacttgaaaatgtaatccaagttttaaccttttacaaatagaaatataggagaagcctattgaatgagtttctcaaaaatgattcggttttttgacctatggagcattctctggtccgccgttataatataggattgc

SEQ ID NO: 194088 - DNA, 906 bp, Gossypium hirsutum
gagatattttagggttagaaggttcgaggagtggttttcacgccaataaggctcacttgccattgcaatttgccgacacatcacaagttactgaattcaattgcgatacacaatccctcctcaccactcgcccttctttttttgttgtcttcttcctgcaagactccacgtgtcaaaaacatggacatgacaagcataaaatctcccccaagatgctcattgacaattatttaggacattacgtcgtggttttcttttaatttggtcactgttgaaattgtatggtcatacttgcatatatcgatctcccctgttttcttctctgtaaattttataacttggaacctagacacccatggctactgtttctcaattgaataactttccatgcaagaccttcttaataaccccacaaaacagtaactttacctcaaaacttccggttctgcctctaaactctacaaaaccaactcagaattcgatcaagaaatctcaatttttgacccagaaatcagtccagccaaggcctgttttccaggtccgtgcttcggacgccgacgacgaatggggcccggacaaggaggagccagttgtaatcgagagtcctggagtggccgtggcggaagagaagaagcctgacgatgcgggggaaatagagagcttgaagaaagctttggtggattcgttttatgggacggatcgtggcttgaaagctagcagtgagaccagagctgagattgttgagcttataactcagctcgaggccaagaacccgactccagcaccaactgaggctttgcctcttctcaatggcaaatggattctcaagtacacatcattcccgggtctgtttccactgttgtcaaggggtcaatttcctttagttaaggtggaggaaatatcaca

SEQ ID NO: 194089 - DNA, 600 bp, Gossypium hirsutum
atactctccacactaaaccaaactacaggaagtactgaatctctgaaacacaaatctcgctttcggaaaagcctcaaatggcagaccaaccgcagatttatgaactcaacaatggaaccgtggttgttaagatcaccaactatggctgcactatcacctcattgtctgttcctgacaaaaacggtaaattagccgatgtcgtcctgggattcgacactgtcgaaccgtacgtgaaaggtgcttcaccttattttggatgcattgtgggaagggttgcaaacaggataaaaaatggcaagtttactcttaatggaacggagtacactttgccaatcaacaagcctccaaacagtctccacggtggattcaagggttttgacaagagaatatgggaggtagcagaatataagaaaggcgacaaaccctccattacttttaaatatcgcagcagcgatggtgaggagggttacccgggtgatgtttctgtgactgcaacctacactctaacttcaaccatgacaatgaagcttgacatggaagcagtgcccgagactaaggccactccaattaacttggctcaacatacttactggaacttac

SEQ ID NO: 194090 - DNA, 302 bp, Gossypium hirsutum
aaaccttccatcacccaagaaaagttctcacctcacttgcacaatggccgcggcaaccatggccctctcttccccatcctttgccggaaaggctgtcaagttctctccttccactcctgaaatccagggcattgggcgtgtttccatgaggaaaactgccaccaaccctgctgcctctggaagcccatggtccggccctgacagagttttgtacttgggtccactctccggtgagcctccatcctacttgaccggagagttccctggtgactacggttgggacactgctggactttcagctg

SEQ ID NO: 194091 - DNA, 399 bp, Gossypium hirsutum
cggaaagactggccggaccgacccacgcgttttaatccttgcaaaaccaaacttaataattgtgtttttccttctatgcaatgatctccgacaagagagcagcgaatgccatgggaggcaagactgctagagcctgcgatggctgtctacgaaagcgtgctcgttggtattgttcagctgatgatgccttcctttgccaaggttgcgatacatcagtccactccgctaaccagttagccagtagacatacaagggttaggcttgaaactgcatcttccaggttcaatgcttctgttatcaacaacagtgctactgatcaagatgctctgccagcatggcaccaaggtttcactcgaaaggcaagaacaccaaggcaaaacaggtccatacaggggcaac

SEQ ID NO: 194092 - DNA, 604 bp, Gossypium hirsutum
  unsure (1)..(604): unsure at all n locations
acccgtccgcccacccgtccggcgagaagagatcttcaccctaaaaaaataactttaaattcctcctgggcgttcttttttaaacctactgtttaattcctaaaaactaaattttcctggtaataataatacctataattaatcaatgatggaaaagtaaaaacccctgcctccttaataagtaatccgatattagccgtctgattcttttcccccagaatcagtaacccatttatctggaaaaaaaaggacggaaattccgattttatcttgaggaaattgaagaaaaaaaagggaaaattcattgtaagtatgcgaagttgggtgatggattcaggcgacggagcaactacttctcaacaaatgggatcgttgaccgaagatcttcgtgagagacatcaacaagaattagaaaacttgacattaacaacacagcccttcaaaacattaaggctatttcttctggctatctttcaatattataagcgattagcattatatcttttggcaaagggtagttggcttgcgctttcaagcactctaatagcagcttttggaatttttgcttgtaacaatcganggtcctcatgaaaagcatgttgat

SEQ ID NO: 194093 - DNA, 865 bp, Gossypium hirsutum
ttacgcgtccgctcgcctgtgattatttttgggtggttgcaacttgcgcataaaagctctggcctttcgctttgccttcggttatttacattctttggtggaccctggtaaagaaacagaaaaaagggaaaaaaaaaaagggatttaagaaagtgaaatcctcttgtttatggtttctaaggtgggtttcgcttcaaattttgatttgattaagaactaaattgaaaggcacatgaaatggagagagattttctgggtttgaactcaaaacaatccttccctttggttaaagaagaagttgaagaaattggttttaccaaaagcttggggattcaatggccactttcaaacaaggtttcttcagctgttccaccacaccagatgagttttgattttgctcaaggagataacgctcaaagaatgggatatgattcaatagtatcctctactttcatgcatatctcaccaccagatgctgctgaacttcagaaatccttcaatcacaacaggcaacgagtaggcaatcatttcccattcacagctgcttcttctgttcagcatgatgtacatcatgttcaacggccttatgacatgaaaatgtttccggtctcgaaccaatcagttcccgtttcaactaccaacccatttatgaatagtcatttcactactactgctatgaaatcacaattgcttggaggaattccagttacgactccgccgcattcggttcttcccaccctcggttccttgggtggaagcatcgaaccacggaaaagtgtcaggggccttggggactccagatcacctgttcaattgactatcttttatgctggtaccgtgaatgtttatgatgatatcacccccg

SEQ ID NO: 194094 - DNA, 454 bp, Gossypium hirsutum
aaccccgccacctgacttaactcatccgataactaaacctctcaaatccttttcttttcctgttttctcttccactgccaattgttcaaccatgtcatcagctgtgattgcaggtgcctcttcttcttgttctgccgccttcaccagcaggaagaactactccaacaaaactacctccaccccttctcccaaggcattcaatacttcacagaaaaccgcactccaaggcttgtctcttcaagaggccaaagggggtatctcagatttcttcatagctgagaaaaagagcagtgtctgttccagtcatgtaggaagaggacttgagatcacttgcaagaactgccggtgcttcaaaaactatagaggttgaggttgacaagcctttaggtttgacattaggtcagaagcaaggaggtggtgtagttatcactgcttgtgatgggggtgggaatgc

SEQ ID NO: 194095 - DNA, 681 bp, Gossypium hirsutum
  unsure (1)..(681): unsure at all n locations
gcgacgctcacgcgnntccgcattggcgcggatcttggtggttacccattgcttcctgtagtatgcnnatatacactgcgtgtggaacggaggaagagtgacgatatacgagcgtgtcggtgtannttattatnttagagttggtnncacaggcgagactctctcaattgacctcagagttctggagaagaaggggacctagtaaagggtgggtcttgcactcatctctaagaatcagaaaaggaagtggacttcattgttctcgannttccaagcttcnngatcctatgtttcaaaaggaagaatatatttacaagaggtcctcaacattggcctcctgtgtactagtccactcccaatcaaccgaccatcaatgagaagggtggttaaaatgttgcaagaagctggcgctgatagcctgccaaaaactgctgctaaaagggatgggaaattgactccttactactacgaagatggctcagatcaaggaagtgtagcttgagaaaaacgaaaagaaaaagaaaaggttttcctcgtagatttgtcccataaacaaagagcaatagaaggattgtgcgagtgtgttacgcctctagtttttttttttcttgccctcaagttttggttttcaatcattgatcccacttgctgttttgctttacaggttggtttagtggggga

SEQ ID NO: 194096 - DNA, 430 bp, Gossypium hirsutum
cttcaatccatttctctttctctctctatctttcaattttcccgagaaaatctcgcattttcgcacccgagagaaagagccggagaatcgcatgatgaggtagtttttttaagttttccggagtgaaaagcaactggaaagtaagtttatcctccgtagattactcgttgatcggcttagacaaagtttaaaacagtatctttcttgaatgctacgatactgaaattcgctattagtttgtggaaattttgagatcagctagattagttgggttttgaaaaatgagttggaatccgaacatggaagttcagtacatcaacagtagctacctttataacagtgctggcagctttatggaatattttgaaggtcttacatatcaacatgtcaatttcatttttgacggtgcttcccatcttcaggagagtgc

SEQ ID NO: 194097 - DNA, 576 bp, Gossypium hirsutum
gttggatctttattatgccaatgggcaaatgcacttggtgccactgtcatcggaactgtctcgaccaaagagaaggcggctcaagcaaaggaagacggatgtcaccatgttataatttataaggaagaggattttgtttcccgtgtcaatgagataacatccggcaagggggtggaagttgtatacgattctgtagggaaagatacctttgagggctcgttggcatgtttaaagccccgtggctatatggtgtgctttgggcagtcatccggtacaccacatccggttcccgtgtcttgcacttgcacccaaatcattgttcttgactaggccttccatgatgcaatacacgtcaactcgggatgagctgctggaaactgcaggggaagtgtttgctaatgttgcatcaggcgtattgcgggttcgggtgaatcacaagtaccccttgtcagaagcagcgcaggcacatgcagacctcgagaatcgtagaacaactggatcagttgtgctgattccatgaaagcatctcggttgtgactttgaacaccaattgcatgaaaaaaaaaaaaaaaaaat

SEQ ID NO: 194098 - DNA, 800 bp, Gossypium hirsutum
gggatagagaattgtgacctgagattattggcttgcaaagacccaattgactatggaacaagaagtatggtaagggatagagcaaggttggtttgggcagaaaacacgcaagcaaggagtgcttgcattgatagccctgatagctatgattatggagcttataaatggaccgttcagctcgttaccaacgatagtccgtctcgagaaaatactttttcctatcttgtggggtcttatgactctcagcacatttgggaacttggagagcacaacagaatggctggaggttgttttcaacatcattgttcttactaggggacttcttctagtcacaatgttgattggtaacatcaacggggtttttgcatgcaacaacgtccaagaaacaagcaatgcaattgaagatgaggaacatagagtggtggatgaggaagaggcgcctgccttctgggttcaagcaaagggtccgctactacgagcggcaacggtgggcggccatgcgcggtgtcgatgaatgccagatgatcagaaacctccccgaggggctccggagagatatcaagtaccatctttgcctggatttagttagacaggtaccattgcctcaacacatggatgatttggtcctagagaacatttgtgatcgtgtcaaatctgtaatttttaccaaaggagaaactataacaagggaaggcgacccagtacacagaatgctatttgtagtaaggggacatcttcaaagcaggcaagttcttagagatggtgtgaaaaagttgctgcatgttaggggccccgaaatt

SEQ ID NO: 194099 - DNA, 1267 bp, Gossypium hirsutum
cccacgcgtccgcccacgcgtccgctcagcagagcagaaaaatagaaataaaaataataaaaggaagggattttttaaaaatttttaaattaagaaaaatttctagaaaaaaaaaaatccttccttttttcctttgatttccccttatgagatcgtaaaatattcgagaatcccttttttttttcctgtaaaatttatatatctaattatcgctttgtctttgattttatttggggttgttttgagttaattaatatggggagtgaagttttacgacctcaggattgtttgatcgaacggattcggttacctccgacggcgtgtcctcgccggagatacggaaacggtagctttaatcctagttattatcataactacaacaataacaatggaaatggtagatctaacaggaaacccgttcagaggaagcggatcggatcggagcaggggatttcgaagaaatacagctccgccgatgacttgaagacggtgaggaacaatgttatggtggagaaggttacgattatgagacgaggtgagtcgttggattcgaagatcaagatcgacaacggcggtggtggaagggaagggggtttggttgttatgggtacggatcgtttgggtccggatccggaaatggttcctaaacagatcaaaatcgtggatgctaagtcttcggtgaccgtaaaatccgacgtgtatgccggatcggctttctccgtttctccggcaccgagctcacttcctttacccactttctcgaagaagaaacaggttccggtcgatgattcagctacaagggatctcaggcgtttgctccggcttgatctctgagacccgaatatttagatttggatccaaataagcctgcgtctctttttatctccatctctctcttgatacgtttcgtctctatttagatatctccggaattttcaagatccgatgccctccgtgatattttttcaagacggtggacggatttgaaaatctggaaaattttaggggcgattagataatattccctgcttatcagtttatgcgttaaacaagtggggtttctttaaggaaaaaagaaaaatcaagggggttgatatgtaatattaggggaatagtgggcgagggttgagttttaaaatgttgagatgggaaaaatgcttttctgctccgttgtgaaaaaagtttgtaagagatttgcaatttagtcccttcgatgtaaagtaaagataaaattagggagaaatttgagcagatttctattattatt

SEQ ID NO: 194100 - DNA, 613 bp, Gossypium hirsutum
ggactctgctaactgctgagtgagtgcctgccgtttcttaaactgatctctttaatctctctctaatcttcaatttccttcgctctcccactcgatattgaaatggcggaatcaaagtcattgaggaaacctgtttttaccaaggtggaccaactccgccctggcactattggtcacactcttactgtcaaggttgtcaatacaaagatggtattgcagaagggtcgggctgatggtcctcaggtgcgtcaaatgcgaattgctgaatgcttggtaggagatgaaactggaatgattatctttactgctagaaatgaacaagtggacttaatgaaagagggtactaccataactcttcgcaatgcgaaaattgacatgtttaaaggatcgatgaggcttgctgtggacaagtggggtcgtgttgaggttgctgaacctgctaatttcaatgtgaaggaagacaacaatctgtcactgatcgagtatgaactggttaatgtcgttgaacagtaacctttcgggacggcgtttgctttgtttctgtattgtgtcccaagaataaaatcgactccagtaaatgtgttattctgatctatgcaacatctcgtcttta

SEQ ID NO: 194101 - DNA, 660 bp, Gossypium hirsutum
ggtaaaatcactcccttagttttgaaaaacgtcttaccgattttccttgcgtaaggcattttgcattccctactctgcgactctcatcgtcttagcttcaaaaatttcttcgcagactttctttagaaagatctgttcttaactgtcttccatggatcttctgagatttgcttcttgttgaatagttccagatccttggttatgagcggcggagatatacacgcagcggcgaggtccggggacctttcaaaacttcaatcaattctggcgtctaaccctttggccgttaattcccgagataagcactccagaactccactacatttagcagtatgggccagacaagcgcaggtagtgagttatctttgcaagcaaaaggctgatgttggtgctgctgccatggatggcatgggtgcgattcattttgtagcgcagaaaggacatctagaggttgtctgaactctgctttcatcaggagtttcagtgagagccactaatcgtaagggattcactccacttcactatgctgttcaagggtcccatctagaaggaatcaaagtcttattaaagaaaggtgcaagttggctagcaatttgatgggagagggtgagattatttaaattatttaggctagtcttgggttttgtgtgtcttgattta

SEQ ID NO: 194102 - DNA, 680 bp, Gossypium hirsutum
  unsure (1)..(680): unsure at all n locations
cccacgcgtccgcccacgcgtccgcaaatttttgaggaaatcccagtttccatgaaaattcttgggacatctcgacctttgcctctccctttatataacaattctcctcctttctctcatccacacctttctccttcaattttcccatcaacccattattctcacaagttttcgcaatccatggctgcttgcattgacatctcaagaacaacagactcttcccaactttcccaacgtccaaacatttctcaacctgatgaagttctttacgagtatggaagtttctgcagatccactttcccaaataatgtttcgagcgtacccttgaataaaaaccacacaaaaaccatccctacaagaaaatctgttgatttttctttagaagaaaaagaagaggttggtgctttatggctgaaaatgaaagaaaagcaaggttagatgctgagcaagaacccatcttatccaattattattacagctcaatcttttctcataattcatttgaaagtgctttagccatcatttgnctatcaaaatagggcatccaagtctttaacagtacttatttgatatatcaggccgtgcttgtgagatcaaggatctgatgcttgtaggagattgaagctgctagaagagacctgctgttagtatgacatgctttgaatttaaggttctactgg

SEQ ID NO: 194103 - DNA, 1500 bp, Gossypium hirsutum
taaaattttcacttcacttttttctactttgtctccgcgttcgctcccttacagccaatctcctcaataccccatttttctggttcctttttcaagccattttacaggcacttcccagttgggagaaggggaaaatggcacagcttttagcaccctcaactcaatggcaaatgacactaccaaagacctcaacctatggaagtcccattgcaacaaaaatgtggagttctctggtactgaaacagaacaagaaaggagctgctaaaagctctggcaagtttaaagtggttgccttgtctgaaaacagcactgtcaacaggctagagaacttactaaacatggacgtcactccatacaccgacaagatcatcgctgaatacatttggataggaggcagtggactcgatatgcgtagcaagtccaggacaatatcaaagccagttaaacatccctctgagcttcccaagtggaactatgatggatcaagtactggacaagcacccggtgaagatagtgaagttatcttataccctcaagcaatctttaaggaccctttccgaggaggtaacaatatcttggtaatttgtgattcatacacaccagctggtgagcctattcccacaaacaagcgccaccgtgccgctgagattttcagtaacaagaaggtggtcgatgaagtaccatggtttggtattgagcaagagtacactttacttcaacaaaatgtgaaatggcctttgggatggcctgttggaggctaccctggtcctcagggtccttattactgtgcagctggtgctgacaagtcattcgggcgtgacatctcagatgctcattacaaggcttgcttgtatgccggcattaacattagtggtaccaacggggaggttatgccaggccagtgggagtatcaagttggtccgagtgttggtatcgaagctggagatcatatctggtgttctagatacattctcgagagaatcactgaacaagccggtgttgtactctccctcgatcctaaaccaataaagggtgactggaatggtgctggatgccacaccaattacagtactaaaagcatgagggaagatggaggcttcgaagtttttaagaatgcaatcctgaatttgtcgcttcgccacaaggagcatatcagtgcctatggtgagggaaacgaaagaagactgaccggaaagcatgaaacggccagcatcaacacgttttcatggggagtggctaatcgcggttgctcaatccgagtcgggcgtgacactgagaagaatggaaaaggttacttggaagatcggcgtccggcatcgaacatggacccatatgttgtgacagcattgctggcagaaactacactattgtatgagccaacacttgaagctgaagcacttgctgctcaaaagattgctttgaatgtctaaattaaagcagtttagctttattcatagagatggttttctattttattttcaattaggctgggttttggga

SEQ ID NO: 194104 - DNA, 550 bp, Gossypium hirsutum
cgccattctacctgctttttccaggaaaccaaacgccattcttcctcacctcactgtcaactcttacaaggtgaattgaagcatggctgcaaaatttaaaaagtgcatgatgttaaagtgataatcaacttgtcagaaggaagaagatatgggaagcgagtcatacgaggaagccattgcagctttgtcgaagcttctcagtgacaaagctgatctcgggagtgtcgccgccgcaaaaatcaagcagataacagccgagttagaggcagctgccgattccactcagttcgacccggtcaagcggctcgagaccggtttccttcacttcaagaaagaaaaatttgacaaaaatcctgatctgtacggtgcacttgccaaagggcaaagacctaagttcttggtatttgcatgctccgactctcgggtgtgcccctcccacatcctgaatttccaaccaggggaggcttttatcgtccgtaacattgccagcatggtcccgccctatgacaagaaaaaatactctggagctggggcggccatcgaatacgct

SEQ ID NO: 194105 - DNA, 855 bp, Gossypium hirsutum
cccacgcgtccgcccacgcgtccgcccacgcccccgtctctctctctcttctacaagccggcgagggaaggaaaacctgagagggtgaaaaatgccagctggtcacggtctccgatctcggaccagggatctgttttccagacccttcagaaagaagggttacatcccattgtccacttacctcaggacctacaagatcggtgactatgttgacgtcaaggtaaatggtgccgttcacaagggtatgccccacaagttctaccatggccgcactggtcgtgtctggaacgtcaccaagcgcgccatcggcgttgaggtcaacaagcaggtgggtaaccggattatcaggaagaggattcatgtcagagtggagcatgttcagccttcaaggtgcactgaggaattcaagctgaggaaggtgaagaatgatcagctcaaggcagaggctaaagcaaagggtgaggtcattagcacaaagaggcagcctgaagggcctagacctggtttcatggtggatggtgctacacttgaaactgttacgcccatcccatacgatgtcgttaatgatctcaagggcggttactaaatctactctgttttttgtttgcggtattgttttggtttccttttttttttttttggcaaaacatcagtggtgaactgaattaaacatttggaagtgctgttttctttagtatattttgaagaggtactgaatcttcagagattttaaatgttatgatatcattttagaagattatggatatgcctatgataaagtgtagtatttgtttatgcattgtgtttggtattatcattttgtcacagtccagtttaaaaccttactactttcat

SEQ ID NO: 194106 - DNA, 727 bp, Gossypium hirsutum
agccactcttttcttcattcgggtgagagtgaagaagaaaatcctaagaggccaaagatgccagctggtcacggtttacgtgctcgaacaagggatttgttcgccagaccctttagaaagaagggttacattcccttgtctacttacctcaggacctacaagatcggcgactacgtcgacgtcaaggtaaacggtgccgttcacaagggtatgccccacaagttctaccatggtcgtactggtcgagtttggaatgtcacaaaacgtgccatcggtgtcgaagtcaacaagcaggtgggaaacaggattatcaggaagaggattcatgtacgtgttgagcatgttcagccttcgaggtgcgctgaggaattcacgctcaggaaggtgaagaatgatcatctcatggcagaggccaatgcaaagggtgaggtgattagcacaaagaggcagcctgagggcccaaaacctggtttcatggtcgagggtgcaatgttggaaacggttactcccattccatacgatgttgctaatgatctcaagggcggctactagttctactccgctttttgggtcttgctgggcttggtttaccctttgcataacttaagtaagcctcgatagttattttggatgtgttgttttctatttgtagttcatttgaagaattactgcttttgaaaagattttaatcttatcaatcattttaatttagtgataaaaggaattc

SEQ ID NO: 194107 - DNA, 555 bp, Gossypium hirsutum
cccacgcgtacgatcggtgactacgtctacgtcaaggtaaacggtgccgttcacaggggtatgccccacaagttctaccatggtcgtactggtcgagtttggaatgtcacacaaacggtgccatcaggtgttcgaagccaacaagcaggtgggaaacaggattatcaggaagaggattcatgtacgtgttgagcatgtacagccttcgaggtgcgctgaggaattcaagctcaggaagataaagaatgatcagctcaaggcagaggccaaggcaaagggtgaggtgattagcacaaagaggcagcctgagggcccaaaacctggtttcatggtcgagggtgcgatgttggaaacggttactcccattccatatgatgttgttaatgatctcaagggtggctactagatctactctgttttttggtttattcttggcataacttaagtaagctttgttagttattttggatgtgttgtttacgttttgtagtttattttgaagagttactgcttctgcaaagattttaatcttatcaatcattttattttagagat

SEQ ID NO: 194108 - DNA, 354 bp, Gossypium hirsutum
ttttctttttaaaaaatttacagagcccacctccccattttttcttcttttcctctgctgggtgttcaaagcctagcttgcgccgaaataaaaagaagcaaaataggttgtcaatctttctctgctagggcaaaagaggtagcccatccttgcagctgctccgttgtgcgcacaccaacgatggcggccggaaaaaaaaatcaacggctttgaaggaggtgatgggatggagcagaggagccaagcctccggacgaagcgcaagtggtgcgcccgagggaggagcggcggcagctcttaggctagggtttcttttttttttgcgctgaaagtaaacttatgggctttcaagcta

SEQ ID NO: 194109 - DNA, 1487 bp, Gossypium hirsutum
cggacgcgtgggcccatctctcctctcatacttcactctaacgttccctttgaggttttaggaaaacagcagagaaattaaggaatggagaccttcctatttacctcggagtctgtgaacgagggacatcccgacaagctgtgtgatcagatctctgatgcagtcctcgatgcctgtttggcacaggatcctgagagcaaggtggcttgcgagacctgcagcaagacaaacatggtgatggtgtttggtgagatcactaccaaagccgacgtagactacgagaagattgtgcgtgacacctgccgtggcatcggtttcacatctgacgatgtgggtctggatgccgacaactgcaaagtgctggttaacatagagcaacaaagccctgatattgcccaaggtgtccatggccatctcagtaagcgtcccgaggaaatcggtgctggtgaccagggccatatgtttggttacgccacagatgaaacccctgaattgatgcctttgacgcatgttttggcaaccaggcttggtgctcgcctcactgaagttcgcaagaacggaacttgcccttggctcaggcctgatggcaagactcaagtcaccgtcgagtattacaacgacaagggtgccatggtgcctgttcgtgtccacaccgtgctcatctccactcaacatgacgagaccgtgactaacgatgagatagctgctgatttgaaggagcatgtcatcaagccggttatacccgagaagtaccttgatgagaaaaccatttttcaccttaacccgtcaggccgtttcgtcattggaggtccccatggtgatgctggtctcactggtcgcaagattatcattgatacttatggaggatggggtgctcatggtggtggggctttctctggtaaagaccctaccaaggtggatagaagcggggcttacattgtgaggcaggctgcaaagagcattgttgctaatggactagctaggaggtgcatcgtgcaagtctcctacgccattggtgtacctgaaccattgtctgtatttgtggacacttacggtactggaaagatcccagacaaggaaattctcaagattgtgaaggagacctttgacttcagaccaggaatgattgccatcaatcttgatcttaagagagggggcaatagcaggttcttgaagactgctgcgtatggtcattttggtcgggatgaccaagatttcacttgggaggttgtcaagccactcaagtgggacaaggtccaggcttaattggagcttcatcacattggttctatgtctgatttatttgatctgctgtctgctaccatatgaggctgcttttcttacaatttcctttaatttcttttttgggtttgaaatttgattaaaatttatatttatgcatatgatatgatatgagcgataatgaatgttattattattacaatttgaaagataataacagaaaatgaattaaagcatttttcttt

SEQ ID NO: 194110 - DNA, 466 bp, Gossypium hirsutum
cgattcccggattcgcgccacggccccacgcgtgacggccacacgtacgaacttcccatctgcgacactggcttctggtgaagcagctggggctgctatcgataaactcgattctcatgaagtgtcggggagaattattagggtagagttttcacggagactgaagaaaccttcgccgccttctttggagccaatggttccttcccgtgagacacgccataagctttatgtctctaaccttgcttggaaagctaggtctactcacctcagagaatttttctctgcctttaatccggcttcaggtaggcgtgttgtttctaacccgtccggacagtctgctcggtatggctctgtttcctttgccacactggaggaagctgaacctgctgcttctactctagatgggaaggaattgatggaccgaccaatacttttaaaatcactgaaaagaaagatgatgaatctg

SEQ ID NO: 194111 - DNA, 440 bp, Gossypium hirsutum
  unsure (1)..(440): unsure at all n locations
cccacgcgtccgcgaaacccaatcttctctttctttttcttctgggagtgaagctgaaacgtcttgttggtgcggaggaggggtgagagatctgcgtgatgggaggaggcaatggccagaaatcaaggatggctcgtgagaaacacgtggagaagtacaaggccgctaaaggtagtcagctggaatcaaataagaaagccatgacgatccaatgcaaggtttgcatgcagacattcatatgcaccacatcagaggtgaagtgcagagaacatgctgaatcaaagcacccaaaatctgacatctatgcttgtttccctcaccttaagaaatgaatgaaattatccattaaggaaaaaataacaataatagaagtagcaggttggacttgaggttccatntcttgtattntatgtcattacgtcccgcaatcgtattggatc

SEQ ID NO: 194112 - DNA, 473 bp, Gossypium hirsutum
accatgttcttgatgaatcaactcagtatagcagtgatctccggccaacagcaaagcagctctggaaatcgtcaattggtgttttagaactcggaattttgaatgccgacgggctccagccaatgaaaactagggacggaaaaggtgcatctgatacatattgtgttgctaagtatggccataaatgggttcgaactcgaaccatagtaatccgcttgaatccgaaatataatgagcagtacaccggggaagtttatgatacagccacggttctcacggtgggggtctttgataactctcagattggaggttccgataataccagagataacaaaatcggaaaggtacggattcgcatatctacactggaaactggtcgtgtttacacacactgttacccgctgctggttcttcacccttctggtgtcaagaaattgggtgaactccatttagcaatacgattttcgtcaaca

SEQ ID NO: 194113 - DNA, 539 bp, Gossypium hirsutum
cccacgcgtccgcttcttgcgatgatgagacgtgagttttcggagatttatgatccaaaaaggacggtctataatgacttcgatgaaacttttaggcagcttaggagggaggcagaagctagggctgaggagttaaagaaatcaaaacagacggataagcctgtcaataataaaaagaagcaagggcaggtgcagaaagctggttctgataaaggaagtaagaagagtgagggtagcttggctactgatggtggggatggtgataaagcgaaaggtcataaattggagaatggacactccaatggtaatcatgttgagatggaagaacctagggcaggtgttgttaatggtaaagaaaatactagctccaatattagtgcttttgatgtaagtaagcttcagaaaagaactaaaggtgtaaagaaaactgatactgttgttaacaagggttccaagccggaccctaagaaaaaggctacaaagaagaatagagtttgggatgatgcacctccggaggaaaaactggactttactgatcc

SEQ ID NO: 194114 - DNA, 605 bp, Gossypium hirsutum
tagaggaggtttcagacatgggctattatccactcggaaatcctccctgcggtgagatatgcgtgaaaggaaagactattttctctgagtactacaaaaaccctgaactgacaagagaatctttcggggatggatggtttcatacaggagacataggccaaatgcttcctaatggaattgttaaggttattgataggaagaaaaatcttattaagctctcccagggagagtatgtcgcactagagtacttggaaaatgtttacggagtcactccaatcatcgatgatgtatgggtctatggaaacagcttcaaatcaatgctagttgcagtggttgtgctacatgaagaaaaagctaaaaaatgggctgagttgaatggttacactgtttcactctttgagctctgttctctgagtaagcttcagaattatgtcctctcagagctcaaatccacagctgataaaaacaagatgagaggttttgagtatatcaaaggagtgattttggaagcccgggctttcgacatggagcaagatctaatgactgcaacattgaagaaaaaaagaaacaatctgctcaaatattatcaggctgaaatagatgca

SEQ ID NO: 194115 - DNA, 619 bp, Gossypium hirsutum
ccctcgcgtccgcccacgcgtccgcccacgcgggcgcccacgcgtccgctgagctctgttctctgagtaagcttcagaattatgtcctctcagagctcaaattcacagctgagaaaaacaagatgagaggttttgagtatatcaaaggagtgattttggaagcccgggctttcgacatggagcgagatctagtgactgcaacattgaagaaaaaaagaaacaatctgctcaaatattatcaggctgaaatagatgcactctaccataacttgactacaaaaaaatgaaaagccgaagtagtatgcttgtgccatacccccacggtttatcgtcatcctgtaggtgaaaatggtgttgaatgcctatgcttaatgcataatataagtaataattgtcgttaactggttttcaatatagaattcagaaggcacaagttgcatttcagtggggaaaggaagaagatattatggtgatattagcacaacaaaagttgaaaatttaatcagacgcgtgggtgtttcaccttcttatttatttgtattattcacctatacttttgagttagtaatatgtattttatatattttcatttagaaaaactcatttcagaattgacaaa

SEQ ID NO: 194116 - DNA, 437 bp, Gossypium hirsutum
cgggaatatccaggaacctagctccatgtcccaaacagagaaatttttatgggaaacttgtccttgttcttctaaacgacgtatcttttctttccctctttccctgtcggcttagggtttccctttttccttttttttttaaagatttcctcttaccttcttcacattagtcttcatcattggttttaaccccccaatctttttatacctaacagtttcaattcgtgcctaattggctaattcctgaaacttgcaatgccgccatttttatcgacctcaaaggcggtcgggtcggtaatatcccgtagaaatgtgattaaccagttcgctgggcacgcaaagaacggagggcgaaccgggaacttcgatcaaatccgatgggttactagtatttccggtatccaaatgccgtcggttcacccggtacttggttcacg

SEQ ID NO: 194117 - DNA, 467 bp, Gossypium hirsutum
gtctctttctagctaaatgccttgactgtttcccaaaactcccatctccttcccaaatgatgcttcttgcaatggaggcttctagtagagacggcgttttcagccaaaattggtccttattataatctttgtcaccttagttgttctcacaataatccctgtactttaccctttgatagggtatcctttatacgtctcaaaagcctcatcttccaggcccttgcccaccaccgcatacgagtctcaacaacccgaacccctgccttcgataaagatatccgaaggagaggactgtgacatattcttgggggaatgggtgccgaaccacgccgcgccgtactacaccaacacgacgtgctgggccatacacgagcaccagaactgcatgaaatatggaaggcctgacactgagttcatgaaatggaaatggaaacctgatgggtgtgagctacctgtgctgaacccag

SEQ ID NO: 194118 - DNA, 420 bp, Gossypium hirsutum
cggacgcgtgggcggacgcgtgggttaaaaataaagaagaaaactctgaaaagagttgagggtaaaccctcggagcgccgcggcgtctccgtcattgggttccctccgcgcctacgcgtcgacgcgccaccaccaacgccacccagtgcggtggccagaactcgaaaagtctcgactttctgatgtgattctaacgatctctcgcgagaaatccggtgatggaagagtcgctagcgttgatggaggcctgaagtctggtggtggtgtcgatgaggcgctgattagggaggcagagccttgagtgatggctttgattggggagctggacagacgctccccaaaccgtccagaacttgctgtggcgcgaggggaaagagaggcaaaaaccctacggtttcatgcctcggtataatggtttgg

SEQ ID NO: 194119 - DNA, 434 bp, Gossypium hirsutum
gagacatggcaatgccaagatatcgtccccttcatctctgtctactcatcttgctcatctacaccactccttccataggacgcctcaatggcaccgagctcctcaaggcggcctgcaaccaaacgtccgactacgcattctgccatgctactttaactgccgaccccaacgcaggtggcccacaagcccttgccggcgaccttgctaatgctgctttacgtttagctcaaaccaaggccacccacgcgcaatccctcatacctgtcctccttcaaaatgccaccacctctttggaccacaaccgtctccaaatgtgccaaagtagcaacaacaaagccatttctcagctctcagcggctaacaatgacttcaactccgactcactcgacaccatggtggaagagaataaacactgctgctcggctactaatgac

SEQ ID NO: 194120 - DNA, 626 bp, Gossypium hirsutum
ccaaccccaaaatccttgttaacacattcgatgctttggaacacgaagcattaaacgccattgaaaatttcaacatggtaggcatcggacctttaatcccatcttctttcttgaactcaaatggctccttggataattccttgagaaccgatctttttcaatccgattcaaaagattacatccaatggttagactccaaaccaaaatcggccgtcgtttacgtttccttcgggagctatgcggtgttaacgaagcaacaagtggaggaaatcgctcgagctttaatatccagccggcgaccgtttttatgggtggtgaggaaccggaaagatggaggcgaagaagagaaagaagaagataaactgacttgcagggaagaattggaacagtttgggatggtggttccatggtgttcgcaagtagaagtgttgtctcatccgtcgttgggttgcttcgtgacgcattgtgggtggaactcgacgttagagagcttggttgccggtgtaccgatggtagcttttcctcagtggacggatcaagggactagtgcgaagctgattgaagatgtgtggggcactggggtgagagtgagcactaatgaagaagggatggtggaacgtgatgag

SEQ ID NO: 194121 - DNA, 446 bp, Gossypium hirsutum
tttttatctttccctgaaaaatttcctttccttttcaagaaagaaaagaaaaatctttagttccaaaacggcccagacgccaaacattagccatttgaatcaatggaaccaatggagttacagttttgtaatggcggaaacggttcgtcactgggcgaccccttgaactgggccgcgtcagctcagtcaatgaaaggtagccatctggatgaagtgaagcgcatggttgaggagtacaagaagccggtggttcgtcttggtggtgagacgttaacgatagctcaagtcacggccattgcgaaccgcgacgtccccgttcacgttgagctctccgaggcggctcggccggccgttaaggccagcagtgattgggttatggaaggaatgaatcgaggtacggacagttatggtgtcaccactggctttggtgcaacatctcatcggag

SEQ ID NO: 194122 - DNA, 650 bp, Gossypium hirsutum
cccacgcgtccgccgattgtagacatcatctcgccaagcatccaagccacaccagtatgctccccaggctcacgagaaccattagcccttaaaaacaaggctcctagatggcatgaacagttacagtgctggtgccttaacttcaaggggcgtgtgacggtggcctctgttaagaatttccagctggtcgcagctgttgagccatcacataatgtatcacctgaagagcaagagaaggtagtcttacagtttggtaaaatcggcaaagacatcttcacaatggattatcgataccctctatctgcttttcaagcctttgcaatcagcctaagctgctttgacaccaaacctgcttgtgaatgatcaccacaggttggggatctgcatcattgatgttgccatagattatcaagtacccctctttcaatgccatcgcaatctacaaagtagctttacgcgagctggcatatggatgccagtatctcggtaggagataaatatctttctcctctaaattgcttcctgtattttagtactgtatttatggttgtaatggaagcttttcttgtttggtctttactggctggctgatgtaagttgtctggtgcatggcttttctgatcatgcaatctgacttgtatattgttggt

SEQ ID NO: 194123 - DNA, 830 bp, Gossypium hirsutum
  unsure (1)..(830): unsure at all n locations
gcatgaacaattacagtgctggtgccttaacttcaagggtcgtgtgacggtggcctctgttaagaatttccagcttgtagcagctgttgagccagaacataatgtatcacctgaagatcaagagaaggtaatcttacagtttgggaaaattggtatggacatcttcaccatggattatcaataccctctttctgcgttccaagcctttgcaatctgtctaagcagctttgacaccaaaccagcttgtgaatgatgccaccggaaggagatccattgatgtgccatggattagtgccattgttcctcgttttcattttgcaagccattgtaagtctcaacctaccagagcagctttatgcctaaccggcaaaccggctggcatgtaaatggtagcaggttgtaaatgggagatgcacatctttctcagatcgaatgcttcctttattccaattcctattgtttgtattcggatggaagcgtttcttgtaaggactttgctcggctgatttctaccttttcagtgcgtcatgtaatctgactggtatgtggttgggccatcttaattagatccaaacctgatttaccagcaaattgcctaaaaaaaaaaaaaaaaaaaaaaaaaaaaaaaaaaaaaaaaaaaaaaaattaaaaaaaaaaaaaaaaaaaaaaaaaaaaaaaaaaaaaaaaaannnntatttttttaaaaaaaaaaggggaaaaaaaaacgggtttttaaaaaaatataattttttaaaaaannnggggcggcccccttttaaagaaacacaatttttcccccccgcggttgggaaaaaaattttttttttttt

SEQ ID NO: 194124 - DNA, 499 bp, Gossypium hirsutum
ggcatacggtgtgtctgtctatcgcagccgagaagactccgtagttatactctatggccgcccaaggtcttcctcaggcactgcatatgattccaagaaaccaagtacagccatttaacccagtgaagaatcgtgggttctctgcatttctgtctcgtggcccttctccattaactacttccaaggtttcggtttctgggtttcattcaaaattccctgtggggtcgagtttcagttgttttgctcgaaggggtttcgttgtgagggcagaatctaaccctgaaggtgaaggtgaagctgaagctgaaagaaatgaaaatggtggtgcagaacccgaaacgaaagctgtagccgaagctgaagctgaaggtgaaggtgaaggagacgatgacgctggagaacagaaacccaatgagcctagaaaaccaaggattaagcttggtgatattatggggatattgaataaaagagcaattgaagcatcagataaggaaaggcc

SEQ ID NO: 194125 - DNA, 591 bp, Gossypium hirsutum
caagaaaatccaaagggaattgaaaatgaatctccaaatccaaactcagtctttgtcaacacactttccccttccacccttccctccaaaacccaaattccttcaagcaaaacccaaaccctccttcaaattatggtcctcgctctccactgtttcagtcccaccaacaaaaaccagccacaagccatttcccgccgaggtttccaggaccataatggaattgtcttctatggggacccttgccactctagctcaagatgggtggcccttgggcgttggtgtaaggtttgctgtcgatgctgagggcacccctgttttgtgcttgcctcaaccttctcctgataaccgctccacccttcatgttcagttagatcaatgtgggttacggactcctcagtgtacaatacagggcagtcttaccaaaccagctgatgcaaccattttgaggtggtttgattcagtatggaagaagaggtttggagaatccgccgatgtagacaatctatatactgttgacgtacaaagagtacttcaaatggaagacttaaatgaggatggtgtatgggtcacttcatcagattataaaaatgc

SEQ ID NO: 194126 - DNA, 445 bp, Gossypium hirsutum
cccacgcgtccgtccacgcgtccgtttctcttttttgagtctccccatcgttcaaaaaagatgtgcaaaggtttagaacaaggagggaacagaagcagttcttggctgaaacagggtttttcatcagggttggtgaattgtgagctctgtaattccagggcttccttatattgccaagccgatgatccatatctgtgtaggaagtgtgacaaatgggttcaccaagctaatttcttacctctcaggcttttcacgggtttcctttgcagtccatgtcaaaccttaacccagagatatcttatcggagcttcacatgaagtgatgctaccaacaatggtgacctcttctgaaacaagccactgttactctgacatggaaacccacctttcaacaacgctgaaaacaccttttctttttctctgactctaaaacttttctcttcttc

SEQ ID NO: 194127 - DNA, 459 bp, Gossypium hirsutum
cccacgcgtccggtctccaattctttctataaaaaaaaaaatctaggaaagcatcaagaatggaggcattgaggatggaagtattttgggtgatgctgattgtgttggttgccgtatttaaggtccaaaatgtggcggcagctgaagctccggcccctagtcccacctccgatgccacaatcttcgtgccgtcggtgcttgcttcccttgttgctcttgcatttgggcttcttttttaaaatgctggtgttttatgagacctataatattttttaaaattcttttctattttctacttgtgactacagttcagtgtattcatatttttgttattgttgtagtttcaatatgtaattgttgtgatttgtttcctagtgacctaataaattatttgttttcttttcatatacaagtattggatgaaaatatttgttgtatttattatctaattttcataaa

SEQ ID NO: 194128 - DNA, 979 bp, Gossypium hirsutum
cggaatggccgggccgacccacccgacccgccacgctctcacagttcacttctgtgtttagtgtagccaggattttaaaaaaaacctccattaatggctgcactaaggagcttccttaggaaaagatgtttaacatgcgacgagctgatgatgacaaggaggctgatctccaccgaacccatcattgattccccttcttttgcacaaagactcagagatcttcccaaggatctccctggtactaaaattaagagggaggtttcgcagctaattggaagaacaccccttgtctttcttaataaagtaaccgaaggctgcggcgcgtatatcgctgtgaaacaggagatgatgcaacccacttctagtattaaagacagaccagcatttgccatgatcaacgatgcagaaaagaaaaacttaatctctcctggaaagacaactctgatagagccgacatccggtaacatggggataagtatggcattcatggcagccatgaaaggttataaaatggttctaactatgccttcttacacaagcttagagagaagagtcaccatgagagcatttggagctgatttaattctcacagatcccacgaaagggatgggtggaacagtgaaaaaggcttatgaccttttggagtccacaccgaatgctttcatgttgcaacaattttcaaatcctgccaacactcaggtgcactttgaaacaacaggtcctgagatatgggaggatactcttggtaaagttgacatcttcgtaatgggaatagggagtggtggtactgtttctggtgttggacagtacctcaaatcccaaaatcctaatgttcagatatacggagtggagcctgctgaaagtaatgtattaaatggtggcaaaccaagtcctcatcatattactggtaacggagttgggttcaagccgactatggacatgatgtatggaaaagtctcaggtacatgagatgcaccct

SEQ ID NO: 194129 - DNA, 695 bp, Gossypium hirsutum
  unsure (1)..(695): unsure at all n locations
gccacgcgtncgcccacgcgtgcggccacgcgtccgctctcatttcaatgatggcttcggtcggaatcctaccccatctaagaaatctgtccttaccaatctgatacaggagattgaaccactggatgttagccttattcaaaaagatgtaccccccacaactgtgggtgccatgaaaaggactatctcgggaatgttgggtttacttccatctgataggtttcaagtctttatcgaggcactatgggaacctctctccaaattgttggtttcttctatgatgactggttatacattgagaaatgctgaatataggctttgccttgaacggaaccttggttgtgaaggagatttggaaaatcaaacttcagaaaaggcaaacttcgatttacaagagatgttattggacagtacaaaaataaatgaattttcagagaaaaatgatttgtcctctgaatctgaaaaaaccattgaagaccaatttgaagatattgactntcaaggcctgngtgaaatgcccctggaaaatcgtaaatacattcttcatttgaggctcgactaacttcagtgaanaaggacttcatgaaataaagagganaaatgctgctctacaaatggcacagtttgttggggagaaaagaatgattactttgactactagatcacttcaccagaaaggtactgaacttctgacn

SEQ ID NO: 194130 - DNA, 1243 bp, Gossypium hirsutum
cacaaaacaagcaaacaaaggtaaaatggcaaggacaatggcaatggcgatcccttcacttcctcttctcttcctctttacatttctgcttctactcccacttctcatttcctcttcccctgttcaagaccctgagcttgttgtccaagatgttcacagggccatcaatgcgtccaggaggaacctagggtatctctcctgtggaaccggcaaccccattgatgactgctggagatgcgaccccaactgggagactaatcgccagaagctagctgattgtgccattgggttcggcaagaacgccattggcggaagagatggtaagatttatgtggtcactgactccggcgatgatgaccccgttaaccccaaaccagggacattacggcatgcggtgattcaagacgaaccgttgtggatcattttcgctcgtgacatgaccattcagctgaaagaagagctgataatgaactcattcaagaccatcgacggtaggggcgccagcgttcatattgcagggggtccatgcattaccgttcagtatgtgaccaacattatcattcatggactcaacatacacgattgtaaacaaggagggaatgctatggtgagggactccccacgtcactatggttggaggacgatatcagacggtgatggtgtttccatcttcggtggtagccatgtttgggttgaccataactccttatcaaactgcaaagacggcttgattgacgctatccatggctccaccgctatcaccatttccaacaattacatgactcaccatgataaagtcatgttattgggacacagtgattcctatactcaagacaagaacatgcaagtcactattgcctttaatcactttggtgaaggccttgtccaaagaatgccacgatgtagacatgggtatttccacgtggtgaacaatgactatactcattgggaaatgtatgccattggaggaagtgctaacccaacaataaacagccaagggaatagatttactgcacctgacaacagattcagcatagaggtgaccaagcatgcaggatgcaccggagagtgaatggaagagctggaattggagatcggaaggtgacctaatggtaaacggtgcattctttatcgcgtcgggtgctggcacctcgtcgagctatgccaaggcttcaagcttgggtgctaggccatcttcactagtggcaacgataactaccaatgctggtgcgcataattgcaa

SEQ ID NO: 194131 - DNA, 719 bp, Gossypium hirsutum
  unsure (1)..(719): unsure at all n locations
tgataaccgaatcatacgatgctctcttctctttatatctcaacctctctttccgtttctccgatttctccgccgtctacttcccgctccaaattccggccacctcgctccgccgctacttacacttcgcaacaacagaaaggatcgacgaacggttacctaagccgtcaaggaatggcgacgtgcacgtcgttgtacgaagttctagggattcccgtcggtgcttcgaacgaggaaatcaaatcggcgtaccgccgattggctagagtttgccatccagacgtggcggcaatcgatcggaaagattcgtcggcggacgagttcatgaagatccacgcggcgtacagtaccttatcggatccacaaaaacgagccgtatacgatagtaagcttgtatggagaaaccaacggccgttgacttccggttctagggcttcaggttataggggggggagtttgggagaaccgatcagtgctcgtaaacccgagcgactcatcacgctccgatgtgggaagtngaactcataaacgatttttaaacttcatanatctggacagttaatcatcaagtcctgtatatattttaagcctgattacttacgacggctaaaaaataacgaccggtgaatttaccggaagaatttccttcgttaatggtgccacgtcttttatgtatgaacttgtgtggctttgttgaggtcaataacctagacttttat

SEQ ID NO: 194132 - DNA, 1371 bp, Gossypium hirsutum
  unsure (1)..(1371): unsure at all n locations
tcggattgagttattttacccttaaggggaataagcagtagggagggggatttttttgttttcttatgttcttatccgctttcccgtcgccgtaatcagacacgcaattcaaggcattatctacacgcgatcaacgatgatgacgaaacccatttaccaaaaccagatccatgttgaaaatattttttttatataaccatttccaaaattgcaataaaatttattcatcttctcttttgaatctttccctttctttccttttcctgtaaaaatggagggttcctcgtctgacaagctgatcgttgtgacccgtgaacctgatgggatcgctattgttaccatcaatcgacccaaatctctcaactccttgacccgacccatgatggtggacttggccaaggctttcaaggctcttgcgaaggacaactcggtgcgggtcatcatcttgtctggagctggacgggctttctgttcaggcgtggatttgacggctgcacaagatgttttcaagggtgacgttaaggacccggagacggatccggttgttcagatggagcaatgccccaaacccatcatcggagctatcaacggcgttgctattactgccggcttcgagatcgccctcgcttgtgacatgctggtcgctgctaagggagccgctttcgttgatactcacgccagatttggtatatttccttcatggggtttatcccagaagcttgcacgctttataggaccaaacaaggctcgcgaagtgtcgttggcagccatgcctttgtcagcagaggaagctgagaaattggggtttgtcaattatgttgttgaccaaaatgaagtgctgaataaagctcgacaacttgcaggagcaattatgaagaacagtcaagacttggttctcaggtacaagtctgtgatcaatgatgggtacaaattggatcttcgtgagggtctcgccatggaaaaggtattcattacgcttatgtatatcttttcttggataagcatggtnttatttatctaaaagaacttggaatttgctgctacataatgaaaggaaagtaatcaaagctatgcattacaagaataaaggaagtgaaaaagattgatttcatggggnctttcattggtttcttagcctgctaacggtttcttcgcccggtgatggttgtttgggaatctgttgaaaatttcatatatctggtgttatctccttcaaattgtagatgaaggtctagcaatactcatacaatctgatcgagattcctgcttagatctactgccattctgtcttcttcagctggatacttttttgagtgattgctagatatcttggactctaagagccattgagacaaggtttcaatttgttgg

SEQ ID NO: 194133 - DNA, 451 bp, Gossypium hirsutum
cccacgcgtccgggcagccatgcctttgtcagcagaggaagctgagaaattggggtttgtcaattatgttgttgaccaaaatgaagtgctgaataaagctcgacaacttgcaggagcaattatgaagaacagtcaagacttggttctcaggtacttgtctgtgatcaatgatgggtacaaattggatcttcgccagggtctcgccatggaaaaggagaggggtcatgaatactacgatggaatgacaccggagcagtttaagaagatgcaagagttcatagctaggcggagttccaagaaaccatcttccaagttgtaatatgatctcctccatgcatcttctgacttggtgtttagtcactgttttataatggaaacataatgtggggaaataaagttgttggttactggactcttactaatacataagtatcaattctgtataatgagt

SEQ ID NO: 194134 - DNA, 1090 bp, Gossypium hirsutum
ggaaaatctccactgtcccctaaagggatactgtctcaactacaaaatatttgtggccaacttgttcaagggaaggaggaggatgcacatgaatttttaaggtatgttattgatgtgatgcaatttgattgtcttaaagaagctggggtgcgttcatcaaggtgttcagaagaagaaacgactttaataggcctaacatttggaggttttctccggtcaaagataatgtgtgtgaaatgtcaaggcaagtctgaacgtcatgaaagaatgatggatcttacggttgagattgaaggagacatagagaccctggaagaggctcttcatcgctttacgaggactgagattttagatggagaaaataagtaccaatgtggcagatgcaactcttacgagaaggccaaaaagaagttgacaatatcagaggctccaaatgtcctcacaattgctttgaagcgatttcagtctggtaaatttgggaagcttaacaaagcgattcaattccctgagatcttgaacttggcgccgtatatgagtgggacaagcgacaattcacccatttacaggctctatggtgtggtggttcacttggatgtgatgaatgctgcattttcaggtcactatgtctgctacgttaaaaatgcccaaaacaagtggttcaagattgatgatagcaaggtaacatcctctgaacttggtaatgttctaacaaaaggcgcgtacatgcttttttacgcgaggtgctcacctagagccccaagatcgataaggagcagaagtaagtccattctatcaaaaataaattcaaagaattatccaaagtcaagttcaactcatcctgatagttcagggagtatcgaatccttctattcgaaaatacaatcggttacaaaagattgtaggaagaggattcatcaagtgatacttcttctctgtttggcagcaattctgataatacttcttcctgtactgatagcacacaagatgactcactggattctgtatttggcgattccgatgcttcatcttccccttcctcttcttcctcttaactcaaagcattcaacccttagctgatttaaaaccgata

SEQ ID NO: 194135 - DNA, 420 bp, Gossypium hirsutum
attttaattccccctttttttttctttcactttttatccacaaaaaacactgtcactttcttttgcatctctcttctcgttgagcaccactggcaaccatgaagaccgccgaggcaaccgccgccacgacgaccgttctcagccgcggttacaaacgttcccccaaatccaacggcaaggtcaacggcacagctgctaagaaaaccggcgttaatcatggcaatggtggtgacatttctaacgggaaagcatcgttcatgaagtggacactcgacgacgtcgtttacgtcgctaaataccaccgcttaccctgttttttcgcggcgtggttcttgtttttcatatacgtggagtacacgctccggatggtaccggattcatccccgccgtttgatctggggttcgtcgtcacacgatctt

SEQ ID NO: 194136 - DNA, 543 bp, Gossypium hirsutum
cccacgcgtacgcccacgcgtccgatacatataaactgtaattccacaaaaccaacttctttttatacgtagaaaaaggagaatatgaaggcatcatatattgcattgtgtgcagtgatggtgatcctcttggcagaagcagtaggggtgtcaacggcggtgacatgcagcccaacgcagctgagctcctgcgtgagcgccataacatcttcatctccaccatctcaactgtgctgtagcaagatcaaggagcagaagccatgcctttgccaatatcttaagaaccctaaccttaagaaatttattaacactggcaatgccaggaaggttgcttccacctgtggaactccttttccaaagtgctaagctagaccctttgcttaaggctttctttctctctattttcactgcagaatggatagagaggaagtactataattattaatattatgtagttgcggtgtgtggaatatatatatatatatccgttttgctgcttctagtatatattaagcactaagattagctctgtggaaaattaaa

SEQ ID NO: 194137 - DNA, 509 bp, Gossypium hirsutum
cccacgcgtccgagccactcaaaagttaaaaaaccttctgttttgttagcgtagcaaatagcaatacaaccatggctttggctcccaccacttatccctcctatctctgctctaacacttgctcacccttacacagagccactcaacctctcctttcttcaaccaggcatgtaggagttagattcaacagcaagtgttcagcgtctttctgcagtggcaaggagcagctaaagccatggattttggtagcgaaagcatcggaaggtgagtcccaaaccacagagcaggaagagcagcagtacgaggagtatgaggtagagattgagcagccttatgggctcaaattcagaaaaggcagagatggtgggacttacattgatgctattcagcctggtggagctgctgacaaggctggggttttcaccgttggggacaaagtacttgccaccagtgcagtgtttggaacagaaatattgccggccgccgaatatgggaggacaatgtacacc

SEQ ID NO: 194138 - DNA, 705 bp, Gossypium hirsutum
tccattcgtccggcaattcagactgcttttacctttctggtttatccagctcttatattggcatacatgggccaagctgcttacttgtctcaacatcatcatacgagttaccaaatcagcttctatgtctcagttccagaaagtgtgagatggcctgtgctcataatagcaattcttgcttctgtcgtgggaagccaagcaatcattagtggaacattctccataatcaatcagagccagtcacttagttgtttccctcgagtgaaggtcattcacacctctgacaagatacatggccagatttatatccctgaaatcaattgggtgctcatgatcctctgcattgctgtgactattggctttagagacacaaaacacatggggaatgcatcaggattggcagtgatgactgtgatgttggtgacgacatgtctcacatccctggttattatcctctgttggcacaaaccccctattgtggctcttttctttcttcttttctttggttctattgagttgctttacttctcagcttcactcaccaagttcactgaaggggcttggctccctattctcttggcccttttccttatgacaatcatgtttgtttggcattatgcaaccatcaagaaatatgaatttgatctccacaataaggtatcactagaatggctattagcattgggtccaagcttatgaattgct

SEQ ID NO: 194139 - DNA, 390 bp, Gossypium hirsutum
ctctcgcgtgcgcccacgcgttcgaccacgcgtccggtaaacactgaaaccgcccctattcggtatcgatcctaatgttctttatgtttttgcaatggaatctctttcgcgttccctctccatctgcatctctaatctacgcgagacctacccaattctcaacagccacttaccatctgcttcttttagtctgatcaaagcgccaaatcaacggatcggatttctcaaattcaactctgaaacctctcagtttcataggttttatctccaagctctaccccgagaggttcctgttgttgaaggtgaagaccagctgcagcctcttacccttaataatgggtttcgcttagtttctgaagacagacaatctgtttatcagggcgattcaaa

SEQ ID NO: 194140 - DNA, 467 bp, Gossypium hirsutum
ccctcccgtccgctgaaattcacaagcagcagccgctaccgtgtcgttggcctcgtacttagccaaatttaaggatggattcacaaattaagtttgccgtggtggtgaaaattatgggaaggacgggatcgagaggtcaagtgactcaagtgagagtcaagtttttggatgatcagaaccgttttattatgaggaacgtgaagggaccggtcagggagggagatattctcaccttgctcgagtctgagagggaagctaggaggcttcgttgatcacttcctcttatctccggtttgttactttattaatgtttatgttgcgcaagtagctagctgtttcttatttctgaaaggtatcccaaattttcaaatctagacttggattttgggagactgatttaaatggatgagttgtttttaaagcataatcattatgtttaaatgaactaagttggtttttgagattat

SEQ ID NO: 194141 - DNA, 403 bp, Gossypium hirsutum
gcagccgttacccaaatttaaggatggattcacaaattaagtttgctgtggtggtgaaaattatgggaaggacgggatcgagaggtcaggtgactcaagtgagagtcaagtttttggatgatcagaaccgttttattatgaggaacgtgaagggaccggtcagggagggagatattctcaccttgctcgagtctgagagggaagctaggaggctccgttgataacttcctcttatctccgttttgttacgttattaatggatgagttgtttttaaagtataatcattatgtttaaatgaactaagttggtttttgagattatgattttcatgtcccgttaatttctgctatttcaaaatgttaattcttttctaaaagttgcttgaacgtgactagaaccttt

SEQ ID NO: 194142 - DNA, 477 bp, Gossypium hirsutum
tgctgattgggggagctgaaaacctattatttcatcaacatatagaaaattaaaaaaaatcgaacggcgataatctctggcgatggttcgaccgacggcgataggcaccacgaacagatcgtcatcagcgatgtcctccatgacaaccaccgtgacgatcgagaacacctcgggcgcgtcctcctcgtcgtcgcagcctcaagaagccctcgtcctcgaactccgccctaggaagaagaaagttacgtggaaagaaggcaccgtggacaacgaattcatgaacaagaagagttccaagatctgttgtatttaccataaagaaaagcccttcgacgaagacgacagtgatgacgacggacatgaccatcatcatcaccatcatccatccaacggacatgattcctccaaggatggctgcaggcccagcagcagctgcagctgcagcttcagcgcctgattctgtttccaatctgtttc

SEQ ID NO: 194143 - DNA, 1467 bp, Gossypium hirsutum
cccacgcgtccggaggaaaaaggacatttggctgctactgtaaagcactaaaagaggggaatacaaaaaacccaagcatttcttcctcctcgagtctctcaatcaagcccttccaacactcttcagcttgaactctccgcaacaatgtttcgatcagtagctcgatcggccgccggaaagcacctcctccgccgaggatatgccactgaatctgttcccgaccggaaggtcgcggttttgggcgctgccggagggattggccagcccttggctctcctcatgaagcttaaccctcttgtttctcaactggctctctatgatatcgctaacactcccggcgttgcagctgatgtcagccacgtcaacaccagatctgaggttgctggatatgttggtgaagatcaattgaagcaagctttggagggatgtgatgttgtcatcattcctgctggggtgccaagaaagcctggtatgactcgcgacgatcttttcaacatcaatgctggaatcgtcaagggtctatgtgctgctattgccaagtattgccctaatgcacttgttaatatgatcagcaaccctgtcaattcaactgttccaattgctgctgaggttttcaagaaggcagggacatatgatgagaaaaagttgtttggtgtaactacccttgatgtggttagggctaagactttctacgctgggaaggcaaaagtgaatgttgcagatgttaatgttccagttgttggtggccatgctggaataaccattctcccactattttcccaagccacaccaaaagccaatttgcctgaagaggatatcaaggctctaacaaagcgaacacaagatggaggcactgaagttgtggaagcaaaggctggaaagggatcagcaacattatcaatggcctatgctggtgcaattttcgctgatgcttgccttaagggactgaatggtgttcctgatgtcgtggaatgttcatttgtacagtcaactgtcactgaacttcccttctttgcttctaaggtaaggcttggaaagaatggtgtggaggaagttatggggttgggtcctctctctgactatgagcaggcaggtttggagagccttaaaccagaacttaaagcatctatagagaagggaatcaagtttgccaaccagaattaaatttatattgtttgagatattcttccattagaacaatgaaaattttgcagttacttcggctgctattggtgttttttttcttgcagcaagcagcatcggctttgctgttgttaataggatagccataccataagtttccactaataattcccagtggtatgttgcaggaagtgtgtgattaaaaacccgtttttgtttaggtgggggatgtttaattacaaaccattttaaaattgtgatattacatttaatcttccacgattattccgtctttggtggtgacgaaagcttactttttatcct

SEQ ID NO: 194144 - DNA, 635 bp, Gossypium hirsutum
cccacgcgtccgcagactcccccaaaaccctcaccacaaaagaaatctcttctatttttccccactctactgcaaaaatgtttcgatccgttgctagatcggccgccggtaagagcctcctccgacgaggatatgcaaccgccgtacctgaacggaaagtcgctgtcttgggcgcagctggagggatcggccaacccttggctctcctcatgaagcttaaccctcttgtttctcaactggctctctatgatatcgctaacactcccggtgttgccgctgatgtcagccacatcaactctagatctgaggttgccggatatgtaggtgaagagcagttggggaaagctttggagggatgtgatgttgtcatcattccagccggggtgcctagaaagcccggtatgactcgtgatgatcttttcaacattaatgccggaatcgtcaagggtctatgttctgcaattgctaaatattgccccaatgcacttgtcaatatgatcagcaaccctgtcaattcaactgttcctatcgcagctgaggtttttaaaaaggcaaggacatatgatgaaagaaagttgtttggcgtaaccacccttgatgtggttcgggctaaaaatttctatgctgggaaagcc

SEQ ID NO: 194145 - DNA, 630 bp, Gossypium hirsutum
aaacaaaaacgggtttttaatcacacacttcttgcaacataccactgggaattattagtggaaacttatggtatggctatcctattaccagcagcaaagccgatgctgcttgctgcaagaaaaaaaacaccaatagcagccgaagtaactgcaaaattttcattgttctaatggaagaatatctcaaataatataaatttaattctggttggcaaacttgattcccttctctatagatgctttaagttatggggttgggccctctctctgactacgagcaggcagggttggagagcctcaaaccagaacctgattcccttctctattgagaaggggatcaagttcgccaaccagaattaaacctgaactacttatgatttcttccattagcccaatccgaaattcttataaaggtttttttttgtgctactgttgtatttcatgctgcaagcagcatcggctttactgaataggataggccctacataccatcaagttttcatgtaataattcccagtgacctgttacaaaggagggtttggttttaaaaaaaaaatctatttttccagtttaggtggggtgttccattcatttaactatataaattgtgaaatcacgtttgctctgggg

SEQ ID NO: 194146 - DNA, 539 bp, Gossypium hirsutum
cccacgcgtccgcccacgcgtccgattttctcgcatctttgtttgttcataaaataatagtatagttttcttagaaaaaccagagtgaaagaaaaaaaaaagaagtaaaagaaaaatggctttggcaagcttggtgagaagaaaggcataccttttgtctagaaacctgtcgaattcgcccgcagatgcgttgaaatactctttttcactcagcaatttctcgaggggtttcgcttcaggatctgaagagaacgacgtcgtcgtcatcggcggcggacccggcggctacgtggcagctatcaaggctgcacagctaggtctcaaaacaacctgtatcgagaagcgtggtaccctcggtggtacttgccttaacgttggttgcatcccatctaaggcgcttcttcattcatcccacatgtaccatgaagctacgcattcatttgctggccatggtgtgaaattctcctctgttgagattgatttgcctgccatgatggcccaaaaggacaaagctgtttctaatcttacccgtggtatcg

SEQ ID NO: 194147 - DNA, 629 bp, Gossypium hirsutum
aaaaaaaccaaatcacaaaatctaattgcccctttcagcactcaatctccaagaacagttttgtttttagaatcatgttcttccattttagtttttatgtaagcctttttatgggtttttatcaagatcttcccaaaaaagcaagagaaaaaaaataaaaatttgaagaattgacaccattgctttttatgattctaccttttccactcaaaaacttgatcagggttttgattcctttccaaatctcttcacttttcttcaagaaagcatctttgttgttgttgctattaataatcttgttcctcgccgttcttctcctttgatttcagttcttcaaatctttgtaaaaaaaaccagaaggaacccaaatatttaataccctcaaagagcaccatgaggatccatccgttgccgaagaaaagaaacatcaccgtccaatacgagatgaacccaaggaccacaaggtctcaagctgagaccttgttgaccggcgggtccaacaagaagctccggaggttaccccacatcttcagccgcgtcctcgagctgccttttaggtcggatgcagacgtggcggtggaggaaagccctgactgtttcaagttcgtggcggagacggatgggatgat

SEQ ID NO: 194148 - DNA, 889 bp, Gossypium hirsutum
ctcaaatgctgagcagagggaggcaatggttgcagctgaaaggcgttcagttgatgaacgagtcaaaaaaattattgagctaaaaaataaggtttgtgctggcaatgatagcaactttgttgttatcaatgaaaagggtattgatcccccttccttgcatctacttcaacaagcagggattgttgccctcagaagagcaaagagaagaaatatggaaaggcttgttttggcttgcggaggagaagctgtaaattctgttgatgatttaaccccagcttgtcttggctgggcgggacttgtctacgagcatgtccttggggaagataagtatacatttgtggaaaatgtgaggcatccccattcatgtacaattttgatcaaagggcctaatgaccacacaattgcccaaattaaggatgctgttcgtgatgggctgcgggctgttaagaatactattgaagatgaggcagttatattaggtgcgggagctttcgaagttgcagctagacaacacctaattaacgaagtaaagaaaactgttcaagggcgtgcccaattaggtgttgaagctttcgccgatgcccttctcgtggtgcccaagacacttgctgaaaattctggacttgacactcaggatgtcataattggtcttacgggggagcatgacagaggaaatattgtcggtctaaaccaacaaacaggagaacctatggacccccaaatggagggtatatttgataactactctgttaaacgacaaattataaactctgggcctgtaattgcttcgcaattgctgctggtggatgaagtgattcgtgctggcagaaacatgcgaaagccaacttaagcccggagtggaccttccttttactctgtatgtgtgtgg

SEQ ID NO: 194149 - DNA, 684 bp, Gossypium hirsutum
cccacgcgttcgtccacgcgtccgcttatatcccaaaacccaaacgtccgcccacgcgcacgtgaaacttcatttctctgccacaaaaagctcccccgccccgactcccctggcatcaacagcacaattctaaacccaaaaacataaaaaaatggcagcaagtgtagcaacaatggcgatgctcaatgcaaaatgcctaagcatcagctcaactaagatgagcagcccaacaaagccaaccccaaagcccttctcccttctctccatgcagaacctccccaaaggcctcaccatctcaaaaccagccaacaactcaaacctaccttcttcactcgctggcagcgccattgctggagctatcttctcaaccttaagttcatgtgaccccgccttagctgcacaacagattgctgaaatagctgaaggagacaaccgtgggctagctctattgcttcccataatcccagcgatcgcttgggtcctcttcaacatcctccagccagcacttaaccagctgaatcgaatgaggagctccaaaggggttatcatagggctagggctcggaggattggctgcatcagggttcatgtcaacaccggaagcatcggccagtgagatagctatggtagctgatgctgcatctagtgacaataggggtacccttctcctcttcgttgtagcacc

SEQ ID NO: 194150 - DNA, 435 bp, Gossypium hirsutum
ccttaatttccatcaacctctttgtaaaaaagaaactcctttcccattcttttgctagaaaagctgtgcaacttccttttatttctatggtcttcagtttaaaattcttaatatttccacttttttttacaaaaaaaaaatttatttaaaggtttaatgctgagaaataaaggcaaattgaaatggtttctctacagattctgaaccctgtcttctcttccatttcgatttcccagtcaagttgtcctggaaaatctgatttcaggaagaaaattctcaactttaatagctgtagaagcttcaggtccttgcataggcaaagatctagaatctattgtgctactcaagaaggtgacaacaaaagcaatggggaagagcctcctgagtcgctggttatgaaggagttgaagaggaaggggatgacgcccacttcac

SEQ ID NO: 194151 - DNA, 1009 bp, Gossypium hirsutum
ctactttatatctctcttctctgcttttacaagcaaatttcttcgaggctgtattttcagatatcggaactggcaaacagcaattccacggacaaatggattataaagcggctggtttatatacgttggatgaagcccttgaaactgtggggtttgggaaattccagggctttgttcttggatacgctggtcttggttggtttgctgaagccatggagattatgattctttcctttataggacaagctgttaaatctgagtggcaactttcctctggtcaggagagccttttaagtaccatcgtctttgctgggatgcttctcggagccaatacatggggccttttatcagataactacgggaggaggaaaggttttcttactatatctatggtaacttttggagctggattactgagcacattctctccaaactatttaacgcttgttgttcttcgaggtttggttggttttggccttggtggctcatctgtattcttatcctggtttctagagtttattccagcttctaatagaggcatgtggatggtagtgttttctactttctggacatttggatcaatttttgaggctgctcttgcatggattgtcatgcccaggttaaactggaggtgggtacttgcattttcggctgtgccatgggttgctttgcttattttgtatggtgttgcacccgagtctccgagatacctatgcatgaaaggtaacacaagtgatgcacttcgaattctggagaagatagcttcagtgaaccaaacaaagcttcctcctggtgtcctactttctggtagatcaaatgacaaggatgaagagtcttctccatcagaaaatactggcccattactttcctcactcagtaaaactgccacacaatcgtgatcaggcttctcatcattttttatgctgttctcttcaaaattaattagaacaacgctgctcctatgggtactattctttggagattcattttcatattatgggatcatatt

SEQ ID NO: 194152 - DNA, 611 bp, Gossypium hirsutum
cccacgcgtccgctttaaagaaatattctttaccaccatttgtgagttgataatttctgagttgtactttgatggctgttgcagcagctagctgcttcggcagcacttgcttcattactgggaggcccaatagttcaatctcaaccaccaactttcccttatctttttcttatccaatcttcaacggctgcaatgggatttcagtgaccagaattgggtctagctcaaaaacatacgccaagtttgagaaatttcaaggtgacccttcagaagctaatggtgaagatattatagtatcttctctacaaacccaggaacaaaccattgaagaagaagaagaagatgacagttgtttgccatctgacttggagggtgcagtgaggcaatcaggtgaagcaagtgccttgtttgtgtcttcaggaggaatgagagctattgttgagctcctaattcctcagttacagcttcttgatgatgaaggtgctcaagctgagctttgggaattatccagaattttctttgatacacttatgcaagaaactggatgtcagaaattaaagctatattttctgatgctggagctgctgcatactgaaatatcgatggaagat

SEQ ID NO: 194153 - DNA, 859 bp, Gossypium hirsutum
cggccgcgtcgacaaagcagccaccacatccttggctcacgttatccccctcaaaatcctcactttcactccctcacaaactgcaaagctgcggcaatagcagcaatggctgcccatattttcacgacaaccccgtcccacctcgctctctcttttccatcctcaactaacccttcaaacccaccggttcttctctcctcatttcgtggggtctctcttaagctccctcgtcaatccctctcccttgctgctactattcccaagaagcccttttctgtgtttgctgttaccaagaaagctgtcgctgttcttaaaggtaattcggaagttgaaggcgttgtcacgttgacccaggaaaatgatggtcctacaactgtgaatgttcgaattactggtcttactcctgggcctcatggcttccacctacatgagtatggtgacacaacgaatgggtgcatgtctacaggagcacatttcaatcctaacaatatgacacatggtgctcctgaggatgaagtacgccatgcgggtgacctgggaaacataattgctaatgctgatggagtggcagaggcaacaattgtggacaatcagataccactaagtggccccaatgcggttgttggaagagcatttgtggttcatgagcttgaggatgatcttggaaagggtggacatgaacttagtctaaccactgggaatgctggcggaagattggcatgtggtgttgttggcttgactccggtataaatcttatcgatgaaaccagtttggtgttgtgctatttgttggttggatttggcagcttcttttatagagccgcatgtgatgttgctttcaatgttgatagcgtgttata

SEQ ID NO: 194154 - DNA, 631 bp, Gossypium hirsutum
  unsure (1)..(631): unsure at all n locations
cccactcttttcaattcaatggaatctcaggatcaaagcccagttgttctaatcacagggtgttcccaggggggaatcgggcatgccctcgcacgagcttttgccaataacaactgcaaggtggtggcgacaagtaggtctttacgctccatgtccgatctgcaacgagatcccaggttttatcttcaagaactcgatgttctctcggagcaaagcgtgcagcatgtcatgtctaatgtaataaataagtttggtcgtgttgatgtcttggttaataatgctgggatccaatgcgttggccctcttgcagaagtccctttgccttccatggaaagtgccttcaataccaatgtttttggtgcgatgagactagtacaagctgttgtacctcacatggcatctaagaaaaagggtaagattgtgaatgttggaagtgttagtgctttggctcctgggccatggtccggtgtctattttgcatctaaagcagcccttcatgcgctaactgatactttgaggttggagctgagccatttcgggatcaatgtcatcaatgttgtgccangagctgtaaggtcaaacatcnggaattctgctatagctagctacaataggatgcctgactggaacc

SEQ ID NO: 194155 - DNA, 648 bp, Gossypium hirsutum
caaacataaggcataaactgttgttgttggttttttttttttttcttttccttcagcttttgggtcttgctctggtttaccccgaaaaagttgttttctgtatggagaaatcgatgaattcgacaactttagctcgaacacaatcggagcaactggtgattgagacgcaggcggcggcgacgccgacgtccaagtcaccaacgatgcaaaatgaagatgcaccgataacatcggaaaacatgggaactctgtcgcggaagtcaagccagcggatggtggtgggtgcatcgccggggcggagcgagcggcggttacaacaataacacccacattaggaaggctagaagtgctcaggtgaagatggacgtggaagagttgagcaacggggctgctctcagccgcgcctctagcgctagcttgggcttatctttttccttcactggcttcaccgtcccacctgatgaaatcactgattccaaacccttcagcgacgacgatattcctgaagacattgaagctggcacctgtaagccgaaatttcagacagaacctactttgccaatatatctaaagttcagtgatgtgacttacaaggtgatcaccaaaggaatgacaacttctgaagagagggatatattgaatggaatc

SEQ ID NO: 194156 - DNA, 624 bp, Gossypium hirsutum
aaaatacgaagaaaaatgacgatgtttcacttcttcaactgtgcgatcctcactttgggtccgcacgccgtctactactggggcactcccttatcggagtatgatactcttggtacttctgttaaagctgcccttgtttatcttggaactgctttggtaaaggtttctgagaatgacggcttcgatccgtaccaggaacttttgaaggcactgattggttttatagatgttgctggcctttattttgccttaacacagttgactcacaggaacatctctcaaaatcataaatttcaagctgttggacttggatgggcgtttgctgattcggtgctacatagattggcacccctttgggtgggagctaggggactagaattcacttgggatttcattctgcaaggcctggaagcaaatgctaatttggtgttgagtatatctcttgcagcattgggatctttgatttggctcaaaaagaacaagcccaagactttgattcccataatatatgcctgcgctggaatttgtgcaaccatgccatccattacaagctacctaaagcgaggattgggatggcacttttcaaaggtggtaggcctttgaattattcacaattttggtgat

SEQ ID NO: 194157 - DNA, 432 bp, Gossypium hirsutum
cccacgcgtccgcccacgcgtccgaaacaaaaacaaaaccatctgctcatcgcagattcagatcgaaaattggggccaaaaaatacgaagaaagatgacgatgtttcacttcttcaactgtgcgatcctcactttcggtcctcacgccgtctactactccgccactcccttatcggagtatgatactcttggtacttctgttaaagctgcccttgtttatcttggaactgctttggtaaagcttgtttgtctcgcaacgcttttgaaggtttccgagaatgacggcttcgatccgtaccaggaacttttgaaggcagggattggttgtatagatgttgctggcctttattttgccttaacacagtcgactcataggaacatctctcaaaatcataaatttcaagctgttggacttggatgggcatttgctga

SEQ ID NO: 194158 - DNA, 429 bp, Gossypium hirsutum
gcgtggtgttgcaggtcttcgttacgcacttgaagttgcgaaacatggatctggggcgagtatcaccaaggccgagcctcatgagaggaatacgaactatgcacaaggtggtgttagtgcagtcctgtgtccatctgattctgtagagagtcacatgcaggatacaatcgtagcaggagcttatctttgcgatgaggagtctgtcaaagttgtctgtactgaaggacctgatagaatccgagaattgattgcaatgggggcttcgcttgaccatggtgatgatggaaatttgcatctggcaagggaaggcggtcattctcatcaccgaatcgttcatgctgctgatatgactggacgagacattgatcgggctttactcgaagcagttgtcaatgatcctaatatttctgtgttaaacaccatttcgca

SEQ ID NO: 194159 - DNA, 511 bp, Gossypium hirsutum
cttggtttcacccaacaagatggagaaatcagaaatatctcaatctgttgctgaattggtgtggcaattaaatgagaaatcttgtgaacttgtggttaaagctgcagacactcgaataatccacgagcagctgggcctgaagatttgtgaatgtgaaggattgcaagaaactgttgcctccttaaagcagcagctctctgatgcactagaatcacaaaatgtcagtcctattgcccctaattctcaacaatttggaggaatgaaaggtctgcagatggacaacgaagctgcggcatcaaaagatagtgatgaagatttgctttcaaaagcacaggtggctgagattgaagaactgaagcagaaggttgttgaactaaccgagtccaaagaacatttagaactacggaaccagaaactagcagaggagagttcatatgccaaagggctagcctcagctgctgctgtggagcttaaggcattgtcggagggaagtactaaactaatgaatcat

SEQ ID NO: 194160 - DNA, 646 bp, Gossypium hirsutum
gaaaagcataataaaagattaaaaaaatattgcattcagacaatcatacaatatggggcagttggaattcttatcgaggccttctcttcctaaagtatggatttatttcatatagcatatagaaggaaattgatttcatatagaaagtatagatagattactatgtatcgactgaaccaatgactattcatgattccataattgaatcaatgctccaaactagaggaatgttatggtaaaacttcgtttgaaacgatgtggtagaaagcaacgtgcgacttgaaggacatgatcagctgtggatgtcaaaacccaccactttccgttatgtagaaatgaaggtgctttttgctcgacatcctttgttctattataatccgtctttttgttgggttgtaatgtaaatagtacaggatggagctcgaagagaaacatccatttttcaggggcaaggatctagggttagttaatggaaatcaataagttggaacaacttcgtaagtctatttgtgatatagaaatcgaaaggatccgattcaaactattttcaaatcaaaaagaaaagttgttggaattggtaaaactctttcgatcaaaagtgtatcatgcgggaattaatcgttcatatgattctttgatagaaaaa

SEQ ID NO: 194161 - DNA, 645 bp, Gossypium hirsutum
  unsure (1)..(645): unsure at all n locations
tcgagcaacacataatagtcaaattagcgagcaagatgagtaagggtacgaagagagcagttctggtgggatgcaactaccccaagacccaattcagcttgcatggatgcatcaatgatgtgaaagccataagaggtgtgatcctggacattgggtttaaggaaagcgatgttaatgtcctcaccgatgcgccagggtcgccggttctgcctacgggtgtaaacattaaggatgcactcaatagaatggtgaacaaggctaaagcaggagatattctatttttctacttcagtggacatggaacacgcgttccaatctttcaacctggccagcctttcaagcaagatgaagcaatcgtggcttgtgatttaaatcttgtcaccgatgtggacttcagacgtttagttaatcggctaccagaaggagcaagcttcacaatcctatcagattcgtgccacagtgggggtctcattgaaaaagagaaagaacaatttggtggtcagcatatgacgacaacagtaaataccgacaagcctaaaccgtctaaggctaaggctaaaaatcttacttttgatatcatacatagtgcgatagatacagcagcaggcatcctacacaacgcancanatgttggccaaaagatta

SEQ ID NO: 194162 - DNA, 731 bp, Gossypium hirsutum
  unsure (1)..(731): unsure at all n locations
atctcttaagcctccctctcctatcctttgagcataaaaaagttatacacaaaaatggagcgaggaaaagagcagggaatggtggtgatgcctcagcaaaaccctttggaacagttgcaagctaagttcaaggaagtggagaccagtttcagaggatggctagccaagcagtccttgcccatcgaggcggctgttgtaaccaccaccagcgctgctcagggtgctgctatcggtgctttcatgggtaccctcaccaacgatgtctcctcctctcttccaactccccctcaggcttccctcgatcctcaagccatggcttctctcaagcaagcccaggctctatcaggaggccccttgatacaagctcggaattttgctgttatgacgggtgtgaatgcaggcatatcttgtgttatgaaaagattgagaggaaaggaggatgtccaatctancatggtggcggctttcggttctggggcaatgttttctttantgagtggtatgggtggccaaaatcagattgcaaatgcagcaacatctggtctttttttcgcccttgttcaaggtggccttttccagctaggtcaaaagttttctcaaccacctgccgaggatatatactactccaaagcaagatccatgtgaagtagtcttggcttgcagaactacgagaaaaacttcaagaaaggcttgttaacggacaacacattgcctttgctcactgatagtgc

SEQ ID NO: 194163 - DNA, 472 bp, Gossypium hirsutum
  unsure (1)..(472): unsure at all n locations
tttcgaagcgcgctctctctctctctgtcctatttaacactctttcaccaaacgcttcgataaccaaccctctctgaatttcatttgcctcttccccattttgcccctgcccttcattgtccaggccccctctcgtctctctcgcttctcttccaatggcgccctccgctgctctccgctcctttcactattctgtaagtgctgcttcacatgcttgctgcacgcttgaaaggcccagtacattgcatatgtcttctaggcgctggccaacttcctgagaatcatgtcttccaggcttgacctttggagggaagaacaatccttctacaagacgaactgtagttttagcatcctctgcaaagacgcctgaagctaccggnacagccaagtcaaatgttccaccagagagcaccaagaaaggctcattggagaagaaaccttcacggaaagccacttttccaaatggatttga

SEQ ID NO: 194164 - DNA, 899 bp, Gossypium hirsutum
aagagaagtgatagctgaactaaaagagtcaactctactcgatgaaaaaaacagtcaaacatagtgtcgtgaaaactatttccagtaactgctttgctttcaaaaggagtattaatgtgtaaaggcaaaagtcaatatctaccaaatccaggaggggcgtttatgcattgggatcaaaagaaccaacctatatattctgcagcagcaatcaagagaagctattctttgtctacatccaagggcttttatcattgccccaaatgtacacaagcaaaaatgaacacatcctcggacagtttttgccatctttatcacttatcttacattctgccttgtcttaatcatccgtttcagagttgcaagccaaaagttgcattcgtcccactcattggtagtcagaagaacctggatatgtagagctgtcccaaaatcattattgtccaacgcctggcagagctgaataagcttatcagaagcattttttgaaatgtctccactgttgagtttggcaaataaggcacctattttctgtgaattgtcttctatttcacgcttcttggctgggttcgcacgtggtcctcccagtgcttgagaggtctcattgaaaagtctagttaaagttgtgattacaggtttctggtgggcaggtacatttgaagtgtcagcagtctgcacagttggtgggggtgcagcaggtgctgcagctagttgtattgatgctgactgcgtaaggctagtagattgcacaggactcatgccaggtctttgaacaacaggtgtgtcggtcactggcataaatcctttaggtgttggggtaggagctacaaattggggcactttggggccaggaactgatcccatttgcaatgggacaggtgcaggagaaccagttccttggg

SEQ ID NO: 194165 - DNA, 372 bp, Gossypium hirsutum
tcgagctctgaagagggtgaaaatgacgtcttctttgattctttggattgcttgtcgatcgaagagcctgttttagcgaatcaaggattagagtgtgggaaattagagtatgaaatttggatgaatgaacctggaaatgttaaggagcggcgtgaaagatttcttctcggaatggatctagttgagtttgcatattcatcaaggataaaggatttgcagaggatcacagagtgcagtgatgctgtcttgagttcttcgtgttcgtctgctggcaatggtgaaggaagtattgctgattgtgataggaaactgatgtgtgaagccaatttgttgctcgatgaatcaacagcatcagctctcgagagcgagaat

SEQ ID NO: 194166 - DNA, 430 bp, Gossypium hirsutum
ggcaatagctgtcgcttagaccctttggttgggtttaaaccccaagattattagctgtcatcgggataagggtatctttgcttctagtacttgttgcaggagagcatgctttcctcctagaataagatatacgattctaaagtttcatggaaggaaaagacatgaatatcttcgtccagcacttgctatatcatcagatgtggaagatgtcggagtttctttccagcttgaagacttcactgttaccccttctagtactgaatagagccgaaagctaaagataagagtcgaggtatcatgagccaaaactcgagcaatttttaatgaagcatttgacaagatgcgtgctgatgcccatccaatccctggctttagaagagtataaggaggaaaaacaccaaatatacctagagagattttggtagaagtc

SEQ ID NO: 194167 - DNA, 458 bp, Gossypium hirsutum
tcgtccacgcgtccgccaagtttctccttcttgagttccctttgatcttcaatggctactacttctccaatggcaagtcggctgaagagcagttttacatcatctcttacaagaaaactagttggcccaaagggaatttccggagccccatttatattctcacccggcaagacccgaactccctgtttcactgtcaaagctgttcaatcagacaagccaacatttcaagtaattcaacccattaatggtgacccattcattggaagtctagagacaccaatcacatcaagtcctttaattgcttgggacttatccaaccttccagcttatagaacagcagggaacccacttctaagaggcatagaagttggtttagcccatgggttcctcttagtaggtccatttgtcaaagctggtcctttaaggaacacagctgttgcaggtcaagctggttcatt

SEQ ID NO: 194168 - DNA, 435 bp, Gossypium hirsutum
atcaaaacaaactaccctctctttttttttatgtcctttctccatctttaagctaattggctgcttaagcttcagtagttaagtttttttagcataaaatgggggaaagaagcattaaatccaccattttttttgttgaattagcagtcacctgctcaaacagtgatattggtgaagggaaactcctgccatggctactagctgcaacaactccatagattcatcactgtccagccaaagattagtggggaaagtggcattggtcactggtggagcaaccggcattggtgagagcattgtgcgtctatttcacaagcatggtgccaaagtctgcattgttgatgtgcaagacaaccttggcctccaagtttgtcaatccctcagcaacggccctaacgtatgttttttccattgcgacgtgacaatagaagaaca

SEQ ID NO: 194169 - DNA, 518 bp, Gossypium hirsutum
gaagactctgagactcaaacaatgggaaagggttgggcagtgaaggtgatgatgatgagtttggtggtggtggttggtgcgggtgatgagagtgggttagccaaagagtgcagcatagatgtacagagcgcgatgacttgcttgagctttgcgcaagggaagatggagaaaccttcaaaggagtgttgcagttcggtttcgagtataaaagaagaagaaccaaagtgtttgtgttatattcttcagcagacccaggcatccggggctcagaatcttaagagcttaggcgttcagcaagataagcttcttcaacttccttctgcttgccagttgaagaacgctagcgtcactgactgcccaaagcttcttggattagcaccaaactcaccagacgcggctatatttacaaattcttcctcaacaccgacgacgccatccaccgggacaccgtcaagtgcttcagagaatgctgataataactccagtggaacaaagctagaaactgctcacttggttgg

SEQ ID NO: 194170 - DNA, 607 bp, Gossypium hirsutum
aaaccggggcggccccacgcgtccgaggctctttaatttacacccaaaaaatatattatttttcattttttttaaaaaacccgggggggctttaccaatcacaggtcataaccaacgaaaggaaacccccattctcccattatctgtaagagaagagaagctttggaataggtcttcaatggctgcttctacttcggtttcagtagctgggtttaagggaagtttagggaagagttccttcaatggaggtgaagattatgccatgttggcggctaaatcgactcccaacgtcgttcgaatcggaaagccagttcgagctcagccgatgatgaagaacgttaatgaagggaaaggggtgtttgcgccgcttgtggtggttactcgccaaatcgtcggcaaaaagaggttcaatcagcttagaggaaaagctattgccttacattctcaggtaattaacgaattttgcaaagcacttggggcagatggtaaacaaaggcaaggattgattcgtttggcaaagaagaatggtgagaagcttggattccttgcctgatttatggccttacacgtggactttcgttttgtctttatttacaaaatgtttcat

SEQ ID NO: 194171 - DNA, 508 bp, Gossypium hirsutum
caaagttggactgggaggcaatgggtaagatcctcgctcgcgggcatagccgagtccgtgggtactcagggaatcccaaaaatattattggacttctgctggtgaaaagccttgtcactgtacgccctgaaactgagacacctgtcagggctgcttccatccgaagggttccaaggggtccagctgatatgcctctctatgatattctgaatgagtttcaaaagggcagcagtcatatggcagctgttgtgaaggctaaaggaaaaaataagaaccttcctccgactgttgacggactgaagtctgaagaaaacaaagtctccagtgcagatacccagctgactactcctctgctatccaagctggatgagaagccagagagcattgtacttgacgttgataagttgtcaagacctaccaatacaagcaggctagatgctgtgacaaatggattgtctgtcacatcagaggacattgaagatggtgaagtgattgggattatcaccct

SEQ ID NO: 194172 - DNA, 581 bp, Gossypium hirsutum
cagaaacagcatgggccggcgctgcttataacctcattctctacatgctggctagccatgttttaggagcttgctggtatcttctcgcaatagagcgacaagaagcatgctggaggactgcctgtgatgtcgaggatccatggtgtcagtataaattttttgattgccacagggttaaagaccctggcagggatacctggttcaagtccagcaatattactaacctatgcagtccaagttccagcttctatgtgttcggtatatatggtgatgccttgacatttgatgtttctacttcaccattcttcaacaagtacttttattgcctcgggtggggtttaaggaacttgagttcactgggacaaaatcttgtcactagcacttatgtgggtgaaataatttttgtcatcattattgcaacccttggtctggttctcttttcgctgctcattggtaatatgcaaacataccttcaatctactactgtcatgttggaagaatgtagaattaggagaactgatacttatcaatggatgcgtcacaggcaactttcttctgagctaaatctatctgtatgaaaa

SEQ ID NO: 194173 - DNA, 893 bp, Gossypium hirsutum
agcatctctcccaattccatggcaaccctatcctcttctccatctccctccattctctcttcctccaccgccaatcctaaaaccccttatctgaaaccgccgctcctcttcttccccaagcctctaaccaccgctctaaccaccgctttagccaccaccaccttactcctaacctcccctccctcctccattgcctctgattcatacaacgtctactacggaaccgccgccagtgccgccaactacggaggctacggtggaaactccgacaagaaagcctccgccgagtacgtctatgatgtccccgacggatggaaagagcgtttagtttccaaagttgaaaagggcaccaacgggacggacagcgaattctacaaccccaagaaaagacaagagaaagagtacttaacattcttggctgggttcaggcaattagcccccaaagacgtgattttgaacaacttggcattatcagacgtggagttgcaggatttgattgccggggccgacagcttggtctccgaggagaaaaaagacgacaatggaccgctttattatgtgtaccagattgatggaattggtaagcatattttgattgcaatcacttgcgccaagaacaagcctttatgctcatttttgttcattgcaccgggcgcctgagttggaaacgcgaatgaagacacctttaaggcacatttcattaatcccttcaaaaactgtgggatcatccgtaatccactcgtctttaattctttttgagcccttcctttctcttcccctccttctctgtttcttttaaagtaatgtttgaagcaatgctattttttttattagcaaagctattttaatctttttataaaaaaaaaaaaaaaaattcttcggcgccccgcggt

SEQ ID NO: 194174 - DNA, 422 bp, Gossypium hirsutum
ccaggaaccagttaccgccactcaaacagaaaactcagtttgtgctatggccgtgagactattgtcaactccaactgctctgtcgcacccaacaaagctctccgtcggctcatcacccaaacccatatcaacagcaacctccttctttcaatggacatccacgtgcagagtttttacagggaaaatggtggtaaaggcatgtcttaaggtggaagaatagaatgcgaaagatactagtaaacaagaatggggcatggtgtctgctgtactttttgacatgcatggcgcgttgtgcaactgtgagaaccctcctagaaaggctgctgttgatgtttttgcagagatgggtgtccaagtcactgcggaggactttgctcctttcactggaatgggtgaagcaaactttttaggaggcgttgctt

SEQ ID NO: 194175 - DNA, 1040 bp, Gossypium hirsutum
tcgcggacccctgggcgaggggatgtgaactctctccttcttttgcttggattattgtgccattcgctgccattgctgtgccgtatgagtggagcatccgctgctctcacagccgacccaacgctgcagttgtcaagagcaagcagcattgtcatgttgattgcatacgtgtcatacatagtcttccaactattcactcacaggcagttgtttgaagctccagaggaagcagaaggcgacgacgatggaatatcagaagaagagccagtaattggattttggagtgggtttatatggctagttggaatgactgttgtcatttctctcctctctgaatatgttgtagaaactattgaggatgcctcggatacttggggaatttctgtaagtttcatcagcattattctgctacccattgttggaaatgcagcagaacatgcaggagctatcatttttgcttttaaaaataagctggatatttctttaggtgttgcattagggtctgcaactcagatttccatgtttgtggtcccactctgcgtccttgtctcttggattatgggcattaacatggatcttaatttcaatctccttgaaactggctctctcgctctatccattattgctgttgccttcactttacaggatggcacttctcactacatgaaaggcctggttcttctactgctctacattgttattggagcttgctttttcgtatctaaaacacctctaaaccaagtaaacatcacaaactcgggagctgaacttgccacaatcctcagagcttgataagctttgccgtcccgggggatgtcgttactccacccccccccccttttgatgatgaaatgtttgaaacttgaacagagatttcatgcattggttattctttcatatctggggcctggcggaaagctgacaatttgcagttactaggccgcatacaagttgtcatgccttcaaagttgagatggatactatctataagtataccgttgaagcttgatgaagacaggctatacaatacacagcacatt

SEQ ID NO: 194176 - DNA, 479 bp, Gossypium hirsutum
cccactcgtccgaggtaacacacctggctgttcatcatcagcttgtgtctatggcattcaatggggagactcatctttctcagttggaatctttgctaaagaaaagctcaccttgacatcaactgatgtgttcgatgactttctatttggttgtggccaaaataaccaaggtcttttcggaggggcagccggattgataggacttggccgagataaattatctctaccttcacaaaccgcctctaaatacaggaaatacttctcctactgcttgccatcatccgccagctcaaccggtttcctcagttttggctacggtggcgtatcgaaattcgtaaatttcacaacgttgaccactctctcccaaggtgcatccttttacggaattgacattgttggaataagcgttggtggcaaaaaaactaccgatatcagcctctgttttcactgctggtggcgccatcattgactctggaact

SEQ ID NO: 194177 - DNA, 638 bp, Gossypium hirsutum
attgctctcaattggtgttactgctactgaaagaatttgcccttgagttccaaaggaataggatcaatggccatgaatgtcagcagtgcctgtttctcagttttgagttgcaagaaacccaaccgaataagagcggatgcttccgaggattttgccactaccgctgctctcaaaacagatacagaagacaaattgaggttaggaggatcggagctcaaagtgacaaggctcggaatcggagcttggtcttggggtgacaccagttactggaacaactttcaatgggatgatcaaaaattgaaggctgctaaggctgctttcaatggaagtcttgattgcggaattacgttcttcgatacagctgaactttatggctctccgctcgccttacgtgctgaaaattctgaaactctactgggaagatttataaaggaaagagaaaatgataatcccggtgaagaggttgttgttgcaacgaagtttgcagctttgccttggaggtttggtcgtcaaagtgtcatcagtgcactcaaggattcccttaatcggcttggcctttcatcggtagacctttatcaactccattggcctggtatatggggaaatgaagggtatattgatggtcttggcgatgctgt

SEQ ID NO: 194178 - DNA, 516 bp, Gossypium hirsutum
  unsure (1)..(516): unsure at all n locations
ataagccctccctccttttccaacctctccttcttctttgaaatttagctgaaatggctactgcaacaatgagcttcaatttggtgggagcatttaggggtctttctctagcatcaagctcgacgtcgtcctttatgaaaggagaagtgggttccattcacaaaacggcagtcgtttcgttcccgaggaagtctccgttccctttgacgatcgaatcggcgcacaaaaaaggagccggtagtactaaaaacggtcgcgattcaaagggtcaacgactcggcgtcaaaatctacggcgaccaggtcgccaagcccggcgctattatcgttaggcaacatggaaccaagtttcatccagggaaaaatgtggggcttggcaaggatcacacaatcttttcattgattgatggacttgtgaaattcgagatgttcggagccgacaagaagaagattagtgtttacccacgagtacttcagcctgagaatcccaacagctatagagcanggcagagagagt

SEQ ID NO: 194179 - DNA, 296 bp, Gossypium hirsutum
gtgctaagttctgttatggtatcacaatcactctcatcgcctataacatcgtatctgcacgagctgcggctgaatacttgcgggtgaccgaagatgtggcgaaggggactttagtttacaagctccaagtcatcttcaattcctgcatcttacatggctggagggactctattgtgactcttcacaccaccaaagcctttcctttatgggctgaagaccttacgattacgagcagatctatcgaaaccattgctttgaacgcgtgcacacactcttgcaaggtgaacttgtcacat

SEQ ID NO: 194180 - DNA, 490 bp, Gossypium hirsutum
acgcccacgcgtccgcccactcgtccgcccacgcgtcctcccacgcgtccgcgggatgctaagtgcctgatggatgaattgaagagacaagtggaatcccaggagcttgatttccctgaatcagatttggttcagtttatcacctttctgttgctaacgttggagagagatgccttgcccctttttaacatgttgagagatgaattacaagtctagcatagacagagaaccggcattcaatgagttgctagatgaaattgcagaaaagttctatggtgtacagcgtagaaatccgcttcaagggatgtttggcgacttattcaagatgatgtgatgaggaaaaacatggcagcaacctgaatttgttggaatttgtcagtgtcttggcggacctgaactgctgattttcattatgtcttcggcttgatggcaaattcctttttatgccaaaattgtttaatatacttttgtaatatgctttcccatttga

SEQ ID NO: 194181 - DNA, 457 bp, Gossypium hirsutum
acgaaagccaatttaaggtcactcaacaagtgcgcatcgccttttctatcggtaaatatcaagacgaagtcgtgtgcgacgtagtacctattcaagcctgccatttgttgctaggagaaccatggcaactggatcgaaaagtcactcacgatggtcgtaccaataggtattccttcaagcatcaaggaaagaaacttaccttagtgccgctcactccggaacaagtccatgagggccaaatcaaactgagaaattctgttaaaacaagtgaggaaaaagaaaaagagaatgaaaaagagcaaaaagagattgagagtgaaaaggaatgtgaaacagaaaagaaatttgaaaaagaagttgaagaaagaagagaaaatgagttagaaaaagaaacaaaagaaaaagacgaggaaaggctagtgaggaatgtttccactaaccaagatatgaatttttc

SEQ ID NO: 194182 - DNA, 471 bp, Gossypium hirsutum
cctgtttcaaatttcagttactaactcaaagcaaagcaaaaggcaaaaaagccatgtcaaagctggtggtgttgcagccaacaaagcagcctcccatctccctcctctcttcctctctttcccacttcaatggcaccaagctctgccaaatccagtacaaaagaaaggtatatcagccaaaaggtgcattgcatgttgcagcatccagcaccaagaagattctcataatgggtggcactaggttcattggtgtgtttttatcaagactccttgtaaaagagggtcatcaggttactttgtttactagaggtaaagcaccagttactcaacaattgcctggtgaatcagacagtgactacgctgagtttaaatccaagattttgcatttgaaaggagatagaatggacttcgattttgtgaaatccagtctttctgcagaaggctacgatgttgtgtacgacataaatggac

SEQ ID NO: 194183 - DNA, 688 bp, Gossypium hirsutum
gcaattgttatgtcgcgtggtgctccattttctgaccaggttgtagaattagattttctatatcctagtgaaggtattcatcggaggtgggatagtggctatcgcatcacttcaaccgctgcaacttgggatcaagctgcttttgtccttagtgttccaagaagaaaacctgcagatgaaactcaagaaacccttcgaacgtctgcttttccaagcacacatgtaaaggagaaatgggcaaagaatctctatattgcatcagtttgctatggtcgaactgtttcatgaactgcctaagttttgttcgggttcagatgcaactcattttgttcgatcctgcacgttgtacaatgagggacgactttactgcttcaatttaaggaactaagctctttagtcagattgattgatcacagcattagagaggtgatgtatgcaaaattctactttattgtcaccatgatgtagcatctattctaatgcctgtgcactgtcattcaatctagtcaaaatctttatgggctaaatttatatctttttttccactagatgtgaatgttcttacctgtatagttttgaaatcataatttctaggttgaaggcaagtgcacaggttaagtttaattgttgatggtgttcgaggaacattcaatgatgattttatgctaaactctaaatgctttgaggc

SEQ ID NO: 194184 - DNA, 1319 bp, Gossypium hirsutum
  unsure (1)..(1319): unsure at all n locations
ctttcttttcgatcgaaaagaaaaaaacacccagagtctcagatcaccctgttctttaaatcaagatgcagtcaaccaacggttctgatctgagctcaaagcaccaaaaacagcagcccccaccgccgccgcagccacagcagcctcaatggatgccgaaccaatggatgggagctatgcaatacccggcggctgctatggcaatgatgcaacaacaacagatgatgatgatgtatcctcctcatcattacatggcttataataaccctcattttcattatcaacaacagtatcaacaacaacagttgcataaacaacaacaaggatctaattcagatgaggttaaaacgatctgggttggtgaccttcttcattggatggatgaaacttatcttcatagtttcttctctcaatctggcgaggtttcgtctataaaaatcatacgaaataagcaaaccggacagtctgaagggtacggattcgtggagtttagctctcgagcaacggctgaaaaggttttacagagctgtaatggttctctgatgccaaatacagagcagcctttccatctgaactgggcctcgttcggtgtgaacgaaagacgatctgatgctggctctgatctgtctatattcgtaggagatttggctgccgatgtaactgatacggtgttgcatgaaaccttttctagtaaatttcaatcggtcaaaggagcaaaagttgttatcgattcgaataccggtcgttcgaaaggttatggtttcgttcgattcggtgatgaaaatgaaaggtcgagggccatgactgaaatgaatggagtgtattgctcgagtagaccaatgaggattagtgttgccactcccaagaaagcatttggatatcagcaacagtattactcacaaggtagacaagcatcgaatggtgctgtggaacaaggtcttcattctcataatgactcgaacaatgctactatttttgttggaggacttgactcggatgttagtgatgatgatcttagacaacccttttcccagtttggtgagatcatctctgtgaaaataccgcctggaaaaggatgtgggtttgtgctatttgcaaacaggaaggacgctgaggaagcaatccagagcttgaacggaacaaccataggcaagcagaccgtccgactttcttggggtcgaagtattggaaacaaacagcggagagctgattctggaaaccagtggaatggaggttattatcnacggcaaggctatggtggttatggttacggttacggtgcaactccaccaattccgggtcctancatgtacgctgcg

SEQ ID NO: 194185 - DNA, 685 bp, Gossypium hirsutum
ccaccgcccccgtgtcagcgctggtttgcttttatccccttcaccaatatcctacggtcttgcgtcgaccctttccttcctccgcggaatcgcctccaaaacatcatactccgccgtttctcaacagcaacagcagcagcagcaacaaaagctgatgaaagagcttttgctgaaggagctgaaagaaaccgaaaccctggcgcaaaagatagggaaagccattaggcaccctggctttccttctaagtctagggtttacgccgatgtcaatgttattcgtcctaaagagtactgggactacgagccccttactgtccaatggggcgaacaagatgattacgaggtggtgaggaaagtcggacgagggaaatacagtgaggttttcgagggggttcatattactgataacgagaaatgtgttatcaagattctcaaaccggtcaagaagaagaagattaagagggagattaaaatactgcagaatctttgtggagggccgaatattgtgaagttgctggatatagttagggatcagcagtcgaagactccaagtcttatatttgaatacgtgaataatacggattttaaagtgctttatccgacgctctctgattatgatattcgatattatatctatgaacttcttaaggcactggactattgccacttacaaggtattatgcac

SEQ ID NO: 194186 - DNA, 598 bp, Gossypium hirsutum
attattgtgaaatcaatggaagcattggtgtttaaagcagagttggtattgccaacgcgtgtgagtttcaagaggattcaaatgtatgagaaatacccaaagggccaatcgaaagtgagatggaaacagctcaagcaaatccttcaagctgaaaattgccagaattactctcctgatgaacccaattatgttaatatcgaatcaccgccttcgatgcaaccgtgcaaaagaatttgtgatataacgggatttgaggcaccgtaccacgatccgaggacgaatctccgctatgcaaatgccgatgttttcaagcttgtgagatctcttcccaatgagtatgtgcaaaggtatctagctctaaggaaagcggcagtggttttgaggtgaagtttgcaaacctggggacagactctggtcttggatcgaacatttagtttacaattagatcagtctttacttatatgaatcatcatagagattctcatgatgtttaatctacaattagatcacgtcttttgttccgttttcatccctagaaacctctgcaaagctgaaattcgttggatagctttagggttagttgtagcataagctaaac

SEQ ID NO: 194187 - DNA, 369 bp, Gossypium hirsutum
ccctcgcgtccgccattttcctctgccaacccaaactaaacctctctaattccctttccttttcgacgaggagagaaatccttcacgttcaaggaggccaatgtgggaaccaaattggatccaagttttgggaagtgatctgcggggaacacggcgttgatcctactggaaggtacaatgctgatggtgaatcatccgataaccacctggagcggatcaatgtgtattataacgagtcttccggtggaaggtacgttcctcgtgcgggtctcatggatcttgaacccgggactatggatagcttcagatctgggccctacggccagatctttaggccctgataatttcgtctttggacaatctggcgct

SEQ ID NO: 194188 - DNA, 912 bp, Gossypium hirsutum
gcgcatttgcccaatctccaaacccccaaaaatccatcgccaccaggaggaaaaaagcaaaagaaccctaccgacgatgttccggcaagcgtcacgcctcttggctcgaactaccaccccatggaggagaagtcgagcattttcgtcagatctaccagccacacccgctcaagattcgaacttcatcgaatcatggtccaaagtcatacccaacatagaccctcccaagacaccatcttctttcatgacccctcgccccgccaccccttctgctatcccttctaaactcaccgttaactttgttcttccttatgcatctgagctctccgctaaagaggttgacatggtaatagttccagcaacaactggacagatgggtattttgcctggacatgtccctacaattgctgaactgaaacctgggatcttgtcggtgcatgaaggaaatgatgtcacaaaatatttccttagcagtggttttgctcttatccatgccaactctgttgcggatattattgctgtggaagcagtgccagtcgaccgccttgacccagccttggtccagaagggtctggctgactttactcaaaagcttgtctcggctacaactgatctggagaaagctgaagcccaaataggtgttgacgttcacagtgctatgaattcagctatcacaggttaatcattttcttaaccagctttggttcaatcctaagactttttttctcatattgcttcccttttttgtatgtgttcatgatcaacaaatgactgagatatctcaagatgcctaaattgttggttttcagagtttggaataaaattttctgaaacaagaagcttgtacttgctatatctttgctgtttattgttttatccatttcaagtttatttgaaaagtcgacgcggccg

SEQ ID NO: 194189 - DNA, 580 bp, Gossypium hirsutum
gcattattcattgctactttcgcttcattaagcctttactttagattttgaaaaacaaaataatctctagggttcttccttagtttccacttccacatatctatccttaaattgaagaaaatggccgcatcatcacctgccatgcaaatgcaatccctccttttagcacgtcccatgactggccttgctagtaagagacaaatggttcagttttatatcgtgaaacgcatgcctcgttttcaaaggaaactcaatcttcaagttcgctgtttggcagaggacggtgatcaaaaggagccaatgccagcagcaagaacgccggaacctaagcagagccctccacggatatcacccaaagtgagcacgaaattctccgatgtgtttgcctttagtgggcctgcaccggagaggatcaacggcaggttggcgatggttgggtttgtggcagcgctggcaattggaggtatccaatgggcaagatgtgttgacccaaatatccaacggggggatcccggtgttcgttgggactaggattggggtattcgcttgcatctttgataccgatgtttttaggtgagac

SEQ ID NO: 194190 - DNA, 360 bp, Gossypium hirsutum
  unsure (1)..(360): unsure at all n locations
ggaaanaccggcgcgacccacgcgttcgcccactcgttcgcccacgcgttcgaggtcgctttttgtctgccacaatttcggttgaaaagggacaattaaatgggaatcgtcgaggaagctcgcaacttgaagggacggggttcaggcgatcgagtcatcgttttggctcatgggttcggtacggaccaatcggtttggaagcacttggtccctcacttagtcgactatttccgtgtcgtatagtacgacaacatgggtgccggaaccaccaaccccgaatactttgatattaattgttatgcttactctcggaaggatatgcttatgattttgcttgcgtaccttgaatgaaaatccact

SEQ ID NO: 194191 - DNA, 558 bp, Gossypium hirsutum
ccgaggctacgacctcacgcgtacagtttgattatttagcagcaaaaagcctctttctcccaaaacatctttaactgttccttcacctactttcagtttgcttgtgcttcagcttttcgcatctctttccttttctttctctgtctgtaactctcaccatttccactcctaaacttccaattgtggccaccccgaccaactacgccaccactaaaacatggtctctcccaccgccaccaccaccctatgatcaccaccccaccaacatgttaggcctccataacatcttccttatagctccaccaccacaggaaaaccaacaacaacaagccccaccaccgccgccgccaccaccacaaccctttaaccaaaactacaacttgactgacacaaatctttggacttcaaagagaagcaccgcccaagaatcaataccagttttccaaaagaaagatggaaccttgaataatgttgaagaagaagatgatgatgaaagtggtgctgctggtggttgcttcaaggtgtgtagaggatgtgggaaataggcaaagaaggagt

SEQ ID NO: 194192 - DNA, 650 bp, Gossypium hirsutum
  unsure (1)..(650): unsure at all n locations
cccacgcgtccgaaaaaaccactgtaattgctcacctcatgcgatgcctaaatagaaacaacgaagaacacgaaggagtaggtttcgttgttgatggatttgactgaaggtgtcggagagagctcatcgccgccgagaagctttggcagcttcaacagctacgatgtcagaaacgacgttttcaatcgcttagtcgaatctggccacgaacaagctatttctaatcctgactttcgcgactttttagattctcacttcaatcgcttgcctgctagctatggacttggatgttaatatggtgagagggagaagaatgttttgttacatcacaagctgcttgcattgcccaaggtatccggagaggcggccagtttatcatatccgcttcttggagaacctttgcaccaaagcagatgctattgatgataaacaatatataaattctttatctccccagtctttggatatggaaatgtagaaagggttgttccatcacttaaaagaacgggggatcatccagttgactttgaaccttgctctaacttgaggacctaaattgagtgtcagaaagaatcagtggtgaagagaagtactctgactggaacntaccaaaagcaagaatgtcatttncacttatgaggattttctac

SEQ ID NO: 194193 - DNA, 376 bp, Gossypium hirsutum
tttttgattttgatgtattgctgtccttttctcttaaccacctctccgatctccttcgcttcacagctctctcatctcccccatttctttccatgcaagcgttctgtcatttctcactcattgaatgctatatttctctctaactttgccttcgtccgccagctaagtaagatcttctttcttcttctgaaaacaagattgttgaattcttttcttttgggaatccgggtcttgtctttcttgagatttgggaaacccttttgtttcattggccactgatgcgaaatgggttgttatgtacatcatagctttcagcttgaatttttgaaaaagctgtaatttgagtgttaaatatgcatagatgtgttggctttct

SEQ ID NO: 194194 - DNA, 481 bp, Gossypium hirsutum
gtccgcccagacttcactcccctctcacagcaacactcatagcacactatccacacttgctttctttgctttgccttccagtacagccccattttaaagccttggaaagcagacagacagcattaaggaatctcgaatctcaactgggtatggcaattactgcaacggctatgactatgactgtcactacgggattacagtttgctggttctctcaatcataaacagacttcttttttaggagttcccttgaggctgtcaatgtcaaaccctcagccatctttaccctctgtcttcctcaatgttcaagccaaagctcgcacccgaacagaagatcgtgaggcccgccattctcgcattaggaagaagattgaagggacaccagatagaccaagactgtgtgtcttccgttccaacaagcatctctatgtccaagtcattgatgactcaaagatgcacacactagcttttgctttaacaat

SEQ ID NO: 194195 - DNA, 396 bp, Gossypium hirsutum
aaagagacaggagtcgttgttgatttcactcatccttcagcagtttatgacaacgtaaaacaggcaacagcgttcggtctgagaagtgtggttcatgtgcctcggattacgggtgacacaatatcagcattatctgcattttgcgagaaagccagcatgggttgcctagttgcaccaactctgtccataggatctattctcctccagcaagctgccatttcagcttccttccactacaacaatgtagaaattgttgaatcaagggcgcatgcaacacatcttccctcaccagatgccatccagattgccaacaacctctccaaccttggccagatctacaacagagaagacctttcaacagatgtttcggcaaggggtcaagtcctaggtgaagat

SEQ ID NO: 194196 - DNA, 723 bp, Gossypium hirsutum
  unsure (1)..(723): unsure at all n locations
tgcacgtacncgtcccggatttcccggccaaaagataaaaaagtttatgtcattggtgaggatggcatcttaaaggagcttgagcttgcgggattccaataccttggtgggccggaggacggtggaaagaagatagaactgaagccagggtttttaatggagcatgataaagatgttggggctgttgttgttggatttgatcgatacttcagctactacaaagtccagtatgggacactttgtatccgtgaaaatcctggttgtcttttcattgcgacaaatcgtgatgctgtcactcatctcacagatgctcaggaatgggcaggtggcggttctatggttggtgccatctgtggatctactcaacgtgagccacttgttgtgggaaagccctcaacttttatgatggactacctcgcaaacaaatttggcatcctcaagtcacagatatgcatggttggggacagattagatactgacattctgtttgggcaaaacggtggctgcaaaactcttcttgttctctcaggcgtgacaagtttgtcaatgcttcaaagccccagcaattccattcaacctgatttctacaccaataacatctcagattttctttctatcaaggctgcaacactgtgatgatgcaaggactttgttttctcttgcattactagtttgccaactactaccatcagatatagaagccctttgcaaattctattcttt

SEQ ID NO: 194197 - DNA, 502 bp, Gossypium hirsutum
cggacgcgtgggtttgctttggggtctgacttttgattttagtgaatggatttctggcatggggagcatgtaaataatggggtttttctgtgatctaacacttccaattcgaacttagttttttttcttcttcttctgataacactagcagttgaaacttgaaactcaaccttaaaaaactgtcttgttcccttggtttcttgttttctctctggtgaagttcaaaataataatgggaatgaggagaagagaaatgggtttttatttcctggctttcttatggttttgggttcctataaacggattgctttctcctaaaggggtaaactatgaagtgcaagctttaatggctataaaggatgctttgcatgatcctcatggcgttcttgacaattgggatgccgatgctggtgatccatgtacgtgggcaatggttacttgttcacctgaaagcctagtcattggcctgggaagtccaagccagaatctatctggtacgtta

SEQ ID NO: 194198 - DNA, 447 bp, Gossypium hirsutum
tcggccacgcgtccggccacgcgtccgggatctgttgtttgagttgtcaatgtggcgttgcaggcgtgagcttcgggttcgtgcaggcgaacttcatacatcttcaaggagagatgcttaacactacatagagttctggaaaaaagttcctccaaatgaaccctaccgcgttattcttggtgatgttagggacaagctgtatcagacacgtgaaaggtctcgccaaatgttgtctcatggtatctctgacattccatgaggaggaaactttcaccaacattgagcagctttttggaaccgcttgaactatgttataggtcactttgctcttgtggggaccggccaactgctggtggaagtctttcttgttttcttgaggcaagtgtcaacttttggcctctcacttgtcagacttgacattcggcaagagtctgaccgccacaccga

SEQ ID NO: 194199 - DNA, 778 bp, Gossypium hirsutum
agtggacaaaatcgatggaacatctttttcttgaaattctagtagaagaggcctagagaggaaataagccttctaatactttaaaagcaatttctattaatcaagttgccgaagttatttctgaaagattccaagtccaatgcgatgcgaagcatgtggaaaatcatttgaggactgtaaaaaaccagtggcagattatatgcataattcggggtgaaagtggttttggatgggatgataacatgaaaatgatcacatgtgatagagcgacatatgatgcagcagtgatggcacacaagaagtatgaaccatttttgaataaaagcattgatcattatgatgaaatggctttggttgttggcaaagatatggcaacagggagttttgccagaacatttgctgacatagatttggatgatggtaaccaagattcagtgcctatagactgcgacaatgaagagactgaagaggtaagaacaaaagtatcttcatctggcacatccaaacgtaaaagaaaaaatgttcaagaaagtgtcgttgatgaacaaattaaatttgtgggtgaacaacttggcaaaattgctaatgctttggaacaatttactgcggataagacaccacatctttacgaagaagtgatgtcgatggaggaagaaggatttgatgatgactccctgtgttttgtgtttgattatctagtgagtcatgaatccgaggccaaagctttttttagttaaaagtaagaagtataaaaaaaatttggctttaaaaatttttt

SEQ ID NO: 194200 - DNA, 480 bp, Gossypium hirsutum
cccacgcgtccgcccacgcgtccgatcaagctctgtttcttcacgcctcaaacccgccaacttcaactcaacacctcgccaattgcaccccttaaaaccactcaacagaccgcgtcacctccctccaccgtcaccccaacgtccccttctcttctccaccaccaaaccaaccactatctccacctctttcacccacaaaaacctcaccgctcctcctatcttcccccaccgcacctcacttctcccttcatcatcccttcatgtccatcgaacccccgccaccggctacgccgcagctctattagacacagctcaatccaccggttcacttcacgaagtccgacgagacgtacgaaagctctcgagactactccaaaacagtcaaattcaagcttttttgaatgaccccgtttttgggtgatcaaaagaagggaaaagcatgaaggaattgctaaaaagggaagttaacaacatctttta

SEQ ID NO: 194201 - DNA, 540 bp, Gossypium hirsutum
gttttgcctgaaaaagccaaacaccttcgagaaaaaccgaaaatttctttaaacatagaaaagaaaaggcgtattttctcggataattaatgggaagagcgtttgtgtatgtaattcttggaggaggtgtagcagctggatatgcagctcttgaatttacgagaaaaggggtttctcctggtgaactttgcattatttctgaagaacctgttgccccatatgagaggcctgctttaagcaaaggctttttacttcccgaatctcctgcacgccttccatcattccacacatgcgttggtgctaatgaggaaaggttaactcctaaatggtacaaggaacatgggattgaattggtccctggaactcgagttaagtctgttgatgtcagacgtaagaagctattgacagcaacaggagagacgataagttacaagatccttctcattgccacaggagctcgggctttgaagcttgaaaaatttggagtggatggatcagaagctgaaaatgtatgttacttaagagatttagcagatgcgt

SEQ ID NO: 194202 - DNA, 645 bp, Gossypium hirsutum
  unsure (1)..(645): unsure at all n locations
cccacgcgtgcgctcacaccttaactcctcaactcccacacgtttacgagtgaatttggtagcagcatggctggttcaagtgccatgcttgtgcagctcactctgatgcttgctttactctcatgttcaatggctcaaagtccatcggcatcacccacaatgtcaccaagttcaagcaccaccccctctcccgttgccactccaccaccaaccaccatgacccctcccccagccatgactccaatgtcagcacccgcaccgtcaatccccatggctcctaccccttcaactactccaatggccccaaccccatcctctgtcccagaggcaccaaccccatcaatgaacagttcaccaccggcacctccacctgtgacgcctccatctatgacgcctaattcagaacctacagctacagctccacctccagccatgacccctggggagggcccaccaggttccgctgcttctacacgtgaatacaccatgtccttgttagcattgcttggaggagttgcactctttgtttaggacacttctttttttggtttcgtttactttgatgtagattaagctatttatttgngtattcttttttccttggtccattttctctctcttctcgtcgattcttggagctgatgc

SEQ ID NO: 194203 - DNA, 551 bp, Gossypium hirsutum
gtttctcattatagatatcatcccttcttccttcattttcatttcatcccataggaatattctttttttttttttttcatgcactccaggtgtttaataaaagtccgatattgttttttgttctaagctgtggaggttgggtatttggttaaagtagttttgaaggggtttcgaattctgggtttaattcgttttggtggggggtagtacccaggtttagacaaattgtggacatcacggctatacacggagtttctcgggatcttattcatgtccgtactgtacgacgtaagggttgtgtgaacgaaagcaacccttcgccgcacggtgggcgtggagctttgccttctgaaggtggtagtccttccgatctcctcttccttgctggtggtggtattgccttttagagtttcagctgtatatatatagatatcttttaatcttccatagatatataaaaaaattccattggaggaagcttttttagatcgcttataagaagaaaagaaattgttgccaagatgatgcttaagattaagaaggttgcgact

SEQ ID NO: 194204 - DNA, 634 bp, Gossypium hirsutum
tcgactctcgaagagggacaacaacaggcagctcttcttccttttctgcgtctcatcatcaaaccccaaactcttaactagcctcttcctcctcctctttactttaatttcattttgctttcacaaatctaagaccagagctccaaaagattgaatttttaacccctcaaattaaaatccttcctttttcgcgttttcggttgaaaatttgtataaaaaagagggtgatttagaaacaatggatgctgattcatggagtgctcgtctttcttcagcttctaagagatatcaatcggctcttcaattacgatctgatatgcttatggggtttgaagaaattgatggagaagatgaaataagagaggagtttcgatgccctttttgttcagagtatttcgacatcgttggcttgtgttgtcacattgatgatgagcatccagtggaggctaaaaatggggtttgtccagtctgtgcaatgagggtgggcgttgatatggttgcgcatataaccctacaacatggacatatattcaagatgcagcgcaagcggagatcacgtagaggtggatctcattccacgctttctcttctgaggaaagagctgcgagacggaaacctgcagtccctcttcggc

SEQ ID NO: 194205 - DNA, 849 bp, Gossypium hirsutum
  unsure (1)..(849): unsure at all n locations
gaattttttttttttttttttttctagttcaaatctcgaatctccataattagctattcaaaagcaagcatctacctttgtccataaacaagcgaagtcacgaacatttttctgaggtttaatggtacaaacaaaaataaatagagatgaaatgcgtataaactactccttagaggatttgttgataagtgatttgtgaatgtgtggaatgacaccaccgcccgcgatggttcctttgatcaaggggaaccaaaggaatcagcttcttcttcttcttcctcacactcacagccaacaccaaagacctaactaccttcatactctgtaatttcttgggtttttatttattcagtgatttactttttaaaaaaaatctatgaccagagctctaaacaattcaaggtttaactccagaaattattgtttacactttgggtccaaaataattataataaaaaagagagggtgatttaaaaatggatgctgatacatggagtgttcgtctttcttcagcttctaagagatatcaatcatctcttgaatcacgatctaatatgttaatggggtttgaagaaatagatgaagaagatgatataagagaggaattcccatgccctttttgttcagagtatttcgatatcgttggcttgtgctgtcacattgatgatgagcatcctgtggaggctaaaaatggggtatgtccggtctgtgcattgagggtgggggttgatatggttgcgcatttancgctacaacatggaaatatattcaagatgcagcgcaagaggaaatcacgtaaaggtggatctcattcaacactctcccttctgaagaaagaattgagggaat

SEQ ID NO: 194206 - DNA, 449 bp, Gossypium hirsutum
cggacgcgtgggaaaaagcagctcactttctccttcatcaaaccccaaaaacctagctttgcctcctttttaatttcttggattttggtgaactttacgaatccaagatcagagtataaaggattcgagttttaaccccagaattaagtacttctgctctttttgatctttgggttgaaattgtctacacaaagagggtgatttagaaatggatgctgatccatggactctttgtctttcttcaactgctaggagatatcaatcagctcttcagtcacgatctgatatgtttatggggtttgaagaaatggatggagaagacgatataagagaggagtttccatgccctttttgttcagagtatttcgatatcgtgggcttgtgctgtcacattgatgatgaacatcctgtggaggcttacaatggggtttggcctgtctgcgcaatga

SEQ ID NO: 194207 - DNA, 413 bp, Gossypium hirsutum
ggaagagaagggtatggctagggacattcgtgacagctgaggctgctgcaagggcatatgaccaagctgctattttgatgaacggccaaaatgcaaagaccaatttccccaaggctgctcaccctggtgaacaaaatgctcgtggtggtggtggtggcggtgatgatgatgatgatgatgatcggtctccattgccccctaaggccttggccgagcttttgaatgctaagctgaggaagtgttgcaaagaccaatctccttctttgacttgcctcaggctcgataccgataatgctcatataggtgtgtggcaaaagcgtgcagggaatcgatcgagttccaattgggtcatgagggttgagcttgggaataagaaggttgataccccggcgtcccgagacagaaggacactg

SEQ ID NO: 194208 - DNA, 604 bp, Gossypium hirsutum
cctttctccagtttcctcattcatttccatttctcaacacaaattttcatcacccatcaagcttttcatcaatggcttcccttcaacaagcttcaatctctcttcaacccaagcttctttcatcttctcaacaccccagatcccttccctctctcaacctctctttttcagccactttcccttccctcaaactctgcaccactcgccctcttcatggcggtgccaaaatgtcagcctccgccgcttccagctacgccaccgctttagccgatgtagccaagtccaacaacacccttgatgccaccagctccgacgttgaaaaggtcgagacaatcttctccgacccacaagtcctccagttcttcaccaaccccaccattgatgtcctcaaaaaacgtcaggttttggatgagattgttagctcctccgagcttcagccgcacacggcgaattttttgaacatcctggttgatgccaagaggattgatcttatcaaagaaatcgtgaaagagttcgagttggtttacaatcagctgacggatacagagctggcgggggggagttcagtggtgaaattggagtctcaacatttggcacagattgt

SEQ ID NO: 194209 - DNA, 476 bp, Gossypium hirsutum
cccacgcgtccggtggggagcttgctccaacagtcatggcttggccatcaggttaaactcgagggcatagcggatatttgacattcgcaaggaagtttttcttgattctttgttatgacacattcctgagtattcactttacagattttcatcctatttttggcctggtttaaaattactgttgtgagtttaacattgtcgaagttcaggtcggaccaggcctacaggtatcatagtgtcttttgataattaaatgatacattaaacagcttctgacgtctctctaaatccttgatgagagatccttctttctcctgtaaattgtgtctcctctgtctccctttattctgattttttctttctttttcttttctttttagtattgtttttttattttctcttcctccctttctttactacacagattctatctgggtatctttccattttttttcctgatttccggaaacaatagg

SEQ ID NO: 194210 - DNA, 893 bp, Gossypium hirsutum
  unsure (1)..(893): unsure at all n locations
tcaaaaagacaattcaacaatttatttttttaatttttactgaaaaatcaaagggggcaatcatgagattcaagaaaggttccgccctcgcgggcgtaaccatgaaggaggttccaaccggcgcgtggcgctgtgccgagattatctccggcaacggccacacttactgcgtcaagtatggttggtttccgatcactggcgaggcggcgttggtcgagagagtcccgaggaaagcgattaggccttgccctcctcctataaatgggaccgacgattgggttcctggcgacgtcgtggaggtgttcgacgagttgtgttggaaaccagcggtgatcgttagagttttcggtggaaacaacatgttttctgtcaggattcttggatcgaagagccaactcatagcacatcaatctcgattgcgtgttcgacaatcttgggaagacggcaactggctccttgtcgggaagggctcgtcaaattccagtggaccaccgaagaggaaaagatcttggcttggttttccggaagctggtggaaagaagatgaaggtgattgaaaaagaatatctcatggcaatgttggaggcatcaatactttgcttctaaagccatgatggattgaatatgtcatctctcgctgttgatcaggggacaacatccatggtttattcctaaaggaacccttaagccctgcttttggtacgaattatttctaaaaatatttgaaaattttgatttatctatggaaatgctggtataggtcattgtattccttgctgcagaaaaacaagataatcttaaaagctgccctacagttagcatgtaaattgataggttgcaagtgcacttatggaaagacatatctgttattccccctcnccttcttcttatccc

SEQ ID NO: 194211 - DNA, 383 bp, Gossypium hirsutum
atttattttattcccttcacattcacactcattccatctatttcctcccagtgtttcacaacgtaattctatactttctgttttctttctgctaacccatcatatcttctttctaatttacggaaaaggaatgtttggaaatgaggctaggagagcagtagcatggatgaatgggtgcgaaggagaccccaaactccctgtaggcagcatagagacgcgcacattaactgtcgttccatctccatcaaaggcgatggagaggttgagtgtagccattagagagttgaaatgcagccctcctcctcttacctctggcattcttcgacttcaggtaccgatcgaggagcaaatcgaagcaatcgagtggcttcatgctcaacatg

SEQ ID NO: 194212 - DNA, 605 bp, Gossypium hirsutum
cgttgtcctctgtatttatttgtcagcttgttttaaggttctagacttggtagctatccggtaatcaagtctagcttcttatagttgttttttgtttccatggcggtaggcttatccgccgccgtaactcctaaacccttccgctcatttccgctgctgaagcctgctccaattttccatcctttactgcacctcccaaaaataacaacctacggagctcgaagaaagaaaagctttgctgtttgtttcgtggtggatgaagaacagaagcagagcgctcctacccagatcgtggaacaaggattcgaggaagttagagatcgtcagatcttaataccggcgcgtctgtcggagaaattagctagaaagagatccgaaaggtttacttacctcgttgccgctgtcatgtctagctttggaattacatccatgtctgttatggccgtttattacaggttttggtggcaaatggagggaggagaggtgcctctttctgaaatgttcggcacatttactttaacattcggtgccgctgtgggcatggagttttgggctaaatgggctcacagagctctctggcacgcatcgttatggcatatgcacgt

SEQ ID NO: 194213 - DNA, 432 bp, Gossypium hirsutum
tcgcccactcgtccgaaatctttcattattcctaaatattccaaacttctctcgaagagagtacccaagcggataggcaaaccagtttctcgattccagcaactaaattttcccagaaagtgagcaacaattacaacaggcaagtagttagcagcctaaacgatctttgagggggaactggaaaaggtttttaagtacccagaaagggaggagggaagcaattatgccatcaggttctaagaagagaaaagctgctaagaaaaataaggaacaagcagccaaaaatgaaaattcatcaactaataacaatccacatggaaatgatgacagtaaaagccaagatgaaggggacacttatggtggtgatgttggctaccctgcatcccaggatgaccataatcaccaccatcggttcaatcaccgtgaagaaga

SEQ ID NO: 194214 - DNA, 497 bp, Gossypium hirsutum
cctgaaacctaaggaaaaatcataaaagaaaaaaatgcacccattgtcttcaattcgacagcttcgccattcttctacttcagtattgcttcaacgctttagcatcttcaattgggtgtttcgagcttcttccaaccgccctgcttttctcggaggttcaaagagtttcagtgctggtgcacattcttctgagaatgttggaactccggagaagaattttgatcaacagacaatgaaggataatgtctctgctacacgtgcttcaactttccagaaattttttggtcctttaggtgcacaatctactggtcaaacagatttcaggtcaggcgggaattacaggtctatggatgttttgagggaagcaatagatgcagatagaatggcaaactttaggggttctcaatttcggcaagaccatatcgagcaaaacaaacattttgcacacataaagatcatgcgcaacaatacctttgtcaccgtgacggattccgatg

SEQ ID NO: 194215 - DNA, 632 bp, Gossypium hirsutum
cccacgcgtccgctcctctatttcttaacaaacatcaactccagagatcgccaaacatgctaggaactgagcatgatttgaacttcaaagagaccgagctgtgtctcggcctgcctggtggaagtggtggaggaggaggagctgccgccgccggtggtggtggtggtggtaaaaatgaagtggaaagttccccaaagaccaccgggaaaagaggctactccgagactgttgatttgaagcttaatcttcagtctaaagaaggttgcatggatctgaatcagaacctagaaaatggttcaaaagaaaagaatcatctcactgcaaaaccaccagccaaggcacaagtattgggttggccaccagttcgatcttataggaagaacattatggctaaccagaagaacaacagtgacgaaattagtgacagagctagcagtggcagtggtgggtgcagcgtttgtgaaggtttgcatggatggtgcaccatatttgcgtaaagtagatttgaagatgtacaacagctaccaaaagttatccgatgccttggctaagatgttcagttccttcaccatggggagttatggatgtgaaggaatgatagacttcatgaatgagagcaagttgatggatct

SEQ ID NO: 194216 - DNA, 524 bp, Gossypium hirsutum
cagagttggtgtcatcttttcaatactactagatttcttctctcataatctcaaagccggaggaggtgttcgatcccacacctcttcgggaaaaaaaatcatcttcaaaaacgaaaaatattataaaattttcgttctaaaattccaaaaaaaagaaagaaaaaggaatcaatggcgtcgtccgatagcctgagcgacaagaacgcggttttcagaaagctgaaagcaaaatcagaaaacaagatgtgtttcgattgtaatgcgaaaaatccaacatgggcgtcggtcacgtatgggatctttctctgcatcgattgctcagccgttcaccggagcctcggtgtgcacatcagctttgttaggtctacaaatttagactcttggtctcctgaacaattgaaaatgatgatctatggtggaaacaaccgtgcacaagttttctttaagcaacatggttggactgatggaggcaaaattgaagccaaatatacttcaagagctgctgatttatataggcaaatgct

SEQ ID NO: 194217 - DNA, 500 bp, Gossypium hirsutum
cccattcttccgcccacgcgtccgcgtttccatcaggcgtttttcttagaaacaaacgctcttttcttattatcttgtatcacttcctcatttttgaataaaccccaacacagtctctttttagccttctctatcttttttttaatcaaatttcgatctccgtttctctcttttatttttcgaaatattcagttttcttatattcctcgtttcgtcggtttttttttttttttttttgaatgcggttgggagggaacagtgagaaatggcgggaggaagtagccgtagacaggagggttctttagtgatcaataatacgaacgttttcgcggctcttgaaactctcaggaggaagaagaaatctgataaggaccgaggttctttgaagaaatcttctttcaagtctcagcagcagccggaaaaagaagccgagccgcaggtcttttggtctccggcgccgcttacgggcaaatcgtgggccgatgttgatgatgaccatg

SEQ ID NO: 194218 - DNA, 449 bp, Gossypium hirsutum
  unsure (1)..(449): unsure at all n locations
atttttcatcagcaaagctgggggatggagagtatgtgaagggcatggccgtggctgtactagctactcaagctttgctctgccaaacccattgccgggctcttccaagaccaacacccttcacttccaaccctcctccacagcccagccgctacccctgcaaacatcacggcgaaacatggcccacaacctccttttctatcctccattccacgcccattgtttgccgcgcgtcccgccgcaagtccaccgccttgagctccatctcggaagaaagcgatcaggatggtcctcttcggcgagtccttcacctgagtctgtgggccgctgaggctgcttacatcttggggctctttttgcttccctatgctcctggagaccctgtatgggccatcagttccaacacaataaacgaactcatcggnctttctctcaacttcttcttcatt

SEQ ID NO: 194219 - DNA, 1034 bp, Gossypium hirsutum
  unsure (1)..(1034): unsure at all n locations
cccacgcgtccgtgaggttcggttaggcctgtataaaagaaaaaaggatttctctttcctaggcttgtgttgcgctgtggttgaagaaaggtctcataacatttgaagccaagcaaagttcagattaggatttagggtttttctgttttcttttctttttgtgaaaggcaaaatggatctggatatgaacgtgaacgcccctcactcaatgggcacaacaatcatcggagtcacctacaatggcggtgtcgtcctcggcgccgactctcgtaccagcaccgggatgtatgttgctaatcgggcatctgacaaaattacacagctcactgataacgtctacgtttgccgttctggatccgctgctgattctcagattgtttctgactacgtccgttatttccttcatcaacatacgatacaacttgggcagcctgcaactgtcaaagttgctgctaaccttatcaggctactatcctacaataacaagaacatgcttcaaactggtcttattgttggagggtgggataagtatgaaggtggtaaaatatatggaattccacttggtggaacactgattgagcagccttttgctattggaggatctggctccagttacctatatgggttttttgatcaggcgtggaaggaaggaatgacaaaggaggaagctgagcaactagtggtcaaggcagtgtcgctcgccattgctcgtgatggtgctagtggaggtgttgttcgcactgttgttatcaactccgacggagtgacaaggaacttctaccctggtgataaacttcaattgtggcacgacgaattggagccgcagcattcgttattggatatactgaacgctcctagtcctgaaccgatgaacatttaatcaatgggagtcagctgccttttcagtaatcaaatgggagtcacctgactttctagttttaggttgtattcagctgaagggcttgttcttactgcgtttattttctaaagctggaagttttatgtttagttgntgttaaaaacatattatctat

SEQ ID NO: 194220 - DNA, 567 bp, Gossypium hirsutum
agactggccttattgttggcgggtgggatatttatgaaggtggtaaaatatacgcaattccgcttggtggaactctgattgagcagccttttgctattggaggatctggctccagttacctatatggattttttgatcaagcatggaaggaaggaatgacaaaggatgaagctgagcaattagtggttaaggcggtttcccttgccattgctcgtgatggtgctagcggtggtgtcgttcgcactgtgattatcaactctgaaggagtcacgaggaacttctatcccggtgacaaactgcagctatggcatgaggaattggagcctcagaactcgttgctggatttactgaattcttctaatcctgaacccatgaatatttaatcaaatcaaaggctaaggggaaattttttattatttttatgtggaaatttttgggtagatccaagaaatcgcttgaaattgatctaacaaatcccagatgattcgtcttataatattttgtttggatacaagtaccattaatattatatttttatatatagataaaatctataggaaattcata

SEQ ID NO: 194221 - DNA, 458 bp, Gossypium hirsutum
gaaattccaaatgaagataagaattttaccactagaatgcgcatcattgactttggaagttcaatagatgggtttacactgaagcatttatacggatcagctggaccttctagatctgagcaaactcatgattatagtccacctgaagctcttcttaatgctagttggtatcaagggcccacgagcacttctttgaaatatgatatgtggagcgtaggtgttgtgatcttagagatgatcttggggacaccaaatgtatttcagataagtgctctgacacgcactcttctagatcatcatatcgagggttggaacgaagacttgaaggagcttgcttataagcttagatccttcatggaattgtgcattctaatcactgggagttcctccaaacatcatcatgcgatgaaccaagctggcatgtcacctgcttcttggaaatgctcttgagaattttt

SEQ ID NO: 194222 - DNA, 520 bp, Gossypium hirsutum
caaaaccatggctgccactcactctcttagaacccttccccaccaccatcagttcctctgccttcaaacgcctctccacccctcctcctcctcctcctccaccctcctccttcttcctcaaacccccctcctccttcacctccacctccaccacaaacactctttcctctctctcctctgccaccaccttctctcttccttcttccaccacatccaccactacttcccaagctatctcctttgacaccctccaacaccacctttccaatcaaaacttccgccaggccgacgaagaaacccgccgtctgctcatccttctagccggcgaagcagctcagaagcgcggctacgtcttcttctccgaagtccaattcatctcccaaaatgacctcaaagccattgacgaactttggaaaaaacacagcaacaacaaattcgggtacagcgtccaaaaaaagacagtggcaaaaagtaaaaaaggacttcaccaagttgttcctcaaactgggatggatgaaaa

SEQ ID NO: 194223 - DNA, 451 bp, Gossypium hirsutum
gcgtacgctccaacacctctctttctctctcgccaacgcaattgactgcttgatggcctgaatacttgaaccagcagagctatctcaccttgttatcaagctctctgagtgcgcgtctatcaatggcgaaaaccaatattgggtcattcttcaataagttcctttctcttttcatccttcttctccaccttggttgcttcgttttcaccgccgctaaagacaaccataaagcaaccaagaaacgcaaatcctcacctctttctcctaactctcacaaacaccgcaaagctctttcctccacatggacttttctcaaacgcattttttcttctaaagccaactgcataaacaccatccaggccgcacaccctccaacatcagcaaccacacccgcgttaacctttgcaagaaactcccaacattcccttgtctccatgtccatgatcaatcc

SEQ ID NO: 194224 - DNA, 1495 bp, Gossypium hirsutum
  unsure (1)..(1495): unsure at all n locations
cccaccagacgactccaaagaaattttaaggaaaaaaaagaaagagagaaagaattagaggaagaagagcaggcattgatggcggagggaaaacaggagaagaacacgacaagcgaagagagcgttaagctgttcgtcggtcaagtgccgaagcacatgacggaagctcaagttcttgcaatcttcgaagagttcgctttggtcgacgaagtcaacatcatcaaagacaaggctactcgtgcctctagaggttgttgctttgttatatgcccgtcgagagaagaggccgataaggcggtcgatgcctgtcacaataagaagactttgcctggggcatctagtccgttgcaagtgaagtatgcagatggcgagttggaaagattagagcacaaactttttgttggcatgctgccgaagaatgtctcagaagctgaagttgctgatttattttctacatatggaaccataaaggacctacaaattataagaggttctcaacaaactattaaaggctgtgcctttctgaaatttgagactaaagaacaagcccttgatgcgctgcaggctgttaatggaaagcataaaatggagggttcaagtgtccctctcgttgtcaaatgggcagatacagagaaggaaagactagcacgaagggctcaaaaagcccaatttcaagcattgaataaactgaatgtagattcacaacatccttcattgtttggagcattgccaatgggttatgttcccccatacaatggatatggatatcaggctccaggaagttatggacttatgcaggaccgcatgccacccatgcagaatcagtctgcatttcacagcatgattcctccagtaaatcaagcaagtgcattgcgaggaatcacacctgaccttgctcccagggctggacctaaaaattatgctatgcctcctggaagttatgttggctccgcttacccagctgtgcaaggtgttcagtaccccatggcatatcctgggggaattattagccaccatccgttgaccagttcacctggttcactaccacaagcaaatacaagcagtaactcttcatcagcttccagtgtcggtacaagctcgggaagtcagattgaaggtccacctggtgcaaacctatttatttatcacatacctcaagaatttggagaccaagaattgacaaacgcttttcaaggatatggtagggttttaagtgcaaaggtttttgttgacaaagcaacgggggctagcaaatgttttggatttgtaagttacgactctccggcagctgctcaaaatgccataaacatgatgaatggatgccaattaggaggtaagaaactgaaggttcancttaagagagacaacaaacagaacaaaccttattaatcgggaggtgagtcatggaaggcaacaaacacccggtcgaaggaacctggatatancgactgactgcagtatcagcatttcggatggattaaggataacctgtgat

SEQ ID NO: 194225 - DNA, 540 bp, Gossypium hirsutum
cgcgtccgctttccttcccctcatccaaaccacaaaaacacacaactcagagaagagaaggggaagggaaacaacaatgatggggcaaaggcaacacgttgtccttctcattttctcagcttttcttctcttccaaacctcaaacgcccataatattacacgtctacttgcaaagcacccctctttgtccacattcaatcattacctcaccctcactcacttagctcccgagatcaaccgccgcaccaccatcactgtccttgccttagacaacgccgccatgtcttccctcttggataaaaacccttccatttacaccatcaagaacatcctttcccttcatgtcctccttgactactttggtgccaagaagcttcaccaaataaggaatggtactgcactagctgctactatgttccaagctactggtgtggctcctggggtttctgggtttgttaatataaccgattttaaaggtgggaaagttggttttggagctgaaaacaatggtggaagtttgaattctttttttgttaaatc

SEQ ID NO: 194226 - DNA, 574 bp, Gossypium hirsutum
cggacgcgtgggcgaatttctcagcaaccaaacaaaaccttccattgtcttctagaactatccaagcacactggtattaatcaatggctcgtacaaagcaaacagccaggaaatcaaccggtggaaaagctccacgtaagcaactggcgaccaaagccgcgaggaaatcagctccagccaccggaggagtgaagaagcctcaccgtttcaggccaggaactgtggctttgagagaaatcaggaagtaccagaagagcaccgagctgttgatcaggaagcttcctttccagaggctggtgagggaaatcgctcaagatttcaagaccgatctgaggttccaaagcagcgccgtcgctgctcttcaagaagcggcggaggcttatctcgtcggactgtttgaagacactaatctgtgtgcaattcatgccaagagggttacaatcatgcctaaggatatccaacttgctaggaggattagaggtgagagagcttaggttgcttgtatttgctcgatcgattttaaaattcagaaagacctagatcttggatttagtttctggaatttgctttctcg

SEQ ID NO: 194227 - DNA, 613 bp, Gossypium hirsutum
caaaaaattatagctttcgagcaatctaaacacttattttctcatcaaatcgttttgacatatggctcgtaccaagcaaactgctagaaaatcaaccggtggtaaggctccacgtaagcagctggccactaaagctgctcggaagtcagcaccggcgaccggaggagtgaagaagcctcaccgtttcaggccaggaactgtagctcttagggaaatcaggaagtaccagaagagcaccgaactcttgatccgaaagcttccgttccagaggcttgtgagagaaatcgctcaagattttaagactgatttgaggttccaaagcagtgccgttgccgctcttcaagaggctgctgaagcttaccttgtcggactgttcgaggatactaatctatgtgctattcatgctaagagggttaccattatgcctaaagatatccaacttgctaggaggattagaggagagagagcttaggtctgttagtttttagttgattgattcctagaattagaaatctgtactttctgttcattttgttgtatttgcagtctctgcaaatcattaatgaaattctgtggaattttaacggtttcatgaaattggaacatattcttc

SEQ ID NO: 194228 - DNA, 670 bp, Gossypium hirsutum
ctctgcgaaaatttcttaatttcctcgcaagccaaacagattttacctcttatctccgaatcatctcatctatggctcgtaccaagcaaacagctaggaaatcaaccggaggaaaagctccgaggaagcagctagccacaaaggccgcgcgtaagtccgctccggcgaccggtggagtgaagaagcctcaccgtttcaggccaggaactgttgctttgagagagatccgtaagtatcagaagagcactgagctgttgatcaggaagcttcctttccagaggttggtgagggaaatcgcgcaagatttcaagaccgatctgaggttccaaagcagcgccgtcgctgctcttcaagaagcggcggaggcttatctcgtcggactgtttgaagacactaatctgtgtgcaattcatgctaagagggttacgatcatgcccaaggatattcaacttgctaggaggattagaggggagagagcttagagtttgattttcggctgggtaacgtctaaagctggagatctaagcttttcatcatttgtacgttttgctttctcagcaaatgttcatttaaattgatggaaaacagttggaagctttatgatttcgttggttaaaattgccttttgcttttttggtaactctttaatatcctttttttggggtatgtg

SEQ ID NO: 194229 - DNA, 598 bp, Gossypium hirsutum
  unsure (1)..(598): unsure at all n locations
aattttcttcgttttctttcaatccaaatcctatctgttcaccgtcagttaacccctatggctcgtaccaagcaaacagcaaggaaatcaaccggtggtaaagctccacgtaagcaactggctacgaaggcggctcggaagtcggctccggcaaccggaggagtgaagaagcctcatcgttttaggcccggaactgttgctctgagagaaatcaggaagtaccagaagagcaccgagcttttgatcaggaaacttccattccaaaggttggtgagagaaatcgctcaagatttcaagactgatttgaggttccagagtagcgctgttgccgctcttcaagaagctgccgaggcttatcttgttggactgttcgaggataccaatctctgtgctattcacgccaagagggttactatcatgcctaaaaatattcaactggctcggaggattaaaggagagagagcttaaataatgtatatggtgatttgctttgaatgatttatgcttttaggatctgnnngtgtatgttttctctagatgtagatctctcagtttagtggttnngtgtcagtgatgatgaaatgaaagtttggaaaga

SEQ ID NO: 194230 - DNA, 608 bp, Gossypium hirsutum
gaaaattattttaatttctcataagctaaacagattttgtcaaatctcgaaatcatgagaggaatggcccgtacaaagcaaacagctaggaagtcgaccggtggaaaagctccaaggaagcagctagccacgaaggccgcccgtaagtctgctccggcgaccggcggagtgaagaagcctcaccgtttcaggccaggaaccgtggctttgagagagatccgtaagtaccagaagagcaccgaattgttgatcaggaagcttcctttccagaggctggtgagggaaatcgctctagatttcaagactgatttaaggttccaaagcagcgccgtcgctgctcttcaagaagctgcggaggcttatctcgtcggattgtttgaagacactaacctttgtgcaattcatgctaagagggttactatcatgcccaaggatatccagcttgctaggaggatcagaggtgaaagagcttagatcgtttgtatttacttgattgattgtgaaattaggttagatctagtgtttggtatccgtttttggaatttgctttttcgcaaaagtccttatgtaaacggtcgtctttctatggagttctcatattttcgttt

SEQ ID NO: 194231 - DNA, 448 bp, Gossypium hirsutum
cccacgcgtccgatcatcaactcggtgctgtaatctctgtttctcagctcactgaatctaatggctttcactcattatttgtttgcagttccaatggacacttcaattcaccccaaaatttcaattcccccttcgttttgttccactgaatccccatcttccttacctttcccttctttttcttccccttttcctccattgtctaaagctcgaaatctctctattttccccagaatcaacagagtgggacacaaagcaaaagctgagcctcgagaatctgaagtgaatatagaagctgatgcgttttctcatttcaagcatttgcttcttccaataactgatagaaatccttatctttctgaaggaactagacaggctgctgcaactactgctgctttggcaaagaagaatggagctgaaattactgttgtggttattgatgaaaagc

SEQ ID NO: 194232 - DNA, 450 bp, Gossypium hirsutum
  unsure (1)..(450): unsure at all n locations
agcttttatccgctattaaggcggctgttacttccttcttccctctcttctcgacttgccttgtaacccagcttatcggttctgggatcagtttgatccttggtttagccttttctgcagtagtcattttaggcttccaagttcattacccttcaccttatttcattttcctttgccttgtttacgtgattattctcttgtttattgtggtgcatttacaagtgaattggatatttgcttacgtagtcgtcgtcgttgaatcaagctgggggtttgaaccattaaagcgaagtcgaaatttaattaaaggaatgaaaggcgttgctttgaagattatactgcntttcgggctcgtaatttccattaatacctggcgctcagttatgacatacaggaattcagctgctgataaatggacaagttggttatttgtttgaatatggacgtcac

SEQ ID NO: 194233 - DNA, 432 bp, Gossypium hirsutum
cccacgcgttcgcccacgcgtccgcccacgcgtccgcccacgcgtccggtgttagtcaagtaggatcaagggcgctggagcatggtatgacaaataaactaacaagaccttcgaaactgctggatgtatcttctgactttgcacttacttacaaggacaaagagggtgactggatgcttgttggagatgttccttgggagctgttcgttatttccgtgaagaggcttagaatcatgaggacatcagaggcaaccggattggctccaatgttacaaggaaggaaccagaggcaaagaagcaagcccaactagaatactattctctcaaagccgaccataacacgaataagacatgctatccaaagcagagaagaaatacaacatagttaaaagcattttgactgtagcaaaggttgaacccttgagctctctg

SEQ ID NO: 194234 - DNA, 701 bp, Gossypium hirsutum
  unsure (1)..(701): unsure at all n locations
cccacgcgtccgcccacgcgtccgtcgatcttcatctctgagaggaaaagcagaatcaaatccaaaaatacacaaaaacataaaaggagtatttttctcaaattcataaccatgactgatcacttgcaggagcaggagatggaaattgaggccctggaagcaatacttatggatgaattcaaagaaattcattctggtgaaagtgggctaaacacttcgaataggtgcttccaaataacattatctcctcaggatgatgatacagatcaatcaaccaccctaccagttctgctggctttgattttctcgcatactgaagaatatccagatgagcctccacttctgaatgtaaaaagtatacgaggaatacaagttagtgacctgaaagttttgaaagaaaaacttgaacaagaggcgtctgaaaatcttggaatggctatgatttacactttggttacatcagccaaggaatggctatctgaaagatatggtcaagatgttgatgctgacaatgttgaagaagaagaatcancnnnagatgaggtgattattccacatggagaacctgttacagttgatacatntttagcttggagagaaagatttgaagcagagttggcactaaagcgagccaagctaatgcccgaatctgctcttacggcacctanagaaaagaaactgtcaggcaggcagtggtttgg

SEQ ID NO: 194235 - DNA, 518 bp, Gossypium hirsutum
cccacgcgtccgcccacgcgtccgcccacgcgtccgcccacgcgtccgcccacgcgtccgcccacgcgttcgagcgtttagctgaaaaacccaatcccaacttgtttcttcatggcgtctccttcgctcttacaatccacatcctcctccttccacggcccctcccctttccttgcaccaccattctccgcgcgcctgccctactctaaccccagaaatggatacgccggcgtcgtttcggtgagggcaacgggagagattgtgttggtggataaatcggaagccgaaaaaccctaccgtctcaaaactacttacctagacaaaattattcctttgcttaaagaagagttcaagtacaccaatattcaccaggttccaaagcttgaaaagattgtggtgaattgtgggattggagatgctgcccagaacgcgaaaggcttggaagccgcaatgaacgagatggcattgataacggggcaaagacctgtgaagacgcgagccaggaattctattgctac

SEQ ID NO: 194236 - DNA, 485 bp, Gossypium hirsutum
gcgcccaacgtccgtccacgcgtacgttgaacggtcttggcagaatcagcaggcaaggaaaggctggatacgactcgatagataggaaaccgggggcaaagcaggaaaaaatgcggacttcgttgagatacactggtgactccaaagctctacgaatccacgccaaggagaagttccccttcgattccaaaacccatttgcaggttcaaggcgagctggacacaagaactggagtccccaataacttctgtgcaatgataaggcactcatatcatgatttgttcacaagccttcgggttggaaatgcgctatgataagcgtgataaggtgcggtacacactgcgaggaaaaaaatctttccttgtaaccaacgatgattcagtcaattttgttatcaagggaagatatgatgttgatcaagaattcaaggggaggaagtcagaaggagctgctgaatttatttataaaatcttcaatttccagaa

SEQ ID NO: 194237 - DNA, 685 bp, Gossypium hirsutum
cccacgcatccgctgactcctgggcggtaatctaaaccatctgattcaccccatcggtggcctctggcattgcttgcaagacgagtttcaaggttgccggcggctagggttgattttagcgcacgggtttccagggagttgaatcatggggttggagattccagggtttcacttaggccgaggattaaatcttgcaggagattgtgttgccagttttctgatttagggcatgtccagtattatgtgtcaccgaagggtggtggtagtggcgatgccacgaagaaagacaagggaaagagctgtgagattaaacaagtcaagaagaagctgaagcttctcaagcgattgtgcaaggacttgtccatgcttcctcaaattgctgatggcgaggatattaggattggattggccgctgaagttaaggccacgacgattcacgaagcaagcggggttttgctggcccaactgcaaaaattgaaatcagaacaaaaggagttgaagagaaaattgaaagaggaacgagccaagctcaaagccacttttgggaaatcagaatcatcatcttcctctgaatcaagtgacagcgaatgtgggaggtagttgacatgaaagccctgagaaacaatgctttgaaaccttccctagagtcagaaacaccaattggcaatgctttggaacgacccga

SEQ ID NO: 194238 - DNA, 537 bp, Gossypium hirsutum
  unsure (1)..(537): unsure at all n locations
cccacgcgtncgccacgcgtncgcccacgcgtacggccacgcgtccgaccaaccatggaagcaacctcacttctttcttcatcttcttccttcgccctctctttccttccttcacctctttcttctccagatctccaccacaagtctcttgtcttcaggggcatgtttccagttactgtaaacccgcagacatgttcaacagctgttgtccgcagaaagttgagcttctgtacaaaggcagttcttggaggaaatgtgcatgtaacaggagttcctacttctgtccctgtaagagtagcacacgagcttcatcaagctgggcatcgatatttggatgttaggactcctgaagagttcagtgcagggcatgtccctggggccattaacatcccttacatgtacaaagttggatcaggaatggcaaaaaaccccagttttgtagctgaagtatcatcacatttaggaaaatatgatgaaattattgttggatgtcaacttnggaaaacgtctctgatggcagncaccgagcttttagct

SEQ ID NO: 194239 - DNA, 380 bp, Gossypium hirsutum
ccattcccctctcttttcacctcatatttcatcaattacccaatcaccctttcaccttgggaaccaatcccccattttacatcccaatgcaacttccccttgtacacataccaaccatggaagcaacctcacttctttcttcatcttcttccttcaccctctctttccttccttcacctctttcttctccacatctccaccacaggtctcttttcttcaggggcatgtttccagttactgtaaacccgcagacatgttcaacagctgttgtccgcaaaaagttgagcttctgcacaaaggcagttcttggaggaaatgtgcatgtaacaggaggtcctacttctgtccctgtaagagtagcacacgagcttcatcaagct

SEQ ID NO: 194240 - DNA, 675 bp, Gossypium hirsutum
cgataattcatagcaggcagtcataaaacacttcccatgcagctatagcatctcaagctgcttcgcttcgttgctgtcttcaatccaaggtagtgcgtgccatgattctgaatgagctttacctttccgttgaggtctgttccggtgagttcaaggcttcataagcctgtgccgtgtagctctagttttgcatgctctcatcatttggctaccacagctctatttcgaagcagcagtgaatctggagatgtgcctttcttgcgcctttctgctgcatcatctccattgttgagtggggatctaggtggtctatcacaagctttaccgtcattacctaggcgtcgtggatctaatttggtgcctcgagcttcaaaggatgtcccgtacagttttcgttttccaccgatgactaagaaacccaaatggtggtggaggactttagcgtgccttccttatttaatgcctcttcacgagacgtggatgtatgcagaaacagcatatcatttacacccatttttagaagactttgagtttttgacctatccgtttctcggagccattggaagtttaccgagctggttcttaatggcatatttctttgttgcatatctaaggatagtgagaagaaaggatggccccatttttttcgatttcatgttgtgatgggcatggtat

SEQ ID NO: 194241 - DNA, 911 bp, Gossypium hirsutum
ccgggaagtaccgggtggaccgacgcgtgcgtttgggtttgaaacaatggagtccaacaccaaaatgtcagctcttcttttgatttgcatgcttttcatttcttcagtgacaccaattcttgggtgtggttcatgtgggaaagcacacaagcatcgaaagcctaagggaaagtcccctaaaggtcccatcactttgcctccccttgtgaaacctccaatcaagttgccaccggttgttcctccaatagttaagccacccattgacctccctccggttacagtccctccaattaacctccctccagggacggttcctccagtaactaagccaccaagtgggaaaccctgcccaacaccaccaaccaaggacacttgccccattgacacactgaaattgggtgcttgtgtggatctgctgggagggttggtgcacattggactaggtgacccggttgtgaaccaatgttgtccggttctttcaggactcgccgagctcgaagctgcggtctgcttgtgcaccaccctcaaacttaaggttctcaaccttaaaatttatgtgccactggctcttcaactccttgtcacatgtgggaaaacaccccctcctggttacacttgctctctctaaaaccaaggttgctaggttgatggactctatatgatggaatggacatgagaggatgtcgagcttttctctttgtttcttagttggattggaaatctgatgcagtttttattgtaaaaccaattattttttttcttttaaaagattgttgcaacttgcaagtgtgtttctgtatcttccacaaaaaaaaaaaaaaaaaaaagcaatcaagaatgatatttgtctttggtcatgattttctgggattttcattttgttgctttcgctaactatatatatatatatg

SEQ ID NO: 194242 - DNA, 364 bp, Gossypium hirsutum
cccacgcgtccgcccacgcgtccgcataacaatacacaggcagtcttttttctgaaaactgagaatggcttccaccgccgtcctcgccacttccacggtcagcagcacctcattcgtccgccgccagccagtgaggagcctatcctccctcccaaactttaagcaggctcttttcgggctaaaaccccaaagaggtgggcgtcttacaatggcagtatacaaagtaacgctgctcactccggaaggacctcaagagtttgagtgcccagatgacttgaagatcctggacgcggcggatgagaacgggattgatcttccgtactcgtgcagggctggtgcttgctcttcatgtgcttggagagtc

SEQ ID NO: 194243 - DNA, 1243 bp, Gossypium hirsutum
tttacggtgaaaatcgaacacaaagcagctcgcgactccatcagcatatcagactgcaagcggatttccaaaacaaatactagaaaccctactcccaaatagaagtttgattgagctctctcatggcgttttctactcgtctcctctacaaatctcgccagctttatggtagtcaagctgttctgcggcaggaggttgccattcctgtccggttttactctaaagaggcttctccccctggtttaaaaggagatgagatattgaaaaatatctttgtggaggttaagaacaaattcgagacagcattgggaatatttaggaaggagaaaatcaccattgacccagatgacccagctgctgtctctcagtatgcaaatgttatgaagactgttagagaaaaggctggcttgttttcagagtctcaacggatcaaatacaccatcgaaacacgaactcagggcattccagatgtccgaacatatttattgacactgaaggaaataagatccaagagaggactcactgatgaacttggtgctgaggctatgatgatgggtgcgttggataaagttgaaaaagaaatcaagaagcctcttatgagggatgacaagaaatcaatggctcttcttactgctgagtttgataagatcaataagaagcttgggatccggaaggaagacctgcccaagtatgaagaacaactggagctaaaaattgccaaggcgcaattggaggagctgaagaaggatgctcttgaagcaatggaaacacaaaagaagcgggaggaattcaaggatgaggcaatgcctgatgtgaagtcattggacatccggaacttcatctgaaactcgaaattcgcctttggtggttccagtttgagggtgaacaagtataactgttcaacgattgcttaaaacctttctttttcattttgctacaataatatgataaataataataatggaaaagtgaaaccggtgattgaaagtgcacaaccgtcagatctgaacaacttaaattgttgtttttgtttgtgtttattattctcaagtttttgggatgaacttcggctccttattgttatgatttggttggttgtatgaaagcaaacatcgatccgtctttgaggtagataaaccgcatccataataattagctttttatgatggaaaaattatgtggatattttttattagcttggacaaatttatcaataaaaagatttatatttttccttgccttt

SEQ ID NO: 194244 - DNA, 904 bp, Gossypium hirsutum
cggacgcgtgggaaaaagtttaattgagttctccgatcatggccctctctgctcgtatcctctcaaaatctcgccagctttgtggtagtcaatctattctacaaaaggagaataccattcctgttcgtttttatgccaaagaggctgctgctcccattgctaataagggagatgagatattgaaaaatatctttttggaggttaaggcaaaatatgaggcggcattgggaatatttaggaaggagaagatcaccattgacccagatgaccctgctgctgtttctcagtatgcaaaggttatgaagacagttaggcagaaggctgacttgttttcagaatctcagcgcatccagtacaccatccaaacacgaactcaggacattccagatgctcgaacatatttattgatcctgaaggatataaggatcaagagaggactcactgatgacctttgtgctgaggctatgatgatgaatgctttggataaagtcgaaaaagaaatcaagaagcctcttttgaggaatgacaagcaatcaatggctcttcttacagcagggtttgacaagatcaataaaaagcttggaatccggaaggaagatctgcccaagtatgaagaacagttagaactaaaaattgccaacgcacaattggaggagctgaagaaggatgcttttgaagcaatggaaacacaaaagaagcgggaggaattcaaggatgaggcaatgcctgatgtgaagtcattggacatacgaaacttcctataattctctaattcactttcggttttccagtgactttggaggtcaactttctgaattggggacttcctttgtcattttttgctataataaaaaaaaaagaaaagcaactggtcagttgaaaatgcaaaaatattatctcatct

SEQ ID NO: 194245 - DNA, 523 bp, Gossypium hirsutum
aatattccaaaactgctgggggtaaccattggttatacaattacagcatcaattagtatggtggctgtgaaaaggtcaaattgttttcacacgcatggtcatcacgtgaagtgccaaacatcaaacaatcctttcatgatcatctttgcttgtattcaaattgttcttagccaaatcccagattttcacaagctttcatggctttcaatccttgctgctgtcatgtcttttacttatgcttccattggtcttggactctccattgctaaagctgcaagtgggggagaacatgtaaggacaagcttaactggtgtacaagtaggggttgacgtgtcacgctctgaaaacgtttggagaacattccaagctattggggacattgcctttgcttatgcttactccaccgtcctcattgagattcaggatacaataaaagcgagtccaccagaaaataagtcgatgaagagagcgagtggtgtcggtgtcacgacaaccactttattctatgtactttgtggcattg

SEQ ID NO: 194246 - DNA, 627 bp, Gossypium hirsutum
  unsure (1)..(627): unsure at all n locations
ttaaatattgtcaatatcaaaactgtgtgaacctaaacattatgcaacacacactccctcagggaaagatgttacaagcaccgagcataattgagagaggtaaggaacaaattgacgctctattccaccatggtaaaaaaccacaccatcacaaagggacacatggcacgagcgatcatatcgccgacgaacaccgctgttgatgatgttaaaggccctaacgtgtttgaaagagtgaaagaagaagtggaggccattgttggagcaattcatcccaagaaagaatctaaaggaccgtgagtcaccttcgtcgatgcaaggtgggtttagaattctgattcgaggatcatatcgaataatttaggtttataatctcagtatgatgtttaatttgctcattcaactatgaaagcattctagaatttgattcttgtgtttgacaagtagcttgtctttgtctgattttctttacatctgtccctctgctttatgtttggaattctttatcttaatgttgctcgattgttctttgacagagtccattgaatacaaagcgtctattatctgnnnnnnnnnnnnnnnnnnnnnnnnnnnnnnnnnnnnnnnnnnnnnnnnnnnnnnnnnnnn

SEQ ID NO: 194247 - DNA, 508 bp, Gossypium hirsutum
gtcgcgacggtctcattgaacatttaatagatcatgtctttctcattcttcaagccgtcgaggccgaaaaccccaccagaggttgccaaagcgatcaaagacagccttaatgcactcgacaccaaaaccgttgctgaagttaaagcccttgaaaaggctatggaagaagttgaaagaaattttgtgacaatgagatgcatgctttctggggatggtgaggttgaaccgaatgtcgagcaggtctcacagttggcacttgaaatctctaaagaggatgttatttcccttggtgttcacaaggtaccgatactgggatgggaagcaatgaaaagatttagtcctctgttggtccatattgttggagcaacaaggtgattccaaatattgctgtgtggaatacattgagaaaaatttggagttacttgactttcttgtagttgctatgacaacaaggaaatagctttaatttggggaaatatgttgagggagtgcataaaattttcatcac

SEQ ID NO: 194248 - DNA, 480 bp, Gossypium hirsutum
ccgtccgaattcccggtcgccacgcgtcatctcttcttcacactctctccctgctgcattctagccccgacccacctcccgaaacgtacgatttcgtcgtacggccgagcattgaaggccaggtcatgaacttctacgtgttgaaacggcccggcgtcgattttttcctggaagaaataagcaagaaacacgaagtggtggttttcacggcggggctcaagcaatatgcttcccaggtcttggataagctcgacccgaagggcttaatatcccaccggctttatcgggattcttgcaaggaactgaacgggaagttcgttaaagacttgtctgaaatggggagggatttagggagaattgtcatcgtcgacgataacccaaacgcttactctctgcaaccagagaacgccgtccctatacggccatttgtggaggatagtcacgacagggagctggagaaattggttcaattctttcagt

SEQ ID NO: 194249 - DNA, 529 bp, Gossypium hirsutum
atactgcagaaatctccaaagccagaatggtttcaaaatcacatgatgtgtactcctcttgggatgatgaattcaaaaaactggtgcaaagcttccccaaagagaaaggctgggcaggatccaatctttatttctatcaaggtttttggtgcccctctcttgttctaaaagcttttatttctttccagaaacattttcaagcatttaattctgatatcatcgttgctacttttccaaaatgtggtactacttggctcaaggccttgactttctccactttgtaccgcaatcagttcccatgggatgaaaatccattgctcacctttggccctcaccaacttgttcgtttcttcgagtatgatctttacttgaacaacccttttcctgatcttcgaaatgtttgtgcttatcagccaaggcttttttccacccacgccccttatgctactttgccaacttccattaaggattctggctgtaagattgtttacatatgtagaaaccccatggatatgttcatttctctttg

SEQ ID NO: 194250 - DNA, 408 bp, Gossypium hirsutum
cccacgcgtccgaattcaaccaccatcactgcctactcctcagccatggcaaccaccacagctgccaccgtgtcacattttttcggtacccgtatccaaacctctaacccaagctccggtagaatccaagctaggttcggctttggaaccaagaaagcaccacccgcaccaaaaaaggccgcccctaaacggccatccgatcgccttgtttggttccccggcgcaaacccaccggaatggcttgacggtacaatgatcggagaccgtgggttcgatcctttcgggtttgctaaaccggctgaatacttacagtacgatttggactcgttggaccaaaactttgccaagaatgtggctggtgaaattataggggtgattagcgagacggcggagcttgaaccgacgccg

SEQ ID NO: 194251 - DNA, 513 bp, Gossypium hirsutum
ttttcgcgtccgattcccagtagcagaacagaaaaaagaggtcttccgtctcatattcttcgatcctctggaaagttgtagaccagagcaagaatacattatggctggacatagtgattcaagttcgtctgaaaagaaatcaagtgaagccatgaatgatgtaccgacctttagcacggagaatatgcaaaataacatgaaagttatatattacagccgaacgtttatgtctatcatcggaggagttattgctggaattttagggttcacaggctttatggggtttatcttttattttcttgtcatggcaattacttcaattggactcatagcaaaggcaaagttctcagtccatttatattttgatagctggaaccggattatactcgatggtttcatgggcggtcttatgtcattcgtgctattttggacatttgcctacgacattgtgcatatattctgaagaagaatctgcaacacctcaccacctcaccggaaagagaagccaagtcg

SEQ ID NO: 194252 - DNA, 939 bp, Gossypium hirsutum
gttttattttatcaatgtggttggttgaggcaagaattccaggagtttactccggtggggcatggcaaaatgcacatgctaccttctacggcggttctgatgcctttggcaccatgggaggagcttgtggatatggaaacttgtacagccaaggttacggagataacacggcagccttgagcacagcattgttcaacaatgggttaagctgcggtgcttgctttgagataaagtgcgcaagtgatccaaaatggtgccattccggaagcccttccatcttcatcacggcaaccaacttttgccccccaaactacgctctcccttgcgacaatggcggctggtgcaaccctcctcgcgctcactttgacctcgccatgcccatgttccttaagattgctgagtaccgtgccggtattgttcccgtttcctaccgccgggtgccatgccggaaaaggggagggataaggttcacaatcaatggattccgatacttcaacttagggttgatttccaacgtggcgggttcagggaatatcgtgaaggctagtgtgaaaggatcaaggacagggtggatgagcatgagtcgaaattggggtcagaattggcagtcaaacgttgtgctggttggtcagtcgctctcatttagggtcacaggcagtgacagacgcacttccacctcttggaacattgtccctgcccattggcaatttggtcaaacattcacgggcaaaaatttcagagtttgatttctcaaagaaaaagaaaaatagaaaattattagccccataagttaggaaaagccatttccagttttacccttgatggtccaacttttgttttgttagggtgatgtctctttttgacaaattgggtacttggggtgtcttctttattttactctttggttctgattttggggttaatgggtttgcatttggg

SEQ ID NO: 194253 - DNA, 801 bp, Gossypium hirsutum
tctgtctcgtgggttccttcttacccagatctataattgattttggttgtaaaattatttacatttgcagggaccccaaagatacatttgtttcattgtatcatttcattgcagggcactgcaaatcccaaaatactcaacccgttcaacttgatgaagcgttcgaattgttttatgaaggtgtaagttggtatgggccttattgggaccatgttttggggtactggaaagcaagtttggaacatccagacaagttaatgttcttgaaatatgaagaactggttgaagatactgttttgtatcttaagaaaatagcagagtttatgggttatcctttctcgtcagaggaacaacaacaaggggtgcctgaaaacattgtacagatgtgcagtttcgacaatttaagtggcttggaagtaaataaaaccgggagacatcgtgaagggaaaggaaatatggagacggaaaataacattttcttccggaaagggaaggttggagactggaagaattatttgaccactgaaatggctcaacgtttagaccaacgaacactgcaacagttgagcggttcaggtttaagtctctaattgaagatctataatctatttagcatccagtgttgcttaaacctgatcggagttcgtaatcatctcttttaataatattacttttaaataaggtcatcttggccgggtcttgtaatcaatgttaatagtctcgtatattgtaatcaatattaatagtcttgtataaatttattgtactatttcttgaattttgaagctcgtaatagaactt

SEQ ID NO: 194254 - DNA, 1006 bp, Gossypium hirsutum
cggttcggaaattccgggttggaccaacccgtccggaaattctcaaatccatttctctgactaagaattctagaatgtcgacaaccattatagcaaattcaatgataattatggattgattgaaaaaattatgaaaagaacccatgtttaagtgcgtattaaaacattatttgaaatatatatatatagtgtcgaaatatcatgaataaaaatatcagaaataattaatttccgtgctattttctgtctagattccatgcccatggcttctacaaccagtaccaatctcccactcaaagaccgagttgctatagtaactgggtcatctcgtggtattggccgagttatagccactcacctggccggactcggtgctaaactcgttattaactacacttccagtgcagaccaagccgatctcgtagctacccagatcaattctctgtatcctggtgactccccgcgagctgtgactgtcaaagccgatgtttcggaccctgcccaggtcaagcttctgtttgattcggccgagcaggcgtttggatcaccgattcacatcctggttaactctgctggagttctggatcctaagtatcctaaaattgctgatactgccttggaggactttgaccgtattttcagtgtaaacacaagaggggcattcttgtgtgccaaggaagcagcaaacaggctgaagcgtggcagtggaggtcggatcatactgctgtcatcatcaatggctgctgcactgaggccaggattcggggcgtatgcagcatcgaaggcagctgtaaaggcaatggtaaaaatactagcaaaggaactcaaaggaactggtatcactgcaaattgtgtggcaccagggccgattgcgacagagatgttctttgctgggaaaagtgaagaagcggtgcagagatgtattgatgaatctccacataatcgacttggtcagagcgaagatgttgcacccgttgtcgggttcttggcctctgatgctagtgat

SEQ ID NO: 194255 - DNA, 1231 bp, Gossypium hirsutum
ggatgccgttggtatatgttaagctttatacataccagatatttagagctttgtcttacatccaccgcagcattggtgtgtgtcatcgggacatcaaaccgcaaaaccttttggtaaatccgcatactcatcaagttaaactatgtgattttggaagtgcaaaagttttggtgaaaggggaaccaaatatatcctacatctgctcaaggtattatagagcacctgagctaatatttggagcaacagagtacactacagctattgacatctggtctgctggttgtgtccttgctgaaatgttacttggacagcctttgtttcctggtgagagtggggtcgaccagcttgttgagattattaaggtcttgggcactccaacccgagaagaaattaagtgcatgaatcctaattatacagagttcaaattccctcagattaaggctcacccatggcacaagatattccacaggcgtatgcctcctgaagctgttgatttggtgtcaagattactccaatactccccgaatctccgatgttctgctctagatgccttgatccatcctttctttgacgagttgcgcgatccaaatgcccgcttgccaaatggccgtttcctgccgccattgtttaacttcaaacctcacgaactgaaaggcgttccggaggagataacggcaaaactgataccggagcatgcaagaaagcaatgtccatcacttggattgtgattttgatgtgtaactcaactagtagcaaaagtggattatcattatggaagcttttatggtgtttgttgttcatctatgccccagttttttgttcttgttgcatgcatgtgttgttgttgtttatgtaaaagcagattttagacataaaaatcgtccatcccactgtcttctatatatttctttcaagatttgtaacatcatcatggagaccaacttatgttctactgtcatatatgttcttgtatgtaatgtaattgtcgagaccctagtagtgacggaaaaaaaaaaaaaaaaaaaaaaaaaaaaaaaaaaaaaaaaaaaaaaaaaaaaaaaaaataaaaaaaaacaagggaaaaaaaatcaaaaaaaagaaaaaaaactaaaccaaacactaagatcaaacaatcactttaaaaaaaataaacaaaaacaaaagggggggcccctttaaaaaaaccaaatttatattgcccgggttggcaaaggaaaaatttttttttagg

SEQ ID NO: 194256 - DNA, 334 bp, Gossypium hirsutum
cggacgcgtgggcggacgcgtgggcaaaatatacatcctttgtatcgcttcacctctttcaattattttttctctcacactgagaacatgcaaagacaatccttaggctcgcctacctctaagctccatagccatggaggagaagagattaccggagcaatcgtcgacgacgatgaccgccgcaaagacagcaagtctcgccgattgacgttttcggcttcttcttcttcgtcgtcgccgttgttgttgccgacgtctcctaagtctgagaagctcattcatctcattcctgttcttactctcctttgcttcctcatactttacttaaattctc

SEQ ID NO: 194257 - DNA, 754 bp, Gossypium hirsutum
  unsure (1)..(754): unsure at all n locations
ctctgaaacagtcacttagctgttaacagcactcaacaatggcgaccacccttttcttcctcctatttttcacccccttcctctactccgccaccgcaccaaatcataatgcaccgcaagatctggtccgttcatcatgcatcaacgccagctacccctcactctgcctccgcacactatcatcctactctggccccaccggcaccccacgcgacttagcccaagccgacgttaaagtcagcctcgcccgcgcccgcaaagcttcgacctacttaaaaaccagcgtcacggggaaaagcaaaagggaacgagcggctctaagcgactgcgtggagcaaatggctgagtcggtggatgagctaagcaaaacgttgagtgagttgaagcatttgagaggcgaaacgttcgagttccagatgagcaatgcacggacgtgggtgagtgcggcgctgacgtatgaggacacgtgtgttgatgggttcgaaggggttgatcgggaggtgaaaggtgatgtgaagaagaagatcacaaatgtggctatggttacaagtaatgctttgtatctgattcgtaggcttgacgaaagtggtggtctgaaccgttgatcatgatgaattggacggttgtgattntatctggcttattgatggttatcgnggtcttttttttttttatcttaattccggagaagttgtatgtaactgtaatgtaatattattttcgtggtaaatacattcaatactatttctctagt

SEQ ID NO: 194258 - DNA, 506 bp, Gossypium hirsutum
cccacgcgtccgaaaaaacaggctaaccaatcataactgaaatgtttctgttaaagagctaagaagcaaaaaaaaaaaaaaaaaaaagctgaagctaaaatcacagcttgataatggcttccaccgccatttctctttctttaccaacatttccttcatcttcttcaactgttaaagctaaaccttctatattcagtcacccccttttattcattgcaaagaacgtaccatcttcttcactctttagttcttcaacgaggacaacgaagcaaattcgtactgccttcaagatcaaatgctcatcggcttctttttcgaatactcctccatctgctcttctttttgactgcgatggtgttctcgttgatcctgagaaggatggtcaccgggtttcgtttaatgacactttcaatgaaaaaagaattgggtgttacttgggatgtggatttgtatggagagttgctcaaaatttggtggtggggaaagaaggatgacagcttacttta

SEQ ID NO: 194259 - DNA, 377 bp, Gossypium hirsutum
cccacgcgtccgaaacattctcaatggcaacgccattcctcaccacgtccaccactttgtccctttctctttcaacccatctccaccgtctttccagttccttatcctctacttgtttcccttttaagccaaacctccacagagtccgtagaagcccatcacttcttgcttcctatggaaacccacacttatttaaccacgaagatcatcattccacctataaatcattgctatccaccagaattcttggacccaaatccaatttctggcaaatgggtccttcagaacctagctgtagcagagaaattttagtcaaatcctctgcatcagacagtagtaacactgtcatctccactctatctaaaaaagtgttgggg

SEQ ID NO: 194260 - DNA, 362 bp, Gossypium hirsutum
gtcttcctttacttcacaaacaaacagtactatttctttcaaaactttgcttaatattttgggttcttttgcaatatgtgccgttcttaccaagatttagagcctgattgccaatacaaagaaggagaagctcatgaccttatcgagtttcatgtcaaacattttagataggaccagctgaaagttcacttcggcagcaacaacgtcctaaccgtttccggcgaacggcccctggaaggaagtaaatggacccgattccgcagggaattcaccattcccaaagactgcaaagcgaacgaaatccgtgcgaggttcagttccggttttctttatataccattcccaaagaaaatcgttttttc

SEQ ID NO: 194261 - DNA, 475 bp, Gossypium hirsutum
ccacgcgttctgccacgcgttcgcccacgcgttcgcccacgcgttcgcgctcattaaattccaaaaaggaaaacttccgatcccgtctccggcgacatgttgccggccgttttgactcaggtggccaccggcttaagcgttttagctggtgccgtcttagtcaaatccgtcatggatcaaaaacccatggccggtccgtttcaaagatgcccgacttgtaacggcacgggtcgcatcacgtgcatttgcaatcgttggtccgatggagattccggttgtcggacttgcgccgggtccggtcggatggcgtgtagcagttgtggtgggtctggtaccggtagaccgattccggttcagatttctgtacgtcaaccgacgaatcggaactcttaattttccgggtttggactctttaaactcttatatatttttatagctttattttttgaaatttaataatgtaatataacagtga

SEQ ID NO: 194262 - DNA, 868 bp, Gossypium hirsutum
cccacgcgtccggtttgttgagcttacagggatacccgttgcaagtactttgatgggtcttggagcctttccgatttcggatgagttgtcgttacaaatgcttgggatgcacggaactgtgtatgccaattatgctgttgataagagtgatttgttgcttgcttttggagtgagatttgatgatagggtgacaggaaaacttgaggcttttgccagccgggcaaagattgtgcatatcgatctcgactctgctgagattgggaagaacaagcagcctcatatgtcagtgtgttccgatgtgaaattggcattgcaggggataaataagatattggagaccacgggagctaagctgaatcttgattattcggaatggaggcaggagttaaacgagcagaagctgaaattccctttgagttacaagacctttggtgaagctattccacctcaatatgcaattcaggttcttgatgaattaactggcgggaatgcaattataagtaccggtgttggccagcatcaaatgtgggctgctcaattttacaagtataagaagcctcgtcaatggttaacgtctgggggattgggtgctatgggatttggattgcctgctgctattggagctgctgttgcaaacccggaggcagttgttgtagacatcgacggtgatggaagttttatcatgaatgtgcaagagttggcgactatccgtgtggaaaatcttccggttaagatattattgttgaataatcagcatttgggtatggttgttcaatgggaggaccggttttacaaggcaaacagggctcatacatacttggtgagacctatccaacgagtcggaaatatttccaaatatgttgaaatt

SEQ ID NO: 194263 - DNA, 278 bp, Gossypium hirsutum
ggcggacgcgtacgcccacgcctccgccctcgcgcaagaacagtatatcggcaaaaatgttcattgagagctttggggttgagagtccaaatgtcaagtacacagacaatgcattccagtcggtgtacaactatgagactactgagcttgttcatgagaacagggatggaacctatcaatgggttgtcaagcccaagactgttaaatatgaattcagaactgatatccatgtccctaaactgggggtaatgcttgttggatggggaggaaacaatggc

SEQ ID NO: 194264 - DNA, 523 bp, Gossypium hirsutum
cccacgcgtccgatcccttcattcattcatatctgcttttctttacgtttggtcattcgattttttctttgggttttccttctttttgatccttttgctattttgggtggtgaaagattgaagaattttgatcatgtcgatcgcgttggaacggatagaatcggcggggttcgggcgggtcatgaactgcgcttgcgatagttctaaattcgaatcgccgccgccggttaaggaaacgaagcagttgttattggcggagacggcggcggttgaagaggaggaggatgattggagggtttcgtcgtctactacgacgtcgtcttcgatcgggaagaacagtgatgaggtatccggaatatcatcggacggtggtgattgcgaggaaaatgaagttcaaagctcttataatggtcctttagatatgatgaattcccttgagcaggtcttgcctatgaggtaagaaaaaccaaaaaccaaaaataaaaatctttccttttggtataatttattgattaatatgctt

SEQ ID NO: 194265 - DNA, 504 bp, Gossypium hirsutum
cggacgcgtgggaaggcatggcatgggccgcccttaggcactagagacatagttactagccacctttcttcattgccttatctccacggattttccggtcgactttgtttgaagttgctccattttgggggtgacgaaagctggattccattttttttattgtctttaaatatattttggtggctggaaaatagtttcatgcgctgactcagttgctgcataaaaggcattttttccagggtgtaattgtagttgggaaaaatcaactctttgttcggagggggactcatcaattcatctgccaataacactggcattatgaaggttcctgggatttgggttttcttctttgtgatcgggacagctttgttcgtcttcgccttcagcagctcctccattcctggtatggatttgcagcatgttgatgggacgagtatgagtgaaacaagtagaaagctgaaggtgagtggatacagtctcaagcatgaaaagaggagcaatgtg

SEQ ID NO: 194266 - DNA, 790 bp, Gossypium hirsutum
ggatcgtactcttcgaacgtcaaccttgctgtttagaactcctcatggaatgatgagaaacagctccaagatatgtacctgagccggaaatcatttgcttttgactgtgatgccccaggtgcaggtatgactgagaaaaggaaagtctttgagatggctctaagcacagcagatgccactttccaaaatcttgattcctcagaaatttcactgactgatgtgagtcactacttcgactcggatccaacaaacttagtacaaaacctccgcaaggatggaaagaagccgagtgcatacattgcagataccaccactgcaaacgcccaggttcgaactctggctgaaactgtgcgactagatgcacgaaccaagttgttgaaccccaaatggtatgaaggaatgatgtccagtggatatgaaggggttcgcgaaattgagaagcgccttacaaatactgtaggggggagtgcaacttcggggcaagtggataactgggtgtacgaagaggctaattcaactttcattcaagatgagaacatgttgagcaggctgatgaacaccaatcccaactcgttcaggaagttgattcaaacattcttggaggccaacggacgtggctattgggaaacttcggaggagaatattgagaagttgaggcagttgtattcagaagtcgaagataagattgaaggtattgatcgatgaaccgtaaaccaaatagcttctaaaatggcaaatatttgatgacttacttgagcccctccctttaggatgagctgaaacactcgtg

SEQ ID NO: 194267 - DNA, 460 bp, Gossypium hirsutum
gcgtccgtcacgcgtccggtgaagtgtatgcgtgtagtacacatgctgtttttagtcctcctgcaatgcggaagattgtcaagtgggcggttccaagaggtaatcataacaaacaccatcccagtgtcagagcaaaactactttcctcagttgactgtcctctctgtggcaaaccttctgggagagaccatatggcgtctccatgatgattgctctggagggttagaaccctatgcaaccttgggcattgattgaattctccacatgctatgagaattttcgtatggaactgcaaatcaattatctatggcttcattgggtagttaggtggtcttcttttaatcacaaaaagtttgtggaatgaactggtaaggcaacaattggatggctactatttttttgcttctcttctttggggttatattgatatccggcgtaatgggtggtattttttttttcc

SEQ ID NO: 194268 - DNA, 404 bp, Gossypium hirsutum
tagctgtatcccgttcttttggcgacactcgatttaaaacggaagaagaatgaaatgctgaagaagggagttgaagaaaagagatggtctgaaaaatttatttcacgtgtagtgttcaatgatgacttggtcatagcatctccagacacttttaaagtagctcttggatcagatgcagaatttgtcctgttggcatctgatggtttatgggattacataaacagttcggacgcagttgcttttgttcgaaatcaattacgagaacatggagatgttcaggtagcatgtgatgcacttgcacaagccgctctggataaaggctcacaagacaatgtcagcattatcatagctgatttcgggcatactgaatggcagaaattgccagttgagcaacagaattttct

SEQ ID NO: 194269 - DNA, 516 bp, Gossypium hirsutum
gaaaacagtacgaaaacttccaagaattcaacatttatatgccccagttgactggtaacctgggaaaggaagatgatgagtttgagatcttgtcttctctccacccaactccagcggtttgtggacttccaaaagaagctgcacgcctcttcatttcagaaactgaaatgtttgaccgagggatgtatgctggaccagttggttggtttggaggaggagaaagtgagtttgcagttggtataaggtcagcattagtggaaaaggattctggagcattgatatatgccggagctgggatagtagaacgcagcaatccctcgtcagaatgggatgaactagaactcaagacatctcagtgcaccaagttgcttcaactggaggttccccggcattcaaacgttgagaatttggaaatcatttattaacaaggttagtgatttagggtagaaatatatgattcagcacgtctggagatttggtttctttttgtttatcaattaacaagtttttaaaatt

SEQ ID NO: 194270 - DNA, 464 bp, Gossypium hirsutum
  unsure (1)..(464): unsure at all n locations
ctaaagccccccaatttttatttctctagccgatataaaaacgctgtaggactgaatatcgcctccaacttcctcccttacttcccgaggtgctttagctattgagttcagttgacaatggcatctttgcaagttttgcatgcaacaaatctgaagcagtcgccattgcaagggtttcttccactctcatcccgttatgctgtggctgcgcccctgaaatcgactgttttgtcgaggacaaagaccataggccagaagaaccaaaagagatcttttacagtggttgcagcagttggcgatgtatcagctgatggtaccaactatctgattgctggtgcaacccgtgttgctctgggtggaactgctttccctatcttcttctctcgcaaggacacatgtctctgaatgtgacggngctggctttgttcgtaaagctggagcaacattgaggccaaatgctgcac

SEQ ID NO: 194271 - DNA, 431 bp, Gossypium hirsutum
cccaaattctctcacgggttccactgcggttatcttcaaagtactagtaaaagattagaaggctaaagcagtgagagggggcgcagcaatcaaaaatcaaatcgaatattgcagagaagaatagagaggaaagagaaggaaatggctttaaatggaaatggttgctgttggattcaggagcgtattttaagtagaaatggatgtagtgtgttcctcactcccaggagtaggtcttctgctgccattttgccccgcaagtcaaccgctctctccttttcctcttcctttcaattccaaggatttgtggtggataggaagcagagctcctcctctatgcaaacggctgcagtccgccatttggtgggatctgttaccaaaactcaaggccttcgctttgctgtggttgtcgctcgtttcaatgagattgtgac

SEQ ID NO: 194272 - DNA, 1524 bp, Gossypium hirsutum
ttattcccaacccaccatgtcacctgcaggggccgccctctgcttcctcctcctcctcttctccacctcaaatgcacacaacatcacacgcatactcgccaaacaccctgagttctccaccttcaaccactacctcaccctcactcacttggcttccgagatcaaccgacgcgaaaccattactgttctggccctcaacaatgctgccatgtcatccctcttgtctaaacaactctccctctacaccctcaagaatgtcctctctctccatgtcctcgtcgactactttggttccaagaagcttcaccagattaccaatggaactgctttgacttccaccatgttccaggctagtggcgccgctcctggttcctctggctacatcaacatcactgatcttaaaggcggaaaagtcggcttcggggctgaaaacaacgatggaaatatcgatgctgtttacgttaagtccgttgcagagattccttacaacatctctgtcttacaaatcagtcaggttgtgaattcagctgaagctgaagccccaacggcggagccaagcaagcttaatctaacagagataatgtcaaagcaaggatgcaaagcttttgcagatttgctgatcgcttcaggagctgatgcaacatttaacgaaaacatcgatgggggtttaacggtgttttgccccaccgaccctgttattaaggatttcatgcccaaatacaagaacttgacagcatccaagaaagcgtccctgctgttgtaccacggcgttcccgtgtatcagtccatgcaaatgctggaatccaacaacgggattatgaacacattggccactgatggagcaaacaagtatgatttcaccattcaaaacgacggcgaggtggtgacattggagactaaagttatgactgcaaagattacagggactttgaaggatgaagagcctttgattgtttacaaaattaacaaggtattgttgcccagggagttgtacaagccagtggaagcaccggctgagtcacccaagccatccaaatccaaatccaaatccaaacacaagatagccgatgcaccggaatccgatgcaccagcggagagtgatccagctgatgatcagacggcagacaatgacaatggggttgcaggactggacggtaggagattggtgatggggatgctgagcctgtgcattggggtattgctgatttgaatacactgatatagaaatatttatcagattgatacaaatggtatgggagacaatactttttaggccattggataacgagaaatggggtccttatttcatgtgagagatttgaaattttctttttcttttaatttctttggtggtttgtgagcaaaagagcaataagtgatgagtcccacttgcatggggtcattttctttattcttttttatttattcccgtttgtcattattagcttgtaatgtatagaataggttacattgcatcttggtttgagctggaaatgcaataattcttttttggtttcttttttc

SEQ ID NO: 194273 - DNA, 595 bp, Gossypium hirsutum
caggattccaccatcagtggatgaatcaacctttcggaggcattttgaggagtatggtgagataacagatttatacatgccgaaggatcaagtctcaaaagctcaccgtggaattggctttatcacttttgctagcgcagaatctgtggagaatctgatggctgatgctcatgaactgggtggttctacagtagtagtcgtccgcccaccccctcgggaagatgacttaaagccaataggcagaatgtcacagggggggtatggtgcatacaatgcttacatttctgctgccactaggtatgctgcagttggtgctcctaccttgtatgaccatcctggccccatgtatggaagaggggagtccagccgagggatgggcaaaaagatatttgttggcagacttcctcaggaggccactgctgatgatctgcgtctgtattttggtagatttggccgtataataaacgtttatgttccttatttcatgtgagagatttgaaattttctttttcttttaatttctttggtggtttgtgagcaaaaagagcaataagtgatgagtcccacttgcatggggtcatttctttattctttt

SEQ ID NO: 194274 - DNA, 410 bp, Gossypium hirsutum
cccacgcgtccgggcctcactcgccaacacaaccgcaggtgccgttgccggcgcccggaaaatttccaacggaaaacgtattcccatcatttcttccaaatccctctcctttccctctttcaggccttccatttcctcactgaaacccttaatccccaccaaattctcctctctttcccctctccaatgctcccctaatccctccccttctacctccccgccttccctcaaatctcgcctccgcaacggcgaaaccctctacggcatcttcctcctctcattctcccccactttggctgagatcgtcgccttctctggctacgacttcgtagtcatcgacatggaacacggccccagaggaatccatgagtccctccaaatgctccgcgctgtcgccacgaccaacaccc

SEQ ID NO: 194275 - DNA, 313 bp, Gossypium hirsutum
  unsure (1)..(313): unsure at all n locations
cccacgcgtccgcccacgcgtccgccttttctggatgaactttcagacttactcatcgacaaagaggctatttcctagatgcatgctatgctgccattagtgccgcaatgttcttcttctattcatatgttgcgatctctggagggaacccacccccaaagaagatgaagctttctgctgctcattaatcatggccatcttaattatatgaatgttgggtccctttgtgtaatgatgtagtttgacttgacctgagattacaggctaatgggcattgtgttatntatcaaacaaactggtggctagctacaag

SEQ ID NO: 194276 - DNA, 439 bp, Gossypium hirsutum
cccacgcgtccgcccacgcgtccgcccacgcgtccgaaaaaaggtttaaaaactctctcaaccccttttatgtccggcccaactccggccgtggtccaatcatcggaccgacgtcgtccaccgcgccggccaccatacacggtggccgaaaatcgaaagaaggttggggaagaagtcaacgaggtaggtggccattttggtgttagcgggctaggggagccgaccctcgagtgaagaacgtgctgacgaggcacgtgggcgatagcagggaggcacgacgctaaagggtggctaaggtttcctttgctgaaactagtttaggtagtgggcttatcgggcttagggttattttaattttgggcctattgggttgtaattttggctgggtttaattgtgtttaatgtttgagttgatgtaatgggcttattatggtttagt

SEQ ID NO: 194277 - DNA, 1269 bp, Gossypium hirsutum
  unsure (1)..(1269): unsure at all n locations
aaaaaacaccccttcactgatctttgagtccaccacacaaaaatcaaccatggcagcagcagccagagtgatagccatcgccggcaactccaccgccgccgcgtcttcctgcttgcttatcaaaacaccgttcgctttacaacgctgcagcaacggacttagattcaacaacgtcagacgatcatcgaaaagattgttttcttgcaatgccatttataaccctcaggttcaaatcaaacaagaaggccaacccgaaactctcgactatagagtcttcttcgaggatacttcgggcaaaaagatttctccttggcacgatgttccattgcacttgggagatggtgtttttagcttcattgttgagatacccaaagaatcaagtgctaaaatggaggttgctactgatgaactttacactcccattaaacaggatacaaaaaagggcaagcttcgatattacccctataatataaattggaattatggattgcttccacaaacatgggaagacccatctttggcaaactctgaagttgaaggagcatttggtgataacgaccctgttgatgtcgttgagatcggtgaatcccggaggaaaatcggtgacattttggaggttaagcccctggctgctttagctatgattgatgaaggggaacttgactggaaaatggttgccatttcattagatgatccaagggcttctcttgtaaatgacattgacgacgtcgagaaacacttcccggggactctcactgctgtcagggattggtttagggactacaagatccctgatgggaaaccagccaacaaatttggcctcggcaacaaggcagcaaacaaggattatgctcttaaggttattacagagaccaacgagtcttgggctaaactagtcaaaagatcaattcccgccagagagctttcgcttttatgaatgctaccagaagcattagagcagcaatgctttcgatttcaaataatcatccgagtttttccccctttcgggtcctgataatagtacgaattgataccaatgcacttgtttctgcttattatttgagtaaattagtgaactccttgaacttggatagtatttcatgttcatatggttgctctggtgtggattaataagaaaaggcgtacatgggaatgactttcctctgcttttttttttttttttataaatatataaatatataatattataacataagacaatancacgaaacactcanatttcatggtccatatccaagtaaccaacac

SEQ ID NO: 194278 - DNA, 932 bp, Gossypium hirsutum
ctttctcgtccgttcatcccgttgtcattagtttctgttactacttcactctccctctgtcttcaagaaatggatcgtagaagtgcatttgcagttgctttgatttgctttgtggtgaccgctgtcggtggtcaatctccggcagcctcacctactaaagctccgccggccgcgactactcctgctactgctactgctcccgctactgcccctgttagcaaacctaaatcaccggctccaactgctgcccctaccacttccccaccaacttcttcaccaccggctgcggctccggagaagtctgcggcggttccagccccatctaaatctgctccggcttcttctcctccggctgctgctccggtgagttctccaccggctccagtacctgtgagctctcctccagccaaatcgcctcccgttgctgcaccgacgactccaccagagagctcggcctctcctccggctcctgttgcggcaccaactactgctgaggttccggccccagctccaagcaagagcaagagcaaaagcaagaaatccaagaaacaccatgctccggctccttcacctgatatgcttggacctcccgctccaccaactggagctcctggacctagcctcgatgcttcctctcccggtccatctgtcgctgccgatgagagtggagcagaggcaatgaagaacatgaagaagataattggagggttggcgttgggatgggcagccattgctttgagcttctagattggttttgatcacattccacattctgcgttgtaattctttggttggtgtactgagaggcggaaactctagttttatttttcctctgtaatttccactattctggttatagatgtgcaattacccgaagtcatgactttaaaattcgatgatataagaaatatacataacgccattactattct

SEQ ID NO: 194279 - DNA, 448 bp, Gossypium hirsutum
gcccctgccatcgcttatcacttaattggaccagttcattgcttacaacagatgcgagacttaatgaatgaacaggttcaagatctactagggcaaagccacttcattggacatcatgtttaaagatagcagaagatgttgcagagggccttgcctacatccaccaagcatcaaggcttttccatggcaacttgaaatcgtccaacgtcctccttggttctgatttcgaagcttgcctcgccgactacagccttgtgctccttgcagactcttcttgttttactgaagatcctgattctttagcctataaagcgcctgagattcgaaaatccagccgccgactaactcccaagtcggatgtttatgccttcggtgtgtttctattggagcttttgacaggcaaacttccatcacgacatccggtgcttgtgcctcgggacatgctgga

SEQ ID NO: 194280 - DNA, 414 bp, Gossypium hirsutum
tcgccacgcgtaccgtacgcgtacgatgagcatggtaggggggttttcgtctttcatctacaaagaattgggatctaggttaggcattatgttttcccgtttatttttggtagcagctggcgcccagttttgataggctgttggtaaaaaaataataataatggaagggacttcttggaggcggcggagctcacagaggaggaaacgacgtggaactgctttcaaaactcttcaggtggaacacaggctgttctacttcgatctcaaggagaacccacgcgggcgttatttgaaaatcttggaaaagacattggccaccaggttcaccatcattgtcccctcctatggcatttcttggttcctggaccttttcaatttttacgtaaactccgacgacaacgacctttttagcaa

SEQ ID NO: 194281 - DNA, 457 bp, Gossypium hirsutum
cccacgcgtccgatttttttttatattctatacaaaaacaaaactccatgcggcgaaatggcatttatcaattcttttctgtatctgtgcgttataaatataaatgcaaatttgagtgtaatgtttcttcttccgttcatacgcatgtcatatttcatacattccacatatattatatggtatatggagttagataaaatgtcatgtgagtcactcaacagaatagaaattacaattccatcattattagatcgattcgtaggattcgatgaagattgaaaaaagaatgggattattttgagaaatgggaaattcaaaatgcttggggatgaaaatggcgaaatgtctacaatacctgggcagaatcagatacaatttgaaggaattagtgggttcatggatcggagcttaacagatgaactgtataagtttacaaaaattgaagatacagatcaag

SEQ ID NO: 194282 - DNA, 368 bp, Gossypium hirsutum
  unsure (1)..(368): unsure at all n locations
caaagccatggggagttgagtctgcaaggagtgcttacgccaagctaggtgacgatgccactgctcagttgctggacataaggcctctcaaggagtctagagatgttggtagccctgacattaagggatttgggaagaaaccggtgtcaattgcctacaatggtgaagataaaccagggttcttgacaaaactgtctttgaaattcaaggaacctgaaaatactaccttattcattatggacaaatttgatgggaattccgaactggttgcggagttggtcactgcaaatggattcaaagctgcttatgcagtcaaagatggtgctgaaggaccacggggatgggtgaacagtggtcttncctggata

SEQ ID NO: 194283 - DNA, 401 bp, Gossypium hirsutum
cttatttgttcgtcacatctcaagcatgggacttcttctccgacccaactgttgagataaactcattctatttaggaggtggtattaatggtgttattacagatttcccgaagacatctaatagatatcggaggaaccgatgcttgaacagaggcaatcaaattcctggctacatgagtcccgtgcaacccggaagcctttatcaactaatcacagctccttacttgccaccagctgaagccccaaatccgttcctgaccgaagcagatgtcaccgagccccctttgcctcctgtcgctgcaaaagccccaagtacttctccaaatggtactgcacttgccccaacatcaccaaatggacaacctaaagttgctgcatccgccatcatgcagctattgact

SEQ ID NO: 194284 - DNA, 447 bp, Gossypium hirsutum
ttacgtcacatgctcgatttggattctccactctcacggctgtactttgcattaactattgggacaggtccttaagtacctttcagtttcaaagagataatccttggatgatccaactactggctgtcacttgtctctctttggctgcaaaagttgaagagacacatgtgcctctgctcctagacctacaagtggcggagacgatgtatgttttcgaggccaaatctatccaaagaatggagctttcggtgctctccacactgaaatggaagatgcatccaattacacccctttcatttctagatcacatcataagaagacttgggttgaaaacccacctccattgggagtttcttaagcgatgtgagcatctcctcctctgtgtaatcactgattcaagacccatccattatcttccctctgtattggctactgcaaccatgatgc

SEQ ID NO: 194285 - DNA, 648 bp, Gossypium hirsutum
ctctctctctcatatctctctgtttatttattttttttgttttccttttgtcgtccttttctcacctgttgttcttccattttttaatcaagttccccccaccccgctcaacacctctccctctaacaagccaaaggccccaagcagattctatttgttctaacatggagaaaagccatgaacttgaactgacccagatgaggaaatcagtagagaaacttgggttttcaacagagaaatacggggatccgacactcatgagattcttgattgcaagatcaatggacacagataaagcttcaaagatgtttgtccagtggctgaaatggaggtcttctttagttcctaatgggtgcgttgtagaatctgaagtgcctgaccaattagaagccagaaagatttttttgcaaggtttgtcaaagacaggatatccagtgatgattgtccaagcttgcaagcattatcctcccaaggaccatctccagttcaagaagttcgtggtttatctgctagacaaaaccatagcaagtgccgtccaaggaagagaaataggaaatgaaaagttgattggcgttcttgattttcaaaatattacatacaaaaatgttgatgcacgtggattaataactggatttcagttcttacagg

SEQ ID NO: 194286 - DNA, 452 bp, Gossypium hirsutum
ccctcgcgtccgattgaaccaaagaaaagacatgggagtttcaggcactttggagtatttgtctgatttaatgagcagtagtggtcataagcacaagaagagaaaacaattgcagacagtagagctgaaggtgaggatggactgtgatggttgtgaactcaaggtcaagaaagccctctcttcattgaatggagtgaaatcggtgaacataaacaggaaacagcagaaggtgactgtaacgggatatgttgaagctaacaaagtgttgaagaaagctaagtcaacagggaaaaaggctgagatttggccttatgttccttacaatctggtggctcaaccttacgctgttactgcttatgacaagaaggcacctcctggttatgttaggaaagtagacaacaatgtaagcagcactgctaccgtcactagatatgaagatccttacatcacca

SEQ ID NO: 194287 - DNA, 605 bp, Gossypium hirsutum
tagtaattgaaccaaagaaaagacatgggagtttcaggcactttggagtatttgtctgatgtagtgagcagtagtggtcataatcacaagaagagaaaacaattgcagacagtagagctgaaggtgaggatggactgtgatggttgtgaactcaaggtcaagaaagccctctcttcattgaatggtatatacatatatttcttccttttgatctcctttctttttggggggtgggggtggaggactgaaatgtaatgtttttttttttgcaggagtgaaatcggtgaacataaacaggaaacagcagaaggtgactgtaacgggatatgttgaagctaacaaagtgttgaagaaagctaagtcaacagggaaaaaggctgagatttggccttatgttccttacaatctggtggctcaaccttacgctgttactgcttatgacaagaaggcacctcctggttatgttaggaaagtagacaacaatgtaagcagcactgctaccgtcactagatatgaagatccttacatcaccatgttcagtgatgaaaacccaaatgcatgttctgtcatgtgaagctgcaattttatattactatttctttttg

SEQ ID NO: 194288 - DNA, 452 bp, Gossypium hirsutum
aagaaaccgatttaccacccttttgcctttgttccatcgatttctagagcttcatggctgaaaccgcctggaactccgccccttctacctctaccaccgccgaggcgccagcgcctcaagaaaccaaaaagaccaccgaggcaccagtaagatgggccgatttggaagacgaagcttcggaagaaccgagcacttcatcggaagacaaaggtgcgccggaactcggagttgaaaacctaaaaatcgatgaaagcaaaaagatcaacaagttcctcgacgaacccgaggactccaacatcaaagccgtcacatctggggagacaccatacacttcagcatttacgtttgaggaattgaatctgtcccctgaattgttaaaagggctatatgttgagatgaaatttgaaaagcctagcaaaatccaagctattagtttaccgatgattttgacg

SEQ ID NO: 194289 - DNA, 342 bp, Gossypium hirsutum
gccacagctaccaaaatttcccaaactaacttttaaagcaaacaaattttacctttactaaatggcccccaaagctgagaaaaagccagccgaaaagaaaccggcggaggagaaaaagaccaccgttgccgagaaatccccggcggagaagaaaccgaaggccggcaagaagcttccaaaagaaggcggtgccgccgctgacaagaagaagaagaaggccaagaagagtgtggagacttacaagatctacatcttcaaggttcttaaacaagttcaccctgatatcgggatctcaagcaacgctacggggataatgaacagtttcattaacgatatctttga

SEQ ID NO: 194290 - DNA, 922 bp, Gossypium hirsutum
ttggacgcgtgggtgctgctgcaccaccaaaggctgtttaaaagaaaccgaccgacaaacccgccgcccagccggtggaagtgatcgaaatcagccccgatgtcgaagaaattctggaagtgaaggagaaaaaggagaagaaagacaaggctgaggtgattaacaacaataagaaggtaactcaaaaagagggttcacccaagaaaaaacatactttttcttcagcccttactgcaagaagcaaggctgctgctcatggaatagctaacaagccaaaggaagacattgttgatatcgatggagcagatactgataatcatttggctggtgttgaatatgttgatgaaatctacaagttctataaatcagctgagcatgagagcatgccaaatgattatatgcacttgcaaactgatatcaatgagaaaatgagagctattctcattgattggctaattgacgttcatcaaaaattcgagctttcgcccgaagctctttatcttacgatcaacttgatcgatcgcttcctttcagtgaaagtcgtcccgaggagagaactacaacttttaggcatgagtgctatgcttatttctaccaaatatgaagaaatttggccacctgaggtcaacgatcttgtatgcattgcagacagggcttacacacatgaacagatcctcataatggagggaacgatattgggacgattggaatggactttaacggtgcctacacattacgtgttcttagcacggttcatcaaagcatcgatccctgacccgaagatggaaaacatggtgtatttcttagctgagttggggataatgcattacgagaccattaggtattgtccgtcgatggtggctgcttcggctgtgtatgccgcacggtgcaccttgaagaagacaccagcttggacagacac

SEQ ID NO: 194291 - DNA, 1008 bp, Gossypium hirsutum
gtccggcccggtatcccctcgaccgcacccacgcgtccggaaaaaaaaaaggtggggagagggtgtgacagagagagaaataattcaatttggattctagtcggaaagtcaggaaaaatcacttcttcaaagtttaagggacttttaagggttcaattcagctccaactttctccttcgctgcttttggtttatggttgtcgataccgctgcttgaaatctaaccaccctacactgcacgaggggtgcttaggatatcggagcattagaccatacagaaaacaggaaaatagtttgggtttttagcaaaaaaaaaaaaaatgagggatgtgcattttagcagagagaaggcaggaaaaggagtggtgctattttttttctggatgctgagtttgatctcgctatcttgcgcggctaggctaagtgtgtcgagacagaagctccaagtgcaaaaccacttgaaccgtttgaacaaaccggctgttaaaaccatccagagtccggatggggatattatagactgtgttcacctctctcgtcagccagcttttgatcatccttttctcaaagaccacaaaattcagatgaggcctagttaccacccagagggtctttttgacgagaacaaggtctctgacactgagaaacccaaaaagggctcgaaccccattactcagttgtggcacatgaatggtaaatgtcctgatggaaccattcccatcagaagaactaaagaagaagatgttttgagggcaagctcagttaaaagatatggtaggaagaagcatagggccatccctcagcccaagtctgcagatcccgatctcatcaatgaaagtggtcatcagcatgcaatagcatatgtggaaggggataagtattatggagctaaagcaaccataaacgtttgggaacccaaaatacaacagcctaatgagttcagcttatcccagttgtggattctgggaggttcttttggtgaagatcttaatagtattgaaactggttg

SEQ ID NO: 194292 - DNA, 338 bp, Gossypium hirsutum
cccacgcgtccgattttcttcaatccctgtctttatatgttatgacctcttcacaaccacctggcatgcaccacctctttccctctatctcatccaccttcaatccattagtttgcttgtattttcacctgttcgatggaaccaacatagcctaagtcccgaaacctcgaccagttcatgaacgaagtcgccccgcctcggtttatctcggtttccaagcgtccattgacgacaatgttggccaccatagccgaggaagaaaaagatttcaacgacaatgaggtcgttaaaggacgacgaacatattcgtcgtcagtgtgtggcaaagctgctatatg

SEQ ID NO: 194293 - DNA, 395 bp, Gossypium hirsutum
aaaatttcttggttttcctcccaaagcaacatgatgttgcaaacagcttgcagctcgttttgcatggctgttgaatgttggcaaccagaaagatggactgttcccagcatctttctcatttctggttgccatatagggaatttcactcttgtactcattttggaaggcgaggaaaccgatggctcctttaccacctggtccccgtgggttgccaatcctggggtatcttccatttcttggattcgataatctccatctggtctttacggagttgggtggagtttatggtcccaattacaagctttggcttgggaacaagcttaaccgaagtaatagctttccatcgcttggaaaagagtggttcgtgaccatgatatagcttttcagagcgagac

SEQ ID NO: 194294 - DNA, 285 bp, Gossypium hirsutum
ctcgaagcccacaccctttctattggacgctcgctctgtttcctctttcgcatcaaagctcagcagccatgtctcagcagccggatacgaagcctttgactgaagaagagctcgaacgaaggaaaaagaaagaagaaaaggcgaaggagaaggaactgaagaaacagaaggccttagaaaaagctgagttagccaaacttaaggcacaacaaggatcgaatgctccaaaaaagagtgcaaagaagagtgccaagcgagaggcagatgatgagaatccagaggatt

SEQ ID NO: 194295 - DNA, 461 bp, Gossypium hirsutum
tttagaaaaaggctaaacatcagttgcaaaagcaggtatgggaagaaaagcctggagatgaaaagagggatgtagcaacaacaaatggtgatttgatcaaagaagccaatccaattcctcactcgaacggccttctttcagaagatggttcaggataccctaaacagtgaagaactttttatcaaacggttgctaacattttctatggatccccttagggatgtgtttgtggtcttgtaaaatataatgaatgcttggtggttttttactggctttagaattttattatagattttacagtaccatgggaccatcttcaaggggatataaagtgaataatccaaggcggggttgggttgggggggttggtgtttatttaagtaattcttggttttcttttgagtttttttacttatttacttgatgtttttagtttctttttttttgtggtagcttttttt

SEQ ID NO: 194296 - DNA, 368 bp, Gossypium hirsutum
ggtcgacgacgcgtacgtccgcggacgcatgagggcaagggcaagggcaagggcaaaattttcgacctttataattcgttatgtgcaggcaatacgaatttttgggagcttttgaagaaggcaatggcttctctgttcaaggacccagctaagctttcagcgtaccgagacagaagattcaatggttcgcaagaggaattcgagcaagcgctcctcaattcgacaaccgtctacatcggaaacatgtctttttacactactgaagaacaggtttatgagcttttctcttgacccggggaaattaataaaaatattatgggccttgtcaagaactctaaaacgccttgcggcttttgctttttctttgt

SEQ ID NO: 194297 - DNA, 442 bp, Gossypium hirsutum
ctttttgttaatctctctgcctggaactgcaattaaaaactgtccattgacactgttctcgtttttttctctatttgaacaagcatgggtttaggccataaaatcaggaccggatatgcgaagctcagctttctttcgagactggctcgtcagtctcatgatgctaagactcttccagcattgccctgccaaatcatgaagcaagatggagatagactacgatcccttgcactctttggggcaggggtctcagggcttttgggttgtgctaccatagcttattctgatgaggctgagcatggtttggcggttcctaactatccttggcctcatcaaggcatactaagctcatatgaccatgcttctatgcgtaggggtcaccaggtctaccaacaagtctgtgcttcttgtcattcaatgtctctaatctcatttcgagatc

SEQ ID NO: 194298 - DNA, 997 bp, Gossypium hirsutum
aggaaacaactcaactaaatcgagaaggcagtcgggactggtcccatacttcaacaggacccggagcaaaaaagtgcatgctagtactagtctcgctccaaaatatgaagttgcgagtgttgcacctccaaagagtccggagaaaatcaagcccaagccatcaccaaaaaggaagatgtctaagaagtcaaccagggagagaaatctttacaaagcaaattatttccatgcatgtgagagtcttctttctttgatggtaaataagcaccggcatggcaaaatggcaattctttccctgaagaagtctggccctgaacttcctcaacttttgacccaattctctgctggcattgccgggactggtcttgctgttgtcttgtctgttttctgtaaggtagcgtatgcgagagccccattgtgtacatctaacctctttagcactagccttggtttcgggctagtttggctctcctgggcagttaacagactgagggacacgatcgtacatatcagcaagaatactggcaagttggatatgaaggaaaaagagatgatttagagagttgagaaaagtgttgatgacatctacatcagagctgcaacgttgatggctgcagcgatgttaaggtttgtatgaattctgaagatataactcatttggataaccatctggactggctgagtgtttcagcaacagaaaacattgacatctatggtcttgtgatgaccttgagctcatatgagcaggacctcagcatctgccagcttgtatatgtataataatcattaagcgctatgaatggagaagagggtgaaaacctttcatgtattttggtgcacgaattgtcattgccggacataaatgggtgggagcggattagtagaactggtactaatctttaatatattcttcttcatgcaaagaaaaatgactggttatggtgttcacgttccaagagggctacaatttttaaatgtcttgaaatgctgtttgatt

SEQ ID NO: 194299 - DNA, 519 bp, Gossypium hirsutum
ggaaacagcaaaagccccagtaaaaagaggcaattcgatttggtaggaggtttcctttttggatgggaaagaatgcaagttttgagaggcggaattcgacaatcgaagaggatcaacgacaatccagagagctctgcttccttagttccgactgctcggaatgctgctgctaatagaggtagaggtagagggagaggtaggggtagagggcgcggaggaatgaatcctgaagaaaatcaaaagcttgttggtcccagtgcttgtggccggggttgcaatggaataaacttgccagtgagacaggtcgttgaaaaaagtgcagaaaaaccggttgctgtcaaggaagaaggaagcactagttcactacctgaaagggtacaacttggtaactctcctgtgtacaagttagacagaaaactcggtaaagggggtttcgggcaagtttttgttggaagaaggatatctggtgggacggggtgcagtggaccagatgctttcgaggttgctttgaagtttgag

SEQ ID NO: 194300 - DNA, 283 bp, Gossypium hirsutum
gcacccttccgtataactaaattgaaataccactactttttcaacttttttcttcccttagcctccatttctccgagcacattcaagccaccagctgatatgtgaagttggaactgggaatggcggttcgatcggtggaacttcaccgttaccggcgtcgttatcaaagctattgattaagggaggaactgtggtgaatgctcatcggcaggagagagctgatgtttatgtagaggatggtattattgttgctagtaagcctaatatcaaggttggtgatgag

SEQ ID NO: 194301 - DNA, 1502 bp, Gossypium hirsutum
aacccataaaagaaaaccccctttcttttctccatttcacactaaaaagattatatctttttgtattttttttttgttagctttcatttcattggagcatcaatggcggattcaaaggggtacatttccaaaacagagcttgaaacccacaaaaaaccagatgatctttggatctcaatccaaggcaagatctatgatgtaactcaatggagtcaccaccaccctggtgggccacttccattactgaacctcgccggtcaagacgccaccgatgctttcatagcttatcatcccggcatagcttggcaatatctcgacaagttcttcactggttattaccttgaaggttacttagtctctgatatatccaaagattatagaaagctagctgttgagttctcaaagatgggtctttttgacaagaaaggacatgggacatgtattttacttaccatcatagcattgctgtttttcatctgtgtttatggtgttttatgttgtgacaaaacttgggttcatctctgttgtggtgggttaatggggtttttatggatacaaagtggttggataggacatgattcaggacattacactgtcatgtctaataaaaacctcaacaggttggctcaacttcttacagggaattgtcttgctgggatcagcatgggatggtggaaatggacacataatgctcaccatattgcttgtaacagcttaaattttgatccagaccttcaacacatgcctttcttcacggtatcttcaaagttctttaattcaatcacatctgcattttatggtagaaaactgaactttgattctcttacaaggcttttagttagttaccaacattggacattctaccctgtcatgtgctttgctaggatcaacctatttgcacaatctatcatcttgttgttgtctaaaagaaaagtccctaacaaaggtcaagaaatttttgggatacttgttttttggacatggtatccattacttgtctctctcttacctaattggtacgaaagagtaatgtttgtggttgtaagttttgctgtgaccggtatccaacatgttcagttctgtttgaaccatttctcgtcgagtgtttacgtcggcccgccgaacgggaatgattggttcgagaaacaaaccgacgggacgcttaatatattgtgttcgtcttggatggattggttctatggtgggttgcaattccaagttgagcatcatttgttcccgaggttgcctaggtgccatttacggacaatttcaccatttgttaaggagttgtgtaagaaacacaatttggcttacaattgtgcttctttttggaaagctaatgcaatgacaattgagacacttaaatcagctgcattacaagctagggttcttaccaatgctgttccaaagaacttggtgtgggaagctgtcaacacacatgggtgacaactattttatgaatatgcttattattattattattatcgccataaatttttatg

SEQ ID NO: 194302 - DNA, 468 bp, Gossypium hirsutum
  unsure (1)..(468): unsure at all n locations
ggtgattctgcacgagaattttggtttcaaacacctcctaagatcggtccagatgttccttacaaatttggaatcattggtgatttgggtcagacatataattcactgtccacccttgagcattacatgcagagtggagcacaaactgtcttgtttgtaggagatctttcttatgctgatagatatcagtataatgatgttggtataagatgggattcatggggtcgctttgttgagaaaagtactgcatatcatccttggatctggtctgctgggaatcatgaaatagaatacatgccttacatggatgaagttgtcccttttaagtcctatctccaacggtaccctacacctcatttgtcttgtaaaagcagcagcccaatgtggtatgctattagacgtgcatctgctcatatcattgngctatcgagctactctccatttgtgaaatacacacctcaatatgag

SEQ ID NO: 194303 - DNA, 571 bp, Gossypium hirsutum
cccacgcgtccgcagaaactgaattaggtatctggggcacattttcttgcccaccacctttacttgagtctgttgatgcttttatccagtcaccaccaccaaccagcatagcagagtcggatagcctttcaccccgtaatagtggcctgctggatgctttacttcacgaggcaaaaactctaagcagcgcaaagaaccatgcatctgagaagagttcatattcagctactcccggtgatgtagctgaaagttccaccttcaacatctgtgagacagaatgggaaaactgtggtgagcctctttcttcaatgggtcattcagcaacttctcttttaagtgagtgtatcactgcaagtggcagggcgttggatgaacagccacctgctgaaacctttactgagtctcatgtgaaatcagagccagctgactatgttttcaccccagagatacaaaatgaggctcctattcggttggacagttgtcaccctgatacattacttgcttttaatgggcttggagcaagattttggttacaataaggaccaaaccatcttgaccgattccatagttg

SEQ ID NO: 194304 - DNA, 788 bp, Gossypium hirsutum
ccggtcgacccactgcctgcgccagccctacagacccttttctcgttgtttcactcatgcgcttcgaaaatccattaccagcgaaccatatagagcatcagtggcggtggtgtgcagcgttggttgcggctgtggtagcgtcagttttcaacggtgcgagtctttaatgctctcgaatcctacatcttcaaaaccgagaacgtccaacatctttgcaacgacgccggcgccctcatctatgcccgttggcggtggcagtctccaatcattgcaaccagaacgatcatcgtcaaagaacaaacgcatggggattccgtacgagaaaatggacggctggatgagagattcagtggctgagattgtaaaaaagttacccgaatcgccactcttgatccacgtctactctgaaaacgccacgatggaaacaacggcggtggaagaaaactgggtttcgatgaaacagaagtggaagaaaggggaaagagctatgcccgatggggtgatatttgttgatcaaatacaaggagttgaagaaggaacatggggcattgtggttcaaagtaaaagtgaagaagaagatgatgggtgtggatcaggaccaggatcagaaccagtaccgccagcttgctatctgttgaagacgactagtgaagtgggttcagggttggggttaaggtgcacccatttttgtttggtgaaggttagtagttttagagaaagtgctttctcacagctcaagaattgttggcttttgcagggaaattgaagaccttgtggggggaattgaa

SEQ ID NO: 194305 - DNA, 341 bp, Gossypium hirsutum
cccacgcgtccgcccacgcgtacgcaatcttctcacaaagcagagtagcagcagcaaaacaacccagggggccctccaagcgcccactatctccataaaaccatctaattctccacttgctcctacacccaatgctggcctgcggccaccctccgatcgttttgctttgaaatcatccttcttttctccatcgctccatctcttgctttcctcttccccaccagcgccgtccaactaatactgcctcacctgcaccaaagttttccatgcgtgtggcctccaagcaagcttatatttgccgtgattgcgggtatatatataatgagaggactccctttgag

SEQ ID NO: 194306 - DNA, 646 bp, Gossypium hirsutum
  unsure (1)..(646): unsure at all n locations
gccacttgggtctatcagactccgttgaagagaaaaacgatctttttgttcttggcactgaagatggtgttgatgaggaagatgatgataaagatgatgatgcagatgagagtgagggactaactggttttcaaaatatattgcaagatgtggttcctggtgcaaaggtcaaggtcgtgaaggtcacttcccctgggaaagtagaccaagatggtgtatccaaggtgattgagcagataatagatgaagaagatgaagaaaaagatgctgatatagaaagcttagaagtggatgatgaaattaagagtgataatgaccaagagagaggtaaaattgagatggatgcggataatggagttatggatagtgataggcaaagtgaatttgcagttaaagttgtggttggtgggtcttgtacaaaagctttctggcaatggttcctgcattagagtcccttacagtgcctgctaagctagtgaaaaaggggcacctagctttttcattttcttttagaaagggacgtaagccaacaagatactagtctcaggcaaagggtttgatagatagaaagcanagggtcaggtcaacgcacgcagatgaataatgatgatctgctaattatcgcagaagagatccttgaggtctc

SEQ ID NO: 194307 - DNA, 1069 bp, Gossypium hirsutum
cttttacatcattcatttctggttatgtaagtggtggaatgtactcacgcaatgggggtaaaaattggataaaggctatgatccttacagcatctctgttcccatttatgtgctttgggattggtttcatcttgaacacaatcgccatattttatggatctctagcagcaattccttttggtacaatggtggttgtttttgtgatttgggctttcatttcattccccttggcccttcttggtacagttgttggaagaaattggagtggtgctccaaataatccttgccgtgtgaagaccattcctcgcccaattccggagaagaaatggtatttgaccccctctgtggtgtctttgatgggaggacttctgccatttggcagcatattcattgaaatgtattttatcttcacatccttctggaattacaaggtttattatgtatatggctttatgctgctggtcttcctgattctcatcattgtaactgtttgtgtgacaattgtggggacatatttcttgctaaatgctgagaattatcactggcagtggacatcgttcttctctgctgcctccacagctgtctatgtgtatttgtactccgtatactattaccacgttaaaaccaagatgtcaggcttctttcaaaccagcttctacttcggatacactttgatgttttgtcttggcttgggaattctctgcggagctgtaggttatcttggttccaatttattcgtacggaggatctatagaaacattaagtgtgactagaacattgctgtcggaaagtagaaccatcagcacttctgcgagaattctagttatcgaggcaataagtgctgagaggaagctcctgatcaggtacaggggaacccaacgaagcctatatattcaatcacggcctttgacggtaacatgtattcctggtaccatggaacaaggaaagccctgagattttggtttggttctgatataattattagtattattggattgctcttgctgtaacttggaggcctggattggtagaatttaaatagttgtgtataattcagaaacttgcttaa

SEQ ID NO: 194308 - DNA, 401 bp, Gossypium hirsutum
  unsure (1)..(401): unsure at all n locations
acgcgtccgcccacgcgtccgcaaatttctattttttataatacaaaaaatgggctgcacttcttccgaaagcagcgtcgccgccgtggatttctaccgtccgccgccgtcaagctttgcggtgttcgacatcaacgccatagatgaaccgtgggttaaggtggaccaaaccccgtcggagaaccaagagaagcccacacatgttcctgctgcgattctcgagaaactcaacgcctttgaaactgctcctcactcatgggatgaagttagcaaagcgcttgaagatcttaaacccaccattaacaacgagaacaagaaaccccaagctccaaattcgcctcaaaaaccaccaaaacaagttactcagctncagcctcgtaagaacttaagttttcatactt

SEQ ID NO: 194309 - DNA, 957 bp, Gossypium hirsutum
cccacgcttccgcccacgcgtccgctttgggtgacgcgggtggaatgaattggacacttggttgtttgtttttgatcggtcattgcttgtcttggtctggttggctagtgttacaagcaccggtgctgaagaagtacccggctagactctcggttacgtcctatacatgtttctttggtctcattcagttccttgttattgctgcggtttttgaaagggatgctcaagcttgggtttttcactctggtggtgaactcttcactattctctatgcgggagtggtggcatcggggattgcatttgctgtacaaatatggtgcattgacagaggtggccctgtcttcgttgctgtttatcaacctgttcagactcttgttgttgctattatgtcttcccttgctttaggtgaagagttctatttgggaggtatcataggggcagtgctgatcataacgggattatatttagtgctatgggggaaaagccgagaaagaaaattcgcagctcaagaaaaagccgcaattcaatcgtcaacggcggagcacggcaacagcagagcatcgagccatatcaaaacatcccttactcagccacttttgccaccttcaacggaaaatgtttgacccctaaagaaaattcctaaactttcaaccattctgctttgctgcaaaaaatgaaagaaacaaatggggaaaaaaccaagcactaccctatatcagaaagtttgtgtgtgtatgatttttttttaatttcttttctttttctttttcctttttaatttagtcgtcaatggctgttctctgagtagcagagagggtttttgaaagatgatgatgatcactgtcacagctgtgtatgatggcttatggggggccctgaaattctccatatgcttttttatatgttagtcttatggttcgttttaaagataaaaagataatgcaaattatcaagttt

SEQ ID NO: 194310 - DNA, 730 bp, Gossypium hirsutum
aatttttctcttttgataaagctgacaaccctgaaagcaacccaaaagaaaaaaaaagaaagaaattatatccgttttgatcacaattcacacagcgcgagccccgttatagaatttgtcttaaaaatacaaaagggtttgagaattttcagttttgtttatatgtttgaaaaatgggggtcttgtgttttttttagtaaagatttgaagagagattcatttccaattccagggacaaacaatctggaataaacccatgttgtgttatgaacacaacaagacattattctatacaaaaacataccacaatatgattcacatttttgttgctttccttcttgtttccacttcgcttggccctgtcttgtctttacaaccagtaccggattccggtcaccggcaactacagaactgtactttaaaccctcacaaagatattcagaagctaagaagagtccaagcttatctcaagaagataaataagcctgctgttaagaccattcagagtccagatggtgatgttatagactgtgttccgtctcatcttcaacctgcttttgatcatcctcagcttaaagggcagaaaccattgaaaccggctgtgaggccaaaaggacataacttaacagaagcagtctctgaaagtttccagctatggagagatacaggtgaatcatgtcctaaagggacagttccaattagaagaacaactgaacaggacattcttaga

SEQ ID NO: 194311 - DNA, 525 bp, Gossypium hirsutum
cccacgcgtccgcaattatcaactgttgcgatttcttttcttcgcctctcctgtttcttgctcctaaaacatatagtcgcctgcttcgaacttagttgagaaagatagatgcttaggttaaatgtttattgttctctaaatattcctattccggaacatattaagcttgggagtagtgatggttcaggcttacctaagttccgtggtggacccaagctgcctcgtcgggtttcagtcagggcgttaaaagatgagatggacggtggtatgagcggcggctttcaaggccggagctgggaacctggcttggaaattgaggtcccttttgaacaaagaccggtgaatgagtactcgtctctgaaagatggacctctgtattcatggggcgaactgggaccaggccaatttttccttcgactaggaggactctggctggtaactttcacggttcttggagtcccaatagcagctgcaagctttaatccttcaagagaacctttaagatttgtgcttgcagctggaaca

SEQ ID NO: 194312 - DNA, 447 bp, Gossypium hirsutum
gtctgagtggttggtagcgcgacggacactcgtagaaccctagtatatcggcggttgccatcagcggactggcttcgtgcacaaatgggtacttaagtttgattagcctggcgtgattggtcgtgtcgttgtgggcacggttaacgtgaccgctgagaaaagtaacatgagaacttgtatgatacgctgaagagttacgtcgtatatttcagcggggttcggctggtgacttgggagttttactgcggttgcggcacggctgaatggtgtcgggtcgtatggcctagtttgccgttagacctcgtgtcggtgtatgcgatgacgatgaggggtttggtggtttggatcgtgagattaatgacgttgagtgtattagattaattgatactgctaattgcttggggttggacattatgctcggttgtacggtcgccggcatcggttggt

SEQ ID NO: 194313 - DNA, 530 bp, Gossypium hirsutum
agggtgcaccgggtttctcagacgtacgtcgtgagtgggggttagcgcgacgggcacccggagaaccttagtatatcggtggttgcctcagcggactcggactgacgcgggtgagcagattggtacgatgcggttggggctacagttccgacttgagtctggcattaagtccgacgtacagtccgagcacctcacagcgctattcaaacagtccggtgcaactacggctacagtcgcccttcgcgcgaaaccgccacttgtctataaccttatataatacatgagttggaagtacaaagcgcaaagttcggggcgttcaacgagcgagtcaatctataccaaccgtgccgtgtctatcgtttgtcccttagctgggaaattcgctgcgttagtcgtaccaacgaactggttaatgtgtggggagaggtggcccgtgcaccgggtgtctccctgtccttctgtctatcgatctgtcgtgtctggctgcctggtcgtggtgagtggcactagtctatctaaaggtggcaaca

SEQ ID NO: 194314 - DNA, 665 bp, Gossypium hirsutum
cttgttttctcagctcagttcccatggctttcgcttcggttttccgtaaatcagctaacgcgttggctccactcgcgattcgactcacccgagtccagaggaactaccactcttcgatcttcagggctttgaaccatgggttacagtctcagaaaccggccgttaaccgtttttacccaaatagcttccatttctctaccgccgttgcttccaagaaaccctcttctgatgagtctctcatccgagttcttgagtccgagattcagtttgctgagggtgatagctctgagcaggttgtaggaactcctagtggattcccttttgaagtcgaagataaccctgggactcaaactgtaacattgacaagagaatataatggtgagctcataaaagttgatgttcacatgcttgatcttaacgaagacgagcaagatgaagatgaagttgaagacaaggatggggataataccaatgctagaatcccgttcgttgtcaccgtttcgaagaaagatggtccgagtttggagttcagttgcactgcttttcatgatgggattggaatcgacagtttgagttttagaaatcccaaccctgaggatgatgaacttgcttatgaaagccctgatttcaatgatttggatgagaatttgcaaaagggtttttac

SEQ ID NO: 194315 - DNA, 715 bp, Gossypium hirsutum
  unsure (1)..(715): unsure at all n locations
tcgcccacgcgtccgcccacgcgtccgctttttcccaaatagccatggctatggcgatggcgggaactgcaaccttcagtatctcatcagctacttcaatcttccggacttcatcttcacttaaattctcttcaaaaccagtgcttattccaatgcgtttttctccaaaaacccaatctcctcccagaactctccggatttacgctttgactagtaacgatatcaaagtgggtactaaccttgaagttgacggtgctccttggcgaattttggagtttcttcatgtgaaacctggaaaaggggctgcatttgtgaggaccaaaatgcgcaattatatcactggaaacactgtggagaaaacgtttcgagctggaagtacgattgaggaggcaaacgttttcaaggaatcgaagcagttcacatacaaagatggttcccagtttgtcttcatggacctgaacacattcgaagaatcccgtctaaatgaggcagatgtaggtgacaagacgaagtggttgaaagagggaatggactgcaatttgctcttctggaacggaaagattattgattttgagctccccatcacggttcagcttactgtggtcgacgtcgatccangtctcaaaggtgacactgcttcaagtggatcgaancctgcaactgttgatacaggcgcagtggttaatgttccgctattcgtaaacattggtgatga

SEQ ID NO: 194316 - DNA, 804 bp, Gossypium hirsutum
tatctaagcctataaacaaaaacccaagtcaacaaaacccagaaatgaattaaagttttttttttcaatagcttttgtccgatttaatataaaaacgtaaaaggaatgatttatttcaatgtgggttattgtttatattataagatgtttgatagctgaaagttgattatgtcgaagcgaggacgtggagggtcagctggaaacaagttcaggatgtcactgggtttaccagtggcagccacagtgaactgtgctgataacactggtgctaagaacctttatatcatctcggtgaagggaatcaagggccgtctcaaccgattgccatctgcttgtgttggagatatggtgatggctactgtcaagaaagggaagcctgatctcaggaagaaggtcttgcctgctgtcattgtgagacaacgcaagccatggcgcagaaaggatggtgtttacatgtactttgaagataatgctggtgtcattgtgaatccaaagggagaaatgaaaggttctgccattactggtccaattgggaaggagtgtgctgatctgtggccaagaattgcaagtgcagccaatgccattgtttagggatttgaatttttctagagttttttgttcccttgagtcatggctttttgctggatcaagattttgttatgtgttttttagggtttcttgaaaaatatcgtatggatagctttgatttggattttgatgctgggatgtagttaatggatttctcccatgtttaagcttattatttcctttttctttgaagatcttgctgatcttagccatatt

SEQ ID NO: 194317 - DNA, 539 bp, Gossypium hirsutum
ttttgaaaatgtcgaagcgagggcgtggaggttcagctggtaacaagtttaggatgtcactgggtctgccagtggcagctacagtgaactgtgctgataacactggcgctaagaacttatacatcatttcggtgaagggaatcaagggccgtctcaaccggttgccctctgcttgtgttggagatatggtgatggctaccgtcaagaaagggaagcctgatctcaggaagaaggtcttgcctgctgtcattgtgagacagcgcaagccctggcgcagaaaggatggtgtttacatgtactttgaagataatgcgggtgtcattgtgaacccaaagggagaaatgaaaggttctgctataactggtccaattgggaaggagtgtgccgatctttggccaaggattgcaagtgcggccaatgccattgtttaggaactcacattctgggctttgggcttctatattatagtccaaagcacagattttgttgtatttctttttggatttgaagaaatgtgctttatggacaggttttccgat

SEQ ID NO: 194318 - DNA, 439 bp, Gossypium hirsutum
agatatggtaatggctactgtcaagaatgggaagcctgatcttaggaagaaggtcttggcttctgtcattgtgagacagcgcaagccctggcgcagaaaggatgttgtttacatgtactttgaagataatgctggtgtcattgtgaacccaaagggagaaatgaaaggttctgctataactggtccaattggaaaagagtgtgctgatctatggccaaggattgcaagtgcagctaatgccattgtttaggaactcacattttagtcattgggtttctctgcatgggactaatatagtttgctggatcaagattttgtttatttttatttttccttcagaacatcatttcgatggtatcttttgatttgatcttgattttggagggtaaattgtagtttgtggagagttttttaatgtttactggtgttttcattttct

SEQ ID NO: 194319 - DNA, 309 bp, Gossypium hirsutum
gccggtgtcattgtgaatccaaaaggagaaatgaaaggttctgctataactggtccaattgggaaggagtgtgctgatctttggccaaggattgcaagtgcagccaatgctattgtttaggaagtcaaaatctgtgctttggactataatattatagtttgctgcttcaatattttgttgtatttctttttggatttgaagaaatgtactttatggacaggttttccgatataagagaagaaaatttttgttggcgtaaaaaataaatatgaagatttttgtataaattcaaaaaaaaataaagggtgg

SEQ ID NO: 194320 - DNA, 716 bp, Gossypium hirsutum
cccacgcgtccgtttagctgcggcttatataggcgaatccatggagggtcatcattgactagtttttgtttttgaaatagtctagcccttttttagcttagcttggtccaatccaatgtatgcgcaactcaagataatctacttacttagggaccataaatatacaaatacgacgatctagagtaataacaaaaaagattacgatattagagaattgtaataaaaaaaggaaagagatctaattgaaaagatctttttcctaaaattcagggttggtccattttttttattacttatatttatatcatatttaccttcgatcaatattatccgatcaatattatctttatcttgatattgtttttgtttattcaatttcaatattatgagtcctaattagaataggaattcttatggtatcaatttagggtctatgattttaaaaaagctgttctttatatagatatagaatgattcccatttcagtcgatttcttcattcaattcaatgattgaccaaaagaaatttttttttttcataaataataaaataaattgcatgaacttagctcaatcaaatactgatattgatgttttatttgtatgcaatgatttggtctaatgaattcgtccatttagattgtatccatgtgagataacgctcaataaaaaataaaaggaagagacgaattaacattacaaaaaacgatataaaaa

SEQ ID NO: 194321 - DNA, 826 bp, Gossypium hirsutum
gttcgccggcgaaggtaaaaacaagagcgactcgcctgaagcgacgtcgaacaattcaagtgcaaatctccagaaggcagtgaagagtgaaccggctgagaccgagtcgtctcagccgttaatttccgatccaacggtggagaaccggggtatcaagagaaaagaccgagaaaaggtgaaagggcagacgaagaaaagcaaaacaacggcgaaagagagctccgacgacgccgagaagctgccttacgttcacgttagagctcgccggggatcaagcaacggatagccatagcttagctgagagagcaaggagagagaagattaatgcacgtatgaagctcctacaggagttggtaccaggatgcaataagatttcgggcacagcgttagttttggatgaaatcatcaaccatgtgcagtccctacaacgtcaagtggagttcttatcaatgagactcgctgcagtgaacccaagagttgatttcaactttgatagtgtattcacggcagaaagtggattttttatggacagtaacttttctggcatggttatgcctatgatgtggcccgagattcaactttcagcaacctgtttgggggagagaagaagtctgcaataattacttaactccggagaacttgcttttaagctatgattcctctgcaaactcagtgtcgttgcactcaaatcaattgaaaatggagctatgaagtccgaaagaagctccaaatggttagatgtatcccagaaaaaaaaaaagttcttatgatagctagtattgtgtgttttttagccgcctctccggatggacccccggatcttccc

SEQ ID NO: 194322 - DNA, 484 bp, Gossypium hirsutum
  unsure (1)..(484): unsure at all n locations
tatgcctgtgatgtggcccgaggttcaactgaacagcaacagacaacagtatccgcagcggttggattttgatgcatttcagcaacctgtttgggggagagaagaagtctgcaataattacttaactccggagaactcgcttttaagctatgattccgtctgcatactcagtgtcgttgcactcgaatcaattgaaaatggagctatgaagtccgaaagaagctcgaaatggttagatttatcaaaaaaaaaaaaaaagttctaatgatagctagtattggatatatattatatatatcagaaattagcagggaagtagaagagaggcctcaccatatatatatatcatttggtttccatgtgttctatttagccgacttcaaatggaaaccttcgatttgtaaggactggagcatgaaatctcagtatggtggtattatatatatantgtatatactaactcggagtcattcaatcaaatact

SEQ ID NO: 194323 - DNA, 972 bp, Gossypium hirsutum
cgtacgcgtgggggctgccatcggtgatttgaggttgccttctacagcttcgttcaatgcttcttcagtttgttcgagccgtaagtcatcggctccttggagcttgtcgttctcggcgtctgctctgtccggtgataaacttgttttcaaaatagctactggttgtagccgaacggaacggactgcttcaattgtttcaccgaaagcagtttcagattccaagaactcgcagacatgtcttgaccccgacgctagtcgaagtgttttggggattattcggggaggggggagcagggacaaggctgtacccactaacaaagaagagagcttagccggctgttccattaggagcatactataggctaatcgacatccctgttagcaattgtttgaacagtaacatatcaaaaatctacgttctgactcaattcaattctgcttctctgaaccgccacctttcccgcgcttatgctagcaacatgggtggctacaagaacgaagggttcgtcgaggttcttgctgctcagcagagtcctgagaacccgaactggttccaggggacagcggatgcggtgaggcagtatttgtggttgtttgaggagcacaatgttttggaattcttggttcttgctggggaccatttgtatagaatggattatgaaaggtttatccaggcgcacagagagactgatgccgacatcactgtagctgcattgcccatggatgaaaaacgggctactgctttcggtctgatgaagattgatgaagaagggcgtataattgaatttgctgagaaaccgaaaggggaccaacttaaagctatgaaggttgatacaacaatattaggtcttgatgatgtgagggcaaaagagatgccttacattgctagtatgggcatatatgttgttagtaagaatgtgatgttggatcttcttagagaaaacgcttccggtgccaatgattttggaagtg

SEQ ID NO: 194324 - DNA, 450 bp, Gossypium hirsutum
caaaccctttaattcaaatgaaccaaaattttgatttttgctagggcttcatttagcagccgccaaaccatcatctaacttgatgatcgatggtgcactagcagtgtccagatcttgccaacgaaggccacgcccatagagatctggtaagctattctttctttttaaaaaaaaacctttaaatccaacattattcttaaaaaacgtagcaaaattcgaagggaaatgcttcaacaccattcgaccctcgcccgtatctccatacttctgagatatttgggcttgcataggtatcgtttcaggtatttttccatttttctcatgcgaaatattgcaaacaaatcgaaaaaaaggaaagaatccaaaaaggaatatgaaaacacctcttaaaaattgctttcgaaatgctcttttttgatatcttgtgtgcgtaaccttacaaagatgaaa

SEQ ID NO: 194325 - DNA, 993 bp, Gossypium hirsutum
  unsure (1)..(993): unsure at all n locations
ttcacgcgtccgcccacgcgtccgattgaaactcgctcaggtccataaacaaaggaaagcaaagagaaagaagcttttcatttcaagggttttagcaatggcaaccaatacgcaagagcagcaatctcaggctggtaggcaccaggaagttggccacaagagccttttgcaaagtgatgctctttaccagtatatcctcgagaccagtgtgtatccgagggagcctgaacccatgaaggagctcagagagttgactgccaagcacccatggaaccttatgacaacatcagccgatgaaggccagttcttgaacatgcttcttaagttgatcaatgccaagaacaccatggagattggtgtctacactggctattctctcttagccactgcccttgctatccctgatgatggaaagatcctagccatggatgttaacagagaaaactacgagctgggtctgcctgtaatccaaaaggctggtgttgcacacaaaattgatttcaaagagggccctgctttgccagttcttgatcaattagtggaagatgaaaagaaccacggatcctttgacttcatctttgtggatgctgataaagacaattacctaaactaccacaagaggctaattgagctggtgaaagtaggcggtttgatcggctacgacaataccctatggaatgggtccggtggtagcaccacctgatgcgcctctcaggaagtacgttaggtattacagagacttcgtcatggaactcaacaaggctcttgctgttgatcccaggattgagatctgcatgctcccggttggtgatggcatcaccctttgccgtcgcgttaaatgaacaaccctcaccaccaccaaagcttgacccacctcttacattcggcacaaaaaagttgacacccaccttctttttctttcctcatctttatattgggtatgtntatttttatcataatgtcacggtggttggatgattgaagaatgccata

SEQ ID NO: 194326 - DNA, 575 bp, Gossypium hirsutum
  unsure (1)..(575): unsure at all n locations
cccacgcgtccgcccacgcgtccgcccacgcctcccccactccctggttatcattgagaagaagaaaatcagagatgggtttcacagagaagcctgaagggttggtgaaagaatcatgggagggtttgaagccagatattcctcacttcagcttgcgtttcttttcactgatattggagatagcaccaggtgcgaagaacatgttcagtttcttgagggagtcagaggagattcctcaaaataatccaaagctcaaagctcatgctgtcaaggttttcaagatgacatgtgagtcagccatacaactgagagagaaaggggaagtggtagtggctgatactactttgaagtatttgggcactgtccatgtcaagagtggtgtcaaagacccccatttcgaggtggtgaaagaggcactcttaaggacaattgaagaagcaattggagaagagaaatggaatgaagagatgaagaatgcttggggtgaagcttatgatcaattggctgaagctattaaggctgagatgaagaaccaccatgatgaaactgcttaattacccttttacttncttcaa

SEQ ID NO: 194327 - DNA, 1151 bp, Gossypium hirsutum
  unsure (1)..(1151): unsure at all n locations
gaaaaaccggggcggccgacgcgtccggaaatagtgaaggtgaacgcttcatttgttgatatgctcctacagccaangatctttgttcaatggatgttggtgggcgatctataaccatggaaatcatggaaggtcgtggtgtaggacctttgaaggatcatatctatctccacttgaatcacttgcctccagaggtgcttaaggagaggcttccaggtatctctgagactgctgccatttttgctggtgtggatgttacgaaggagcccatcccagtcttgcctactgtacattataacatgggtggaattccaacaaatcatcatggagaggtagttactatcacaggcagtgatccagattctgtggttcctggactgatggctgctggagaggcagcctgtgcatcagttcatggtgctaatcggttgggtgcaaattcccttcttgacattgtcgtctttggtcgggcttgtgcaaaccgagttgcagagatccaaaggccagggcagaagcagaaacctttggaaaaggatgctggtgagagaacaattgcatggttggacaaaataagaaattctaatggttctcttccaacttcaaacattcgattaaatatgcaacgagtaatgcaaaacaatgctgctgttttccgcacacaggaaacactagaggaaggttgtcagttaattgataagacatgggaaagcttccatgatgttaagttgaaggatcgcagtttaatatggaactctgatttgatagaatctatcgagttggaaaatcttttgataaatgcctgtatcaccatgcactccgctgaagctaggaaagagagcagaggagcacatgctcgtgaagattttacgaaaagagatgatgagaactggatgaaacacacattgggtttttgggagaatgagaaggtgagactggattaccggccagttcacatgaacacattagatgatgaagttgagtcattcccacctaaagctcgtgtctattaaaactcgtgctgtaatgcaaatgggttatgatgatccgacaattcagcccggcataagttatggagaacaaagatgcaataaaattacttgtaagcatattattttggcaatattcttgtgccattcatcaatcttggaact

SEQ ID NO: 194328 - DNA, 381 bp, Gossypium hirsutum
accaacccctctccccctaaaagaaaatcaatacctgcgaattgtcttagctggttcttgtttggttgttgagaaaatgcaagaaagtaaagaccctgggatcaagttgtttggtaagaaaattcatttacctgctgatggagagatttcaactctctctgttgatgaattcgacaaggctcagtgtgggaacagagtagtagatgatgaagactatgaagaatttgatgatgatgatgatgatgatggtggtggtggtgatggtgatgaagaagaagatgaacagaaagacaaaacagagctggattctttagcagaacagattgctgatactggtctagaagatgacaacatccagccgttctatagagaggtattaac

SEQ ID NO: 194329 - DNA, 439 bp, Gossypium hirsutum
  unsure (1)..(439): unsure at all n locations
cccacgcgtccggttgatttttctttaatttctcaattctcaattctcttctatggtggtagccaccaaaccaaagcatggctatctctctaagttcagtgttcgggtttaatttaaagtatgtctcgagatcctgtattggaggagcttcagtacttaaggccaaccccagtgtatctccctttcaaatgtatggctcggggggacgtgtacaccaaaaaagaaggggcttatgtctttcagttgaagacagagaccgactagtcgcgaatagcagcataaaggattctggtgatgctgagaagctggtttctgatgatcgaggtttggccgtgaatcccccatcattggataatgaatcgcgctcccctacctctgagcctagtaatggttcaatggtttcttcaactccgatgcangaggcctcatcacctccaaa

SEQ ID NO: 194330 - DNA, 442 bp, Gossypium hirsutum
gggctgaactggaagtccggagtaccgccggaaaatcgttctgggatttcaaattgacctaagagctggttaaaagaagaatggataggctatcgaatgcgttttcgttgctggatattgatgtggacgatcatcatcccccaccggcttcatcatctgcttccaaaccttcaggtaagagcataaacaatgggaagggcccaactgaactgaaaccggcattgctttcggaaaactacaagttaccccttgtttggattgacttggaaatgactggtttgaatattgagactgatagaatattggagatagcttgtataattacagatggctatctcaccaaatcattggagggtcctgatctggttatccatcaatctaaagagtgtttagatagaatgggggaatggtgtcaaaatcatcatgcagctagtggattgac

SEQ ID NO: 194331 - DNA, 618 bp, Gossypium hirsutum
acggcttgcaagtttacagaatctggtgcttataatgtttgaggacgatacagttttgataccaaaagaaacagcctggttcagttattttccagacggtgctttcgaacctgtattgcctgtacaagcggtaaacatatacataactgttctataagcaaagtaaaactaaaacctttcgttttggtattgtccggatttgtttgcttttctgcaggccaagctctataaggaagattggatcggtttgaaaactttggatgaagctggaaaagttaaattcgtaaatgtctcgggtaatcacctacaaatctcaacaagcgacatgaagaagtacatggtaccatatttggaggaccaaacacctgcaccaacagggcagacaccgacagaagcttcatcgtatcaatggatttcaaaagtcgggcacttttttaaagacttaattggtctgagcgaagatcaacctttgctgcatattgtgtactaaaactgtaactttcttggggtacaatccacgttattattggttttaagccactattattaccatatatgtgaaagattttgacgttcttatcattttatgattatgataataatgactttcgtacaaaa

SEQ ID NO: 194332 - DNA, 735 bp, Gossypium hirsutum
cccacgcgtccgcacaatcgattttgccgccggggaaacaaacgtttcgactcggagagggagagatggtaatgtcaccggtggttaacacgtaccctttgtccagctacacctttggtaccaaagagccgaagatggagaaggacacgtccgtcgccgatcgccttgctcgcatgaaagtcaattacatgaaagagggcatgagaactagcgttgaagcaattttattggtccaagaacataatcatcctcacattcttcttctgcaaattgggaacacattctgcaaacttcctggtggacgcctgaagcctggagagaatgagattgagggtctgaagaggaagctgaccagcaagcttggagctaattcacctgctcttgtgccagactggcagattggtgagtctgtggccatctggtggaggcccaattttgagacaatgatgtatccatattgccctccccacattacaaaacccaaggagtgcacgaagccccccctcgtccacttgtctgagaaagagtactttgcagtaccgaagaatctgaaacttcttgctgtaccattgcttgagctctacgataatgtgcagagatatgggccagtcatatcaaccattcctcagcagctttctagattccagttcaacatgatcagtatatgactttggcacgggatgccaagattgtgaatctttctgctcgctttctgacagctacatcatgagagta

SEQ ID NO: 194333 - DNA, 540 bp, Gossypium hirsutum
cccacgcgtccgcaagcgttgaaatttaccgtgtttcatgtgggaatcaattggttcgtttccctttccgtctcagcaaccaacccgatcgttgtggctatccccggttcaatctctcatgcaaggaccaagcccatactgtcctttcgcttccattttccggagaattcaatgtcgtacacatcgactatttggtccaaagtatatggctcaacgaccctgatcattgcacccccaaacgtctccttcatggacttaacctatccagcactccttttgatttgctatatcctcgaagcttcacgtttttcaattcctccgccgctgcatcaacacaacttcatcaagcaaagtatatatcttgtctcagcggcacaaacttttatgacgtggctctaccggcagcccgactcgatacgactgcatcagtggcaacggctgagcatagcagatagcgacggttcaggatccgagatccggaacggattaggcgaatcatgggaatggtctgatgaagacatggactgaaccgaagcgcct

SEQ ID NO: 194334 - DNA, 671 bp, Gossypium hirsutum
gatacccatcatcgaagatgctagacatccggccaaataccggatgctagttggaatggtggatgtcatattttctgatgttgctcaacctgatcaggcgaggattctagctttgaatgcatcatttttcctaaaagctggtggtcattttgttatttcaatcaaggctaactgcattgactcaacggttccagccgaggcagtgttccagagtgaagttaagaaacttcaacaggagcaattcaaaccttttgaacaagtgacgctcgaaccgtttgagcgcgaccatgcttgcgttgttggtggttaccggatgccaaagaaacagaaagctgcaacataatgtttttgtagtcttgtttttaatccctaagtttcgtggctttggattaaaaatgatgaacatgttttgggatcgaacatctttcttttttgtactaaaaatcaaacttatttctactgatgaaaaagggctcttaattagacaaacaaagcacaagtatcatgtctcttatttttagagagggttcaatcattatttgagtttgggtttgacaataagtactattggggtatggaaatttctattgttcaaattggtactcgatattttttcattaggaatttagtctttgaatttgataattgattgaatttaattaataaaaaaa

SEQ ID NO: 194335 - DNA, 420 bp, Gossypium hirsutum
cccaaaatcaatggcgtcttcctcgtacaagaaatacgaaatcagaaagcgagatccaaaccctaaaaccaccgctttgttagtgatcgacatgcaaaactattttgcctccatggccaaacctattctcagcaacgcaattaccaccatcaacctttgccgagaagcttccatccccattttcttcactcgccactgccacaaatcccccgccgactacggcatgctcggtgagtggtgggacaacgacctcatcttcgacggcaccgttgattccgaactgatccccgagatcggacggctttcgaaacccgacgaggtggttgagaaaaacacgtacagcgcgttcgagaacacgcgactacatgagatgctgatggagaaaaaagtggaggaggttataatcacgggggtcatgac

SEQ ID NO: 194336 - DNA, 874 bp, Gossypium hirsutum
tccacgcgtccgcccacgcgtccggagcttgaaatatctctccgaattctccacctcttaacatagatttgatttctcttttagtcaagttatgtcagggaagagaccacgtccgatgatggggaaattgtctgaattattggtttccggcaaaaaacccggatttttggatgctgttgttacaagccctaggagtccactagatttgaagacaccatcacctagaagttcgaagagatatgatgttggtggggttggactagggatcgctgttgcactggataacaagtgtagtacccattcctgcaggcatactatttgtagctcaaatgtaattgttgtgaaatctggtgggaagaatttagagatggaaagcttggaggattttacgtatgtgactacccatggatctggcaagtcgtctacaaaggtgttttatgatggaggtgaagaaaggagaaaaagtaactgtgaaaccccagctccagcaccaagatttgtggaagaggttgcttacccaacttcagattttctcagttgttgtcacctatgcaggaaaaagctgcatggccaagacatttacatgtacagaggggaaaaagcgttttgcagttcagagtgtaggtcaacgcaaataatgatggatgagaggaaagaacagtgcagatcagaagtttcaagatctgcaagagtctcaacctcctcttatgagtctggggatatcttcttctcaactgggattcttgcaatttagcctccggtcctcatttgggctcttcctgcgtatgtaattatatctatcggagaaataccatatacctttatgaggattaagaataacttattaagaatataaaaaaagaaatttggtcgt

SEQ ID NO: 194337 - DNA, 370 bp, Gossypium hirsutum
  unsure (1)..(370): unsure at all n locations
cccacgcgtccggaaaacaattggttttatgagttgagaggatgaagcacgaaatatagggtgcgtatgggtgtttaaagcctaggaacattgtttcaattgttaatgggtttcttgatttggctcctatattgaaggaatgaaagctaagagtctttagggtctaaaaaaaaaataacgaagagaaatacataaacggcgaacgacgcgctaaatccagatactgagtacattcgcaaattaaattcacggacccattatgcggcttcaaagagtacttctttgatcacctagaatcnnnnnnnnnnnnnnnnnnnnnnnnnnnnnnnnnnnnnnnnnnnnnnnnnnnnnnnnnnnnnnnnnnnnnnnn

SEQ ID NO: 194338 - DNA, 442 bp, Gossypium hirsutum
gccactctaactgttttgatcagtttcgcaagtcattttcagatacctcctcgacaacaccacaaaatcctcaacaaggagctcaacttgtaaccacaaactctatcaccagttgtgaatgcaacttcagaatcaactgtctccgagttgcgggaagaaaggactgaggaaggtccctccaacccatctattgtctcatgtgaaaaccaggtgctcccaaaactagtatgccctctatgtcgtggtgaggtaaaagattgggttgttgtagagcctgctcgtcatttcatgaatgccaaatctagaagctgttcctctgaaacatgtaattctactggttcctataaagacctaaggaaacatgctagactagagcaccctgctgcccgcccatctgaggctgatcctgagcgacaacgaaactggaggaggttggagcgtc

SEQ ID NO: 194339 - DNA, 940 bp, Gossypium hirsutum
ctttttccctctttcgtgatcttcgatctccgttccttttcccttttgggtttaccatataatcttcgcaattgaatcaaagtgagaaaacagttatcgagcggcgtcgtaatggaagcacacggcgccggactccggcgagttttggtgttggcattttgcgttgccgggatttggtctgcctatatttaccaaggctttcttcaggaaactctgtccaccaagcgatttggttccgacgggaagaggtttgagcatcttgcatttcttaacttggcgcaaaatgtggtctgcttagtttggtcttacataatgataaagctttggtccagtagaagcaatggtggtgctcccttgtggacttattggagtgctggaatcacaaatacaattggtccggccatgggtatagaagcattgaagtacatcagctacccggctcaggtgttggccaagtcctcaaaaatgattcctgtcatgctgatgggcactctagtttatggtattcgatacactttccctgagtatatctgtactttccttgtggctggaggagtatctgcttttgcacttatgaagactagctctaaaacaattagcaagttggcacaccccaatgcaccccttggatatgggctctgttttctgaaccttgcatttgatggctttacaaacgctacgcaggattcaataactgcaaggtatccaaagacaagtgcttgggaaatcatgttgggaatgaatctatggggcaccatatacaacatgatttacatgtttggctggccgcatggtattggtttcgaagcagtccatttttgcaagcagcatccagaagctgcttgggatattctcctctattgcctctgcggtgctgttggccaaaatttcatctttcttaccataagtcgatttggctccttggcaaacacaaccgtta

SEQ ID NO: 194340 - DNA, 661 bp, Gossypium hirsutum
ctccaggcttaaggcaacagggagacaagcttgaaagccacacttgcacacgacacttgctcgtttctttctgacttggtgctttcagtccgtcctgtcgaaatttatttttcacttcttttgtttgtgtaagccttcaagccaagtgaaaatggagagcgtttttcactgatttgattggtggatcgggtctggttcttgctttagtttttttcttgcgcacttgaccatgggatggttgagtgccctattagagaaggccgatggatagacccaatatctatcagtactcgcgatctggggagtacctaggcaacttataaggcctctacattgagggaaaacctgctctacgtgaaaaaaaaagggaagttaacttttgcataacctctgttttattttccttgggcattggaacaatcacaagtgcaggaaataactggttgatataagaagatctctgaccatatggtcttaagttgagtatagtactcagcaacagtcatattcccctgactaagattgggactttctaatcaaacctggataatctaatagaaataaagggccgctctcaactaggcctaaactttggaaccacttgatccctatgcctttcctcattccttataaatggaaaagataattgctttgctttttt

SEQ ID NO: 194341 - DNA, 571 bp, Gossypium hirsutum
atttatagatgagtgatgaaacacagaagagccgattgtctgttttgagttctcataacccgtttgcctccggcatcttcccactcatggcttcggagaaagaagctgcccttgctgctgctccctctgattctcctaccatatttgacaaaatcatcaacaaggaaatcccagctaccgtggtgtatgaagatgataaggtcttagctttcagggacatagctccccaggctcctacgcacattttaattattccaaaatcaaaggatggcctaacgggtttgtctaaggctgaggagaggcactgtgaaatccttggctgccttctttatactgcaaagcttgttgcaaaacaggaagggctggaagatggattcaggattgtgatcaatgatggccctaaaggatgccaatctgtgtatcacattcatgtccacctcattggagggcgccaaatgaactggcctccaggctaaataaagaagttatagttgatataggtatttcatgataacttcaataacgaaagcctgcatgtgggctttcatcgatgatcaatggtatacgctct

SEQ ID NO: 194342 - DNA, 409 bp, Gossypium hirsutum
cccacgcgtccgccaaaaacgccgaaactctaggggagaaaatgggagaaggaaattctgtaaaatttcttttccttgaccgtgagaagggaaatcggtggtgaaaggaaggggaaaacttcatgttttcttctataatatatgttcctttgtctgtacttttcttttcttttgctggtccgaatggatgaaacaaatagggtggtcacttgcatggtgggagaggccatggatttggcatattaaatagttgtttcttcatattaagaagcttgagaggtgggagacggtcacattggtaaaggcgaggagaaagtctgtgctcttaacataaatttcgggaagaattcgatttgacaaaatcatcaacaaggaaatcccagctaccgtggtgtatgaagatgataag

SEQ ID NO: 194343 - DNA, 783 bp, Gossypium hirsutum
caacgctttccacatcatttctttgtcacagtgattcgatttgtcacccttgttcgaagagaagaagagagaagaagaggagcttaggttcgccacgactcggccggcgagcagcgtgatatcgaggctggaagaggtagccaagtcggtgaagttcaacgtgaagaaaagtgagtcaaaggtgaggttacagggtcaagaatgtggaaggaaaggaaaattagctattgctgctgacatatttgcagtgacgccattgtttttggtcgtggaagttaaaaaagacaacggcgataccttcgaatacaaccagttttgcagtaaacagctccggccggcgcttcaggacatcgtctggacttcaccagccgagaagccgacggttgcttgacgggaagtttcaagattattaattatctacatgaaaattgaaaaagaaaaaaaaatgagaaagagaggatgctatgttgttatcactcttattttatcaattttcatcctgtgttaaggtgagtttggataagtttggatagacggtgtgtttatctacaggtagtgtaaaaatagggcggtgagattagatattataatataagataaaaagtaagttaaacgctccgcatcgtacctgattgcctattcaaactcactcttaatagatttgtgttatgagctgtaggatttgtgtacgaaaaaaaaataaatttattaattaaataatatttattgtgttattattttttaaaatttttttattttttttgattgagtaaattgtttttt

SEQ ID NO: 194344 - DNA, 1150 bp, Gossypium hirsutum
agaacgtcatgcaccatttcgggaaccccaacttcgagcttatccgccacgacgtcgttgaacctttactcttggaagttgaccagatctaccatctcgcttgtcctgcttctccagtccattacaaatttaaccccgtcaaaactatcaagacaaatgtggtgggaacactgaacatgttagggctggcaaaaagagttggtgccaggttcttattaaccagtaccagtgaagtatatggagatcctctacaacatcctcagaaagtggcttactggggcaacgttaatcccatcggtgtccgaagctgctacgatgagggaaagcgtactgccgagacgttgacaatggactatcacagaggggcccggagttgaggttaggatcgccagaattttcaatacttacggacctcgtatgtgcatcgatgatggtcgtgttgttagcaactttgttgctcaggctttaaggaaggagcctttgactgtgtatggtgatgggaagcagacaaggagtttccaatatgtttctgatctggtggagggtctcatgcgtttaatggaaggagaacatgttggaccttttaatcttggaaacccgggcgaattcaccatgcttgagcttgctgaggtggtacaagaaacaatagacccgaatgcgaagatagagttcaggccaaacacagaagatgacccgcacaagaggaagcctgatatctcaagagccaaagagttacttggttggcaacccaaggtctccctccgaaagggtctccctctaatggtttcagacttccgacaacgtatctttggtgatcacaaggtcggcagcagcaccaccaccaccaacgactcatcatcttaagatggcctatatactcttctcacagacagagcgataaaaatatataatggttaagaggaaaagagcttgccgttgtcttttccctattgaaacaattaatattatagtgtatctttatgatagatgtgggatggacttttttattttttatttttgacatttatttgtttgccatctttgtagcttcaatatttcttgtccctttttaagagttgtagttttactgtgagctttccggatctaaaaaaggttgatattttccccaaaaaaaaagtcgacgcggccg

SEQ ID NO: 194345 - DNA, 894 bp, Gossypium hirsutum
cggtccggaaattcgccgtggtcgatcccacgcccgtccgagacacagtgttgcgtccgctgttctgctatccattcgaagaactgtgagcagccgcgcactattcaagcgcgaagcttttagtgttgtggacggcgtctccaaaatggatcacttttgtccacagcattacaatggtagagttcgttaaagcgcttgaacacttgcgccaggatctcaataaccgacccgaaaccaaaatgggtcttggaaactatgcctttagctagagtcatgggtgacatggtattgcttccaaacggcaaagttttggtcatcaacggagcacgttccgggtcagcaggatgggacttaggaagggacccggtcttaaatccagtgttatacatgcctgataatgaaatcgagtcacgattcaagatactaaacccaacaaagatccctccgatgtaccattccacagcagtattacttcgtgatggaagagttttagtgggtggaagcaatcctcatgcgtattacaactttacgggagtcctttaccctactgaactaagcctggaggcattctatccgggttatttggacgccaaattcaacaatttacgacccaccattgttgctcccaagtcaatgtccggaatcagatacagtaagaaattaaagattcaagtggtgattacaggtgaagtaactctaaacttgttgtcggtgacaatggtgtcaccagcttttaatacccattccttctcgatgaatcaaaggttgcttgtacttggaaacgaccaagttatggcttccgggaaatcaacatataagattgaagtgatgacgccaggttcgggtaacctcgcacctgcaggcttttatcttttgttggggttcatcaagaca

SEQ ID NO: 194346 - DNA, 1151 bp, Gossypium hirsutum
attttgaaaccagaaactaaaccatcgttttcataaagacaaaccactacaagcatcccacgcaagaccacatggtgtgggagtctcaaatctcaaagccttcattgcttctctcaccaagtcctttataaaagagttcccaaagctgacaagcagccataatatcatctgctaaacatatggcagaaatgtcaaccctttgtacatttcttttctcacttctactctttgcctcacatccccttatcctccccactgctgccgacggccggtggcagctgctacaaaaaagcattggcatctcatccatgcacatgcaactccttaaaaatgaccgtgttgttatgtatgataggactgatttcggcccatccactctgccattggcaagtgggaaatgccacaatgacccaaccaacactgctgtccaagtagattgtacggcgcattcagttgagtatgatgttttgagcaacaagttcagggctcttactgtccaaagcaacgtttggtgttcttcaggcgccgtcatgcctgacggtaaattggtccaaaccggtggtttcagcgacggagaacttcgggtcagggttttcagcccatgcgaaagctgcgactggcacgaaacaccaaatggattggcggccaaaagatggtatgctaccaatcatgtcttgccagatggaagacaaattgttgtcggcggccgagaacaatttaattacgagtttgttcctaaaaacatagccgccgacacgttcaagttgcatttcctgtcggaaaccaatgaacgaggagtagagaacaatctctacccttttgtttttctcaatgtcgatggaaacctgttcattttcgccaacaatcgagctattttgcttgattatgtgaacaacaaggtggtgaaaacttaccccaaaataccaggtggggagccaagaagctatccaagcacaggttcggctgtattgctaccattgaagaacttgacagccgccactattcaagctgaagttttagtttgtagcggtgctccaaaaggatcatttgtccaagcattacaaggtaagttcgttaaagccttgaacacttgcgccaggatctcaataaccgacccgaaaccaaaatgggtcttggaaactatgccttta

SEQ ID NO: 194347 - DNA, 934 bp, Gossypium hirsutum
cccacgcgtccgcccacgcgtccgcccacgcgtccgggtgattcttggaaaaccaaacgtttctgatattttcccggtgcttgcaaggtttgacatacagggattggagaaagagatgactaaaatcgttaattctttcgataagcttttcaactccatgattgaagaaagagagaactttagcaacaaattgagcaaagaagatggaaacactgaagcaaaagacttcttgcagcttctgttggacctcaagcagaagaacgatagcggaatatcgataacaatgaatcaagtcaaggccttgctcatggacattgtggtcggtggaactgatacaacatcaaccatgatggaatggacaatggctgaactaattgcaaatcctgaagcaatgaaaaaggtgaagcaagaaatagacgatgttgtcggttcggatgccgccgtcgatgagactcacttgcctaagttgcgctatctagatgctgcagtaaaggagaccttccgattgcacccaccgatgccactccttgtaccccgttgcccaggtgacttaagcaacgttggtggctatagcgtaccaaagggcaccagggtcttcttaaacatttggtgtattcagagggatccacagctttgggaaaatcctttagaattcaagcctgagaggttcttgactgatcatcaaaagctcgattatttaggaaacgattcccggtacatgccgtttggttccggaaggagaatgtgtgccggagtatctctcggtgaaaagatgttgtattcctccttggcggcaatgatccatgcttatgattggaatttggccgacggtgaagaaaatgacttgattggcttatttggaattatcatgaagaaaaagaagcctttaattcttgttcctacaccaagaccatcaaatctccagcactatatg

SEQ ID NO: 194348 - DNA, 378 bp, Gossypium hirsutum
ggaattcagtggacaagtgaggaagaagagaagttcaaggctaaggttatggaggcatatgagagagaggggaatccgtactactcaacagctaggctctgggatgatggtattatagatcctgctgataccaggataattgcggggctctgcatctctgcttccaggaatcgcccatttgaagataccaaatatggtgtattccgaatgtaaatggaatcattaacttgtcaatccgtactcttctaacctgaaaagaaaatatggaaaacaggaagactatgcaataaaaaattctggataataatgcaatgcatgtcaatgatcaataattccttggttcaaatgtaaaagtcctggtgtaagggttcaggtgcc

SEQ ID NO: 194349 - DNA, 1031 bp, Gossypium hirsutum
tgtttgcaaacttctctattgttggaatgaatgtgagtttgatggggaattctgggggcttctaccagatagcaaagctgagcatgagtccagtatcttgctttctggaagttgtttttgagaaagttcgctactcaagggatacaaaacttagcattctactagttctccttggagttgctgtctgcactgttactgatgtgagtgtcaacgtcaagggttttttagctgctgtaattgcagtctggagcacagccctgcaacaatattatgtgcatttttttcaacgcaagcattctttaggatcttttgacttattgggacatactgctccggtacaagctgcaagccttgtgttagctggtccttttgtggactattggttaacagagaaaaaggtctatgcctataactacactacggtatcaacgttcttcataatcctatcatgcaccattgccgttggtacaaacctcagccagttcatctgcatcggccggtttactgccgtatcattccaagtgcttggccatatgaagactattcttgtcctgattttaggattccttttcttcggcaaagaaagtcttaatctacatgtaatcctgggtatggtcattgcagttgcaggaatgatctggtatggtaatgcctcctccaagcccggaggaaaggagcgttggatttattcagctccaagcgacaaatcacaaaaaccagacaatttattgggttctactgaaacagacgagaaggtttaaaaattccaataccggttttacagttaataaggggtgagaataaaaaaaacaaaaactgagccttttacccaaaggattcgaattattacaaacttttccgttccgtttttaaattcttcctttgggtggcatccataatggttaatccattttcatgttcctttaattttataaatccagggtaaaaataatgccgttgataaaggaagcaaaatccccgttaatccaacaccgttttcttccaataatatttccttatagtaatttatt

SEQ ID NO: 194350 - DNA, 738 bp, Gossypium hirsutum
  unsure (1)..(738): unsure at all n locations
cccactcttcctagactccttgtttttgatacatagnaaaagcaccttaaataggtagaaatcaaaatggaaaaaattctgtgacaaaataaaaaaatgattcgacatagtaaagagaggtgagcacttacactatttattagaaacctagtaatttctttgcttacacttgttagcataggatttctaggagcagaaaaaatcgcctatgaatggatctttcttatagtcattctattaataagtttcattattttatatcgggaaataaataaaaaaaagaattggattcttttgttgctaatccattttttgttagtgattttggcttttatcttacgctctttcctatcccagatgatttccactttgctaggagtttctttggttttttgcttttcttcggactcgagtgggggtggacatcttcctctttcgagtccgggcccttccgctccagcaagctccaataattctgatgctgattctttcggcatcaatgttatattggagagttggccaacaaccgaaagcgaaagacagtcgtcagcctcagcagaaacgggcacgtcggtgaataagccagaatctggacgtgtgccgcctgctaatcaagtacctccccgggggaacgaagctggtccatcgaatcagcccccacaaggggtcccctatccgtatcaagaaaatcaaattatagggggggattcgatcctagcgatcgaacggcgccttttg

SEQ ID NO: 194351 - DNA, 402 bp, Gossypium hirsutum
tcttcacgcgtccgcccacgcgtccgaaaataaagtccatgtattttctctatgttttttcaggtcatatgggaaacaaggcaggaagaagaagaagaagaagaacaagaagattcaattttcaagcagggaaaccttcggcctcggaagaagcagcagagttgctggaaagaagctgcggcagcaccaccgcaggcgccggcttaagcggatggaaaccgaactggcaaagatgaaagcggagatgagggactcggctgagtccctaatggcaggtaaagtagaagctgatcaggctaaggctaaacttcaagtgctgaagttgaagcttttggcagtgaaggaaattgaagcttttctcatgggttttctttgacttaatggaagttaggaccttcatgt

SEQ ID NO: 194352 - DNA, 1136 bp, Gossypium hirsutum
ctccatttctcttcgtttcggttcttcctcttttgaggattacgacaaaccacccaaactgaccccacctttcctaatcgggaaactcctctcctctgtctggatttatctggaaaatacacaacccatatcgtaaatccaaatcttgctttgttttcctcccccccaatactcatggagatggaagcctcttcagctaatcaacgcctccattttgggaagatgggatatggatgccaacattataggaggagatgcaagattcgagctccatgttgcaacgaggttttctcgtgtcgccattgccataacgaagctgtgaacctgttaagtaacccttttgacaggcacgagcttgttcgaaaagatgttaaacaagttatttgctcggtttgtgacacagagcagccggttgctcaactttgttcaaattgcggagtcaatatgggagaatatttctgtgcaatttgcatgttctttgatgatgataccgagaaggagcactttcattgccatgattgtgggatctgcagagtcggaggtcgtgataacttttttcattgcaaaaagtgcgggtcttgctatgccattgccttgcgaggtaatcattcgtgcgtggagaactcgatgcggcatcactgccccatatgttacgagtacctcttcgattcgttgaaagatacgactgtgatgaaatgcggtcacacgatgcactatgaatgttaccatgagatgctaaagcgtgacaaatattgctgtcccatatgctcaaagtcggtgatcgatatgtcccgagcctggaagaggatggacgaagagattgaagcgaccctaatgccggaggattaccgatataagaaggtttggattctatgcaatgactgcgacgacactaccgaggtttacttccacataatcggacagaaatgcagtcactgtagatcttacaacacccggacgatcgcccctccagaactccctcagtgatgagatcatgatcgaagaaccgaagccggtgagctccggacttctaaaggtctgctcgttaactgtaaaaacggagatgaattcttcgaatttgcatatcatgtctcgatcatctcgatccatcatcgtcattggatttgattatatga

SEQ ID NO: 194353 - DNA, 1057 bp, Gossypium hirsutum
ttgaggcatcacattggtttgacatctacacgcatctgaattaattggacagcaacatattcatattttgcattactttactataaattccaactatctgacgccaatttatatcatcctcttcctcacatactaatcttcagtttttgccttcccaccggcttaacaccgcctttcagttttcatttcctctaagaaaaggattaaaatggcgaagaatatgatgcgagccgttcaatacagtaaatataacggaggcgccgctgatctcaagcatgttgaagttccggttcccagtccaaaaaaggatgaagttttgatcaaagtagaggcagctagtattaacccaatcgactggaaaatacaggagggggtagcgcgcccatttttacctcgcaaattcccccacattcctggtaccgatgtagcaggagaaatcgtacaagttggatcaggtgtccagagtttcaaagtcggggatacagttgttgccgtacttggtaatggaggtgcactagctgaatatgctgtggctaaggaaggttccacagttccaaggcctccagaggtatcagcccctgaagctgcagctttgccaattgctggcctcgcagctcaccagtcactcacccagcttgctggtctcaaacttgatggaaccggcccacaagttaaatgttctgggttaccgctgcttcaggtggagtaggtcaatatgccgtgcaactcctaaagctcgctaatgcacacattacagccacttgtggggctcgtaacatagatttagtcaggagcctgggggctgatgaggttcttgactacaaaactcctgatggggtggctctcaagagcccttctggtcgaaaatacgatgtaatcatccactgtgcacacaacattccttggtctacctttgaggctaacttgacttcaaaagggaaggtagtagataccactcctggtttcggcactctgatgagtgttgctttcaaaaagataacattcggaaagaggcaactcataccattgtttacctcacctaagaaagagaaccttg

SEQ ID NO: 194354 - DNA, 502 bp, Gossypium hirsutum
ggaaagaaagacattcatatttggattactttgctataaattcaaactatctgacgccaaaatatattatctgatccttctccaccttgtctttctcacagtttttcttgatttttgcctttcccagacttaaaagcttcggtttttattttcactttgaaaaacgaaaatggataagattaagagtatgatgcgcgctgttcagtacagtaaatatggcggaggagtcgccgatctcaagcatgttgaagttccggttcccagtccaaaaaaggatgaagttttgatcaaagtagagacagctagtattaacccaatcgactggaaactacaggatggggtagctcggccatttttacctcggaaattcccccacattcctggtaccgatgtagctggagaagtcgtacaagttggatcagaagtccagagtttcaaagttggggagaacgttgttgccgtacttggtaatggaggtgcactagctgagtatgctgtcgct

SEQ ID NO: 194355 - DNA, 681 bp, Gossypium hirsutum
tttttatagaagaaaatatagaagaaatagctggaggggtttctaaaaatggtggcgtcgctaactcactatgcaagctcatcgacataccagctgcttcaatggcactacgttactatgcaggtgcagctgataaaatccatggaaccgtgttgaaattaagcaaaggactccaaggctggtgtccctgatggagtgcttaatgttgtgaatggatacggagagactgctggtgctgccattagctctcatatggacattgataaaactgataagaagcaattcgagaaaatcctatcatacatcgagcatggcaaaagagaaggagctactttactaacaggaggcaaacacattggccaaaagggatattacatacagcctaccatatttgctgatgttaaggatgatatgatcgtagcaaaaaatgaaatttttgggccagtaatgtcattgatgaagttcaaaactatggaagaggggattaagagggcaaacaacacgacttatggtctggcagctggggttataacgaaggacttgaatgtggcaaacactgtttcgagatcggtccgtgctggtatcgtgtggatcaactgttacgctgtgttcgatatggattgcccttatggcgggtacaagatgagcgggtttggtagagattatggtttggatgcactt

SEQ ID NO: 194356 - DNA, 603 bp, Gossypium hirsutum
tctttaccttaatcaaagctttgactactaatcctattataaatttacactcaccgctctcaggatctaccagaaaatcgactaatctcccaaccatggcggtcgtgaaactgttcggagcttggcttagtccgtacggttacagagtaatttgggctctgaaactcaaaggcataccttacgaatacatcgaagaagatctctccaacaagagtcctttgcttcttcaatataatccaattcataagaaagtcccggtgctcgttcatgacggaaaaccgatctgcgaatccaccgtcatccttcgatatatcgatgaaatttggccgcaaaatcccttgctgccggctgatccctatgacagagccgttgctctgttttggatcaaatttgcagatgacaagagtcctttaatgtcaaagctttatcgaggcaatggcgaagaacaacaggcggcagtgaaggagtggttggaaatgttggaagtcatggaagaacatgcgctgataggagtgaaaaagttcttcggcggagacgagataaacatggtggacattgcattttcctttgttgctcactggcttgggattctcgaagacgtac

SEQ ID NO: 194357 - DNA, 365 bp, Gossypium hirsutum
actttattctggtttttcaagaaagtaaaagcaaaccgttaaaatgggttctttaatggcgggatgggattctcctgtatcagaatcggatcctacatcagtaatacgccaacgaaatcgatcgttgaccaaggaagagatcgaagcttattggaaatcaaagaagcaaacggaggaagaacatcttaaagctacttttagtccatcatatacctgcactcactcttacctggaaacaccattggaggagcatggaagtaagaatctgagatcaaactccagccaggaggatgcagaaacaagcctggagaatatcataaagaaaaatggctggtggacaaggagcaattgggcattcttgaatg

SEQ ID NO: 194358 - DNA, 555 bp, Gossypium hirsutum
caacgaagggcatacggctagatgcggaaggtgatgcatctttggaagacttagcgaatgctggagctcagggtactggggtcgatccatctccagatcctgaaaaagccaagtccagtaataaaaagagaaaaagtgcttctgaaaggcaaacatctgctaagcgaaggatttctcagaagacaagtgaacctagctttgtggataatgagttagatgatgcccttcaagacgatatgcaatcacagagacccaacacgcctaactgaccaaagaagagtgtaaatgaaaacctacaaccagcaattactactgcagctgctgcatcagcttctggccaggtacctggaaatgagtttggtcctggtggttttgggactgaaatggggcataacatggcgcagagtaatatgtcaacgtgttaacttgacgaaaggaaagcaaggtacaccttaattgctgtcactgcaacacttgttggatggttgtggtcatttcgactaacactgacctgcatattgattagtatagtagtatgcatgtatatataacatt

SEQ ID NO: 194359 - DNA, 798 bp, Gossypium hirsutum
gctgggcttagtaaccaaatcaaagtttcaaccgccatcgacaccatcacccttgcagaatcttcccctccatccaaagggtcattcaagcctgaatcccgagaggttctggaccccatcattggcttcttggctaacaaccaagccccattgcttgtcaacttgtacccctatttcagctacgatgacaacaacgttatcgatctaccatacgcactcttcactgctccaaaccctgttgtggaggatccccccttgcggtacagtaacctgttcgatgccatcttggatgcagtttactccgccctggagaaggctggtgggggttctttggagattgtaatatcggaaagtggatggcctaccgctggaggtaggaaaagggcagcaacaagtattgaaaattcaagaacctataaccagaacttgatcaaccacgtgaaaaaagggacgcctaagaagcctggaaagcctatagaaacgtatatttttgccatgtttgatgagaataccaaaacgggcgaagaaatcgaaaaacactggggactttttcttccaaataggcagcctaaataccaaataaattttaactaaatagctgcacagaatctgtagatgaagggcatttcaaccatgctagctattctacttgccctagacgagcctctcacttctccctaggaagggagggtaaacaatgcatctatcaatttcaaaatactattcaaaataagatgatgaaaatcagtcccatatgttaaagtattcaaaataataagattatctcctatttagatt

SEQ ID NO: 194360 - DNA, 436 bp, Gossypium hirsutum
  unsure (1)..(436): unsure at all n locations
ggcgacccacgcgtgcgttacgcacataccacatttttccgggaggcatcatacgacacgatatcttccattgtagtgttggagcatatgaagaaccatcacgaccttctcaagaagatatcaaagtggctgaaagaggatagtcttctttttcctcattatttctgccataaagcatttgcttaccactttgaggacataaatgaagatgactggataaccacgttcttctttacaggaggtacaatgccttcagctaatctgcttctatatttccaggatgatgcttctgttgtcaaccattggcttgtgaatgggaaacattatgcaaaaactagtgaagagtggctgaagaggatggaccgaagcttggcttccattaagccaataatggagtccacctatggcanggatcangctgtgaaatggacagtgt

SEQ ID NO: 194361 - DNA, 789 bp, Gossypium hirsutum
tttgctgctgctgttatagtaggtgcggatccattggctgaaatcgagaagcctatgtgggaactcgtctcggcggcccaaacgatcttgccagacagcgatggtgccattgacggtcaccttcgtgaagttggacttacatttcaccttctcaaggatgttcccggcctaatttcaaagaacattgaaaagagcctagctgaggcatttcaacctttgggcatttcggattggaactcgctcttttggatcgctcaccccggtggtccagccatattggatcaggttgaggcgaagctagcccttaaacccgaaaaactccgagccacgaggcacgtgctttcagaatatgggaacatgtcaagtgcttgtgtgctgttcatattggatgagatgaggaagaaatcaaaggaagatggacttggaaccacgggtgaagggctcgagtggggtgtcctgtttgggttcggaccagggctcactgttgagaccgtggtgcttcatagtatctctgcttaaacaaggttttaatgttcatgttggctagccctggctgcactacaatttgctttgcatttttatttattttattttcctttttattaatgaaatttgggatttgtatggttatttgaaagagagtaaagctctcacatatggtgtttaacgcctgtagaatttatgtgccaccttatattttatgatatggtgtataacgcctgtagaatttatgtgccaccttatattttatggaaataataaattgccttttttttaggtgaaaaaagg

SEQ ID NO: 194362 - DNA, 445 bp, Gossypium hirsutum
aagtacgcgtgcgcagacacttgggcgagcaggtcatgctgcgtttggtcctttggaagggggcatgttggcaggaagtatttctccccttttagatacctacaaaccaattcgcactgcatctacaaggttcagcggtgcttaccccaaaaatatcgacactttgaagatggagccattgtcccgtagctataatatatactctaaactatccattttcaataccaaacggttggtgaatgctcctatatccacacttggcggtgctgcgttgtctctccgttatgcaaacttgattattttgatagagaaactactttcatcgcctcacttcatcactctcgatgcatgagacgacctatacactatgctacctacacactatgagaaatgctctttcttttaaactgaacacctccgcatagtctttatctttatcaatata

SEQ ID NO: 194363 - DNA, 1210 bp, Gossypium hirsutum
ctcctccttcccctttagccgtctttccctccttcactttcagatcaccaaaaccttcaacaatggcctttgttaaggctcaaaaaaccaaagcttactttaagcggtttcaggttccatacaagagaaggagagagggaaagactgactaccgggctaggattcgcctaaccaatcaagacaagaacaagtacaacacgcctaaataccgattcgttgttcgatttagcaacaaagatgtcaccgcacaaatagtttctgctaatattgctggtgatatggttcttgcttctgcttactcacatgagcttccacgatatgggcttgaagtgggtcttacaaactatgccgcagcttattgcactggtttgctgttggggcgccgtgtgcttaagatgcttgaaatggatgaagagtatcagggcaatgtagaggctactggagaggacttctcagttgagccaactgacacaaggaggcctttccgtgctctccttgatgtagggctgatcaggacaaccactggcaatcgtgtttttggtgctctaaagggagccttggatgctggtttggatattcctcatagcgacaagaggtttgctgggttctccaaggacaacaagcagctcgatgctgaggttcacagcaagtacatatatggtggccatgttgctgcatatatgaggactttgatggaagatgaacccgagaagtatcaatctcacttcagcgagtatattaagaggggaattgaggctgataacattgagtccttgtacaagaaagttcatgctgctatccgagctgatccaactgcaaagaagactgaaaaggagcctcctaagcagcacaaaaggttcaacttgaagaaactaacatacgaggaaaggaaagctaagttgattgaacggttacacacccttaatgccgctgctggtgctgattcagaggaagaggattgaatgtgggaatgctcatttcaaagcactaaaattattccatgcttttctttattatacattgctgttgactgcagttttgtccagaactgagttgcattttgtaaggggttgaacttatttcgcattttgtttcaattttgttaagaatttttgttattttttgcaattctagtgtaattgaattattagatttttggatcaaaaaaaaaaaaagaaaaaaagatccgaaaaaaaaacacgaacagact

SEQ ID NO: 194364 - DNA, 717 bp, Gossypium hirsutum
cccacgcgtccggccaaatgttgacctgttaggcattgttgcccccacttctaattctgggggttattttctcaatcttcacaaggcaacaggccatcctattcttgtctatatggctgctggaagatttgctgacgatctggagaagttttctgatgaatatgcctgtgaactttgtgatgtcgcagttgaagaaaatgtttcctgatgcaactgagccggtacaatatctggtgtcacattggggaacagatccaaactcccttggctgttattcgtatgatccagtcgggatggcaggagatgtgtatgataagcttagagaacctttggataatcttttctttggaggggaagcagttaccgaggagcaccaaggggcggggcacggagcggactcgttcgggagtcctggctgccagaaactgtgagagccatctcttagagagattaggtgactttagaaagctccagctgatctcctttagtggtgatgcattattagaacccatatttcctctccagatatctaggatgtgaactttattttacccattacaaagacctgtctgagttgccgtcattttctaattagatttaaaaaagaaaatcatccaacttgttaaaatactattatatactgtatcactaaatgtgactactgctttcaatttccatccccaaaaagtggaagaaaataaatttcagatgtttgat

SEQ ID NO: 194365 - DNA, 609 bp, Gossypium hirsutum
  unsure (1)..(609): unsure at all n locations
gggaaagcgagttgaatctatggcgtcctccaagttacaggctctgtggaaccaccctgccggacccaaaaccattcacttttgggcaccaacttttaaatggggcattagcatagcgaatgtggctgactttgctaaaccaccggaaaaactttcctaccctcagcaaatagcggttactgcaactggaattatctggtcacgctacagcactgtaatcactccgaaaaattggaatctcttcagtgtaaacattgctatggctggaacaggcatataccaactaacacgaaaaataaaacatgattacttttcggaggcagagccagccgttgcatctgaatgatgacgaaatcttctgaaatcctttgtttttaatggaacaaattatcagttatcttgccttgtttttctgttaattaaaagttacactttggccctatggctttgaattattcaagcatgttgtgttgtggaaaaattggaacttgatgatgatgattgtagagccatcaactgatactgaactgagcaacagaatcccaaaaatttttaataatgcttttgttccctcnnnnnnnnnnnnnnnnnnnnnnnnnnnnnnnnnnn

SEQ ID NO: 194366 - DNA, 1185 bp, Gossypium hirsutum
cccacgcgtccgcccacgcgtccgtccacgcttccggtgtgtgtgtatttttcagagtagaagcttcactaagcttactccctccctccttcccgctctctgtttctgtcgcttccatggctgtcttgtttaaaatgcctgtcgttttgggtttctttgtgggtcttatgatgctgggtttggctagctcagctgagtttcatgagctttttcaacctggttgggcaaacgatcatttcatctatgaaggagagcttcttaagctcaaacttgataacttttctggtgctgggtttgcatcaaaaagcaggtatttgtttggaaaagtatccatgcagattaaacttgtagagggtgactctgctgggactgtcactgcttactatatgtcatcggagggtccataccacaatgagttcgacttcgagttcctgggcaataccacaggtgaaccttaccttctccagaccaatgtgtacgtgaatggtgtagggaacagagagcaaagaatgaacctttggtttgaccctaccaaggacttccactcttactctctcctttggaaccagcgccaagttgtatttctagtggatgagacaccaataagagtgcacaccaacatggaacacaaaggaattccttttcccaaagaccaagccatgggtgtatatagctcaatctggaatgctgatgattgggccacacagggtggcctagtcaagactgattggagccatgcaccatttgttgcctcctacaaaggcttcgaaatcgacgcatgcgagtgcccggtttccgtgacagcagatgagatcgccaagaaatgcagcagcagtgctgagaagaggttctggtgggacgagccgacaatgtcggagttaagtttgcaccagagccaccaactggtgtgggttagggcaaaccacttggtctatgactattgtactgatactgctaggttccctgtcaagcctgtagagtgtgagcaccaccgtcactagtagaccagctaaggcaaaaggggttcttttgggtacattgtaaaaacatgttgtatggggcactgggcggtggaagaaccttagtcataaaaaaaacatgtactccatgtttcatattttggtttcttttagtttccattttgtatgagaatcacattagattaatagtattaacctttttttt

SEQ ID NO: 194367 - DNA, 476 bp, Gossypium hirsutum
gctttactgagctccatctctctgtctctctcccatttacctccatggctgtctcttttaaaatgtgtgtgagtggcgggctatttgtggggcttatgatgctggggctggtaagctcagcttagttcgatgagcttttccaacccggttgggctatggatcacttcatctatgaaggagagctccttaagctcaaactcgacaactattcgggtaatttccaccctttcttgctctccaaggacccacctacttatgttcattgactccctgtttttcattacaatatggtacttccaacttttttcttcgttgttaacatgcccgcttattgattaatgaaaatggtgggttttggtgatatcaggtgctggctttgcatcaaaaagcaagtatctatttggcaaagtgaccatgcagattaagcttgtagaaggcgactctgctgggactgtaactgcttactatatgtcatc

SEQ ID NO: 194368 - DNA, 364 bp, Gossypium hirsutum
tttcacgcgtccgcccacgcgtccggcttcactgagctctctctctctctctctctctctctctctctctctcccatttccctccatggccgtctcttttaaaatgtgcgcgagtttcggtctatttgtgggtcttatgatgctgggtctggtaagctcagctaagttcgatgagcttttccaacctggttgggctatggatcatttcatctatgaaggagagctccttaagctcaaactcgacaactattccggtgctggctttgcatcaaaaaagcaagtatctatttggaaaagtgaccatgcagattaagcttgtagaaggcgactctgctgggactgtaactgcttattatatgtcatc

SEQ ID NO: 194369 - DNA, 551 bp, Gossypium hirsutum
ctctctcgtccgcccacgcgtccggtttgtttgtatattctgatcggttcaatttcatgtgtcactcactttcctttcccatcttaaacatgctccctcctctgtaaatcctattagacgtcaatttcccctttcataaatctttgggttttcatggaggaaatcaattgggatacccttctgctcgaggttgacttacccgatttcgggaatatcttagataatgaaccggtaacggaacctcctcctcaaccttgttcaacccagaatcccgatgaagaaccggcggtgtcttcgtggatcggggcgatcgagaaggttttgatggaggatgataattttgatcctagggttgagactcaacctgtctccgatgatgatttcttggccgatttactggttgattcacctcctagtagcggcggcgatgtggctggcgtcgacggtgctgatttgcacaaacagagccagacccacaccgacgtcgataaagacgatcccattattaagaaacagagaaggcagttgagaaacagagatgcagctgtgag

SEQ ID NO: 194370 - DNA, 475 bp, Gossypium hirsutum
cagctttcctcgtaagaatgttcccctagaagacaatgcagcctctcaaataatcatatttggcttttatatcatccctttcagaggtgtttgatatgctcggatgcttacggctgtggaaggttagagagaggctttttttctcgctagttaaattggttgcctgaaggaggagcatgttgagtgccgcaactgcttctctttatgcttgcttgcttttcatctccttttgtatgtagtttctgttattatttttttctttcctatttgttaaatgttacacttaacgcatttgggttgggcatgtgaattgagtttccttgtctttgacagttgactcacgtgaactggatttatgcgcaatttatgcttgtcttggaactgagttgtactaaatttatactttggtctttctataaataggtgaaacacttaacaaaaaaaaaagggaaaaaaaaattaatttaagggagtt

SEQ ID NO: 194371 - DNA, 716 bp, Gossypium hirsutum
  unsure (1)..(716): unsure at all n locations
caaaaagcacgctcttcttccttgtgtaagcggcgccggcaagaagctaaggccagtccacctcggatctctcgtctctgccttccatcgacaacaatctatcttacatgtttcacttcttctttcatcaaagattttgatggcgtcaaaattgcagcagttgcaatctcaggcgtgccaagcttcaaagtttgtggcgaagcacggaactgcttactacaagcagttgttggagcagaacaagcaatacattcaagagccgccgacagtggagaagtgcaacgagttggctaagcaactcttttacactcgccttgctagtatcccaggtcgtacagagtcattctggaaggagctcgattatgtcaagcaactatggaagaacaggaaagagctgaaggtcgaagatgccggtcttgccgctttgtttggaatggagtgctttgcatggtattgcgcacgtgagatagtgggaaggggttttactttcaccggttactatgtttaaggggagtttggatttttgttcgccattgcacgattgaattacggccacactgggtgtgcatttttgttgttttcagagatttttgaagctgagaaatcagtgaattaacactcggtatagcctgaataagttgttatagttgaaagttgaaacggcttatgttggttnaaaacaaacaatttttatacaacaaatgtatgccttaaaa

SEQ ID NO: 194372 - DNA, 870 bp, Gossypium hirsutum
tatgtatatttgaaaagaaaagtattaggccaaaagctcttgttgaatgtgattgctaaagttgatgtttataagtttgctccctgggacttgcttgatatgtcctgtatgaagactggggatcttaaatggtacttctattgtcccatcgagaagaaatatgctagaggggatagggtgaatcgagctactatattcggctactggaaagccacgggaaaggatcggcccgtgaagtacaatgacgaagttgttggaatgatcaaaaccttggtatttcacaaaggtaaagctccacgtggtgaccgaacagactgggttatgcatgagtataggcttgaagaaaaaatattggctgacagagggcctgttcaagatatgtatatgctttatgttgttttcaagaaggatggtctgggcccaagaaatggttcccaatacggggccccattcaaggaagaggagtggagtgacgacgagcaggcagatgtgcctggtgcgggttccctttgcggcctgtctacagtagctgttggtggtgataatagctcctgtgtccccgagagtgtatgtgctgggccttctgtcgagtcaagtgggtggtgtacacaaccatcgatgggtcatactaatggcgatgttaatgtcaccactgccattgatactaatgcttatgctgcccctacatgcgcggatgcccctgaagttccagtggtcgctgttgctgaggatgttcctacattgttggaggcgcctcaacctgctctggttcctcaagatcaagaatcgaatgataacatgttatctatgttggagtgcttctttgaagagggtgcatttggtacacatgaaagtcagaggaggggcaat

SEQ ID NO: 194373 - DNA, 1406 bp, Gossypium hirsutum
  unsure (1)..(1406): unsure at all n locations
tttttgacgcgtggccggacgcttcgctgcaatctcttctttttggagtttcatcacaccagatattacaatgggttcaatcggtgaaactcaaatgacacccacccaagtctcagatgaggaagccaacttattcgctatgcaacttgccagtgcatcagtcctccccatggtcctcaaatcagccattgaacttgacttgctggagatcatggccaaagctggtccaggtgctttcttgtccccaaaagaagtggcttccaagctccccaccaccaaccctgatgcacccgtcatgctggaccgtatcttgcgtctcctggctagctacaacgtcctcacttgctccttgcgtacccttcctgatggcaaagtggaaagactctatggccttggccctgtctgcaaattcttgaccaagaacgaagatggtgtcactctttccgcccttagtctcatgaatcaagacaaggtccttatggagagctggtactacttgaaagatgctgtgctggatggtggaattccattcaacaaggcctatggtatgactgcatttgagtaccatggcactgatcctagattcaacaaggttttcaacaggggaatgtctgatcactctaccatcaccatgaagaagattctcgatacatatgatggtttccaagggctaaaaacattggtcgatgttggcggtggtaccggtgccacgcttagcatgatcgtctctaagtaccccaccataaaaggcattaactttgatttgcctcatgtcattgaggatgctcctagctgtcctggtgtggagcatgttggtggagacatgtttgtaagtgtaccaaaaggagatgccattttcatgaagtggatatgtcatgattggagcgacgaacactgcgccaagtttttgaagaactgctatgaagctttgccagacaacgggaaagtgattgttgccgaatgcattcttcctgattaccccgaccctagccttgccacgaagttggttgtccatattgattgcattatgttggctcacaaccctggtgggaaagagaggaccgcaaaggaattcgaggcactcgcaacgggtgcgggatttcaaggcttccaaatcacatgctccgcttttggcaccaacatcatggagtttctcaaaagtgtttgaatcttacatgcttttggattctgaagcttggtgattgttgtctcaaaggtggattttctggaattacatactttttgtttgacagaaaacaataaagaacgaaatttcatggtttttacgtagaagaaataccatactatatccactaccttactgtaactattaaacaaagttaaaaggcataaagcctctactttgagaatgattcatggagaagatgattgtttnaatcnnnnnn

SEQ ID NO: 194374 - DNA, 450 bp, Gossypium hirsutum
  unsure (1)..(450): unsure at all n locations
nctgaacatggctgtttgctcgctaaagctcaagcgctgggaataagccatcggacactgttccatcgtgttatcagaagatgaaaataatgtgaaagcaatgttcagacgtggaaaggcccgagccgaactcgggcaaacggatgctgcgcgggaagactttctaaaggctcgcaaatatgcacctgaagacaaagcgattgcaagggagttacgtatgcttgcagaacaagacaaagctatataccagaagcaaaaagagatttataaaggaatttttggaccaagacctgaacctaaacccaagagaggtaattggctaatccgattatggcactggcttgtgtcactattctattacatgtttaggcgtgaaagagtgaaagctgattagtttaagctccgaaagattttcccaaaaaaataatttaatcaaagctttaaatcatt

SEQ ID NO: 194375 - DNA, 435 bp, Gossypium hirsutum
cggtacgcgtgggcggacgcgtgggcggacgcgtgggcggacgcgtgggtttgtcagcgtttcacactttctaaaactccaatatcccaaaacaatgggttcaaccggtgaaacccaaatgactcccacccaagtctcggatgaggaagccaacttattcgccatgcaactcaccagtgcctcagtccttcccatggtcctcaagtcggccatagaacttgacctgctggagatcatggccaaagctggcccaggtgctttcctctccccaaaagaattggcttcccagctccccaccagcaaccccgatgcacctgtcatgctagaccgcatcttgcgcctcctggctacctactccatcctcacttgctccttgcgcactcttcctgatggcaaagtggagagactctatggtcttggccctgtctgcaaatt

SEQ ID NO: 194376 - DNA, 804 bp, Gossypium hirsutum
atcaggggaatgtctgatcactctaccatggggatgaataagattcttgagacgtgggatggctttgagggactcaaaacatggtcgatgttggcggcggtactggagctcgcttaacatgattgtcaccaagcacccttctataaagggcatcaactttgatttgcctcatgtcattggggatgctcctgcttatcctggtgtggagcatgttggtggagacatgtttgaaagtgttccaaaaggagacgccatcttcatgaagtggatatgccacgattggagtgatgagcactgctccaggcttgtgacgaggtgctacgaagctttgccggacagcggaaaagtaattgttgcagaatgtattctcccagattacccagatcctagccttgccacaaagttagttgtccatattgattgcatcatgttggctcacaatcctggtgggaaagagaggactgagaaagaattcgaggccttggcaaggagtgctgggtttcaaggtttccaagtaaaatgctgcgcgttcggcacatacatcatggagtttgtcaaaagggtttgaactttgaatctacgtgtcttggttacatgcttcacactgttacttgggcgattgtctcaaaggtggcttgcaaataaggacgagattttgtgctgcttatgtatgataaatactgctgttttatacgtatgctcataattctatcccggcctcaatgtaaagtaatacgcaaatgttgattaatgtcataaaacctcgagtttgagcaaaaaaaatcatgaagaagctgattgtat

SEQ ID NO: 194377 - DNA, 490 bp, Gossypium hirsutum
cactgaaggaacagaatctcccaaaggacgacaacctaagaaagaaataaagggaccttgctctgaagatgagaaattggaagaatctccagttttgggccttctgtctgacaataaaactgcgaaaaatgatgataaagaaaatacagaagtttctgagagtacgataaagaaagctatcaccaatagagcttcatatctgaaagctaattcggaaaaagtcacaatggctggactccggcggcttttggaggaagatcttaaacttgataaatatacacttgatccatacaagaagtttatcgctgaacaattagatcagctattgaagtctgctgaagtttctgcacctgcaagtgaggttaagaaaaaaaacctcaagaaaaattctcagagcaaaacttctgaaaagcttagcaagaaagtgatttctgcttcatcacgaagcgagaatgatgaagtgggagatgaagaacgagatggtgatgat

SEQ ID NO: 194378 - DNA, 478 bp, Gossypium hirsutum
ttaaaacagcatcatccattgattcccttcccttactgctccctccctcttccattaaaaaagaagacagaaagcagctaccaaaatggctactttgctagcggctgcaggtcgtagagcaactactctatctcgatccccggctctgtctcaagccgcttctctcattcctcgccgtggtcttgccggcgctgcggatcaccatggacccccgaaggttaattgttggcaagacccaatgaacccatctaaatggaaagaagagcactttgttattgtctctttatccggttggggcctgcttttctttagcggatacaagttcttcactaaaggcaaaggcaagaaggaagagaacatggtggaaacgacacattaatgaggttggagtttctaaattttacaaatagtccatgaataatgtgttgctggaacttccatgtccttgggcatcatcttcacttttctggtttccttt

SEQ ID NO: 194379 - DNA, 480 bp, Gossypium hirsutum
cccatttcccttgtaaaaacaaaacatcatcgattccttctaaagaaataacccacggaagatggctactttggcggcggctgcagctcgtagagcagctactctagctcgaacaccccttccatctcaacccgcttctctcattcctcgccgtggtcttgccggcgccgcagatcaccatggacctccaaaggttaatttttggcatgacccaatgagcccatctaaatggaaggaagaacattttgttatcgtctctttaactggttggggtctgcttttctttagtggatacaagttcttcactaaaggcaaaggcaaaaaggaagagaacgcggtggaagcaacacactaacgaggttggagtttttattttatttttataagatctcaagtaataatgtatgggtggaactttcatgtccttgggatgcttttattggcaaattattcagttttcttgttcatcatttcttttat

SEQ ID NO: 194380 - DNA, 862 bp, Gossypium hirsutum
  unsure (1)..(862): unsure at all n locations
atccttttgaaactagggtttgggttggggcagtgctgtattttatatagtatataaggacatttgttctcttatttcgacaagcgccgagacagagcagagcagacagactagaaaagaagagaagatggagcaaacattcatcatgatcaagcctgatggggtccaaagaggcctggttggtgaaatcattggcagatttgagaagaaaggcttctatttgaaagggttgaagctcatcagtgtggatcgatcttttgccgagaagcactatgctgacctgtctgcaaaacccttctttaatgggctcgtagagtacattatctccggtccggtcgttgctatgatttgggaaggtaagaatgttgttaccacaggtcgcaagattatcggagccacaaacccagctgaatctgctccgggaacaatccgtggtgactttgcaattgacattgggaggaatgtgatccatgggagtgattccgtcgagagtgcaaggaaggaaatcgccctttggttccctgaatgccctgttaactggcagagcagccttcacccttggatctacgagtagagatcatttggtcgaagctattggccgtcatggctctgtcctggttgtttgttgttgttgttgttgccagtcttttgatatttatattactattatagtttgaagtggtgaaagctttgtagcattttgggtgtataggttaagttggagttgtgttgaaagctcctattacaacgccacagtggaggtgaacagcgtttgaataatcaaagctatttgtgtgtttgtcatataacaagagataaatattaatattatattttttatttaattttttttttnnnnnnn

SEQ ID NO: 194381 - DNA, 744 bp, Gossypium hirsutum
  unsure (1)..(744): unsure at all n locations
tgagtttagatggattgaattgcttgcagatggaggacttttctgaagatgtaggagattcaatcaggctacaaaatagaaaatttaccagaacgcttagtggaattgcagaaaacagaaaattaaccagaatacttagtggaactgaaaggattggtttgagctggccagagcctccactaaactttcttcctcagaatgttttggagagaccaggttctttcaaaccaagaaaatcttttagagcaataaagtcttttaaaacatataattccttcaagtccataaatgatatgggccatatggtatctgtgatagctttgcttgctgaacttgaccttgaatccctcatgaagaggagaagaagatcatcatatgtaagaatagtaagcaagcagatggtaggaattttcctcactatatgggttcgtaggagtttgcgcaggcatattcagaatctgaaggtgtctactgttggtgttggtgtaatgggttacattggtaacaagggatccatatcggtcagcatgtccatatatcaaacacttttctgttttatatgcactcacctgacatcaggtgaaaaagatggggatgaacttaaaagaaatgctgatgtgcatgaaatacttcgacgaactcgttttcattctctttcagcaattggacttcccanacgcatccatgatcacgaaagataatttggatgggtgatctaaataccgtatcacctgccatatgaca

SEQ ID NO: 194382 - DNA, 823 bp, Gossypium hirsutum
cccacgcgtgcgctttgatcagttccataagaaagaaagaaagaaatcaaatatgggttccatttccaagagtttccttctccttgcccttttagctgctactgttcttctcatttcatcggaagtggcagctcgagaccttgctgaaaccaccactgaaaagaacaatggtgaggtggctactgaaacaaccgaggctgaggctcagtgtaagaaggccaaatatggatatggtggatacgggagccgtggaggttatggaggatacggagggcgcggtgggtacggaggatacggagggcgtggtgggtatggtggtggttacggtggacgaggacgtggacgtggacgtggaggttatggaggaggttgtgcctatggatgctgtcattcagattattacggaagaggttgccgaaggtgctgcgcttacgttggggaggctgtgaatgttgaaacacatgctgatcctctctactaaaataaaatcattccaagttgcatgtatctaaaaaagtaaagtggcatagcaaatcttacaatttgctacgtcctaaataaagatgcttccttaatattcaggaattatattattatctccctcccctccccccctccccccccctcctcttcttctcctcccctctccggccccccctccgtcccgcctccccccgcctcctttctcccgctccctttctcctcctctttcccccccccccccccccgggggaatccctccctccccccccctttcgtttccttttccccccccccctccggccccccccttttacacccccccttactcggggaaaccccc

SEQ ID NO: 194383 - DNA, 522 bp, Gossypium hirsutum
gttgcagcactcttcattttgtctaaaaaagaaaaatgccaggcctcaccattggagacacagtgcccaaccttgaagttgaaaccacccacgggacattcaagcttcatgactacttcaacaatgggtggaccatcattttctctcatccttctgatttcacgcctgtgtgtacgacggaactggggaagatggcggcttacctgccggagtttgaaaaacgaggggttaagcttctaggtttctcttgcgatgatgtgcagtcacacaaggagtggatcaaagatgttgaagcctacacgcctgggtgcaaggtggcatacccaatcgtggcagatcccaagagagggatcattaagcaacttaacatggtggacccaaatgaaaaagactcttcagggaacgagctcccatctagagctctgcatatcgtgggctctgataacaagataaagctgagcattctgtatgcagcaaccacagggcgaaacatggatgaagtgatgcgggcagtggactcac

SEQ ID NO: 194384 - DNA, 1200 bp, Gossypium hirsutum
  unsure (1)..(1200): unsure at all n locations
atttcatcgctcccactatctgatccctcaaagcctacagaaaaaaaaaggagagcaaaaaatggcagaaagaggcggcggagaacgtggcgcttttaggcgcggcttcggtggaggaaggggtgaccgtggtccaagaggcaggcgccgtggccgcaaggacgaagaggagaaatgggtacccgtcacgaaactcggccgtttagtcaaatccgggaaaatcacgtccctcgaacaaatttacctccactctctccctatcaaagagtaccaaatcatcgaccagctcgtcggcccttccttgaaagacgaagtcatgaagatcactcccgtccagaaacaaacacgtgccggccagcgcacgcgtttcaaggccttcgtcgtcgtcggtgacggaaatggacacgttggactcggtgtcaaatgtagcaaagaagttgcgacggctataagaggggcaatcatattggctaagttgtcagtgataccggttagaagaggttactggggaaataagatcggaaaacctcatactgtgccatgcaaggttaccgggaaatgtgggtccgtcaccgttaggatggtgccggctcctagaggtgctggtattgtggctgctagggttcccaaaaaggtgcttcagtttgctgggattgaagatgtcttcacttcttcaaggggttcaaccaaaactcttggaaactttgtcaaggccacctttgaatgtcttctgaaaacatatggtttcttgacaccggatttctggagagagactcgtttcacaaggtctccattccaggagtatactgatctgttgggaaagccatcgaagacccttgtactggaagatgtcgagagagttgatatctgattgaagatcaacagggtcattacttattagtaagttgggtgtgtttctaggtcctttctatgttgcaatctttaattgtgtcttgcttgttttgattttgtcatgagattaaatcagtaatggttcaattttgttgtgttttttcatctggattctttataaagattgtggatgagttgaggacttgtctatttatgtgctgcttgcttgtgaattaatgtttcataatatgatagcatgcttcttatcaagtctaaaaaaaaaaaaatatggatcatttgnnnnnnnnnnnnnnnnnnnnnnnnnnnnnnnnnnnnnnnnnnnnnnnn

SEQ ID NO: 194385 - DNA, 827 bp, Gossypium hirsutum
  unsure (1)..(827): unsure at all n locations
cttcctgccgtttttgctccttccttcatctctacatccctaaacaaaaagcaaataatggcagaaagaggcggcggcgaacgcggcgctttcaggcgtggcttcggcggcgggagagccgaccgtgggccaagaggccggcgccgcggccgcaaggacgaggaggagaaatgggttcccgtcacgaaacttggccgcttggtcaaagccggcaagatcacatccctcgagcaaatctacctccactccctccccatcaaggagtaccaaatcatcgaccaaactcgtcggcccttcactgaaagacgaggtcatgaagatcactcccgtccagaaacaaactcgcgccggtcagcgtacgcggttcaaggcctttgtcgtcgtcggtgacggaaatggacacgttggactcggtgtcaaatgtagcagggaagttgcgacggctataagaggggcaatcatattgctaagttgtcagtgataccggttagaagaggttactggggaaataagatcgngaaacctcatactgtgccatgcaaggttaccgggaaatgtggtccgtcacccgtaggatggtgccggctcctaaagtgctggtattgtggcttgttggttcccaanaaggtgctcantttgctgggattgagatngcttcactcctttcagggtcaaccataacttttggaactttgtaaaggcacccttgaatgcttctgaaaacatatgttcntgcaaccgtattttgaaaagactgtttaaaagtctcattccgaagttactatcgtgggaaacttcaaaaccttttctagaatgtaaaagttttn

SEQ ID NO: 194386 - DNA, 793 bp, Gossypium hirsutum
  unsure (1)..(793): unsure at all n locations
gtacgcaaaaaatcaaaaccctaactngctcactctctgcatatttattcctaaccctatccgcttctattacctgttttcaatctcacgcatttgtgtcaaaccctaaccaaaggcaaaaggaaaaaaaatggcagaaagaggcggaggtgaacgcggcgctttcaggcgtggctttggtggtggtagaggtgaccgtggtccaagaggcaggcgccgcggccgcaaggacgaagaggaaaaatgggtacccgtcacgaaactcggccgcttagtcaaagccggcaagatcacatcccttgagcaaatctacctccattctctccctatcaaggagtaccaaatcatcgaccaactcgtcggcccttcactgaagacgaggtatgaagatacntncagttcagaaacaaactgcgccgggaaacgacacgcttaaagcttcgtcgcnttcgtgacggaatggacacgtnagctcggtgtaaatgtacaaaaaaagtccaacggtataaggggcgatcatttgcttaatggtcaatgtcaccggtaaaaaagntactggggaataagatcggaaacccatactgttcatgaaggntaccggaatgtggtgctcaccggtagatgtgccgctcctaagtgctggatgggcttctggttcccaaaaggtctcattgcttgaaatgaatgctattttttcaggtcaacaacctttgaacttgaagcccccttgagcttgaaaacatggtctgaccgtatttgagaaacgtnacagtctttccgtntttctatgaaa

SEQ ID NO: 194387 - DNA, 771 bp, Gossypium hirsutum
acgcgtccgcccacgcgtccggaaaaattctcttcctttttttttattccttcctttttcctttcatccaatcgaccaaattcagagcttacaaaagaaaaatggccggaatcggacctttaactcaagactgggagcccgtcgttattcggaaaaagcccccaaacgctgccaccaagaaggatgagaaagtcgttaacgccgcccgtcgagccggtgccgagatcgaatccgtcaagaaatcgaatgctgggacgaacaaggcagcatcgagtagcactactttgaatacaaggaaacttgatgaggaaactgaaaatcttgctcatgaacgagtgccaactgaactgaagaaagccatcatgcatgctcgaatggagaagaaactcacccagtctcaacttgctcagatgatcaatgaaaagccccagattatacaagagtacgaatccggaaaagctattcctaaccaacagattataggtaaactcgagagggcacttggtgcaaagctgagagggaagaagtgaggagggtcttgtcgttaatcaaacagaagttgaatatggtgtccagttcttgagtcctaaaaaatggtgatgtaaataaatgcgctctactgttactatggctcgcatgtaataacagcgtcttcgatgttatctgaagactgactatgactatgactgatgaaatgaagtgtgttcttgactgttgcaaggggaaaaaaataattattaaaaaatccgttacaaaaagaaggggagttat

SEQ ID NO: 194388 - DNA, 568 bp, Gossypium hirsutum
tccggaattgaccaaaatggcgaaattgagagtttgcatagtggtgttagcttgcgtggtggtatcggcggcagcccaaagtgcttccaatgtgagagctacttatcatctttacaatccgcagaacataaactgggacttgactgctgcaagtgctttctgcgccacatgggatgccagtaagcccttagcatggcgtcaaaaatatggatggactgctttttgtggtcctgctggtcctcaaggtcaagctgcttgtggccgatgcttaagggtgaccaacaccgccactggaactcaggcaacggtgagaatcgtggatcaatgtagcaatggagggctggatttggatgttaatgtatttaaccaacttgacacaaatgggattgggaatgctcaaggtcacctcactgtcaactatgaatttgtaaactgtggtgactaaacccactttctagtaattaaaatgagtttcaaccaaataaatgctttgtatcactactaaataaatccattctcgaataaaacttagcagcacttgttgcttgcaagttgctaaatttacttt

SEQ ID NO: 194389 - DNA, 652 bp, Gossypium hirsutum
gagatgaactgcttgtgacagaactgatttttaatggtacattcaatgatcttgatcatcagcaagtagtagcccttgcaagttgtttcattccagtagataaatcaagtgaacaaatacagttgaggacagagattgccaaaccattacagcaactccaagaaagtgcacgaaaaatagcagagatacaacatgaatgcaaattggatgtaaacatcgacgaatatgtagaatcaactgtgagaccatttttgatggatgtgatttattgttggtcgaagggtgcaacttttgcagaggtaatacagatgaccgatatatttgagggtagcattattaggagtgctagaaggcttgatgagtttctgaaccagctccgcgctgccgcacaagctgttggagaagtcaatttggagagtaagttcgctgcagcaagtgaaagcctacgtcgaggtatcatgttcgccaactccctttatctgtaagattgtgtttttgccatggatatagacgtaaaagctgtgtgcggtctaatggtacattgacacccatagatttctcctcttcatcttttaaaaggtaaccctgccttccgaatataatccctttttttagttaataatccccaggaggggcgcctttaaatttggtt

SEQ ID NO: 194390 - DNA, 650 bp, Gossypium hirsutum
cccacgcgtccgcccacgcgtccgagaagatgttaaagcaaggcttaaattctgggcacaagctgtggcctgcactgtcaaactgtgcaactaaaagattcatgaacaatcattggaaaaatgagaatgaatatttttctcattgatgaccatcaactggataaaaccctacgctctgccgaaccatgccatggtggggatgacatttccagcaattgtgggaaatataccaggccaaaattttaaaaatggatcagctgcaaggagcatgggaagaagctggaaaggaagatgttacagtggtgagagtctccagttgagcttcaccgactagttccggacctctgcgtttgctgagggttttctttctcacggaacggaaggctgcaaattacacgcattccactgagatggctcatctttgcgtatgttaatgtggtgttgaaggttacgttttggtatcagtttcattttgtggttgagaattgagataggaagaaaactcaaaacttatctgataatcacagcctagtttgaaacagtaagagaagggacgaaatttgactcggattggatttccgttattaggaaaagaggcattgagttgaaatatcaaagattattgatttggggtgatgtcaaagtttact

SEQ ID NO: 194391 - DNA, 603 bp, Gossypium hirsutum
cccacgcgtccgcttccttcttctcaagaccgtttcttctcacgaatcctccagatttaagacagtcttcctgagttattagaggtttatcctaacaaatctgtgaagggttgagaaaaaataaacaactatttttaatggcatctagagtttcattaaagactaaaggtaaaggagggaaggggtctaagggctcggatgagaaatcaactacgcagtgcttgaaagagtggagcacatgggctatgaagaaagccaaagtggtaacgcactatggcttcattcctctggtgatcattatcggcatgaactctgaacccaagccccaactttatcaattgctaagccctgtctgattcagttgcttatttcttaaccacccagatcttggtttaactatgtaatttgtttgttgcctatctgtcgaaactacatggtattatgttaggcatatgctttatatgatgttgactgttctattctatgtgcttgagaatacattttatgtaattcgaatcttatttgagtttctcaatattttcttttactcaaaaaaaaaatatctttaatttttctatttctcttttattatatatctaattt

SEQ ID NO: 194392 - DNA, 635 bp, Gossypium hirsutum
aaaaatcatatcctcagaaaaaagaaaaaaaacgcaaagaaaagagaaaatggctactttgggtggaattagccaggtcgatggaagcgccaatagcctggagattgaaaacctcgctcgttttgctgttgatgaacacaacaagaaagggaatacgatgctacagtttaagaaggtgacgaatgtaaaacaacaagtggtttctgggactatgtattacataacattggaggcgatggatggtgacaagacgaaagtttatgaagccaaggtgtgggacaagccatggatggatttcaaggagttacaggatttcaaggttattggcgatgctcccgccggttgtacttccaccgcttaaggtgactggagattgtagaggaaaggatatcaggataccgaatgcgggttttaaataaatgtaactgtcttatgttaatttggatttagactactaaattcagtggtattgaacttaagcttatctagaacaatgaatgaataacgtctattgatgcaaagtacataatttacctgtgtcccttgtaccctatttcttctgtaattttagtatgataccattaatctgaagtaaatctacattttgggggatttattctcatgactgtctttct

SEQ ID NO: 194393 - DNA, 459 bp, Gossypium hirsutum
acgccacgcgtccgcttctttccacacttgaaaatcttcatggttagcttctgcaagagggagttggcaagattctttgggcaatttctgtttgaaagatcacatttcctcttccaactctccaacaaagtccatctcgaagaagaccctttgctacccaaatactcttccaggtaaatgaagatgcagatctccaccttggctatctttcttcaaactgtaggagacaaatgtgcaagatgcgccgacttcaagcaatagaaaacaaaaaacagcagaaaaacctagaactcttgccagagacgacagacaataacgtgctggggtagcaaactttctttttatatttataataaaatttacaatactataaatacatgaaaaaaaaagtagaaaatttccaatttctttcttttcccattgttttgcttttcccacttctgttctttctctttccct

SEQ ID NO: 194394 - DNA, 740 bp, Gossypium hirsutum
tttactgattccgtgagctccaaatgaaccataaagcgcagcaaaaagtccaacactattccttagtactcttttcaaaaacctagggcattgtttaaagacatggtggctatcctcttctccggagcaacaacgaggacatctgacgttagtggtcactcgcttgtgtctaagcttctgcaagagggatttgcaagattctttgggcaatttctgtttgaaagatcacatttcctcttccaactctccaacaaagtccatctcgaagaagaccctttgctacccaaatactcttccaggtaaatgaagatgcagatctccaccttggctatctttcttcaaactgtaggagacaaatgtgcaagatgcgccgacttcaagcaatagaaaacaaaaaacaggagaaggacctagaactcttgccagagacgacagacaataacgtgctggggtagcaaactttctttttatatttataataaaatttacaatactataaatacatgaaaaaaaaagtagaaaatttccaatttctttcttttcaaaaaaaaaaaaaaaaaaaaaaaaaaaaaaaaaaaaaaaagaaagaaaaaaaaaaggatgggggggtcggtataaagggattcgagcttacgtaccccttgcttcgaggtactaaaatttaatatactgcccgtaaatttacaacactgggcctgggaaaacaacgtcgttactgaaaaaactctggttgcaccaaa

SEQ ID NO: 194395 - DNA, 1296 bp, Gossypium hirsutum
cggacgcgtggggttcaagttatttcccattttttggtctttctttatgccaactgataatcaaatgaaagacatgaaaccgaattccataatgggatcgtcagtcaccgacggcgagatcgtgtgcgtaacaggcggctctgggttcattggttcatggctcatcaagctgctcttggaacgcggttatgtcgtccgagccactgtgcgcgaccctggcaactcgaagaaggtgaagcatttactagagctacctaaagcagagacgcacttgactctttggaaagcagatttagctgaagagggaagctttgatgatgcaattcaagcttgtacgggtgtgttccatgtggccacgcctatggacttcgagtccgaggaccctgagaatgaagtcataaaaccaacaatcaatggagtgctaagcatcatgaaagcttgcgccaaagccaaaactgttagaaggttagtgttcacatcatcagctggaactattgatgttgcagaacaacaaaagccctgttatgatgaaacctgttggagcgaccttgaattcatccaggccaaaaaaatgactggttggatgtattttgtctccaagacaatggcagagcaagcagcctggaaattcgctaaagaaaataacattgattttgtcagcataataccacctttggtggtcggtccatttattatgcaatcaatgccgccaagcctcataactgcactttctcctatcaccgggaacgaagctcattattcgatcataaaacaaggccaattcattcatttggatgacttgtgcagagctcatatctttctattcgagaatccaaaagcggaaggtcgctacatttgcgcctctcaccatgctaccattatcgatcttgcgaaaatgctcagtgaaaaataccctgaatataatgttcccaccaagttcaaagatgtggatgagaacctgaagagtgtggagttctcctcaaagaagctcttggacttgggatttgagtttaaatatagcttggaagacatgttcgtaggagctgtcgagacatgccgagaaaagggactgcttcctctttctaatgagaagaagaccaacaacatagactgaaaaatatgaactttcaacaattgagtgcctacccatgtcttccatttctagtggtgaaaacaatatagatttaaatctattatctgtttcctggtattgtacaatttttaattgcaaacattggtaatgtaatttggagtctattctgggaactttgtgatttatctaatattttcagcatt

SEQ ID NO: 194396 - DNA, 446 bp, Gossypium hirsutum
cccacgcgtccgcccacgcgtccgggcaggggatatctcggctctcgcatcgatgaagaacgtagcgaaatgcgatacttggtgtgaattgcagaatcccgtgaaccatcgagtctttgaacgcaagttgcgccccaagccattaggccgagggcacgtctgcctgggtgtcacgcatcgtcgcccccatccaaccatgagccctcgagcctcggttggaccgcgggcggaaattggcctcccgtgcgctcacagccagcggttggcctaaattcgagtcctcgacgacatcatcgtcgcgacgatcggtggtaatgctgcaagcaacctcgttcggagtcgtgcgcgtccgtcgatcgagacccttgaaccctttcggcatcgcagggacggtgctcgcatcgcgaccccaggtcaggcgggattacccgctgagtttaagcata

SEQ ID NO: 194397 - DNA, 1039 bp, Gossypium hirsutum
  unsure (1)..(1039): unsure at all n locations
ttgtcttgtctgtttggttcctgagaaagcgaaagaaaacgcaacggtctgtttttaaagacaaaacagtagtggtaatttgattccccctccccccttaattcttgctttaggtatctgttaaaggataaaggtgcgattcttttggtgaaaaaaacaatgaggcctgtgtttgtggggaacttcgagtacgagactcggcaatcagagctggagcgtttgttttcaaaatacgggaggatcgaacgggttgatatgaaatctggatttgcctttgtttattacgaggatgaacgtgatgctgaagatgctattcgtgaacttgataatattccttttggttatgaccgacggcgactgtctgtggagtgggctaagggtgaacgtggtcgacgtggtgatggttctagatcagtgacaaatcagagacccaccaaaaccttgtttgttatcaactttgatccaatccgtactagggaacgagatattctaaggcactttgagccatatgggaaggttcttcatgttcgcattaggcgaaactttgcgtttgttcagtttgcaacacaagacgatgctaccaaagctctcgaggctacacaaaggagcacagttactacacagagtcgggtctgttgaatatgctttaagggatgatgatgagagggataacagattcgatagtcctaaaagaggaggttacgatagacgtagagatagtccatatggggaggtccccaagtcctgtataccataggcgacaaagtcctgattatggtagagctcgtagtcctgtttatgaacgttataatggccctgcttatgacagacgcaaaagtcctgattacgggaggcataggagtcctgaatatggcagataccgcagccgatcacctgttcgaaggtcccgaacatagaagggcatcagattaacggtgaaaagtatttcgtagctctatgcctagctntctatgtantttggtatgtactttaaagaccctatngntcatngtaatatatgtacttggctttggtttna

SEQ ID NO: 194398 - DNA, 981 bp, Gossypium hirsutum
attcgatcctaatgaccgtccatccgctgaagaggcattagctgatccatatttccatggattggcaaatgtggacaatgaaccatccatgcaacccatttcaaaattggaattcgagtttgaaagaaggaaattatcagaagatgatgtccgagagctattttatagagagatattagagtaccatccacagatgcttcagcagcaccttaaaggcaaagatcagattagcttcatgtatccaagtggagttgatcggtataggcaacaatttgcttgtcttgagggacaaggcaaaattgaaagaggcattctgctccaaaggaaacatacatccttgccaagggagcgagtctgcaatgatgatactgatcgcattgatgaatcaaaaaaacgtacagtggcttctgctggtcgtgcaacccttcagagccctacaaagttgcaagcatccgtggaaccagaatatgtaaaccaaaatgtggcagggcctcagaaagcctctggcaaacctgtgcaaaatggtcgtcgcctgtcgaaaagtgaaagcattagtgcttcaaggtgtgtgggcgtcattcgaaaacctcaagggatgcacggagaagtgcagaaactggtcgcttaacatgcttgggaacttgcaaacgtttgactaagaaaaatctgccgattcttggttttcttttgctatgtccatgatattcctttggaggttcttaatctgccttaatcaactaatatgtgctacttgtagttactttattgtactctggacaaggaaaaaatttgcctgacttatgatttggaaattatttaaggcaggcaatcttgcggtgacaatttgggtcaattctcaatagttcagcaggattcagctaatgcactcacacatgaatcaagcaattcaattacgggcagattttgccattcttattgtacataccatggtaataaaacaagaaacatgcaattcgattt

SEQ ID NO: 194399 - DNA, 533 bp, Gossypium hirsutum
tttcccacgcgtccgcccacgcgtccgctgaagctagcaaaggggttcttgttccagttgatgatgatgaagtgatagttgaaacgtgtaacgctgaagccaatgggacatattgtttcaaggcatcaatctgttgtgattacagaccccaactgctaaccgacttacgacaagctctcgatgctcttccgattaagatggttaaagcggaaatatcaaccttgggtagtcggctgaggaaagattttgtttttaccggttgccgaaccaccgcacatggtgatgacgccgagtcatggcaacatctggcctgttccgttcgccgggccttgaattctgtcctggagaaggcttctatctcgccggaatacttgccatactcgacgtttccaaagaagaggcagaggatctcatactttgattcctcaagctcatcttcataaaaaagatgattgccattgtttcgtttgtgtcaatccactgcgacatctcctttattttctgcaggtgtttgtttgaatgtgcaaaggttg

SEQ ID NO: 194400 - DNA, 432 bp, Gossypium hirsutum
  unsure (1)..(432): unsure at all n locations
aagcggatggccttcagctggtgggttcgggacgtcggttgataacgcagccacttatctatcaaacttgattaaacatgtccaaaaaggtaccccaaagaggccaggaaaagctatagagacatatttgtttgcattgtttgatgaaaaccaaaaatcgggtccagagctagagagacactttggcttatttttaccaaacaagcagccaaaatatcagctccgttttggtgggggaaggcattgggatattgcttctaaggaatataatgcaacatttcctcttaaatatgatatgtaaaaatctgcaaagcttggggaatttggggagttatgtctttctattgagttntctcttttattatcctatgtatttttcgtttaaataaggagaactctcatggngttaattttgattgtatttttatcatc

SEQ ID NO: 194401 - DNA, 573 bp, Gossypium hirsutum
  unsure (1)..(573): unsure at all n locations
cacttcatccaccacttgcnccatctttttcttcgctttctcctgcttaacgttttttggagcttattcatgtttactggccgcatcatcaaaaaacgcataccacaccaagtacagaggaatctttggcggagaggacatttcatgtgctacactgaggaaaggcgtatttgctgctggagctgctctaactttgttgtcattggtgggatcagtcttctattactgggctcactctagagctgatactggtggatggcagaaacatcggaatgaaggcgttggaatgacagagcagcctcccgaatttggtaaggtctgactctattgtgcctcacggcgttttaattccctaaaattttggtggtacctgtcaagagaggtattgatagatccaagaatgaatagactgaatgagctatggatgaatataagttgtgtagcttcaaagataaattatagatataggatgctatcgttgttaatattttacctacttacttggccacgttttcaatgatgatatggtgcatttctcaaaaaaaaaaaaaaaaaacaaaaaaataccatcat

SEQ ID NO: 194402 - DNA, 543 bp, Gossypium hirsutum
atcatcttatcccctttccttctactttgaatagccaaggcgatttggctttggttcatcacagatcgatcgtgaagtctctcccaccaggtgcttccgctgcaaacagatatgcaacattgtcatgaaggatcgactttgcttctacgatcctaccctcctcattcttaacaataagacctgatgcagatctgtggttctgtgagtcaaaagccgcgtcaaaaaagatggacttatttgcccttcgtaccctctgtctgggccttgcgctgacttctaagatttcccacagctctcaacaaaatcccaagcactgttcattcgtccctacgctgaagatccaggaaagccaactccataaatcaaaatggttattgttaagtacccaggggaaatttaactaactccaaatttctttcactataaggcatctttggaaaacgtggaagctgtcttctacttcctgaccgcatctcggacaacggtcttcagtcataactcttttcagcttaagagtaattccatagtgtaattttaattttt

SEQ ID NO: 194403 - DNA, 407 bp, Gossypium hirsutum
gcggggcaaaccatacgttttggtaattcccttatccaacacaaggcgcatgttattcgctctcgtggaactcgctccaaaacttagccaaacaaggcatcaaaatcagctttgttaacacagtgtttaatcacaagagggtcctagatgcattcggcgagaaggtggatgaaaatggcttacttcatctactttcagtccccgatggactggaagatggggaagataggaatcagttagggaagttaactgaaagattatgccaggttatgcctactcaactcaaggagctcattcataaggttaatggatcagatgatgataagatttcatgtgttttagctgatattaacattgggttggctcttgatgttgcggcggagttggggattcctacggtgggcttg

SEQ ID NO: 194404 - DNA, 711 bp, Gossypium hirsutum
  unsure (1)..(711): unsure at all n locations
cctcgtgccgaatcggcacgaggcggcacgaggattgtctagaaaactcctacattttcatctctttcactcacaaacaagcacctccaaatccaatggccgctgcagctccacccccaccaccatccgccgcccctgaaccttccatggcaccacctgaaacaaccccgataggccaccccgtcttcaccaggatccgcctagccaccccttcagacgtccctttcatccacaaactaatccaccaaatggccgtctttgagcggctgacccacctcttctccgccaccgaatcttccctatcttccaaccttttcctctcccctcctttccattcattcacaatttttctactcgaactttcctcttcccccattcctcctctcctttccccttcaccatctttcactcccatagaaaagacattcaacttcgacatccccttaaacgaccccgaaagtgatgccttctcgatctattacgggaatcagcaagttataatcggtgggttcgtgttgttcttcccaaactactcgacatttttagggaaaccagggttttaccttgaggatttgttcgtcagggaatgctaccggaagaaaaggtttgggaaaatgttgctgtcngcggtggcgaaacaggcggtgaanatggggtacgggagagttgaatgggtggttttggattggaatgtanatgccattacgtctt

SEQ ID NO: 194405 - DNA, 470 bp, Gossypium hirsutum
cccacgcgtccgcccacgcgtccgggcaacttgttatgatgattgtaaggtctcgagattcgagtgagagcagcaagagatcactttcagcattcgttaaggataagaggggctgttacaagagaaagaggtttgctcaaacaaagatagtggtgtctgataaaatagaagatgggcatgcatggagaaaatatggacaaaaaaatatcttacattctaaacatccaaggagttacttcaggtgcagtcacaagcatgatcaaggctgtagtgctatcaaacaagttcaaagaatggaagatgatgcccaaatgtaccacatcacatacattggtacccacacttgcagagaccagtactcatccatggctacaccacgaatcgacagtccgagtccgatattaaaactcgaatccgaggaacaagcgacgacaccaagcaatgttacggatttggattcgatgaccatg

SEQ ID NO: 194406 - DNA, 593 bp, Gossypium hirsutum
cccacgcgtccgatttaacttctttgctttctttgtattagcagcttgtgtagggggaaaaaattgatgaagagggtttcctttgttgccttgtgtgtggtggcactcgcggtggtgctgttttcgggtgaaagtcgcacggcggaggcagtgacatgtaatcccgtggagcttgccccctgctcgccggcgcttacgtcgtcctcgcctccatcaagcgcttgttgcagcaagctgaaggcgcagcagccatgcctctgtggatacattaagaacccatctcttaaacagtatgtcaacagtcctaacgctaaaaaggttgcttcgacttgtggagtcccatatcctaagtgttaaatgttgcttaatggtgtatctactatctactggcagcaaataagtgattctttttgctgtcaagtactgttctgaataaaagaataatgataaaatattagataaaattaaggtaatattttacttatgttggaagaaatgataaattagatggcttacagcttctccattaaaaaaaagtacctatatataaaaagattactataaaatactcaatgaactcacaatttctttag

SEQ ID NO: 194407 - DNA, 811 bp, Gossypium hirsutum
gggcttttgctacgaacggggtgtttatatcctcatgtataactgtctgtgaggcttttaaatctcccatctggtctcaaacgactatacctgaggcagatctagcattcttctatcaaaggctgcgtcaaactgagctatgatgccctccgtcgccccggtataactgattccccttttggtataaaagatttcgggtactccatatgcaccataacgcacagcaaaagaaccggcattgatctattgtacccctttcaagaacccaggacaaagacaaaagatatggctactgtcttcctcttcaagtctgcaccgaggacaccaagcgtactttgttactttcttagatcttagattaactagtaaatgaatatagttccaggaaattcgccagaccagtatctttattttacctggtatctgtaaatcctataatttctaatagaaatttcttgtttcgggttgtaaaagataaacattaggattcaagctagcattatgtaatggtttataggcgcttctgactgagaactcccctgaatgcttctctctccacacctgacagtcatcatgaatattcaggattttctacgctatgcccggctgagatgtattgttgcaaaccatcactccatcgttatattatgacctctatgcttgagaagattatttacaccttctacgccaataaagatacttacacctatgggactgctctcgctaaaagttaaactagacactaaggtggacgctttctttctctctattatctctccagaatggatacagttaaagtactataaatatt

SEQ ID NO: 194408 - DNA, 660 bp, Gossypium hirsutum
aatcccttctctgagaaaaaaacacctatattttaataaaaaaccataaaaagtaaacaaataaatttgaagagcaggaaaagaaaggtaggctgaagattcccattcagaggctttctccaggccaaaacagagctcaggatcagcagccatgggaatcattacggtagccggtggagacgccttgtgaacctggatgtgggtattttccatgccgctcttaaagattttcacctccaaaatcgtcgggttcctcggcgcccaaacgttgcctttggcgactcttatggtctcgacggtcttagtcagtattttagtcatgattttcagctttatcggcaacgttttcggcggcgcaagcttcaatcccgcggcttctatgactttccacgttgcgggtctcaagaaaaacgactccatcctctccatggccgtcagattcccagctcaagccgccggtggagtcgcaggcgtcaaggcagctctgggtttgattcccgcggaatacagcaacaccctgaccggaccttccctgaaagtggacttacacaccggagccgtcgcagaaggactgtttacattcggacgaagccttgcactgctgctgataatgtttatgggtccaaaaaacgggtgggttaagcaatggttggtgtcttt

SEQ ID NO: 194409 - DNA, 799 bp, Gossypium hirsutum
ggcctgctccggtagccattgcaggagaaggagcaatatcctgaaattgcgaagacagagagagttggagggaatgtcgtttagagggaagaggaaggatggagagggtctcggttccgacgagaacgacgatcacgcgcctcctaataaagtctcgaagatttcttctgcagtcgactctgacgattccgacgatgtcgtcgtctgcgagatatccaagaataggagagtttcagtgaggaactggaatggcaagatttgggttgatattcgtgaattttatgtcaaggatggtaaacaattgcctggcaagaaaggtctttctctaagtctggaccagtggaatgttctacgtgatcatgcagaggcaatcgataaggcacttgctgagaactcgtaggaagtagacatatggtataccaagggaatctaaggaccttttcatatattttggaaagttaacttgctggaggcctaggttttgttgtttatgacagatcttaacttgtttttgaagttgctatacttggaagatattttatgcggacctccattttgtgtaattagttgtgtagctttcggctactagactgaatttctgctgtatctttcatgttggatgatattaacatgatctgtgaaatggaaacgtaaaaaaggaactagatggtgaatcttgctattaatgagatgggaaaagaaagaagttaatttcggtttttttgcttctaaagagattttaattaaaacgtctaaagatggacaaccgctgataagcctaccactatcattgggtata

SEQ ID NO: 194410 - DNA, 905 bp, Gossypium hirsutum
gtcaattgccaacacaaaaggagggcgaagaggtggactttagaggtgtcctgcatcgtgagggctcggttcttatgtctgtttcccttgatcacttgaaggcaccggaacctttatataagtcacttgcagcaaagctggtcgtaggcatgccatttaaggacttggcaacagtagactcaatcatactgcgggagcttccaccagtagatgacgctgatgctcggctggctcttaaaaggttgatagacataagcatgggtgtcattacacctttatcggaacagctaacaaagccattgccaaatgctatggctctagtaaaccttaaggaattatcaactggagcttacaagcttttgcccgaaggtacacgcttggttgtatctgtacgtggtgacgagccctatgaagagctggaaatcctgaaagacattgatgctacaatgcttcttcataatataccttttgatgaagaaaagattggtcgagtgcatgcagcaaggaggttatttgagtatctatcggagaacagtcttgatttccctgtaatccatcatattcagtttccaaatgggactcacagggatgacttagtcattaatgctggcaccaatgctggagcccttctggtggatggactcggagatggtatattgttggaagcaccagaccaagattttgatttcctcagaaacacttctttcaacttactccagggctgtagaatgaggaataccaagacggagtatgtttcatgcccatcttgcggcagaacattgtttgaccttcaagaaataagtgcacaaatacgagaaaagacgtcacacttgcctggtgtttcgattgcaattatgggttgcatcgttaatggtccgggggaaatggctgatgcagatttcgga

SEQ ID NO: 194411 - DNA, 422 bp, Gossypium hirsutum
aaaaaacttaaaattctctgcaggagaggaagtgaagaaccctccaagctccggcctccggccttcatcgcccacgcgccatacgcgccaccgcccacggcggttggaaggtgaaaagcctccaatttttcaggcgaaacacaggtgacgacaagagaatgggcaacaatcgtacgttgatgatgcgaatctgccggtggtgggattggcacaccgattgcggcgtgaatttaagatcctttgtctgacgcttgcggtgcccagggtttctgaaaccctaggccttctgtcttctgttaatgatttgggcccccttgggccgtgtttaggcgttgcgttgggtgtaaccgggtatttgggttttaaactaattgggctatgtacatgggctactgtaaaaggacttttattcacaaattaaa

SEQ ID NO: 194412 - DNA, 662 bp, Gossypium hirsutum
ccaggatttattctttttcatcatcaatagacagcccggcgaaatctgactccatggacaggtacatgagaaacagattaagagaattattttagaccctttagatggtagccgtcaaaccaagaaacttttgaaaacctagacttgccaaggaggcagacagaaacatgctagggtagcatacgtaattttgggttcccgaggttggatttcatggtcacatatttttttcggatgggatctgtatcaatccgagtaaagtttctgacattgctaattggaaagctccgaaaaatgtttcagatgtgagaagttttctgggctttccgggttactattggcattttattaagaatttctctatgggttcttcaccgctgattagattgttactgaaaaatgttgagtttgtttaatcagacaagtgccaacagaattttgatcagttgaaaaatatattgacagaagcccctgtactaactcagcctgaatccggaaaatagtatgttgtttatagtgatgcgtcacttagtggcttaggttgtgttttgatgcaagctggaaaggttgtagcttatgcttcttaatagttaaaaccacacgagagaaattacttgacacgatctcgaattggccgcggttattttcactttgaagatttg

SEQ ID NO: 194413 - DNA, 838 bp, Gossypium hirsutum
gcgcccacgcgtccgcccacgcgtacgctttcgaaacacttctccagtgaccaaaaaagcttcattgtctcttctatcgaaaaccccatggctgctcttaagctagtttgtgctctagtgttgtgcatgttggtggttgagcccattgccacaaccaccataacatgcggcgatgtgacaagcaaagtggccggttgcttatcatacttgcagaacggagggaacgtgccgaaggcttgctgcgacgggatccggtccctgaacaacatggctcgaaccacccctgaccgccaaaccgtgtgtgggtgcttgcaagctgccgctaaggctgtcaaaattaaaggcaacttggctgagaccctcccagccaaatgtagtgtcaacatcccttacaagatcagcacttccactaactgcaaaaatgtgaagtgagatggatgaagagagggttttgcagcagcttgcaggagataaaatatatgattaaaaagaagaagaagaagaatgaataaggattttgggatggaattttcaaaatccaaaattagtctccactttagtgtagtgaggctttgtttattttgttttatgttttggtccctgcatgttggctctaattttatatcctctatgtattggctattttaatgttttaatgaattaaagtttatgctttgtcaatcaaaaaaaaaaaaaaaaaaaaaaaaaaaaaaaaaaaaaaaaaaaaaaaaaaaaatataaaaaataaaaaaataaaaaaaaaaaacatacaaaataataaattataatataataaaaactaaatttaatttaatttttcttgggggggcccctttta

SEQ ID NO: 194414 - DNA, 554 bp, Gossypium hirsutum
gccgaaggcttgctgcgacgggatccggtccctgaacatgatggctcgaaccacccctgagcgccaaaccgtgtgtgggtgcttgcaaactgccgctaaggctgtcaaaattaaaggcaacttggctgagaccctcccggccaaatgtagtgtcaacatcccttacaagatcagcacttccactaactgcaaaaatgtgaagtgagatggatgaagagagggttttgcagcagcttgaaggagatataatatatgattaaaaagaagaagaagaatgaataaggattttgggatggaattttcaaaatccaaaattagtctccactttagtgtagtgaggctttgtttattttgtttaatgttttggtccctgcatgtattggctgttttaatgttttaatgaaaggaagtttatgctttgtcagatcagagtaatatgttttaatattgaccagcctattaaatttaatgtaaattgataaaaaaaaaaacatatgtggataaaaacagcatacaccatcaaacaggaagatgtaataaaagggaacaatagc

SEQ ID NO: 194415 - DNA, 702 bp, Gossypium hirsutum
gcgtgcgcccacgcgtcctcaaaaatctttttctaactaattttttccatactcattcccggtttgatgcaactgctttcaccccttcacttctttctcttaacaatgttgctaaaagagagcaaatttctaggatgcaaggaaccaaatactatgacaaactatgtactgaaaaattccaagattgtgctgattgtggagcgctacttgttaaccctagctgtacttttccggcttttggggttccctacggagctgtaacttatcttgcaaatttatatgcaagaaactcggagaacagatgtacggcttgtatcaatcgtggagttgctcctccgaaatcgtttctgaccctgtggaatatgtgaagaaaacagtgatcgaggaaatcgtttcgacttgaaatatgaacttagtccatcggaaatatcattatccgatacctcaactgaactttttttatgcctgatttgtggatgttattgctcttttgtgcttgtaaatattggaaacaccttcctgttgaacttgggaaaattagtatgctaattagtagaatagcttactctttcgtataaaccaagaaccggcactggcatgctttgatttgtgtaactagaccttttgagctatgttatttagactcttcattttcttcgacattcatgttggaaaatataatataatcctttgaagacttta

SEQ ID NO: 194416 - DNA, 489 bp, Gossypium hirsutum
gcgcccacgcgtccgggatgctggcaacagaggtcacagcttcttggaggtattcttatgaatctgtctctagcatccctcaaaagtcgctctacctcaatgagcaatacttgaatgtgaaaaaggctttggtcgatgctttctttggtcctcctgaacggggtgtatatagtgcatctgttcaaagcactcttttgcagatggcaaaggctgtacttggcaggttcggtgacatatcatcagttaaactaaaaatgccgaatatccatttcttacctgttaatatatcaagcaaggatcacggcagcattgtaaagttcgatgatgatgtatatcttccgacagatgaacctcacggatcgatcgaagctagcttgagccggttctggtcaaagatgtaggtacaagacaaacgtactgtatggtgggaagaagggtataataaaatttctgcttcatgctttgctcattatctaataacgataatca

SEQ ID NO: 194417 - DNA, 730 bp, Gossypium hirsutum
ataaatggtattttaaattttaaatgataatatcttcatctttttcctataaagattgggtggaaaaattatgataggtaactcatcctcaaacatcccccgcccctaaaaaactctcactcatataatttaaattcgaagaatctgctacatcaaagggaaatcacaaatcccatttctcttccttacatcttttctttccttttcaacaattgcatcttttgcttttgatcccaaattctgggtttcctcttctgtccatcaatcaattcatactagttactcgaaatcgttaattttaagttgaagaaaaatgggcggtggtagggaaggtgaatcaagtgacaaagggctgttttctcatcttgctggctatgccgccggacattatcctccgcctggatcctaccctccacaaggatatcctcctcaaggatatcccccacaaggatacccaccggctggatatcctccaccagcgggatatcctcctcatggcggatacccacctgcaggatatcctcctcatggaggataccctcatccacctcatggtggatatccaccagctggttatcctggacacggttcgcatggacctgggatgggaggattattagccggggctggggctgcggctgctgctgtttacggggctcaccatttgtcacatggagctcatcatgttgcacatgggggatactatggccatggtcacggaaaattcaaa

SEQ ID NO: 194418 - DNA, 408 bp, Gossypium hirsutum
catcccccgcccctaaaaaatctcactcatataatttaaattcgaagaatctgctacaccaaagactagttactcgaattcgttaattttaagtcgaagaaaaatgggaggtggtagggaaggcgaatcaagtgacaaagggctgttttctcatcttgctggctatgccgccggacattatcctccgcctggatcctaccctccacaaggatatcctcctcaaggatatcccccacaaggatacccaccggctggatatcctccaccagcgggatatcctccacatggcggatacccacctgcagggtatcctcctcatggaggataccctcatccacctcatggtggatatccaccagctggttattctggacacggttcgcatggacctgggatgggaggattatt

SEQ ID NO: 194419 - DNA, 407 bp, Gossypium hirsutum
gtggattccaccccaggtgcgactcctacatcttgcaatggccagcccttcgtccgtaaccgccagcgcgacaccctcttcttgctttgccggagcgccgcgcggcgccgtgaagaacgatttccgaggcttgctgttgaaccaatgtatgaacgcttccggcttatgccgggtcctgtgattgcgccggtacccgttgctccaacggcacatcgtgcgatcctcgaaaccattcttggattctcgacttttgcttgcaacccagaggcgacagtttcacccgcaggtcaattttcgactgcatggtcgccggttccatcctcgtcttcttctggcaccgaacggcttatctgcagtaccaatggtttttaccgaatgatccaaagtgactcgtttatcaccggaca

SEQ ID NO: 194420 - DNA, 726 bp, Gossypium hirsutum
ctcacacataataatacacatcggggttgccgcctgcgcacacacagatcgcatgcagaaagtcgttttcacttctcccttaactccagctatttggagagaaaacattcgttcacagacagatgtagatgagaggccttggagtgatcaagatttctgccgcataatgaagttgtggtatgcccttgctaaaacactctccgagcatgctgcctgggctctcgctatggatcgaatgcttaacatggtttctgtgaatgctcgactagttgttcgccctgctcttgcacatcaaaatccttgttcaaccatgtcatatcttaaaggagctgctgaaatgtttcaaaacggagttctagctgttgtggatgtgaagtttttagctgacgttcatattcgagctttcgaagattcatctaccatcggacgatacttttgcttcaatcaaatagtgcatactgaggaagaagctgttaaacttgtagaaaccctgagccctttgttatcttcacagcccaaatatgaatgccaagggagcgaggcctatgctgagaggttgagaaccaagaaattgaacaaactggttgaaggcactgcataattgtgaaacttgattttaccttttttcctatcgattatagcttcttaactttatcagatgatgtatatatatatatatatgtgttctcattgagaaagacgtgctgattttctcatcagcatttt

SEQ ID NO: 194421 - DNA, 396 bp, Gossypium hirsutum
gtaatcctcaagtctactactacaggaatcggttgaagcagagaatggagggaagaagggtcattgggtgggctgccagagatgtatcagcacatctttcaccttattcattcactctcaggaaaacaggtccagaagatgtggtgttgaaggtattgcattgtggagtacatcacactgatctacaccagatgaggggtgagcttatgcccatcaactacccattggttccagggcatgaagtggtgggcgacgtcgtggaagtgggttcagaagtaaacaaattcaagcttggagacaaggttggagctgggtgcctggtaagctcttgtgggaaatgctcgtcttgcatctccaataatgaacagtactgcaaccagagggtctttacatatg

SEQ ID NO: 194422 - DNA, 555 bp, Gossypium hirsutum
  unsure (1)..(555): unsure at all n locations
ctcgtctacccattcctggcacaggagtttttctacctcctccaggctccaattcagcatctcaacagtcgtcaacaactgcaaccgagcccaacattcctgtggagacaactttcccccccgaaggaaaatgagatggagtcagggaaaaccaatcagcatgcagcttctcctgaagtggggttggataaaaaatctccaaagcaggactgcaatggaagtgtagatggaagtgtgagtgggagagctatggtgaaggaagaagtacaatgtgctgagaatagtgtcaagcaaagctgctaatgcagttgtgagagagagaaagagagaaaagcagtttggcctgcaaactccaatgagttaaaagcaaatgttaagagcggcaacagtcgagacatttggcatttgatacgagtaggtgggagggggagcaaaggggagggaggaacttctcagttgtctctgcaatccttcatgtngncttttccatttcttttttgctgtcttagtatatgaacacactcacgctaggtggaaaactcattcttaatatac

SEQ ID NO: 194423 - DNA, 452 bp, Gossypium hirsutum
cccacgcctccgatccaatattcagactcggctacctctaagaaaattgggagttagctgcgtcacagagaaacagagtggaaacaaagcagaaaggaagagaagaagagctaaaaaatatatagatatttaaaaaaaaattcatcaatggagataacgaaccctaaaccatcttcgaaacgcctgctattcgaccggcgttatggtggggtgttggatgaatggaaagacccatcggaagaaagctctggctgctgcccgaggaaggtaaggtttctttcttttcttcccttattaaatcaaatattagcaattgctgtacttaaccactcttcttttttgggttttttcttgggggtcattttcgaaagggtttgcataattcctctaacaaaagctttcttgaagaccggtacaaattcgatcaattttgtgggaaggtctactgtaaa

SEQ ID NO: 194424 - DNA, 775 bp, Gossypium hirsutum
gtttccttccctttttatccttcactcaacttccagtccctgatctccgtttgcattctctctcagctttccggtcgaagaatcattcaatttaaggggaaaaagaagaaaaaaaaaaaccaaacatgtcgaaatcggtgattgaaacgcctccgaagggtgggtttagcttcgatctttgtaaaagaaacgagatgctttcaaagaaaggtgttaatccgccgtcatttcgtaaaacgggtaccactattgttggcttgatcttccaggatggtgtaattcttggagcagacactagagcaactgaaggacctatagtttgcgataagaattgtgagaaaattcattacatggccccaaacatttactgttgtggagctggaactgctgctgacacagaggcagtaactgacatggtcagttcacagctccagttacaccgctatcatactggtagagagtccagggttgtgacagcattgacccttctcaagagacaccttttcaactaccaaggctatgtttctgctgctttggtacttggtggtgtaaatgtctctgggcctcatttgcatactatatatccccaatgggtcaactgacacattgccatttgcctacaatgggttctgggtccctggcaaccaatggctgtatttgaatcaaaattcaggaaaggcttttcttaaaaccaaggaataaaaattttctctggaggctatttctctggttacctccatgaactccggttttgaaaccatgttgaaatttgtgt

SEQ ID NO: 194425 - DNA, 641 bp, Gossypium hirsutum
tcggttgtgacagcattgacccttctcaagagacaccttttcaactaccaaggctatgtttctgctgctctggtacttggtggtgtagatgtcactgggcctcatttgcatactatatacccccatgggtctactgacacgttgccatttgctacgatgggttctggttccctggcagcaatggcagtttttgaatcaaattacagggaaggccttaccagagatgaaggaatagaacttgtcactgaggccatatgctctggtatcttcaatgacctcggaagtggaagcaatgttgatatttgtgtaataactaagggtggcaaagaatacttgaggaaccatctacaacctaatcctcgaacttacaccagctccaaaggctattcttttcccaagaagacagaggtcctcttgacaaaaatcataccccttaaggagaaagtggagatcatcgaaggaggcgacgccatggaagaatgaagcacttacgcaactgatgattagtatatcaactctctagcgttcatttatgctctatcaaagaactattttctgatcagtattgtgcaattgctcatctgtttgaccaaagattttgttggtaatcaaaccttttgagtttgttttaacattgcaca

SEQ ID NO: 194426 - DNA, 496 bp, Gossypium hirsutum
caaaaaaaaaaaaaaaaacaaacaaaggtagcctgagcaaactatgaggaagtgggcgatcccttccgctttggttcttctttgccttctcagtctcctctcagatcatgggagaaaagtacaagcaaatgccgaggaaggaggtgtagatcctcctaaagtcgaggaaaagatcggcgctgtgcctcatggcttacaaactgattctgatgtagttaaaagggaatcggaatccatctcttcgagatcgcttcgcaataatgcggagaagtttgagttccaagctgaagtgtctcggcttatggatatcattatcaattctctttatagcaacaaggatattttcctgagggagttgatctccaatgcttctgatgcactggacaagattaggttcctttcactcacagacaaagaagttttgggtgaaggcgacacttccaagctggatatccagattaagttggacaaagagaagaagattctttcccttcgc

SEQ ID NO: 194427 - DNA, 779 bp, Gossypium hirsutum
cccacgcgtccgcccacgcgttcgttggtggagggcttgttgtttggatgtgagattggtgccattaggcatgctcatccccattgcttatcactgctggttatggcataaggttaggactcagcctctcgctaccatcatcggaatcaattccaccggacgacgcttctgggtctctgccatcatcaaggacaacgcgaaaaagaacatcctggcagtccaaacgcttcgaaacaccataatgggatcgaccctaatggccacaacatccatcctgctgtgtgctgggttggcagccgtcatcagcagcactgacaccgtcaaaaagccactcaatgactctatattcggagctcacggggagttcatggtggttctcaagcacgtcacaatcctatgtatcttcctcttctcggttacgagccacaccttatctatcaggttcataaaccaagtcaacatcctcatcaacactccccaagaccccacctccattgttacccctcactacctgtccgacttgctcgaaaaagggttcctcttgaacactgtgggcaacaggctcttctacgctgcgcttcctctcctgctatggatctttggccctgtgctcgtctttgttggctccatcaccatcgtcactttgctttacaaccttgacttcgcgtttgggtttaggagaaacaagcatattgatgttggagactgtgaatgagggcgatcctactcgtacatgtaagctttaatgccctagcaaatgccatgcatgcggcactaga

SEQ ID NO: 194428 - DNA, 863 bp, Gossypium hirsutum
tttgattgaagtgaagcttttgaagacctggtcaagcgcttttggattaagggttgtttgggcgttgaagctcaaaggtataccatatgaagcaattgatgaagatctgtccaacaagagcgctttgcttcttcagtataaccctgtccacaagaaaatcccagttcttgttcacaatgggaaccccatctctgaatcccttgtgattcttgaatatattgatgagacatggaagcaaaatcccatattgccccaagatcctctacacagagccagggaacggttctgggccaaatttagtgatgaaaagctactaccatcagtatggggtgctttcaccaaagaagggaaagaccgagaggaagctatggctgcaacgatggagaacctgaaattcgtagaagaagagctgaaaggaaagaaattcttcagtggagagaagataggcctggtagatcttgttttcggttggcttgctaacttgatctctatttttgaagaggtatctggcttcaacatagttggtgagggatatccattgttatcggcctggatgcaagaattttcagaactccctgtgattaaagatacctggcctcctcgtgacaagatgatcatcaagtatcaagcactttatgacaattcccatcctgcaaaatgacctgttcctgaggtttttccattggtagtttacattaaaagtttaggcatcatattgctgcaataagttcaaaactatgtgtgtagacaaggccttggagcttatttaccattaatgagggattttcctttgtaatctgtcaagaaactgaagttgtaattgttgaaccagattgcctcgtgaattatatcagttgttgctg

SEQ ID NO: 194429 - DNA, 547 bp, Gossypium hirsutum
ggaaaacattagaatatctgttattggagatctaactaagctccctaaggcccttcaggaactgatgatcaacttagaggaagccaccaagaacaatacactttttcaactaatcgtagcggtcagttacagcggacactatgatgttgttcaagcttgtcaaaggcttgctctgaaggcaaagtgtggtcttatcgaacccagtgacgtcaatgtctctctaatggaacacgagctagaaacaaattgcacagaattcccccatcccgacctgcttataaggacaagtggagagttcagaattagcaatttcatgttatggcagctggcatatactgaattgtactttgcacagtcactatggccggatttcggaaaagccgaatttttgaacgcattgcttgcctttcaacaaaagcagaaacgttacggtgtatgaagttatttgtgtacgactgttgacacttaattattgtggaatgggaaagaattgatggtgacacgcgaaggggcttaacaagaagctggatttggccattggagtatt

SEQ ID NO: 194430 - DNA, 455 bp, Gossypium hirsutum
tccactcgtccgcccacgcgtccgcccagaaacccgtccctctccttctacgcagaggaatcaaaatcatgttgttcttttcgtgggtcggagacttggtgggaagagaagtgacggtggagctgaagaacgatttggctatcagaggaacccttcactccgttgatcaatacctcaatatcaagctcgagaatactagggttgtcgatcaagacaagtatcctcacatgctttcggtaaggaactgtttcatcagaggctctgttgtgagatatgttcaactacctccagacggagtcgacattgaattgcttcatgatgccactagaagagaagctcgtggaggctgaaaaagcagcttttgttgacaaattcacgtgtgcttttaatgatttagatattttgcttcaaagattgtgacaagttatccaggatttattcctttttgcattaat

SEQ ID NO: 194431 - DNA, 424 bp, Gossypium hirsutum
gaaaataaaaaatcagactcactagctgaaatttgtataaacgaactccaaatggcgtttggtaatgttcccactactatcacaaatgatattggccatggccagcatctagtattgctttcgtcgagctacagacctatcccggataacatcactatttcagggaattctcagcaggaaatgccagacaactatgtgaacggagcttttgtgtatgacgtcggtgatggcttcatctggatcgttttctggaccaagaataatcaggtctctactaagatcttcatacgttataatgactccactgaacccaataattccattctctggcaccaagttgtaaacaatcttcacccccgcctcagcgaagattgcgcttttggatataccgcatgggcaaggattgaaccaaatgctaacggtc

SEQ ID NO: 194432 - DNA, 282 bp, Gossypium hirsutum
cccacgcgtccggagctttactctttattaacggttgctgaaatcccagctgaaggattgaagggtttaggcaccaaggtcattgatgacgatgaggaataatttttatctgtctcttgtttacttgcattttgttctcctacaagtttcatcagagttttgactagttttacaattgtgacattaaaaatatttggtttgtgttatttagattcttaagcttgtcgctttagtttagagctttataaatagattcaaatgatgagtgtttggatttatgtt

SEQ ID NO: 194433 - DNA, 717 bp, Gossypium hirsutum
  unsure (1)..(717): unsure at all n locations
gacagccttcttcttttccaaactatggaaagcataatcaaaggacgactgagagatgtggactacccatatgttgganatcattttcagcagggcaggccacaggaggtggttatattcatcattggtggaacaacttatgaggaatcgcgctctgttgctcagctaaatgccagcaattctggaattcgttttataattggtggaacagcagttctctcttctgaggggtttctgaagtgactccctagaagaagctttctaggggaaatagctcgagagcgaatgccaatcgtttgtttaacgtccaacatttgtggcgtatatatatactgggttgagcatgcagaagcatgtaaataagcatttgtgggtcattagtttagatgattggcagtggaactgtgttggtaaaagcaatatgacaaggtgagactcgtgaaatcagctcattgtctgtgtttaagatgagataaatggttcgacgatcaccattgcagagtataagtgaaaggtagaattggctaaccccctcattgtattcgtctttagggggcattaccatatttcttctacataaaattttgtaatttagtattcaactccctccttttgtgttttgctggtgtgtacctcattgatgcatctagcattcacccatgtatttgtatcgtcatctgattgtcaaaaatggaagctatagttttctctttaaac

SEQ ID NO: 194434 - DNA, 657 bp, Gossypium hirsutum
ggccttcgcccaccgcttccgcccacccgtccgttttaagcatctttgtcaaacaaatcaccaatctttccagaggcctgagcctcaccacttcagtgattatggcttcgacccccaattccactatttccaggttttggaacatgcaaggaagcacaagatagggacgcgagactccattgattcactacagttcaagctcgaaaaacccatctctaaagacgacccaaagtccaaaacgaagaaatattggtggagaaatgctctcttgttcttcaactggaaaaaatggtctccaaatagcaataaccagcatgatgatcgaacaaaggctaaagctttaagggcatcgaattcaggaccaatttacatgatcgagaccagcaataatggttcaaccactccttatcgaaccagtagccgaccatcttcaggccctttgactggaatttcgactccttatattagtcttagggaacttaacatggagcaacaacaacatagggtttctacttcttctttacccatatatttggtcacttaacccatcattttttttttgggttaagctaagtttttttttctttttcttttaagctctgtttatcatcttcttgggttgtacacactgacagaagtgtttgataaagtttgttt

SEQ ID NO: 194435 - DNA, 433 bp, Gossypium hirsutum
gagaaatctagaattctctcagagctccggtctagggccatcactgctcatccttgagctgtgccgcgtgtggtcttagcgccgactctccatcctaagaaccaccgcacacggtggctaaggttcaaaaaaccctccctcgccagtcgtcgggaaaatcacgaagctcacggtggtaatctcgtcagcgttgatggaggcgtagaatctggttatgaggagccctgggtatgctaagaaggtgcattaatggcctcgattttagggagctagacagacgctcctcgaggcttctagaagacgttgcggcgctagaagaaagagggcagaaaccctatggtttcctgcttgggtctgtaatagtttgggccagttgggcctctttagtcctgggtctgtttgggtctgggtttgctggatgcttgtaactgga

SEQ ID NO: 194436 - DNA, 526 bp, Gossypium hirsutum
tcgtccacgcgtccgcccacgcgtccggttttccgatatggcttcagctgatgttgagtaccgatgcttcgtcggagggctcgctggggccaccgatgaccgggctctcgaagaagccttcagtgtgtatggcgagatcgtcgaatcgaagattatcaatgaccgtgaatctggaagatcccgaggctttgggttcgtaactttccgtgacgagaaatctatgagagacgctattgaaggaatgaacggtcagaatcttgacggaaggaacattaccgtaaacgaagcccaatcacgccgaagcggtggaggcggcggtgaaggatacggaggaggaagcggaggctacaaaagaagtggaggaggcggaggatatggtcgccgtgaaggaggctatggaggtggccgtcgtgagggtgtattcgggaatggtggaggatatgacggcggaggcggtggtggcggatatggcggaggcggtggcggatatggaggcggtggcggatatggcggcggtggcggtggt

SEQ ID NO: 194437 - DNA, 501 bp, Gossypium hirsutum
cccacgcgtccggggtactgtcttcgaaaaaagagtcacagtgttatctctggaggaatttctatgcgttggaccccagagagaagcagggaaacaagggaagagtttgttgagaaaaaccaaagatggcaaaattctcaactggaatgttgaaactgatgattcattttgtacattggctgaaaccttccagaaagttgatccttctttaggtttcaatattgaattgaaatttgatgaccatattgtttaccaacaagaccatctcatccatgtcctccaagtcatcttgcacgtggtatctgagtatgctaaagataggcccataatcttctctagctttcaccctgatgctgctcaactggttaggaaattgcagaacacttaccctgttttcttcttaacgaacggcgggactcaagtttactatgatgtaagaagaaactccctggaggaggccataaaggtgtgcatggaaggaggtttacaagggattgtttt

SEQ ID NO: 194438 - DNA, 690 bp, Gossypium hirsutum
ctgcatcagaggttttcccgatctttgctttcgactaattgaagaccttggctctgctaatcgccacttgagatcttcaaacaggaagaaaatggggttcattatggaatttgcagagaatctggtgttgaggttaatggaggacccaaaagagagggatagaaaattcagagaacacgtttactctatgaaggatcgatgcgcaaaaaccaaggagatgtggagttatccactgcggccttatgggttttggacatttgagcgccacaatgctcagctccgttgggatcctcagattagccaagtccccggccgcagggatccttatgatgaccttcttcaagacagttatgcgtcttcctccaaacgaaactgaggaatcagaagccattagcagatggtttggagcttgatctacaaatgggaagtggacattgaaaccctttttactttttgtttgaatttattttcaattgtgctacaaaaagattctgcttgttttgtagtctacttttgaacatttgagttgggacactggtttatgaatgaaaataaattgtccatgtaactcaatgggtaagacttgtaagggaaataaagactctgtgttggtgaaaaaaataatataatataattttcaataataaaaaaaataaaaaaaaaaaaattatttataaattaatttataat

SEQ ID NO: 194439 - DNA, 680 bp, Gossypium hirsutum
gcctggggcaataacccacgcgcgcgtcagcttcactccacatttcacactctttttcaactttctcttcttctctttgttttaaagaggggctggagttttagccaaagaaaactccatggctaaacttgttgctactttcttcttggctctcattgccatctccatggttcaaactttggttatggcatcacatggacatggtggtcaccattatgataacaaacgttatggacctggaagtctcaagccttaccaatgtccatctcagtgcacaaggaggtgtagccagacacagtaccataaaccatgcatgttcttctgtcagaaatgttgcaggacatgcctttgtgttcctccagggtattatgggaacaaacaagtttgcccttgctacaacaactggaaaaccaaggaaggaggccccaaatgcccttaaattactcaaaagaagacccttttttttcttttttacattattatccctataaatttcctatttgaaattcaagtcattgaagcataaggttgcactgtaatactaactatatattttatgttgttagttgttactagtggtttatgtgttttgattttttttgtaccaaattgtcactccattaaaatgagagtggctaatctttgttctattttattaatgaagatggtgtcgtttaatt

SEQ ID NO: 194440 - DNA, 711 bp, Gossypium hirsutum
catttttcttctctggagacttcttcttcacttcccccatccagccgagcttgatccatttgcataatctggaactcccctatccagtctccttcaaggatcaaatgtcgccatcccctcctgattcccatttgaacgcctttccggcaggcaattgcttcagcagcattggctgatggaataccaaaatgaatctctgaatatgaaaaaagaatagtaccattcgaatctctggccacaatacccacacccgactgattctttactttatcgtaagcaccatcaaagttgatcttcatgaaactttcctgtggtggcgaccatctctttttctctaagagtgcacaacaaaatacgcgactttgatcaaggttgagctgctctattgcctagcttcttctccacatcaggggcagctcggatttactactaacttccgatgttgaagattcacctttgtaggcagataattcctagatagcttccatattgtaaccttaattttagctggtagattcaggcaccatagttttttataaaaattcccatagatggtctgttaaagcataagctctaggattgtcagtcaatttttgtaatagttgataggcacttctgaccgtaaactcacccgaccgttcgcctccccagataagaaaatcatcatgcggcgtttgtgccagagggattctgaggattctagctgcgtcg

SEQ ID NO: 194441 - DNA, 324 bp, Gossypium hirsutum
tgatccatttgcataatctggaactcccctatccaggtaaaactcttctcctcttctcaatgatcctgtcgctatgatatgagctagaccatttgcggatctaggtatattctgaaatctgatgttttcaagtccatagatttcctgttgaatgtcaaacttgtatactccccccatagatctatcttgactctgcgatttacattttttgactattgcgagggagtctccttcaaggatcaaatgtcgccatcccctcctgattcccatttgaacgcctttccggcaggcaattgcttcagcagcaaaggctgatggaatacc

SEQ ID NO: 194442 - DNA, 714 bp, Gossypium hirsutum
cggacgcggcaattaaaatcccagaattacttaaacaacaatggctacctatgaaggtaaagttttcactgaagaacaagaagctttggtggtcaagtcatggactgtaatgaagaagaatgcagctgaattgggtcttaaattcttcttgaagatatttgagattgcaccatcagccaagaaactattctcattcttgagagactcaaatgttccattggagcaaaacacaaagctgaagccccatgccatgtctgtctttgtcatgacatgtgaatctgcagttcaactgcgtaaagcaggcaaagttacagtgagggaatcaaatttgaagaaattaggagctacccattttaagtatggggtagttgatgaacattttgaggtaacaaaatttgctcttttggagaccataaaagaagcagtaccagatatgtggtcagatgagatgaagaatgcatggggtgaagcctatgatcgtttggttgcagccattaaaatagaaatgaaggcatgctcactagctgcatgatttcacaagttccctacattattgcttgttaattttgggtccaataagattgaaagttttcaatcatttaaacatgtaatgtaacatagctattgctcatcactactgttttttccccctagtttgttcgctcctgttctttttggccccttgtatctccataaataattggtaacgtaaca

SEQ ID NO: 194443 - DNA, 522 bp, Gossypium hirsutum
cccacgcgtccgtccacgcgtccgcccaagcaccctttcacgtataagtctcccccaccacccacggcagtctacaaatataagtctcctccccctcctcctccagcttactattacaggtctcctcctccaccaccaccccattatgtctactcatcaccacctcctcctcaccactactaagcaacggctttgaccgcaccaaggggaacaaaagagtgtgatccaataaagcgacagagaaagagagcagtgagaggtcgcctagtctccgcgtttcaagagaagaaaaagaaaacaagaatgatgtagacaagtagtagggtcaataaaaaacaaggggttcatcgttttcacatttgtattattcagtggttctcgtatttcttgctgctttagtatacaatgtttcctagattttatgtgtttttcttttccgacctttttgcaaatgcaggggtgatgggtttgatctttaataaaataaaggtttttactaaaaaataaatttttttattaaaa

SEQ ID NO: 194444 - DNA, 414 bp, Gossypium hirsutum
ccttcgcgtccgcccacgcgtccgaaaaacccggggatacctgaagcttccttggcactatctcaaacccaacaaaccatgtcgctccaatgccaccgccattctcctactttcccttcttgctttagaccttgcaccaccccattatgtctactcatcaccacctcctcctcaccactactaagcaacggctttgaccgcaccaaggggaacaggagagtgtgctccaataaagcgacagagaaagagagcagtcagaggtcgcctactctccgcgtttcaagagatggaaaaagaaaacaagaatgatgtagacaagtagtagggtcaataaaaaacaaggggttcatcgttttcacacataaaaaaaaaaaaaacaaaataataaagaaataataaaaaaaaaattaattt

SEQ ID NO: 194445 - DNA, 1065 bp, Gossypium hirsutum
cagaggacctttcccacccttcaaccactgaaaaaagatggcctccaccttctcattgcagatggttcattgccctcgcttcagtttccagggtcaagctgtttcaaatgctcatagcccacatatgatcggttcatggtcggcttactcccaacctaactcatctgctatcgtcttagcatcgaaactaaactatgcatcaggtttgcctgtgacccaactttctaaatccccttccgttaagtaccgaagaatggtctgcaattccatgggaaatgatgtaaagttgcaagcgaaagtgacgactaagtgcttctttgacgttgaaatcggtggtaaggctgttggcagaattgttatgggcctttttggggatgttgttcctaaaactgttgagaattttcgtgccctctgcacaggagagaatggatatggtttcaaaggatgctcctttcaccgtattattaaagatttcatgatccagggtggtgattttactaatggaaatggaactggtggaatgagtatttatggatccaagtttgaagatgagagctttgctttgaagcatgttggacccggcgtattaagcatggccaatgcaggtcctaataccaatgggagccaattctttatttgcacagtaaagactccatggctggacaacagacatgttgttttcggacatgtgatcgatggaatggatgttgtgcgtgaactagagtcccaagagacaagcaggacagatggccctcgagggccatgcagaattgtcaattgtggggagctgcctataggaggctaatatccgatccgtttaaccactaccacaaatctcccattttatcatttactttctctgcttcaagatgattttacctggtaataccgacaacagtcggcgtttattatagaagagagaattttggatgatactttgtaagctcttggcaggggtgtgctattatccttatcattttttacggtgtaagtttgcagattccatcaaaactcttctcttaatggaacatctgatttttctttataaaaaatattatattttaa

SEQ ID NO: 194446 - DNA, 440 bp, Gossypium hirsutum
tcgcccacgcgtccgcctggaaccactctgctgccgctgcccttcgggcacaccttcggcgcttaccagtcacctacgctcttgcagcatgcccccttcgggcaatactactttcgtaatacgcgaagcagctgagcgatagctcttcgatcgctatattctcgcgatggcgaaggatcgaagatcttcgcgagacggcccatgaatcaatctcgagaatcgagcatggggcttgaagaccctaccgcattccggccccggggccttcaattggtcctttctctcttctcttttaccagtgagtggtgagtttcctttctaggtaggtacctcttggattcggagtttgctccaacatctgccacacgtgagatcctgatcgtctttctcccagcgttgatgcctgctgggggaaggaaacaaaaaagcacataagctta

SEQ ID NO: 194447 - DNA, 452 bp, Gossypium hirsutum
cgcagattgtttcatctgatctgaaactccgtcgcccacttcccaaacaaagcaaatcgatggcgccgcctcctggaccatactccggcaccagcactctcgctctcgtggctcgtgcatctgctttctcttttggactcgtttatggtagcattaagctcaagtatctcaaggccaaggcaaggtctcaaaggaaagctgaagcaaaggctcaccactgaagcaggggtggtttttgttcatagttggtttgcatgagtgaattgagtttggtgtaggaataaagcatatcaatggtattgtaccagattttcatttcggcttaaagcttctacggacaatgacattcttgtccccaaatttttttagtattacgaacttggcatttcaagtattaatttttcggttggcaatggcactaccgacgtttagtgtctttagtaaatgggaag

SEQ ID NO: 194448 - DNA, 1037 bp, Gossypium hirsutum
cctcttcacaagactaacaaacctggaatcacttcaattgatatcaatttttcaaaggatattgttgccactggaggggttgattcaagtgctgtactctttgatcgaacatctggagagatcttatctacactcagtgggcattctaagaaggttactagtgtaaaatttgtagcccagaatgatgtatttttaagtggttcagcagataagactgttcggatttggcaagggtctgaagatggaaagtatgattgcaggcatattttgaaagatcatacagctgaggtgcaagctgtcacggtccatgccactaacaactactttgtaactgcttcacttgacatgacgtggtgtttttatgatctttcgtctggtttatgcttgacccaggttgaagacccatcaaattctatgggctatacgtctgcagcttttcatcctgatggccttatccttggaactggcaccactggagctactgttagaatttgggatgtgaagagtcggggaaatgttgccaactttgatggacacactggggctgtaacagccatatctttctcagaaaacggttacttccttgcgactgctgctcatgatggtgttaagttgtgggatctacgcaaattgaagaactttcgatcttttgaattatatgatcaagacacaccaaccaactcagtggatttcgaccatagtgggagttaccttgcaattgctggctcagatataagagttttccaagttggcagcgtaaaagctgaatggaattgcatcaaaactttacctgatctgtccggcacaggtaaatcaacttgtgtcaaatttggtccagatgcaaagtacttggcagtgggatcaatggatcgcaaccttcgcatatttggccttcccgaaggtgatgatgcttcaacagaatcataaaaaggaaccccttctgttcttcatatatgataagttgcgactgctcggtttcgtggttaaagtagaactggcagattttgaggtggggttaaatcttttagtcttgtgct

SEQ ID NO: 194449 - DNA, 458 bp, Gossypium hirsutum
gcgtccgaccgtcagagtgaggaaactgcaaagattcctgcgacctcaggtgaggaaactacaagtggtcctgtggccctgcatgaggaaactctggctattccgacaactttggctgagggcagtccaactatgaccgcaaaattggatgaggaaactccaaccagtcccacaaacttagctgaggaaactttgacttctcccacatcctccggtgtggaagcttcaacagttctcgcaactaacagtgaggaaacatctgctgtttctacaactacggaaatggaaactttaccccctgcgggtgctgaaagtgtagaacctgcaacttaattgctttactgtcaaaactactcggaaatttcagaattgttgtaggggagaacacgtccagtggttctgatatcggtgtggggtttggtagggatgattcgagttgccatagaagaaagcaagca

SEQ ID NO: 194450 - DNA, 953 bp, Gossypium hirsutum
cccacgcgtccgcccacgcgtccgcccacgcgtccgcccacggacatatacaatttagccaactcttgtgtatttcatccacgatgaatcccttcaaaaccttgccaaccctttctttcctcttcttaacccttttcagcttagcccatgcagccacatttgatataagaaacaactgcccttacaccgtttgggctgccgcatctccgggtggtggcaagagacttgaccaaggtcaagcatggcaaatcactgcagcctctggaaccacacaagcccgaatttgggctcgaaccaaatgcaatttcgatgcctccgggaaaggctcatgcgagacaggcgactgcggtggagtcctcgaatgcaagggatacggtaaagctcccaacacactagccgaatacgcaatcgaccaatttgagcaccaagacttcattgacatctccaacatcgatggctttaatgttcctatggagtttagctccaactccccagggtgcactagggttatcaagtgtacggccgacattgtcggacaatgcccgaaccagttgaaggttcccggaggttgtaacgggccttgcccagtgttcaaaactgaagaacattgctgtaattctgggaactgtcaacctaccgacttctcgaggtttttcaaggagaggtgccccgatgcttatagttacccaaaggatgacccaacaagcttgtttacatgccccacagggactaattacaaggttattttctgcccatgaagagtatttgggatggttttaagtcctttctatacacaaattagtaggtttatatcaataaatggaataaactcgaatgctatttgagcacatttcttgatgtgcatatgttctgatttgtaataatagtgtttgtcatgaatgaaaatttggagtctctatgggtttcgattaaacttgttgtaaaattggagc

SEQ ID NO: 194451 - DNA, 593 bp, Gossypium hirsutum
ccctctcgtccgatttatatatatacacacactccgttgtagaaaggaaatatattcccatcttcaaccgttgccttattgtttcttcctcttttagattttctttctctccgttttctttccttacttgtatggcagccaatttgaagagtggtggagggatcgccagcttggggaagcgacttcttaaccgcacctccactcgcaccccttctcttttcatctccacttcttcacctaccaggagtcctcacgcgtcggcatacgacaagaacctggatgatcaggtccatgcgactgtggttcctgatgatgtgattcagcctcaatcggacaagtactgggctcctgacccgcggacaggggtatttggtcctgctacggagcaacttaacgcatctgcgggtggggagcagggcacccattccagtggtgcaaactcggtcctggaggaaaaggcgtggttccgccccacaagtattgaggacttggagaagccacaccatcactaagtcgctgataatgagcctgctactatatagtctataggtaaaacaaagacaatatgtgtggtttgcttggatcaaataaac

SEQ ID NO: 194452 - DNA, 555 bp, Gossypium hirsutum
acccttccggttctggctacagcatcgtccgactccaccgtttgtttgtttgatgtacgaaagctgactgtaggttttcatgttttaagcagccacagtggagaggtcttccaggtagaatgggatcctaatcacgagacagtgctggcatcttctggtgatgataggagattgatgatttgggaccttaacaggattggagaagagcaattagaaatcgaattagatgccgatgatggccctcccgaacttctcttttctcatggaggccataaagctaagatttcagatttctcgtggaacaaaaatgagccatgggttatttctagtgtagctgaagacaacacacttcaggtgtggcaattggcagagagtatatatcgagacgaggatgacactcaaactgccggagaccatccataggccatagaagttggatttagagttttaaggatatgacctttttaaagtagcatcattgtgagtttataataatgctttgtatgtggacacgctttatgagtcttttaacatgtaatttaatatttcaaacct

SEQ ID NO: 194453 - DNA, 398 bp, Gossypium hirsutum
cgcgtgcgcggacgcttggagaagatctaaagctcgtgcttagaaaaaatatgccagagctgatgaactgtgccacaggagtatcgaatcaggataccacttacctacattcaacttctcaaatttgtagtactactgtgattcgagattgttaaccattgtgtatctgcagggtcatagaccttcaaaacgaagagattcttgctcaaaagtatcagattcgactaacgtgatgaagaggcgtaagcaaaggtgaatcaagttttgcctcgggaacgtacatggttgacaccatgtcaatcctactccaagtcaggcgatgtttactttcatgccttggagcaagcgtactcacaccggcggtaggctcaacctcaaaactagaagtaggtgcaaga

SEQ ID NO: 194454 - DNA, 414 bp, Gossypium hirsutum
tgcaaacagagaacgatcagttgtactatcttcagaagcaaagcaggctgcttccgaaattgagcttcggctgcaattgggatcaaaactcagtgatattgtcagcagcaagggggatgtactggcactattcaatctgtataaagatgaaggctacgtactgactgaacaagaaggaaaattctgcgtagtgcttaaagaaagttgttcaccgcaagatatgctgaagtcacttttccaggtaaattatttgtactggttggagaggaatgcaggaattgaatcaaggggtgcctccaatgactgcaggcaagggggtaggctacaaatctctctcgagtatgtgcaaagagaattcaaccatgttaaaatcgacagcgaatcagtacgttgcgtaactgatggacttattgc

SEQ ID NO: 194455 - DNA, 351 bp, Gossypium hirsutum
catattgatcgccggcttcatcaaatgctgcttgctgatagggattacgaaggtggtggagggacaagtgaggttgactatcctccatccttcaaaccaaagatcacagttgagcgctgtgaggagaaaggatactcgcttcttactgtcccgtgcaaacatcgagctaagctcatgtttgacattgtctgcacgctcacggacatgcaatatgtagtttttcatgctaacatctcatccaatggtccttatgcttcacaggaatattttattcgccacatggatggttgcacacttgatactgaaggagagaaagaaagggttgttaaaattctcgaaacttccattcat

SEQ ID NO: 194456 - DNA, 450 bp, Gossypium hirsutum
ctttctggttccggatctctctgcatttgcttccccgcctacaatgaacgccatctccacctctcctgtcgatttcattcaagagagtaacaatggcaatggcagcgactccgataccagtcacgatgacgcgcctgaatactaccagccgatctcagccgtggatggtgatgatgacgacgacgacgatgaggatcgagaaagtttcgatgatcaagtcaattcagatgaagaacaccaccatcgtaacctaacgagtggttacgtcaatcgagtggagaacgggatctcgtttcttcacgtaggcagcgtcgctacggagcaagaagaagaggaagaggaagagaggaggagagaggcgtctgatacggcgataaggagggcgtttagggaagatgagaggcggagaaacgcgccgttaacggcggagaatgctatgagagtgaggga

SEQ ID NO: 194457 - DNA, 1000 bp, Gossypium hirsutum
  unsure (1)..(1000): unsure at all n locations
cacccttccgaaaaaggtatacccagaatattttatttttctcaaagaaaagaaagatgagccgtaggttttcggatcaggtgagagtaacctctgaaaacctgctggagggtcctaatgatgatggctacagttggagaaaatacggccaaaaggatatccttgaagccaaatatccaagaagctattacagatgcacctatcgaaacacccaaaactgctgggctacaaagcaagtccagagatcagatgaagatcccaccctctttgaggtcacatacagaggaactcacacatgtgcaaatggcaaccccgcagttccatccccagaaaaacaacataaatcaaactcaaacggccttaataataccaattaccaaccattgcaatcacaagataccctctcagagtttcgagcaggcctaagagtcaatactgagggcttagacaataaagagatggcacccccattctcttttgcttcaacatcatttngggtgtataaagagcgaaaaccatagcttttcaccttcaggagtacttgattactacaatatcttcggcagcttttcatcgccgttcatgtgtgccgatacaccagaattaaactacttttcagtttcccagatgaacaacttccaaggggtgctcaacacacagcattctaaatctgatctcaccgagttggtttcagccaacacttcggccaccaattctccaattatggacttggatttttcgctcgaccaagtggagttggacccgaatttcccatttgacacaccgggatttttctcctaactcttttccgcaatcgaataagagtaatggtagatgtcaaattcgggttccaataaccaaagtaagttcatggtgagccgtgtgttctgcgaagaactattgtacaatacatgtccctttcaattctatgttggttttgagaaatttcctcagattaaacaaacttaaaaaaaaaaaaaaaaaaaaaagtctcgccgct

SEQ ID NO: 194458 - DNA, 790 bp, Gossypium hirsutum
tttcactatccggcacttcctttcttccgtaatcttactttcagatttcagtctcagtaaagctgtttttgcaccagccaaaatgggttcagttatatactctttctcggagtgagggcttttgttccaagtggtttactgcttcagccttcagcttcagggttggtgggtttttgtactgagttaaagaaatgcctctatatgattgtgtgcttttattgaagccccatgtgaagaaggaggggctcatcgatttggtagcacgtgtaggtagacatgtttatagcagaaatggggttctcactgggctcaaatcatttggcaccggtcaattaggttatgggatcaggaagctctccggaagatactaccagggtcaactcatgcagatgacaatgatggccacacccaatatcaacaaggagctgcagtacttgaacaaggaagacagactgttgcgttggcttttagttaagcatcgtgacacgaaatatgggctggaattccttaatgaagatgatggggaattggagcttagcaaactctctcgaggcagtatatatgaagaggacattgatgacgatgatgatgatggtgatgatgatgatgaatacgatgagaacccaggcaatggcggaaaactctgatcagtaaaaggttttgataatccgaggatagagcagaacctgatagataattgaagtccataactatgttctttgtctttgtagtatgcctttttaaagttctgaatgatccaacttatgttgtttgtaggtcttaagagact

SEQ ID NO: 194459 - DNA, 374 bp, Gossypium hirsutum
cggtgaatacttgaagatataaaaatatgacctcttcacatacgttaaaaaacacataaaatgggcctgaatcatactcatgtcacacgtgcaattccatttaacagtctttgccccaccattacctgattgctccaagcaagttggctccatcgagctttgcaccttctaagtgcgtatcacgaacattaacatgtcgtaaataagccctttggaggtttgcacccttcaaattcgcattgcttaatttcgcacccttcaaattggctccttcaagattagctccctctaagttggcatcagttacatcagcactctgtaagtgtgcataacgaacatcatccacacagaagctacaatctatcaaaaaaaca

SEQ ID NO: 194460 - DNA, 446 bp, Gossypium hirsutum
agatcgcgagcgggcgctcgcgatctcacgtgggctaaaatgtgggggtactttgcaagagcgagctgctcgtctgtttctgctaaaatctacccctttagataagcttccaaagaaactgcttgcgaagaagtgaaaagctatgtagtaggctaaggcttcatatcacctcattgtgtattgctaaggagtgctccgttttgtcgaacggtgaaatgtatagatttctttcgcttctgttcaatattggataagctgggtcttggtagctgaaactctgttagctatgaggggatattaactaatggtctctgtaagttacacttcgcctaaactgaattttgagatttgtggaatgatcatggtgataagaatgtggtgctttagctaattgaaaccccaaactatcttacccaaaacaaatttctttgaagttattttcaaac

SEQ ID NO: 194461 - DNA, 671 bp, Gossypium hirsutum
  unsure (1)..(671): unsure at all n locations
gggcggcccacgcgtccgcccacgcgtccggaaaactagaggcacagatctaagagaggggcgactgagaagtgagaacacagcaaattttcaatgagtgggaaaatcaccatggccatggctgcactttttgtagttctagctgcaaatgtgttgcagagtacaaatggtgcaacttatacagtgggtgactctactggctggagagtccctgccaataatgatttctacgatgattgggctgataacaaagccttcgttgttggggatgttctcgtgttcaatttcactaccggacaacatgatgttgcagaggtgacggaaactgcttacgatgcgtgcaacactgccaatactatatcaaccgtcagcaccggaccggcaaggattactcttaacaggaccggcgatttttacttcatttgtgctgtccccggtcactgttccggcgggcaaaagctcaacgtcaaagtcagaaatgggaacaacggtaccgctgctgttcccgcacctggaccgagtcccaccaccacgcctgtagctaccagccccaccaccagtacgcctccgaccgctgccacgcccaccccgcctggaacttcaagtcctcctcccgtgaccaactcagcttcttccctggtgtctactctgtctcctgtcttctncatgcc

SEQ ID NO: 194462 - DNA, 734 bp, Gossypium hirsutum
  unsure (1)..(734): unsure at all n locations
ttctgacgcgtgggacagagatcaaagaggaggtgactgactgtaagcagagaacacagcaaatttttttttttaaatgggtgggaaaatcagcatggctgcattttttgtagttttggctgcaaatgtgttgcagagtacgtatggtgcaacttataaggtgggtggctccactggctggcgagtccctaccaatattgatttttacgaagattgggctgatgataaagtcttcgttgttggggatgctcttgttttcaactttactactggaaagcataatgttgcagtggtgaccgaagctgcttacgaggcgtgcaacaccaccgatactataactatcatatgcgacggaccggcaaggattacccttagcaggaccggcgatttttacttcatttgtgctgtccccggtcactgttccggcgggcaaaagctcagcgtcgaagtaagaaatgggaacaaccgtaccgctgctgttcccgcacctggaccgagtcccaccaccacgcctgtagctaccagccccaccaccagtacgcctccgaccgctgccacgcccacctcgcctggaactccgaccgccaccgcgcctggaacttcaagtcctcctcctgggaccaactcagcttcttcccttgtttctactctgnctcctgtcttcttcatggacattgccttaattttgatgtgctgattatgctattaattccattttgcactttttggtattt

SEQ ID NO: 194463 - DNA, 1165 bp, Gossypium hirsutum
  unsure (1)..(1165): unsure at all n locations
aaaaaaaatgaaggcaatagttataactacaggaggaggcccagaggtgttgcaattgcaacaagtagaagacccagaactcaaagatgatgaggttctcatcaaggtagaagctaccgctctaaaccgggctgatactctacagagaaaaggttcctaccctcctccaaagggtgcttgcccttaccctggtcttgaatgttctggtactatccaagcccctggcaagaatgttctgggctggagagttggtgatcaggtgtgtgctcttcttantggaggtggatatgctgagaaagtggcagtcccagctggtcaagttcttccaatcccacttggggtttccctcaaagaagctgctggtttacctgaagttgcttgtactgtttggtccactgtttttatgatgagtcgattatctgctagggagacattcttggtccatggtggttcaagtgggattggcacttttgcaattcagatagctaagagcaaaggagcaacagggtttgctacggcagggaatgaagaaaagttagctttctgcaagagtcttggagctgatttgtgcatcaattataagacagaggattgtgttgcgtgcattaaggaagaaactggagggaagggtgtcgatgtgattctggattgcatcggggcagcgtacctacagcgaaacctggacagtttaaattttgatggaaggctttgtatcattggcttgcaaggtggagctgtgaccgaaattaaacttaatactttatttccaaagcgcctcacagtgcatggggctgcgttgcgacctagaaatccagaaaacaaagcaatggttgttaatgaagtggagaagaatgtttggccagaaatcgtggcgggcaaggtgaagcctatcatctacaaatcatttcccttatctgaggctggggaggctcataagctaatggaaagtaatgagcatattgggaagatactgcttgttccatgatgctgctaatggttttatcttatattgtgacaatggtgtgtcttttgataatacaatggagccacttgttactgtgtagtgtgtaccaatttgaaatcatgcagaactgatgtgaaagatttctaatacttgccaatggcattgtctgataaatataataagaacaagttaatttccccc

SEQ ID NO: 194464 - DNA, 702 bp, Gossypium hirsutum
cccacgcgtccgggcctgggtgcatatctcggtataatgggatctcgacgagatgttgtgactgctgtgtggaagactggtcttgaaccggtttggtacaagtgcatgagatgtttgcgacaaacttcagcttttgcttcggctgattcgacccaccaacctagtcaaaatgaacgggtgagttggtggatcagtcgttgggcctatggatgtccgatgtgcggcggaccttgggttcgagttgtatagaagccgccagggtgaatgtcgattatgtatttgttgtcaggggctcacttcggttcctcttttcgatgtacgggtatgtactttttggaagctttacaagttgctgcaggtttaaagcttaaacataggaaacaaatgattggcttgtttaacactagaacctgtttctgtataaaatttgttgataaaataatttgttaggttacttttttattttaacaaacgttaactaagaacattgatttttaagggggtgagaaatgagaagaatatgggtaggtgtaatagtttccttttgttctagatgattgtagttgtaagacaggtagacattgtatgaatgtagagcagtgttcaggtctaatttcatattgtacttttcttgtcaatatatgggtaggtgtaatagtttccttttgtttctgtttttattgaattttagtattggattct

SEQ ID NO: 194465 - DNA, 807 bp, Gossypium hirsutum
  unsure (1)..(807): unsure at all n locations
cggacgcgtggggccgaaagaacagaaaggccttcagttggccaagagattggagaaagggggtctggcggtattganccgcttacaagacgcattggttccgggcagggtttgcatggtgatcaatctagatacacatctgatgacgtgccgtcatccaaggatgtgcaacctgattctgaaaaggttcgctcctcctcaagaaacgatagttcttcaaagaggcctgtcgcaacaagaagccgactggactcctctggtgagcctaacgaaaaccggtctggcagattagtctcaagcagtagtcgcctgtcaacaactcagagaatcctccctgggtttcaatccaaatcagcatcttatactcgaacctcagccacaagaggtggtcaagatgattcccttcggagcttcgagttcttgacaattgggagtgggaaaaggaaataaattgaacatgcatcttgtaggaaggatttgctcgtgtcggaagcacacttattatctgacggaaatctcggcactataacggtatttacgagcagttactagtatgtgtatcggtggtcatgatttggttccaaccatgacagtctccctggaaagccttttcagtccttccccatgtaccccgtcagtatacttgtcattatgatgcctccagtcagtaaagtaatagaaatgagcgtcgtcctaagtaattgtccatatattttcaacattctatctgtaataaacacttgatgtttctttctttaattagaagattaaaagaaatatatattatagcaaagacgttctgccttc

SEQ ID NO: 194466 - DNA, 402 bp, Gossypium hirsutum
catattaactcgtgtagataggaaattccatgatatcttccagattgtaatttgtattttggaaggaaggttcagaagccataattttttgtagaactccttatagtcagcttgtaaagagtaagctctaggatcattttccgacgcctcagcactccagacccaaaaatcttcatgaggttcttctgccaacggaatgcaaataatcttctcggcaacatcctccggaaaggtagaagctatcaactctttcttccatgttctattactttgatcaattaatttggcaactttaaaatcattgaaattcgtaattaaagctgatcacctgttctttttcaaatgacaaaaccaacataaaaactaagacgggggagcctctttaaaaaagcaaccttaaaa

SEQ ID NO: 194467 - DNA, 599 bp, Gossypium hirsutum
cccacgcgtccgcccacgcgtccgcccacgcgttcgcacacgtccttttgctgttggttttcggtaatcttgcgtttctccgtcggatttccaagtttcagggcggagctcaacatcgaggaaatctcacgacacaacatccatccagtaacttgttttggttactggagacaatggacttctggttcaagggaatcagtgaggacacatctgcgtactcatttaatgagacagacattcagaaatgtccatttcttaagaacattaacaaacccaccaacttttcattctcttcaatgagttttcccatgcctgtacagggagctagaggtcctttatttgaggatggtccaaattttgatatggcatttaagctttttcatgggaaggatggcattgtacctctctcagggaggtctgatgttccctgtgacagagacaaacaggagcctaccatccaatttaacccattagcaggaaaagctgcaacaattagcctttcagcttttagctcaggagggcccttcagctttggtcccttctcagataaaaggaagaaccagaaaaagaaatccgactcatctaacaaacaagaaccc

SEQ ID NO: 194468 - DNA, 425 bp, Gossypium hirsutum
cccacgcgtccgcacagatcacacgctatcacgggccttgtcgctaagtggcatgtatgtgcgacaatcggctctttcgacgaagctgatggtgaaacacccatggctcaaatcgcttctccgccgttgcttccggtggccgtcgattgggaatcgggtgaagaagatgaaggggatgatttggataacacgaagcttgtccccatttttgcgcacacggtttctttccaaaagagacaggcgttagcgacatatctagagcacaacagagctaggaatgaccgggtacggcgtcatggtccacagaactgtgaatccgcaccatatatcggcatcgagactaactttactgctttggctactcaacaagacaatagtgaacttgacatgaacaccatatatgacggacagaacttaacccgaca

SEQ ID NO: 194469 - DNA, 729 bp, Gossypium hirsutum
cccacgcgtccggccgttttctctctggccagtaatattgcacctagtgttatttttgtgggtggggttgatagcatgttaggaagaccagagaatccaggtgaacacgaggctatgcgtaaaatgaagaatgaatttatggtaaattgggacggtcttcgtacaaaggataaagaacgagtgttggttcttgctgctactaaccggccgtttggccttgatgaggcagtcatccggaggcttcctcgaagattgatggtaaatttgccagatgctccaaacagagaaaagattttaagagttatattggccaaagaggatttgtcacccaatgttgatttggaaactattgcaaatatgactgatggatattctggaagtgacctgaagaacctttgcgtgactgctgcacattgtcccataagagaaattctggagaaggaaaagaaggagagagcttcagcagcagctgagaatagacctgcacccaccttgtatagcagtgctgacgttcgacctctgaagatggatgattttaaatatgcacatgagcaggtgtgtgcaagcgtgtcatcagagtctacaaatatgaatgagttgcttcaatggcacgagttatatggagaaggtggatcgagaaagaaaaaacctctgagctacttcatgttgaggagaggaggtatctttgtgtataggcgtagcttcatcattcctttttcatttcattct

SEQ ID NO: 194470 - DNA, 420 bp, Gossypium hirsutum
gttttttgtaaatgtgtgtaaccgattacaagattagaatctggctttatagccgaaaagaaagaggaaaataaatcaaaatacaatatgtgtttttttggttggatttgctgctgtgtttggctggttcttttgcaggtacggttgtgcgctcgggtaccgggccgtgtgctggcgttcggggcgtgggcctggcgccaggaggccgtaccgaggcctggaggctgggactgctgccgcgcaaacaagctgctagggttctgccctaatttttgagtcttgggtcacttgggcttatcgtatttgggctcgggtttatttgtaaatgggttgatttgggcttgtatagggtcatgtattaattttgggttttggacttgtaaaaaggatatttaatggactgtggttatttaattattt

SEQ ID NO: 194471 - DNA, 438 bp, Gossypium hirsutum
cccacgcgtccgggaagacatatggggtgaccatatgcaccatggatattacgacccgggttccggtgtgtcgggttcagatcatcgtgccgctcagattcgaatgatcgaagaatcgctccgtttcgctggaatatcggatgacccagcaaacagacccaagagaatagttgatgttgggtgtgggataggaggcagttctaggtatctagcaaggaaatatggagcaaaatgccaaggcattactttgagccctgttcaagctggaagagccaatgctcttgctaatgctcaagtactagcagaccacgtttgttttgaagttgcagatgccttgaaccaaccattccctgatgaccaatttgatcttgtttggtctatggaaagcggagaacacatgcctgacaaacccaagtttggtgaaaagctggtgcgagt

SEQ ID NO: 194472 - DNA, 650 bp, Gossypium hirsutum
ttcctttcgtccgcccacgcgtccgtggattctggggatggagtcagtcacacagttccgatctatgaaggttatgcacttccccatgccatcctcaggcttgaccttgctggacgagatttaacagatgctttgatgaagatcctgacagagaggggttactcattcaccacaactgctgagcgagaaattgtccgcgacatcaaggagaaacttgcttatgtggcactcgacttcgagcaggagcttgaaactgcgaaaagcagctcatcaattgagaaaagttatgagctacctgatggccaggtaataaccattggagcagagcgtttccgttgtcctgaggtcttatttcaaccatcgcttattggaatggaagctcctggaattcacgagaccacttataactccatcatgaaatgtgatgttgatattagaaaggacttgtacggtaacatagtgcttagtggtggatccaccatgtttcctggtattgctgatagaatgagcaaggaaatcacagctcttgcaccaagtagcatgaagattaaggtggtagcacccccagagagaaaatacagtgtctggattggtgggtctattttagcttctcttagtacattccaacagatgtggatatcaaaagccga

SEQ ID NO: 194473 - DNA, 754 bp, Gossypium hirsutum
  unsure (1)..(754): unsure at all n locations
cggaatnccgggtcgccgaaggcgtccgcccacgcgtccgcaaatactttgatcagtttcataaaaaagaaagaaatcaaatatgggtccggagtttccaagagtttccttctccttgctcttttagctgctgttgttcttctcatttcttcggaagtggcagctcgagatcttgctgaaactaccactgaaaacaataatggtgaggtggctaccgaaacaacccaggctgagctagaagatggacgcggaggttataatggaagaggacacggagggaaaggagggtatggaggtgggcacggagggtatggtggtggtggccacggagggtatggtggtggccacggaggatacggtggtggtggccacaggcggtcacggtggacatggaggaggttataaaggaggctgcgcctatggctgctgtcgttcagatcatcacggaagaggctgccaaaggtgctgctcttatgctggcgaggcgggcgaagttgaaactcacgcctaatgtagccttttgcatttacagttggcatgtatgataataaataaatgggcatacgtcctaaatgaaaatgcttccttaatatagtgatgtaagtggaagtataaagcaataaaattgtgcttttactttccaaaggacaaaaaaaaaaaaaaataaaaaaaaaaataaagaaaaaacaaaaattaaccaaaaactaagcattaagcttaaaacaaaaatataaacttgaccaactacttcaat

SEQ ID NO: 194474 - DNA, 433 bp, Gossypium hirsutum
aaatactttgatcagtttcataaaaaagaaataaatcaaatatgggttccatttccaagaggttccttctccttgctcttctagcggctgggggtcttctcatttcttcggaagtggcagctcgagatcttgctgaaactaccactgaaaacaacaatggtgaggtggctaccgaaacaacccagcctgagctagaagattaacgctcagcttataatggaagaggacacggaggtaaaggagggtatggaggtgggcaccgagggtatgtgaggtgggcaccgagggtatggtggtggacacccggggtatggtggtggacacggagggtatggtggtggacacggagggtatggtggtggcggccactgagggtatggtggtggtggccaccgaggatattgtggcggtggacatggatgaggttataaag

SEQ ID NO: 194475 - DNA, 394 bp, Gossypium hirsutum
acgttctttcgtccggggccgtaaaaactaatgtattcaactttgggttaaatttccaagcgtttccttctccttgctcttctagctgccggcgttcttctcattccttcggaagtggcagctcgagatcttgctgaaactaccactgaaaacaactatggtagaggtgcgctaccgaaacaacccagcctgtgctagaagataaacgctcagcttataatggaagaggacacggcggtaacggacggtatggaggcgggcacggacggtatggaggccaccactgagggtatggcggcggacacagcgggtctgcgggtgccgcccgacggactgactgggaacggctcccttgggggccttacccgggcgacgaacagtcgacttagaactg

SEQ ID NO: 194476 - DNA, 790 bp, Gossypium hirsutum
cggacgcgtggggttggctctttcttttttgtttctgtttcctctctttttattgaaaaattagggtttccgtcagcggtattgagaatcaatggcgtcgacttcgaggaagataatgttgaggagctccgacggagagacttttgaggtggaggaagcggtggcggttgagtcgcagacgatcaagcacatgatcgaggacgattgcgccgacaacgagatccctctcccaaacgtcaccagcaagatcttgtccaaagtccttgagtactgcaagaagcatgtcgatgctgctgccgacaaggaaaagactcccgatgacgaactcaaggcttgggatgctgattttgtcaaggttgaccaaaataccctctttgacctcatcctggcagcgaactatctgaatatcaagagcttgctggacttgacctgccaaactgtggctgatatgataaagggaaagacacccgaggagattcgcaagaccttcaacatcaagaacgatttcacccccgaggaagaagaagaggttaggagggagaatcaatgggcattcgagtgataagaaagcctttaaatttaatgttgatattattataggttctatgcttttctcgctaggttttcaagttggggaaaaaaattaaagaacattggctttcttttggcttattttgttatatgcattagtgtcttctattctagaggatatttaatatgaacctctcccctcctctattatcataatataaattaaaattttctaaaaaaaaaaaaaaaaggacggccg

SEQ ID NO: 194477 - DNA, 445 bp, Gossypium hirsutum
cagtgcaaggcattatcctcaacactgcggccttggccattccttgcacgatgaagatgttgttcagggggtcaagaaaaaggaaaaggaggaaggagggagaggccgcttcaaatcacatacgacaggtcctgcacgaatatccgatagagagaaaaaggctccattgaagacctaaccatgacaaaagatgtcggcaggaagtaagagttgcccttttttgttgtataagtaatattatcaactagtattgtctggctgatttattctgtttcccgtttcttccagctcccctcatttttcacttcttaattatattgccattaagtagctgtattttagtacgtacttggatgcaaattttggtcatttacactataaaccactattctgaaagaaaaaacatgggcagtcttcaaagacaagaacgcctagattgtatacc

SEQ ID NO: 194478 - DNA, 780 bp, Gossypium hirsutum
  unsure (1)..(780): unsure at all n locations
ttcaatgaagaaacagagaggctgaaaaagcatagcgaaggatagaagcacaaacaaaaagaaatggattacctaggaatcgatcttagctgcgccattggatctctaaaagatggcaatttccctcccaaggactgtttgttgcctctcatctccaagctcctcggctacgccatcgtcgccgcttccaccaccgtcaaactccctcagatattgaaaattgtgaaccataaaagtgttagagggcttagtcttatagcctttgagcttgaagtagttggttataccattgctttagcgtattgccttcacaacggactacccttttcagcttatggggaattggtatttcttttgatccaagccctaatcttagttgctgttatttactactattcaaaacccgtgggcatcacgacctggatcagggcactgctatattgtgctgtagcaccaacaatcttagctggccaaattgatcctattctttttgaagctctatatgcatcccagcatgcaatatttttctttgccagggtgccacaaatttggaagaacttttctaacaaaagcactggggagctcagtttcttaacatgcttaatgaatgttgctggctcgcttgtgagagtatttaccagcctccaggaaaaagcaccaacaatgggttccctttttctattgtactcgcatattcttgaaagatttttatacacttaattaaaacattttcatgatttattgtttcttctaanaaaanaacaattaattttttttttt

SEQ ID NO: 194479 - DNA, 561 bp, Gossypium hirsutum
aagagaccccgtggctgaaacctcctattccttccgactagcaatatatttctttgcccgggtgccaacacattgggagggcggttgctaacaaggccctggcgagctcacgttcttaacatgcttaatgaatgttgctggctcgcttgtgagagtatttaccagcctccaggaaaaagcaccaacaatggttcttttgggctctgtacttgggattgcaacaaatggcgcagtcctgagtcaaattattctctattggaattcacaagtgccgaaggagaagaaagcagagtaaattgataccatgtcagagtcagaagtaggaggaggttaagattggtgcagttggtgatcatcggatgtatgtattaccaagcaaatatcatcaacttatagttgacactatgaattggcaaatcttgtagatgattcattttagatattcgtaaatgggattcttctgcttttatgtgctttctttaggagttgatatgaatcacgctgcatttgcctgttggttagtattattttcattttatgttgaatatttgatatcatcta

SEQ ID NO: 194480 - DNA, 507 bp, Gossypium hirsutum
ctttatttctttacaaggatccactttttttttttgcctgggtgccacaaatatggaagagctggtctaacaaaagcactggggagctcagtaacttaacatgcttaatgaatgttgctggctcgctcgtgagagtatttaccagcctccaggaaaaggcaccagccctggcttctttggggctctgtacttggttttgcaacaaatggcgcagtcctgagtcaaattattctgtatcggaatccacaagtcccgaaggagaagaaagcagagttgactgttctcatgtcaggctcagaagtaggaggaggttaagattggcgcactcggcgatcatcggattatcacttatcatcaacttatagttgacactatgaattggcaaatcttgtagatgattcattttagatattagtaaatgggattgttctacttttatgtgctttctttagtagttgacatgaatcatgctgcatttgcctgttggttagtattattttcatttta

SEQ ID NO: 194481 - DNA, 673 bp, Gossypium hirsutum
cctacgtttccgaaaaaattccttttaaaaatttcccgacctactctaacctctcttaaaacacctccgtcgccgccagacaagcctctcgccaccacttccgacagtccgttttttggattttttgatttctgggtgaagtgcggaaagagttgctttcctaaagggtacagaaatcttaacacaaaggtgccagaactacctacaacatgtcaggcaggaaggaaacagtgttggatttggctaagtttgttgacaaaggtgttcaggtcaaactcaccggtggtagacaagtcacagggaccctaaaaggatacgaccagctactgaatcttgtcctggatgaagctgtagagtttcttcgagaccaggatgatccgttgaagactactgatcagactaggcgtcttggcttgatagtttgtaggggcacagcagtcatgctggtgtcacctaccgatggcacagatgagattgccaatcctttcatccagccagatggagcctgatctgatccgttttcaaaatatggcatttcctttgctctactacttatatattctcttaacattttcaagtctgtatttctatgagcatgttggtatctctttgaaagctaccaaaaaaccaaaccatcaaggccttaaatcttaatatcatttggagttgaaaa

SEQ ID NO: 194482 - DNA, 623 bp, Gossypium hirsutum
tttcctatctcttctttctttctcctctgagaaattccctaaggaaaaaaaaatgtcttctccaagtaaacgcccagagatggacttgatgaaactggtgatgagtgacttcaaaagtggggatgatgaatgatggcgtgcaagaattttatgttgaattcaacggaccaaaagacagtccttaccatggtggtgtgtggaggataagggtagagctcccagatgcttatccttacaaatctccatcaattggatttgtgaacaagatttaccacccaaatgttgatgaaatgtctggctcagtttgtttggatgtcatcaatcaaacttggagccctatgttcgatcttggtaatggctttgaaatggttctttcttaaactcctttggatccaaatcctcagacccatggaatggagaaactgctgctctaatgatgcgtgatccgactgcttatgaggaaaagtgaaagataccgtgagaaaatgccaaacctgacgatgttgcggagcagagaaatgaagtcaatgacgaagaactggtgaaatgatatgcgcctcgatgatgagaaatcgccggaaaccgaccttagacatatatgcctgatactgctacgaaatggt

SEQ ID NO: 194483 - DNA, 805 bp, Gossypium hirsutum
cgacccacgcgtgcggagaatgagaatacgatctttcgatagaatttgcgtctgggtgttcgatatggaaatatagcaggtccttatcatggtggtgtatggaagatcagggtggaactcccagatgcttatccttataaatctccatcaattggctttataaacaagatctatcacccgaatgttgatgaaatgtaaggttctctgaatgttgaaatgctctatatttggcttttaaatgctccgctattgtttaatatgtctttgaactatgagtatcacgtctggtacagtttgtttggatgtcatcaatcacacttggagccctatgtgcgacctgaaaaatgtcttcgaagagcttcttcctcaactactttgatatgccaaccgatcggatccattgaatgcagaagctgctgctcttatgatgcgtgatcgtgctgcctatgaacaaagagtgaaagagtattgtgagaagtatgccaagccagaagacattggagcagcccctgaagagaagtccagtgatgaagaactaagcgatgacgaatatgctgcctcggatgacgaggaaatagctggaaaagctgacccttaagctgatatgtgcctttagagaaaaaattcccttgtgttgtacataatttaaaacctgacaaacaacttgtggggggggggtatggaaaaattcctgcctcccccctctttgtgtctttattttcaatggatgatgatgtgtaaataaaaaatcccacttgctgtttaacatttgaaaaatattcattcacagtttgcaatttgcatc

SEQ ID NO: 194484 - DNA, 498 bp, Gossypium hirsutum
cccacgcgtccgaaaaaaaaaaacccttactatggcccctttcttgtcgcttggtcgtcttcgggttgccgtacgaagtaggaaaggtttcaaacccacatccagggctagacatggaaagaagcgtggaaccaaggagttgcggggaagagtggagaggttgaagacagagatggagaaaagaagcgaggaacagaaggatatcagggaaagacagagacaagtgaaagacaaagttacagcaattgaagccgaatgcgaggaattaaagagagaaactagattcattgttcagcaaactgccagaacccagatcaaactggggcttatgttccgcatattgaaagcaagggaaactggtcacttggatgaaagccgcccttctcactcagatgctccgagaaattgtaagatttgagaatgaggaggagaaagaagggtgagggctgtatctcgacgataaactacctatgctctgctgcgaaataaacttgtttg

SEQ ID NO: 194485 - DNA, 952 bp, Gossypium hirsutum
tttagggagtatcaaaagtctatcaaaaagacagaatatgaaacaataaaaaaccagtggcagagtatctctcctggacaggcaaaaagatttacaaaatttagagagaggaaaggccttatagagaaagatgtggtaaggacagacagatcgctctctttctatgatggggatgacaatccaaatgtgaatcttttacatgatattctcttgacctactctttttacaactttgatcttggttactgtcaggggatgagcgatctgctatctccaattttgtttgtgatggaggatgagtcagaatcattttggtgttttgtggctctgatggaacgccttgggcccaattttaatcgtgatcaaaatggcatgcattctcagctttttgcattatctaagctggtggagttgctggacagacctctgcacaaatatttcgagcagaatgactgcttgaattatttcttttgtttccgctggattctgatacagtttaaaagggaacttgaatacgagcaaacaatgcgattgtgggaagtattgtggacgcattatttgtcggagcacctccatctgtatgtgtgcgtagctatcttgaagcgctatcgagggaagataatgggagagcaaatggactttgataccctcttgaagttcatcaatgagctgagtgggcagattgagcttgatgcgatcctcagggatgcggaagctttatgtatatgtgcgggtgagaatggagctgcctgcatcccacctggaactgtaccttctttgccagttgacaatggtttattctatagtcagctagatgatgaagtactgtaaattgattcaccattatgttttagtgtgaaacagattcattgatcttgtatttagctgtttttttaacaaaacattaatgcgaatggattggatgaatcataatataatttctttttcgttc

SEQ ID NO: 194486 - DNA, 839 bp, Gossypium hirsutum
tttttcagactctgtatcttctcttcctctgtactatttccttctttaagctaatttcttaggtccttgctagctaagcatggcaaaggaaggagagaacagcactttccatgccagggattatgttgaccctccaccagcaccattgattgatgcttcagagcttaagaaatggtcattttacagagcattgatagctgagttcattgcaactatgctcttcctttacatcacagtcttgactgtgattggtcacaagagccaagttgccacctcccctgacgcatgttctggtgttggccttcttggtattgcttgggcctttggtggcatgatcttcatccttgtttactgcactgctggtatttctgggggtcatattaacccagcagtgacatttgggctgttttgggctcgtaaggtctcattgatccgagccattgcatacatggtggctcagtcgttgggagccatatgtggggttgggctggttaaggcattccaatcagcatactacaacaggtatggaggtggagccaacactctagcagatggttacagcacaggcactggtttgggtgcagaaattattggaacctttgtgttggtttacactgttttctctgctactgatcctaagaggaaggctagagactcccatgtccctgtattggctcccctccccattggatttgctgtattcatggttcacttggctaccatcccaatcaccggcactggcatcaaccctgctagaagtattggagctgctgttatcttcaacaacaagaaagcttgggatgatcattggattttctgggttgggtccatgattggag

SEQ ID NO: 194487 - DNA, 414 bp, Gossypium hirsutum
acccacgcgtgcgttcagcatcacgagtctacaaacctttctcatttcagttctcgcctctcgaatcttcattaggggccggtactcttttaattagagtaggcctcccgagacatcataccgcaccgccctgccgtattcccgagtctttttattctcccaactgctgtcatattcaccaaggttaaacctcccagaaaaaaccttctatttggaaggccatccctcccgttaacctacccgtccccaaacccaccccagtttaaccaattaaattttcctacgccccttaaaaaaccacttccaaagaacctcgccaaattacccccttaccctcggaaaaggggttccctcccatcttttgatttagaaagccgcacattccaagacctatccactttttattaaaaacac

SEQ ID NO: 194488 - DNA, 845 bp, Gossypium hirsutum
cggttatgatgccctggttattcctggcggccggttctcggagctcttcagcgtcgacgacagggtcgtgagcattgttaaagcgtttgctgacgcaggaaagcctattgtcaccacttgccatagccaactcattttggcggcggcagggcttttgaaaggcaagaaatgcactgcctttgcaagcatgaaaccagtgattgagctggcgggtggtatttggtgggagcaacctggaatcacatcaccttttgacattactgcttgtctcaaagatggaaacatcttgagttccataggatggccagcgcatgctgaaattctcaaaactttgtttgaatccatgggagcctcgaattcatacaaccaaggctaactcagtgcttttcctttgtggggactatgtagaagattatgaattcaatgtcccattccgtgcgctccaagcattatgggtgcaagggtcgatgcagttaccccaagcaagaagaagggcgaaacctgtgtcactgccatccacgatgatgaaggagcccaagccttcagcgagaaacgtggccataacttggttattacagccaattggagtgatgtaagtgtttatgattacgattgccttgttgtgccgggtgggaggtccccagagttgctggtaatgaacgacaaagcagtcactctagtgaaggatttcgctgagaaaaacagggtcattgctggtgttgggcaagggcaatggctccttgctgctgctggtgttctaaaggggaagagatgtgcatgcggggatggaatgaaggtaatggtgaagattggtggaggggaattggaagagtctaaagggtgtg

SEQ ID NO: 194489 - DNA, 558 bp, Gossypium hirsutum
ccggtccggaatctgagtgttcggcccaggcgtcaaaaacatagcagccatggcagtccgtatgcttcttgggttaggtgtcctgctactctgccttgcaaaggtttcatctgatctgaaggcagaagaagttataaccaatgtcggtgaggtgggttctttggttaccagaggcggaaacagaagactgatgctagagattgattgtggaggattatgcaagaaaagatgcagtcaacactcgaggccaaacagatgcaacagggcgtgtgggacttgctgcttgaggtgcaagtgcgtgccaccggggacttcagggaacagggaggtctgcgggacctgctatactggcatgaccacccatggaaacgttgccaagtgcccttaacctttacgtcgcccaatatgtgttgcagccatcaaggggaaaaatgaaatgtttgtttgtgtaatatgtatgttgtagctcaagatgtctcacctactcctaaaattattagtacttgtaatatatatttttaaaatagtagtatgcatttagcctccgttcagtattac

SEQ ID NO: 194490 - DNA, 895 bp, Gossypium hirsutum
gatcaatgctactaatggaactgctggtgcatttgatgtcacaaccaagggaattcttcattcagctctggaaagatgtgagtattggagattatcggataagaaggggaagcctcctggggttgttggatggtggccatctcgtgctgttacctttatagagaatcatgacactggttctacccagggtcattggaggttcccaggtggaaaggaaatgcaaggatatgcttatatcttgactcacccaggaacgccggctgtgttctacgatcatattttctctcatcatcgatctgagattgccaatcttatctctgtcagaaacagaaacggaatccattgccggagtttagttaaaatcgtcaaggcagagagggatgtgtatgcagccattattgatgaaaaggttgcgatgaagatcggaccacgttattacgagcctcctagtggttcccaaagatggtccttggcccttgaagggagggattacaaggtatgggaaacatcttaaatgtaaaaccattgatattatttatgtttccaaatgtgtatatcctatacggaagccaaccgtcgagttgttgaatgtcgaaccagtagtgtttgttggggatagcaggaagggtgtaggccctcactgataatactatttgccagtgccattgttgtaccattttttacacagaaatacattggagtgattgattaagggcaaggctagaccaggtgattattggagccagttagctaatgtcgaaggaaaggtatcctttccatactatagtttatgtgtaaatgctttacgagtgtggagattaaacactggaaggccgatttcttgccttctacaaataggatacatatattgtattcttattggttttttctgttc

SEQ ID NO: 194491 - DNA, 683 bp, Gossypium hirsutum
cgattacaataactcctaacttcccggttgacactgggaatgggttatccgctggagctattgctggtattgtgatcggttcatgtgtgattctcatcttgctcttgatcatcctccgactgatgggttacttggggggcaaacacgatgaatacagtgaacttcatggtctagaacttcagactggctatttcagtttaagacaaataaaggctgcaacaaataattttgattctgcaaataagatcggcgaaggaggatttggaccagtttacaagggtatactgccagatggtagagtacttgcagtcaagcaactatcttctaagtcaaagcacggaagtcgggaatttgtgactgagatagggatgatttctggattgcaacaccctaatcttgtgaagctttatggctgttgtattgaaggaaatcaattgttgctaatttatgagtacttggaaaacaacagtcttgctcgtgccctttttggtcgtgatgaacaacgccttaacttgcattggtctacgagaaagaaaatatgcttgggaatagcaagaggccttgcttatcttcacgaggagtcaagactcaaaattgttcacagagatataaaggcgacaaatgtgctgctcgataaggatctaaatgctaagatttccgacttcggattacccaaccttgat

SEQ ID NO: 194492 - DNA, 736 bp, Gossypium hirsutum
cccacgcgtcccgtccggtgaactaaaaaaggagttaaaaatggcttgtcctccaactcacaaagtggtaaaaggtgagcttaagaatggttctgatgactgccttgcgagcttgatgtattcgaattaccaaggtgctccggtaacgattaaaaaagattcattacccactccatttgcgcagaatatgctagtcgacggtctgtacggaggcctggtgtatgatgttgttagggttaagtggattattctttggaccactgattgtaaggtggctactaagatcattccgaccgaaaaccatattgtttgggaggatatagtgagcatccttcagccctacgatagctctgacaacttgcccttatcatgtgggggtgcattttccgccgaagctcatatccatgcaaatggagatggatctctaaacctgacagcacaaatcatgtggagcgggtgcgagtagcctgactctctttgcatcatatattgctccatgcttatctctatcagtttgtgctgtgtgacccacggaggctgtctacttctttatattaataatactattaaataaatttgacagccaccccataatatactactggattcctacttcttctaccttacctattcaacattgtgtgccctgtttctcctttttcttttcttttctgtaatagtatatacacacacgattgtgtgaattaataaaaaaatgtctgtctgtgtctaaaat

SEQ ID NO: 194493 - DNA, 621 bp, Gossypium hirsutum
gaccaagccttccgccaacccttccgttgaagtcccgattggatctggctcccaagtcaaaactcgcttatgcaacaaatttagtggccctgaaggttgtaagtatggtgacaaatgtcattttgcacatggagagtgggaacttggcaagcctattccgccatctcaagatgatccccgttccatggcacctcttcctggtcgcatgggcagtcggatggaaccaccacccccatcaggtcctgctgctacatttggtgcttcagcaactgcaaaaattagtgtggatgcttcccttgcaggagccatcatagggaaaggcggtgtgcactcgaaacagatatgtcgtcaaacaggagcaaagctatctattcgggagcatgagtcagatccatcacttaggaacatcgagcttgaaggatcgtttgagcaaattaaagaagcgagtgcaatggttagagaactaatcagcagcctaggtccggttccaggtcctgccaaaacacccggtgcgcatggtggtcaagggcatccaggaagcaactacaaaacgaagttgtgcgacaattttgcaaagggaagttgcacgttcggagaaagatgtcactttgcacatggtgc

SEQ ID NO: 194494 - DNA, 458 bp, Gossypium hirsutum
gacccacgcgtacggcacagaaattgcttgaactacacttggcttttggttttagaaaatacttcatttgcttcggaggtaagcggcaaggcagccatgttgctttgattcaagaagggaaggacctggttaactatgcattgattaatgccgtggcgattcgtaaaatactgaaaaaatacgataaggttcatttctccaaacaagggcaagctttcaagtcacaagcacaaagtatgcacattgaaatccttcaatcgccgtggctatgcgagcttatggctttccatattaatttgagggaaaccaaggtgaaatcagggatgacccttgcatcgtttgaaggatgttacctcacatttaatgatgggaaaccattcctttcttgtgaactctttgattctgtcaagcttgatattgacttgacttgttctatatgcttggacacagtatttgat

SEQ ID NO: 194495 - DNA, 428 bp, Gossypium hirsutum
actaactccaccaccatcgccaccacctccacctccaccaacctttccgtttcctcttccggcattccagttcccacctgtaccgcctttccctggtatcccccctgcctctgcctctacttcaccaaagaaatcctctccttaattgtgtactataagtaatgattctccactaaaacctgtcacaatctagccactcttctggtgattatcaattacatatgtatatcttttttgttcattacgattataaattatatatacagttaaataatctacctaaacagtgtgggctttctcttggttgtttgttgtgtgattgactgtgccattgtcaataagaagctcccgtgaatgtgacacaattattgtactatataataaatccaatcctggggtcatctgattccaacaggtttattctcttt

SEQ ID NO: 194496 - DNA, 604 bp, Gossypium hirsutum
tctcccacgcgttcgtttttattgatggatttttactaacgatgatgatatcaaattaatcattattcattccaatatatttgaataaaggaacatttgttcagataaaatatactctatgttctctggtcttatctaatttatcatcaatttgccttctcaacgacatgaattttaccagaatcctcactgattgaatcatacctatgaaacatgcgagctataatatactgtgtaagctaatggagttaccatagtatagctcttttattgtatgactggtggcaaatggaacaggaaaaaccaactacactggattgcggtccaagaacaatttgcacaaggcacataatgaatggctgctacctctacgaatgcttgtgggaggcattgcagcagcgaataagaatgatattgatcaacatgcagttgacaccgtatgtgctctgaatccaattgagttggttttgtatcggtgtattgaactcgttgaagagaatttgaaacatttagcctagcatgcttgagtgtttggtgctcaagccatttattggggaattcctcacaacatctgaagccattatatcgaagtaggcaatgctaa

SEQ ID NO: 194497 - DNA, 940 bp, Gossypium hirsutum
tcttgtaaattcaacgaggttgtcgattcctctgaacaaggctgacttcacttttaggagggaaaatgctgtagcattgaatttatcaagcttcttgaatttatcaggctgcagtgctagcaatggatgatacggtattagatgttgatcaagtggaaaatctcataaaattttgtccaactaaagaggaaatggaacttctcaagaactacactggtgacaaggaaagtctagagaagcgtgaacaggtttctgaatttaaaaggagcttaaatactgtaaattctacatctaatgaggctaagaagttagcatcacaatatcaaaaggaagcggacaaatgcaattcgggtatggagacgtgcgaagaagtaagggagaaagctgaagaagcactgtcggctcaaatgaaattgacagcaatgtgggaaataagatctcgtcagaaagggtggagagataaggtcgccaaatctaatgcgcagacacaaggaaaaaccaactacactagattgcggtccaagaacaatttgcagaaggcacataatggctggctcctacctctacaaatgcatgtgggaggcattgcagcagcgaataagaatgatattgatcaacatgcagtcgacaccgtatgtgctctgaattcgaattcaggtgtgagtttcagatattttatgtgcaaaaaagtattagagtgccttatgtttgtatgttagttaagcagattatagatagaacctgcagtaggatcaactaattagctgatcaaaaactacacctagttttgtaatagtctacttgcatatttgcatatatttaataataatctcgtgtcaaaaaaaaaaaaaaaaaccaaaaataaaaaaaacaaggggctgcccacttaaaagaacacaagcttactacgggggcatgcttcgggatgccctttctttct

SEQ ID NO: 194498 - DNA, 537 bp, Gossypium hirsutum
acacgtgcgaagaagtaagggagaaagctgaagaagcactatcggctcaaatgaaattaacagcaatttgggaaataagagctcgtcagaaagggtggagagaaaaggtcgccaaatctaatgcatttccttatttcatttaagtaacttcattataatgtcttattttattgatatttttatatttaatctagtttttacaaagcactttattttggagtacaagcatccttgaattggttgagtcagttttgaggcctgacacaggaggaccaccaatccttcctgacaatagtgatgctgttctatctgcccttaacctgtacagatttgtattaatgacagaggcagcaggaaaaaccaactacactggattgcggtccaagaacaatttgcagaaggcatataatgaatggctgctacctctacgaatgcttgtgggaggcattgcagcagcgaataagaatgatattgatcaacatgcagttgacaccgtatgtgctctgaatccaattgagttggttttgtatcggtgta

SEQ ID NO: 194499 - DNA, 495 bp, Gossypium hirsutum
tggatgagacagttcccacttgaagcatgctttaagtctagctttgagacatggattactgcgaccggaaccttcattccttattgttgcaattccatgctagcgagtttcatgtcgacttgcggaacaatcacatcaatattcacgaaaatcgaagaactggaacttgataacgaaccatgaaagagaacctggccaaaggatttttttttacaatgtatatgtctgggttgacaaagctgtttacgtaatacgctgctggctagaaacataggaattgggaatgttgagatgactggtacgtttatcgaaacactcgagtagatgctttcaacacgccccactcacagatagctaatgagctagctcttttaaaaaggaaccagcaatactggatgcgatgtttggaacataaagaccaccaaaggttccccgaaatgttcgcaaatgacttgtcatatggccgtacagaagaacacgcagacatggacaatt

SEQ ID NO: 194500 - DNA, 436 bp, Gossypium hirsutum
cccactcgtccgcttgccaactgtgatttctcccagtgtttatattaaaagattcagaaagttcatgtcaacgtactttttgagtgtccctgatcactggtgttcacagggatcctctgacccttgccaactattgtggcactccaaatgatgcctcgtctcaacccgagtccctaaatggtatttctgcctagttcttgtattccttgtttcccatttattctttgaatcagccctcattttttatagccagttgaaaaatgctgtgtgtatatatatacccaaccccattataatgcaatttttagcaaatttgtggggatagtttcaactagcattcgtcttatgttcataattttgtatggtcgagtgagaatgtaaagacccgatgttattggaagattggtaatgtataatcaatttaaagtttcagctt

SEQ ID NO: 194501 - DNA, 440 bp, Gossypium hirsutum
acaaattccaaagagagtgagaaaaatgtctgcagtagttggtggatggatgggcgaggtagcagcaaagcttaaagagaaagttgaagcaagaaaaccattcttgtcaataagggccaagaaagaccaaccgtttccgaccaaagaagggcatgttgaagacaaagatgcttctaaagatgatactaacgaaaccacaatgtctgaagctactgtctgtctgcttatggatcggtttgtaccttggtaatgataaattagagaaagttcccttgtcctaactttgttgggccttatatgtaaaggcaactctatgctttgtgtaaattagagttgttttattgtggatatggcagccagctctgcttttagtgttcatttcttttgtatctgagcgctgtatatgattaactggtctctttaaacatatccagtaatac

SEQ ID NO: 194502 - DNA, 1398 bp, Gossypium hirsutum
  unsure (1)..(1398): unsure at all n locations
aaataagagcgatccatgtggtggaaggtatatttatgtgcataaacttcctccaaggtttaacgaggatatgcttaaggagtgtaggagtttgagcctttggactaatatgtgtaaatttactagtaataaagggcttggtcccccacttgagaatgttgaaggggtgtttgagaataccgggtggtatgccacgaatcagtttgcggtggatgtgatattcagtaatcgtatgaagcagtatgagtgcttgaccaatgattcctcgatcgcagccgcaatatttgtaccattttatgctggctttgatattgcaaggtatctttggggatataatatctcaacaagggatgctgcttcgctagatttggttgattggctgatgaagaggcctgagtggggtataatgggagggaaggatcattttctcgtggctggtagaattacctgggatttcaggagattgagtgatgaagaatctgattggggtaataagcttctgtttctacctgctgcaaggagtatgtcgatgctggtggtcgagtcgagcccttggaatgcaaatgattttgggattccatatccaacatacttccatcctgcaaaggatgaggaagtctttgtatggcaagatcggatgcgaaatctggagcggaaatggcttttctcttttgcaggtgcacctcgtcccggtaaccccaagtcgataagagggcagattattgatcaatgcaggcagtccaaggtgtgcaaattgttggaatgtgattttggggagagcaagtgtcattcaccaagcagtataatgcagatgttccagagctccctgttctgcttacaacctcaaggagattcatacacacgaagatctgctttcgactcaatgttggctggttgtattcctgtcttcttccatcctggctcggcgtacacacagtacacttggcaccttccgaagaattatactacatattcagtgttcatcccagaggatgatattcgtaaacggaatgttagtatagaggagaggcttagtcaaatttctcctgagcaagtgaagatcatgagagaggcagtcataaatctcattccaaggctaatatatgctgatcctcgctctaaattggagactcttcgagatgctttcgatgttgctgtacatgcggtgatcaataaagtcactaagttgaggaggaacatcatccaaggtcgtaccgaatatgataactttgtggaggagaacagttggaagtacgacttattagacgaaggacagcgcgaggtcggagctcacgaatgggatcctttcttctcanaaccaaaggacgagcagagagatcaatctgccgaagctgcgaaaaattcttggaagacgagcagagagatcaatcataaatg

SEQ ID NO: 194503 - DNA, 441 bp, Gossypium hirsutum
attcatttgcaggttgggtttgatgagctcgggggaacagacgagttttccactgatgatttggcggacagattggcgaaagtgcaaggcatcttctctgaaggcgaatcgtcatcgaaacccagaacacaaaccaaaaggagtgtccgacagagctcgaacccagactcgtccgattcggattaactgtgggttgtctcggtttgtaagctttctttacctgtttcagtggaaatcaataggatttatcatcattccgtgtttaaatactttaaaagcaaatgaagagaatattgtttgttgtatgaatgacgatcatttaatcatctcgatatttatatataaaaaaaaaaaaaaaaaaaaaaaaaaaaaaaaaaaaccaaaaaaaaaaataaacccattactattaaacccataccttaaaaaacttttaaatttttt

SEQ ID NO: 194504 - DNA, 493 bp, Gossypium hirsutum
caaatagggagatctttggctaacccaggggaacgtcttcccagcagtatcgaacgatcttggccgcgcggagcaaagaatcaaatttgtgcattttactctccttgtcatctattgtaaattctcaaattaggttgggtatattgcagcttgtgcatgtaattcaaagtgagaaaactagggttgtttactgtaaaaataaaaatcagggcaaattttgttaatggtagttaaagttccactagcaaaccagctatgttaggcatgaatcttagatatggtaggtaacaatggtgctttcttaggataattttactgtaaaatgtcttgattaaaaaaattacgaacacagttttttggttagagcattttgcttagtgtcaaactcatccttttcatgtaaagagcatcttgatgatgtaaaaatgctactaatgtatcatctgctatggtggcatatgaatgtatcgtgcactgcatgatttttgtgata

SEQ ID NO: 194505 - DNA, 441 bp, Gossypium hirsutum
ttttcgcgtccgcccacgcgtccgcccacgcggccgctggtatctctattctccatttttcattacttcctccattccctcacctctcagaaggaagaaaattatgggtctcatgattcacaaagctcagccatatttcgcagtctctgatgagaagatggcgaatacggataacccagaaagtgaacatggtcaacaacctaacaacatcgtcaccagccaactccacataagatcctcacctcggtcatcccctgaagcgctggagaaagaggctgttcttagacgaatccgccatcacatgtgcaaatacagagtcaaacgtgcttttcaggctttggttggccgcgacggacaagctcaagaaaagtggatggaactgggcgatgctttcacttgtccttaaacattctggaaaaacccagaaaattcatcgggatc

SEQ ID NO: 194506 - DNA, 452 bp, Gossypium hirsutum
ggacaaagcctgagatagtgagtatgcattttgaggtactggctaaggttgatggcgagactgttataccggagagaatcatgcaggttaaccctgttgctgtggaggatgcaatcgcaccacgtcgtgctagcaaggaacatgaccatgtcttccacacctgttgtttacactccttcaaatcccttcaccttgtaaattgttagagggaaaaggatcaagagtctaaatagttatacagaacggtaaaggtgagatgaatcgattattctattccgtgtgccctcattaacatatttaatataaaggtaaagatgaatttatattacaaaaaaaaacccgcggttaaaaaatttaaaaattttatactttttccctaaaaaaaaaaaaaaagggtaatggtttttaaggggtttcaaaacaaatgggtgaaaaaaaaagggtattttctt

SEQ ID NO: 194507 - DNA, 536 bp, Gossypium hirsutum
gatactttaaggcttcatcctattgcacctttactagttcctcgtgagtcaatggaggacatagttattgatggttgttacataccaaaaaagtcaagggtcttagtgaacgtttgggcaattgggagagatcctaatgtgtggtccagtatgggcggacgcgtgggtcctgaaaggttcattgatagcaatatagaccttcatggacatgattttgaactcatcccatttggtgcaggccgtagagtatgcccagggaagaaactagggttaatcacagttaaacttattctagctcaattggtgcattgtttcgattgggagcttcctagtggaatgtcgccgaatgaactggacatgactgagaactttggtgcctcggtgccaaggaagactaatctttgtgccaagcccacttatcgcatgtagaaatgcaagtttcatgattttttttgtgttttaaaataacaggatgtatacttataataaagggcattttaaaatggcatgtatttctttttgaaaaaatattaatt

SEQ ID NO: 194508 - DNA, 444 bp, Gossypium hirsutum
ctttcaattacgttgtgcctttggggggtcaatgaaacaatacacaggatgatggtgtcagcgacgattgatctgttgaagaaagagcttcctgtggaagaaggctctttggttctttcgaaagatgttaagactggtcttgttcttgctgatgttgttaatggcttccgcagcggtggagcatggaaatctggtaattcttccccataaaatgcactcaatttattatattttggatgaacagtgaatctgggttgcgcctttcgtttgttttgatgcttcgtgttcatacaggctccagcgaaacctgttaaacatatatctgatatcggtaaagaatctgcgagactagccaagctattttgtggggaaaaatggcctgcttttgctttccttgattaccatcatgctgatattcctgaaccttcctacccacctcattgc

SEQ ID NO: 194509 - DNA, 573 bp, Gossypium hirsutum
tgtatttgaaagtggagaagttggctgagaagcatggatgtagccctgcacaattagcacttgcctgggttcttcatcaacgggatgatgtagcaccgattcccggaacaacaaagataaaaaatctggatagtaacattgattcactaaaagtcaagctcacagcagaagatttgaaagaaatttctgatgcgggtccgataaatgaggtagcaggtgatgttttgcctgatagatttagtcaattacactggaagtttggtaatacaccaccaaaggggagcaaggtttcaacctgaaaaaaccatggatgccaagtctgcagcaaaatatgaggttttggatgaatggactgtccaacaactcaaactattgaaaaattgtatcaatgatttggtaagcaatttgggtagagtactaatgaagggttgagtgagagtagaagcctgcattaccaaaccaaaacaaataagcagttttgtattgtgtttctgcctgtgatatgtagctagtaatcttccaagttatatagtctgaaaatgaaccaggttgtttgtttatcacctgaatgct

SEQ ID NO: 194510 - DNA, 871 bp, Gossypium hirsutum
atttgctatagtatgtgcataaatattctgtgctttagggacaaaagtaaactcagtctgctggaacctgttttttagactttggatatctgtgataattgctccaatgactgatttatctgtgaagaagctttggcatttcttgataacagttttggaatctcctaaaactgttaatttatttactcccagtctccctaattttattgcatgtaaccctgcatatgcctctgctgtgaatggatttgcaatgttggagtgaatgactgcctgtgatgcaagaatctctctattctcgttccgtactattatacctgaagccgatctgaactccagacgatcgtaagctgcatcaaaatgaatgaaggtccatccccttttgtgtatctgttggagattgtcagatgaatggagaatgatttctgctaaaccaaatgaaccaaaggctacaacagaaaagttgaagctgctcttcattacctcgatcaaaaacccagggcactgaataaaaatatgccagctattttcttcggcacaaccgcacctgggacaaagagtgttcatcactaccctctttattttaaggttgacaaaggaagggataaaatcccaagaaatcctccaaattgtcatctgaatctttgaagggatatgtaacttccataatttgttgtagaaattttttgtctcggtatgtaataataaatcattagggtccagattagaaccatgtaatagtttataggcactcctcaccgagaactcccctatcggttctcctctccatacttgaagatcttcttgttctgtctccgcaagagggatttgtaaaatttgctctgcaacatctggttgaaaggtatttcttatc

SEQ ID NO: 194511 - DNA, 574 bp, Gossypium hirsutum
gttcttacagccgtccaaatgggtcgtgtcatccgagctcagcgtaagggtgcgggttccgtcttcaaggcccacacccaccaccgcaagggtcccgcccgttttcgcagcctcgacttcggtgaacgaaacggctacctcaaaggcgtcgtcaccgatgttatccacgacccacgccgcggtgcgcccttagctcgcgtcgtgttccgtcacccgttccgttacaagaagcagaaggaactgttcgtcgctgctgagggtatgtacaccggacagttcgtgtactgtggtaagaaggccacccttatggtcggaaacgtgttgcctcttagatctatccccgaaggagctgtcgtttgcaacgtggaacaccacgttggtgatcgtggggttatcgctagggcttctggtgattatgccattggtattagtcacaaccttgataacgacactaccagaatcaagctaccatccggttcaaagaagattgttccaagtcgttgccgcgccatgattgggcacgttgctggtggttgtaggactgacaagcctcttataaaatctggtaatgctt

SEQ ID NO: 194512 - DNA, 360 bp, Gossypium hirsutum
ccacgcgtccgcccacgcgtccgcttgccagcaagacaatatgttctgatgatttggtggtagtctcaccagatgttggtggtgttgctagagcacgtgcttttgcaaaaaaattatctgatgcacctcttgctattgttgataaaaggcgtcatgggcataatgttgcagaggtcatgaatttgataggtgatgtgaaaggaaaggttgcagttatggtggatgacatgattgacactgctggaacaatcgcaaaaggtgcagctcttttgcatcaagagggggctcgggaagtgtatgcgtgtagtacacatgctgtttttagtccttctgcaatagaaagattgtcaagtggtcctt

SEQ ID NO: 194513 - DNA, 513 bp, Gossypium hirsutum
ttcttgaatcaacctctgcttgtttaagaaaagaaggaaaacttgtgaaacaagaagaagaagaagagaagagcaaaaaagtgaaatatgtacgtgagagcggtgccaacgacagatctgaacaagaatacggagtggttcacgtacccaggggtttggaccacttatatcttgatggttttcatttcatggctcctcgttttatctctctttggcacctctgctggaaccgcttggacaattgttcatctcgcgcatttctttgtcacatatcacttctttcactggaagaagggaacaccgtttgctgatgaccaaggtatctacaacggtttgacttggtgggagcaaatagacaatggcaagcaactgacacggaacaggaagtttttgactgttgtacctgttgtgctgtaccttatcgcctcacatacaacagattatcaaaacccaatgctcttcttcaatacgttggccgtatttgtgctggtggttgcaaagttccccaacatg

SEQ ID NO: 194514 - DNA, 652 bp, Gossypium hirsutum
  unsure (1)..(652): unsure at all n locations
gctttctccaaatgaccatgcctcctcaagtgattcccgacaagacccttcaaggtctctatggtttgggtagagaaaacaattcttctcctcaccctagaaggttggaagggaaagttgctattgtgacgggaggagcaagagggattggggaggcaacagtgaggctttttgcaaggcatggtgctaaggtagtgatcgcagatgtggaagacacgcttggaactgcgttggctaattctttgtctccttgtgtcacttttgttcattgtgatgttagcctggaagaagacattgagaatttagtaagctcaacagtttcccgatatgggcggcttgatatcctttttaacaatgctggggtgcttgggaatcagagatagcataaaagcattgttgatttcgacgtggatgagttcgataatataatgagagtgaacgtgaggggaatggcgctgggaatcaagcatgctgcacgtgcaatgattccccgaggtggcatcattaacaccatgttctgaatatggtggctggtcctgctaccgctcgaaccgcattgtgatgacaaaacgcgtgtgactaggcgatggataaggactgtttntcatcgggctcactttctggatgctgaagcccacttaaaagaacgctt

SEQ ID NO: 194515 - DNA, 1354 bp, Gossypium hirsutum
ccgtccggccggtcggaccacgcgtcaaaacatagcaaaaaagaaaaatggcaaaatcagcagaggaagagaaccaacaaaaagcttttggttgggctgctactgataattctggaatcctctcccctttcaatttttccagaagggaaaatggtgatgatgatgtcactttaaaaattctttactgtggagtgtgccattcagacctacatactttgagaaatgactggggtttctccttttaccctgttgttcctgggcatgaaatttcaggtgttgtgaccaaagtggggaagaatgtgacaaaattcaatattggtgaccgggttggggttggggttttggttggttcctgcaagacatgtgaatgctgcgagcaggatctggagaactactgccctcgtataatatttacctacaactcttacaatccagacgggacaaaaaattatggtggttattcggatatgattgtggttgaccagcgctatgtgctacggtttcctgataacttgccactggatgcgggtgcaccattgttatgtgcagggatcacagtgtacagccctatgaagtattatggaatgaccgaggcaggcaagcatctaggtgtttctggacttggtgggcttggtcatgttgctgtgaagatcggtaaggcctttggattgaaagtcactgccattagtagctccccacagaaggagtctgaagcaatcaatagacttggtgctgactcattccttgtttctaacgatccggaaaaaatgaagtcagctattggtaccatggactatatcattgacacagtgtctgcggtccatcccctacttccactgcttagtctgctgaaggtgaatggaaaattggtcactgtgggattgcctaataagccactcgaattgcctgtttttcctttagtcatgggacggaagcttattggaggaagtgatgttggagggatgaaagaaactcaggagatgctagacttctgtgccaagcacaatatcactgcagatatcgagctgattcggatagaggaaatcaatacggccatggaaaggcttgctaaatctgatgtcagataccgatttgtgattgatgtggcaaattccttgtcacagtagggttcattgtgaaggaactagtccagtaagtttaaagattatgatcttaatggagaagagaaaacagatgaactttgatggcttgggacttgtaatgctatataataatcatttatatgagatcattttgtgggtgttctgcttcatgttatcactgttggtcggatggaatctttattttaacctcactattatttttgcagtcaataaaggaaatagttgcataa

SEQ ID NO: 194516 - DNA, 434 bp, Gossypium hirsutum
tcgtccatctcgtgcgaccacgcgtccgatcccctacttccactgcttagtctgctgacggtgaatggaaaattgctcactgtgggattgcctaataagccactcgaattgcctgtttttcctttagtcatgggtaaacttccctctttataggccttaaattccaccaaaacatttacaaaataaagttatatatataattcccatatcagaactttgcattggtaatgaaggtaatcacctattggctgctgtgaacttggcttgattattttggcttacaggacggaagcttattggaggaagtgatgttggagggatgaaagaaactcaggagatgctagacttctgtgctaagcacaatatcactgcagatatcgagctgattcggatagaggaaatcaatacggccatggaaaggcttgctaaatctg

SEQ ID NO: 194517 - DNA, 966 bp, Gossypium hirsutum
agagttgtatgctaagaataacaagctgagggaattagcaaacctcgttgttgttgctggttacattgatgtaaagaagtccaaagacagagaagagatagcagaaattgaaaagatgcatgaccttatgaaagaggcgtccgtagatgggcaatttcgttggatagcagcccaaacaaatcgagcacgcaatggtgagctctatcgctatatagctgactcaaagggtatatttgttcagcctgcattctacgaagcctttggacttacggtggtggaagccatgacatgtggccttcctacgtttgccacattgcatggtggtcctgcagagattatcgaacatggtatatcagggttccatattgatccataccaccctgaccagaccgctgaactcctggcaactttctttgaacgttgcaaggaggacccaagccactggactaaaatatctgatggagggcttaagaggatttatgaaaggtatacatggaaaatttattctgaaaggctgatgacattggctggagtatatggtttctggaagtacgtctcaaaactcgagaggcgtgagacccgaagatatcttgaaatgttctacatcctcaagttccgtgaattggtaaaatctgttcccttggccagtgatgattaaaagcttaatccctggttgcgctcgtagggtactggtggtatacattcacgggtctggttgattgcgaggatgaacaatataatatataaataaagcagactaggtctccttgctatggagcattttaattcggctttgtgttggaagtaaaaaatcaattatgtgatgggtgttgtaaataaatgcagtgttctggctttggactgcctcttgaaatctggttgaagatttgtatgtatgtaaagctaacagtgtgcctgtatgagagctggtaagaactgcaatcataatttcgtctccttgctgtt

SEQ ID NO: 194518 - DNA, 373 bp, Gossypium hirsutum
tgcatatctagttatatgtatatgaattttttctacttttcgcttatcttgtctgttctttattttatagtcttagggtgttctcatttttttcttcgctgtttattactggcagttttaactttaggatgcttgcgtgttgatgttcatggataggcttagaatagttgcctttaaggttttcaatagtgcagccgcctcacaccatagggaggcagaatgtcttcttttttggtttattgtggagccttagcttatatgttttgaacaattgtaaacagaaattgtttcccttttataacttgctctagagcttgcttcttgcaaaaaaaataataatacaatttttttttataaaatatttataaaatat

SEQ ID NO: 194519 - DNA, 611 bp, Gossypium hirsutum
ccctctcgtccgattaattctcccattttcctttttgccttctagaaatttccaagttcttcttcaaaaccctcacatcccattcgatcaaaagaactcaaatctttatcatccaccatgggaggaggaaatgcccaaaaatccaagatggctcgtgagaagaacttggaaaagcaaaaagctgccgccaaaggaagccagcttgattctaacaagaaggccatgaccatccagtgcaaggtgtgcatgcaaacattcatctgtactacaacagaagtgaaatgccgggagcatgctgaggcgaagcatcctaaatccgacctatacacatgttttcctcatcttaaaaagtagcacactggggaagtggagatggcttgtagcatgcatctatcttgtcccattggtactgtatgagtaacttcttaaaatctctctcacaaaagccctataagctctcacttggtgatttcgatgatgcaattgtcgtgtcgtgttctgtctcgatacttgcttgttgcttgattttgatatgattaatgtggtaaagctggtggtgttatttgtggagctgttttttcttaacctttttttgccactttgtctatgaa

SEQ ID NO: 194520 - DNA, 774 bp, Gossypium hirsutum
  unsure (1)..(774): unsure at all n locations
ggcgtattcctttatcgacaattgacagcctctatccttttggcccacacttgcattactgcattcgtatagacacgctttgcggatcattgtcttgcctgtttactgccggcaccccccccatttgccttatttggcctttatcatctctgatacgtccctcttccaagttttcacttccaattcgatcaaaaaacccttctttttttccctcatcaatccaccatgggaggaggaaatggccaaaaatccaagatggcccgtgagaagaacttggaaaagcaaaaagctgctgccaaaggaagccagcttgagtctaacaagaaggccatgtccatccagtgcaaggtgtgtatgcaaacattcatgtgcaccacaacggaagtgaaatgccgggagcacgctgaggcgaagcatccaaagtccgacgtgtacgcgtgctttcctcatcttaaaaaataaacatcgaaactccacagaaagaacggagatgtcaagacagcttgtaatgcatatcatctatctatgttgtatcttggtactctacaatttatcttaaattctctttcacaagcctgtaaaaaactcactagctgattttactcgtgcaaactaaatgtttgtgttcaatcatggatttgtatgataacagagctttgaaggagaaattccagtctttcacatnnnnnnnnnnnnnnnnnnnnnnnnnnnnnnnnnnnnnnnnnnnnnnnnnnnnnnnnnnnnnnnnnnnnnnnnnnnnnnnnnnnnnnnnnn

SEQ ID NO: 194521 - DNA, 504 bp, Gossypium hirsutum
cccacgcgtccgatcagtactgcattgttgtaaagtttttcttaattttcttcctttgggaaatcctgaggaattaacacttgagtgttagctcatctcgcatgagctattgccaattgtcgattttgatgacaacaatctgtagccttcttgaaaagattattgatagcaaaaaccatgtttttgttcgatttgtgtgatgtatggtgataaaagaagactttggattttccatttggtcactatatatctttagtttgatattattgaatcgagttagactcgttttattaagtccattgatggaagtgttacttgccttatcttctttgttcgcttcattgatattgtacctggtggatggtggtgatttgtgtatagtgcaaggtgtgcatgcaaacattcatctgtactacaacagaagtgaaatgccgggagcatgccgaggcgaagcattctaaatccgacctatacacatgttttcctcaccttaaaaagatcaca

SEQ ID NO: 194522 - DNA, 823 bp, Gossypium hirsutum
atttgcttgagcatcaatatcacatgatgatttattctgtgcctccaaaggttcctatggctccaatacaaaatgggatccatcccatgcccgttaacaatttaccaatgggataccctgtgctgcaacaacctcaatttccagctgcagggcaacctcatatggactccatgggtatatcaagctgtcatgttgtcaacggagtccctgctaccagcaactttcaacctatgcggatgaattctgggaatgacatggtgatggacagcaatgccagtgatgtaatacctgcagttccaccaaccactgccatgtcatccatgtcagagatgcctttgagctgtacatcagtagcatccagtgggagttttcccttcagtgcatcagatatgtcagggatgggagtagacacatcggcacttgattcagccttcacaacagatgtggcaagttcagtaggattgcagctgggacaggataatgaaactgggaattctagagattcctttagaccacttgatcagattcagtggaatttcagtctcacagatctgactgcagacttgtcaaacttgggagatctaggtgcccttgggaattaccctggttctccttttcttccctctgattcagaaattttgcttgattcttcggagcaagagaatatagtggaggaattttttgttgattctgtccccgaacagccgtgcttctcgtctgatgaagataaatcctagataaaggttagtaacgttccttcttgaaattgttaggaataagaacaagatttgacatctatttagtatgcatttttaaattttga

SEQ ID NO: 194523 - DNA, 770 bp, Gossypium hirsutum
  unsure (1)..(770): unsure at all n locations
gccagctccatttgtgttgcacactgactgtcctcactattggcgctatcatctagaaggggagacggaagaggagttctcaacaagattagccaacaatttagagaaccttattctgaaagagggtccagagacgattgctgcatttattgccgagcctgttatgggagcaggaggtgttatacctcctcctgctacttattttgagaagatacaagctgttgtgaaaaagtatgacatactttttatcgccgatgaggttatttgtgcatttggaaggcttgggacgatgtttggatgtgacaagtacaatattaaaccagatcttatttcactagcaaaggctctttcttctgcatatatgcccattggagcagtcatggtgagccctgaagtttcagaagtcatttattctcaaagcaacaaacttggtagtttctctcatggattcacctactctgggcaccctgtatcctgtgctgttgcaattgaagcactcaagctctacaaggagagaaatattgttgagaaggtgaagaccatttctccgaggtttcaagatggtctaaaatccttttctgacagtcctattgttggagagatcagaggtaccggcttgattcttggtactgagtttacagacaacaagtcgcctaatgatccattccctcctgaatggggggttggtacatattttggagcacaatgtgagaaacatgggttgctagtacgtgttgcaggggacaacataatgatgtctncaccattta

SEQ ID NO: 194524 - DNA, 1380 bp, Gossypium hirsutum
cacactccaattttaactactagtgattgtgagggagctggtgagatgtttcaagtcacaactttgattagtgaatctgaaaagctggagaaggaactgattaaaaaccctcctccatcggaggttgacatagaagcagctaggcaagttgtgagcgagagaggagaggctgttaaacagcttaaagctgccaaagcaagcaaatcggaaatcactgcttctgtggctgaacttaacaaagcaaaggagaatctctctaagctggaggagagatctaaattgaaacctgggattcccaagaaggatgggaagattgactacactcaagacttctttgcccgccaagcttttttgacagtttctgggcaactgcaggttgaaacatatgcttgtgctgttagtaacgtgtatacatttgggccaacgttttcgggctgaacactctcacacttcaaggcatttggcagaattttggatggtagagcctgaaatagcatttgcagatctacaggatgacatgaactgtgccgaggcttatgtgaagtatatgtgcaattggttgcttgataaatgccttgacgatatgcaattcatggctaaaagttatgataaaggttgcattgatcggttgagaatggttgcttcaattccctttgtacggatatcatacacagaagcggtggagcttttagaggaagctgtgagaggtggtaagaaatttgagaatgaagtgaagtgggggattgatttggcttctgagcatgaaagatacttgactgaagttaaatttcagaagcccgttattgtttataactacccaaagggaataaaagcattctacatgaggctcaatgatgacttgaagactgttgctgctatggatgtccttgtgcccaaggttggagaactaatcgggggaagccaaagggaagaacgttatgaggtcattcgggaaagaattttggaggtggggttgcctcttgagccatatgagtggtatcttgacctgcggcgatacggaactgttaaacattgtggattcgggctaggctttgaacgaatgattctctttgccactggcatcgagaacattagagatgttattcccttcccaagatatccgggaagagctgatctctgattggatttttctaagatgacgtgagaaaatggtcttggttttcaggttaatactcatgggttttagtaaatttttgcgcattggcaatcatattacgtactttgaaaagaattgtaaaagtataactgtttcttaatttttgttctttctctgttcatccttaacagcaccacatgtttgttatatattgatgttagtgttatcatctaatgcaataatatatacgtcttctttacctc

SEQ ID NO: 194525 - DNA, 670 bp, Gossypium hirsutum
  unsure (1)..(670): unsure at all n locations
aaagtttcactaccgtaacaaaaggggttgcgaaggctctcgacattggcttagaaatggtttatgttggcaaaaacaatgcaaaggaacgagtgaaaaagattactggtctaatcaaagagaaaaaacttagccacgcttgggaagatgacaatgtgtggttcttttggaaccgattagagagcatgttgtactcgaaaacacaacatgggaaagccattgaaaacgattttataaagcaagaagtgatgaccttgcttgcatatgacggtagtgaaaatggatgggcagtgttcttcactggttcagatgaaatggtgagagccaatggagagaaagtgcttagcagcatgaagagctttgaggaatgggaaaaacttgcgaagcaaatggggtttatcccagcacttcgtaaacatttggacgggattaccgatgaccatcactgcactcgccttatcctaccgggaaacggtggcgggattccggagagggtgcagtgtgctgagtgtggacgtccgatggagatgtatttcatgtatcgctgctgtgttgagtgagctaaacaaagccacaaaaattactattggggggaccaagntaaatacaagaaataaaaatataacaatcatcataattgatgtttggttagaagtattaatgatgatca

SEQ ID NO: 194526 - DNA, 633 bp, Gossypium hirsutum
tttccaatccaatatttcaaatccctttaatcttcttgatcaataaaacaccccacccagattgttagtttgcaatcccatcaaatcatctatcatcaattgcctaacgtttcctttttggtttattgccgtctcccataaatctaatctaagttgttttaaagaaataaaatgagctggtggtgggctggtgctatcggagctgctaagaagaaatttgaggaagatgaagcaccgaaaagcctcaagagcgttgggctgatcattggagtcaccggcatagttggcaatagcttggctgaaatcctcccgttatccgacactcccggcggcccatggaaagtatacggggtggctcgtcggcccagacccaactggaacgccgaccatccaatcgagtacattcaatgcgacgtatccgacccgaatgataccgaatcgaagctctctcaacttaccgacgtcacccatatcttctacgtcacctggaccaaccgaacatccgaagccgagaattgcgaaatcaacggttccatgctccgcaatgttttgcattccgtgatcccaaacgcacccaatctccgccacatctgtctacaaacaggagccaaacattatcttggaccgttcgag

SEQ ID NO: 194527 - DNA, 372 bp, Gossypium hirsutum
aaattcaaatcccttgattcctttttgtcaaccaagcatcccacccggactgttagttcgccgtttcatcaacttcccaaccttccctttttctttaatttcctaccccaattttcgccacaaatctaatccaaaatgagctggtggtgggctggtgccattggggctgctaagaagaaatttgaggaagatgaagcaccgagaagcttccagagcgttgggctgatcattggagccaccggcatagtcggcaacagcttggctgaaatcctcccgttatccgacacccccggtggcccatggaaagtatacggggtggctcgtcgggccagacccaactggaacgtcgaccattcaatcgagtacattcag

SEQ ID NO: 194528 - DNA, 1000 bp, Gossypium hirsutum
ctcaatctgggagcctactccatcttccatcggaacgcacataaaggcggtgtagtgcctctccttccaggtgtgtttcttctcccctgcttagcgcttcttctgcaattttgtgagccgagatgttctcggctctattgataaattggaacctgatttcttgaaaaaactccgactttttttgaatatcactgatgattgctcctataactgacttatcttgcatcgatgtttgacatttctttatgacggttcgtgaatccccctttaccgtaactgagtgtatacccatggaaagtccaagattaatcgcgtgaagacctgcataagcttctgctgcaaaagaagttgaaacatttgaatttaagaccgtcttcgtagcaagaattactcccatctgatcccgaaccaccaggcctgccatcgatttgaaatcccttcggttaaaagcagcatcaaagtgaatcgtcatcccagaactcgtatcgctctgaatggccctcgtagctgtacacaaggacccatatgccacagcaaagcaatcgaccttgtttgggagtgctcttttggaaaatccaagacaataccgaaagacatgagataaatcttcctccccagatctacatcgagaacaaacagcagtgtcgactactcgtttagatcgcaaattaactagagtaggcatatagttccatgatgctcttcaaactgtaatagtaatctttgagggtaactgtaaattccagagctttttgtagaaattttttaaatcggtatgtaataataagttgttaggattcgagctagtgctttgtaatagtttgtaggcacttctgaccgaaaatcaactccttggagttccgctagaaagattctgcaaaatcttttgggcagtgtctgctgggaaggtacttagcactagttcagacttccacatattatttgatgcatcaattaaatctgaaactaattggacttcattattgttttcgtgactctt

SEQ ID NO: 194529 - DNA, 417 bp, Gossypium hirsutum
cccacgcgtccgcccacgcgtccgtgtctctctgccaatttgataaaaaccaaaaaaagaaaaagcctccaaaaaaaatggagaagatgatggcgttgagatccgtttatagagcagccttgtttcagatcttcccgttttacccccatcgccgtcacggccgccgtcaaccacaatcgccacttggtttcccggagtttcttctctatctcatcgcctatcgcccctaatccgcctagaaacaccccttctggtgggaggtcgtcctttgcgttgagatcgggaagcatgcgctatttttagtgaagatgcagctcatttgcctgacataaacgacactgagattctgaatgttttcaaggacttaatggctgcaagctgggatgagcttccctattcggtcgtacaagatgcaaa

SEQ ID NO: 194530 - DNA, 775 bp, Gossypium hirsutum
gaaagatacacctatatcattggttgaagatccattcgaccaagatgactggagctcatggccttcgcttcagtcttccatcgatatccaactcgttggagatgatttgttagtcacaaatccaaagaggatatcggaagctattcaaaagaaggcttgcaatgccttgcttcttaaggttaaccagattggaacagttaccgaatctattcaagcagcacttgactcaaaagctgcaggatggggagtgatggtcagccaccgaagtggtgaaacagaggataacttcatcgctgacctttctgttggtttagctagtggccagatcaagactggagctccttgtagaagtgagaggttggccaagtacaaccagcttcttcgcattgaagacgaactcggaaatgtccgctatgctggtgaagctttcagatctccttagaggagttaacttacaggaacaagtttctgcaccaaattagtatggagaaacgttttaacgagctctagtaaactgaggccgacctttagaaattttcaggaaccctaagagcttctcaggggaaaaaaacataatttgatcatctaggatagatttcagtttgtgggatctgaataatcaagttttggtataagttgtatttggagtgttgaatgaagactttgattagatgtgattctctgtaattctgctgaaccttagtaaagaggtattcaaaaataaatatatgttgtgatgttgtgtttttcaaaaaaaaaaaaaaaaaattctgcg

SEQ ID NO: 194531 - DNA, 648 bp, Gossypium hirsutum
cacaaaaacacctattctcttgagtaactgttacaaaattcagcaaatatggaagccaacaggggccagaacggtattcaacagctgctagctgcggaacaagatgctcagcatattgtcaatgctgcaagaaatgcaaaaatggctagactgaaacaggccaaggaagaggcagagaaagagattgctgaatatcgtgctcaagtagagtatgagttcaagaagaaggtggcggagagtagcggatactcgggggctaatgtgaagcggctcgagacggaaacagatgcaaagatcaatcacttgaaaaacgaagctgcaaggatatctcatgatgttgtacagatgcttttgaagaatgtgacaactgtgaggaactagggggtcttccatgaagactgatggtttaattttctactacattctatcaattcccaaaactcagctcatgcttgggaacaattttatgtcattattttatcatttgttgttatttttgtttgtgccatgttcctgttctgaaataaactccaatgtgtgccttctagaaatggtttctcttagtatttcttggaacttgatctgaattcttgatgagtcttgatctcagctcaatattgtttaatggattcattttgtctctctcct

SEQ ID NO: 194532 - DNA, 520 bp, Gossypium hirsutum
cgtccggtaatttgatcatggcattgttgttgaggaatcataggcatcacagggggttcaaaaagggttgctcattatcttttagcatggagggagaggccatggatttggcatattaaatagttgtttcttcatattaagaagttagagaggtaggagatggttaaagtggtaaaggcaaggagaaattttgtgcttgtaaggaagaattcgaaacaagcacattatgattgatcttggcatcgataataacaagattaactgggctctcaaggacaaacaggagttcagagacatcattgggactgtataccgtgaggcatggaaaggccgtggtttgaaagattactcgaaaaagtactgctattgagtattcttccaacatgtagttgatcagaatgtaaattgtatgtagatatgtgtgtcatttgcaatgtttggttgcatgaatgtggaggataatccaatttgagatgaaactttgaaatatatattttatgtgctcttttgatgcttgttt

SEQ ID NO: 194533 - DNA, 538 bp, Gossypium hirsutum
  unsure (1)..(538): unsure at all n locations
atacaaactaccacatggatctaatagctgggctagcaaacatgagggccaggaactacagggttcctgaggtggataagctgaaagccaagtatattgctgggagaatcatcccagcaagtgctaccaccacagccatggccaccggtcatggctgcctagagcattacaaggctcttgatggaggccacaaggtagaggactaccgcaacacttttgcaaaccttgcactgcctctgttctccatggctgagccagttctacccaaagtcatcaaacacggtgacatgagctggaccggttgggaccgatggagcccgagagacaacccaactttgagagaactcaatccaatggcttgaaaggataagggcttcgaatgcctacagcatatcaatcaggcagggagattaagttcttctaccatggggtggccacgtccttgaaagtctttgtataatgtatagtatattagtctgtcacaatttgtattgaatattgcgtctatttaataacagaagtnaccttttctttattc

SEQ ID NO: 194534 - DNA, 345 bp, Gossypium hirsutum
cctatactaaagtcaattacattactctactttcacttgttctagctttatcgcttgtatgtgatactttttcccttctcgtcctcctcggcctccttgccgcttggctcttcttatacttgttccgaccgtcggatcaacctctcgcaatcttcggccgtacattctccgatcgtgagacgcttggcatcttggcggtgctgacggtattcatcgtgttcttaaccagcattggctcgctcttgatctccgccatcttgtttggagttgccattgtttgtatacacggtgcgtttagggttccggaggacttgtttttagacgatcaggatcctgcaaactctg

SEQ ID NO: 194535 - DNA, 383 bp, Gossypium hirsutum
gtcagcctcacactttctccttccagcgtcgattcatctccatcagatacatgctcttagagcctggaggaatcttggccggagatccctcctcaacttcaatttcaacgaagagaggaggagaaatctgtagcgtgctcgcgcggtaaggtttctcagtcactggtcttactatgcttttttttaaaaatggtgaatgattcccatagaatacgaaacgatgtgaagaaaggtaaagagattcgaaggaagaaatcacatctgctattctttgccttctattacgtgtatattccgcgaatatgcggtagttttgcttgggggttaccgattacaaggttcaaaacttctgctttatagcccaaaaaaaaagggaaattcaa

SEQ ID NO: 194536 - DNA, 376 bp, Gossypium hirsutum
gcgtaattgccgaaggagggagcgaggaaagagaggacgcgaggaaaacaaaagatcgaagcgcagaggcgaaacgctgagaagaatcaaaagccaaagggttctcagctggaggccagagctgtagccctcaaagtcagctgccctatctgcaaggtgcaattagcaaatgaaaaacaacttggtgatcattatggctctaaacatccaaaggaaaaccctcctgctgtgtcaagttgattgctttcttcgcatgtaaaagaaggaaaagaacaaattatcttttcctgtgtgattctagatattatatgttaaccgtctgtaaaaaaaaaataatttaaaccaatgaaaatgactcttttatctatttgccttt

SEQ ID NO: 194537 - DNA, 456 bp, Gossypium hirsutum
gccatgttgttcttgcccaagaaggtcactgcaggcctggagaggttttgttagggacagattcacacacctgtactgctggagcattcggtcaatttgctacaggaattggaaatacagatgcaggctttgtcttaggcaccgggaagcttctactcaaggttccaccaacattgacatttgtgatggatggtgaaatgcctccttatctgcttgcaaaggatttgattttgcacatcattggtgaaatatctgtagccggtgcaacatataaagccatggagtttgtcggcacaacggttgaaagtctaaatatggaagaacggatgacgttatgcaacatggttgttgaagctgggggaaagaatggagtcgttcccgctgatagtactacatttaagtaccttgagggtaaaacatccctgccatatgaaccagtttacagtgatgcacaag

SEQ ID NO: 194538 - DNA, 746 bp, Gossypium hirsutum
  unsure (1)..(746): unsure at all n locations
cccacgcgtccgcccacgcgtccgcccacgcgtccgcggacgcgttctgagctttcgtgtttgtctattgaattctttccctcactttctcgaaaaaaaaaatgtcttcaggttgcaattgcggatctaactgcagctgcggtgacaactgctcatgcagcaggaaccttaaccttggatattcggagaagacaaccagcactcagaccatcatctccggagttgcgccagtgaagatgacctttgagggaccagagatgagcactactgaatcaggacatggatgcaagtgtggatcaaactgctcttgtgatccatgcaactgttgaaaagcttgatgaaagccatagattatgaaaaaaagaaagcagcaaaaataacaggcctctgtaatgatatattgtcaaggatggatgcctgcaaggtctataattatgtctctgtctgtgtcttgtgtaatagaagctttgtttgtggtgaaaataatgtataagccatttggttgggagcaaattgtccttttctccaaaggatttttgctgctcattcatggtgacttggtttatggttttatctgttgttgttaaaatcttataaaaatatatatcggttgctgctcttggtttgtatcaaatcattgtctgaaaatatatggcatcttttattnnnnnnnnnnnnnnnnnnnnnnnnnnnnnnnnnnnnnnnnnnnnnnnnnnnnnnnnnnnnnnnnnnnnnnnnnnnnnnnn

SEQ ID NO: 194539 - DNA, 536 bp, Gossypium hirsutum
tcctcatcgcgtccgcccccgcgtgagctttcgtgtttgtctattgaattctttccttcactttctcgagaaaaaaaaaatgtcttcaggttgcaattgcggatctagctgcagctgcggatctggctgcaattgcggtgagaactgctcaatgaaccttaaccttggatactcggagaagacaaccagcactcagaccatcatctccggagttgcgccagtgaagatgacctttgagggaccagagatgggcactactgaatcaggacatggatgcagctgtggatcaagctgcaaatgtaatccatgcacctgttgaaaagcttgatgaaagccatagattatgaaaaaagaaagcagcaaaataacaggcctctgtaatgatttattttcaaggatggatgcctgcaaggtctataattatgtctctctctgtcttgtgtaatagaagctttgtttgcggtgaaaataatgtataagccatttggttgggagcaaattttccttttgtccaaaggatttttgctgctcattca

SEQ ID NO: 194540 - DNA, 1648 bp, Gossypium hirsutum
  unsure (1)..(1648): unsure at all n locations
ctttattgtcagggatttttaccaccagatgaggtgcacatatttggctatgcaaggactaagatttcggatgatgatttaaggaaccgtattcgtgggtatcttgtcaatgatagaagtgcttcaccctcagaagacgtgtcaaagttcttacagctgattcaatatgtaagtgggtcatatgacggagctcagggctttcagctattagacaaggaaatcacaaagcatgaaatctcaaaaagtagccaagaagggtcatctcggagactcttttatcttgcacttccaccatcagtgtatccatctgtttgtaggatgatcaggaaatattgcatgaataaatctgatcttggcggctggactcggatatttgttgagaaaccatttggtaaagatttggactctgcagagcaactaagttctcaaatcggagagttgtttgatgaaccacaaatctaccgtattgatcactatttgggaaaggaattggtccagaacctgttggtacttcgttttgctaatcgcttcttcttgcccctttggaatcgcgacaacattgataatgtacagattgtattcagagaggattttggaactgagggtcgcggtggatattttgatgaatacggaattatccgtgatattatccaaaaccacctattacaggttctttgtcttgttgctatggagaagcctgtctctctcaaacccgagcacattcgtgacgagaaagtgaaggttcttcaatctgtacttccgattaaagatgaagaggttgtactcggacaatatgaaggttacagggacgacccaacagttcccaaccactcaaacactcccacatttgcaactgttattctccgtatacataatgaaagatgggaaggtgtcccgtttattctaaaggcagggaaagcattgaattcaagaaaagcagagatacgtgttcaatttaaggatgttcctggtgatatatttaaatgtcaaaagcaagggagaaacgagtttgtcatacgcctgcaaccttctgaagccatgtacatgaagctaaccgtgaagcagcctggtctcgagatgtcaacagtgcaaagtgaactagatttgtcatacaggcaacgctatcaaggtgttacgatcccagaggcttatgaacgtcttatactcgacacgataagaggtgatcagcagcattttgttcgccgggacgagttaaaggcggcatgggagattttcacgcctcttctacacagaatcgacaacggtgaaatgaagccaattccataccgaacaggcagccggggtcctgcagaagcagatgagctctcggctaaagccggttatgttcaaacacacggttatatttggattcctcccaccttatagaaacattatatatatttatatatatatagctttgcgatatcctatcaccattgccatagaaagaagttgaggtttgtaacagatacaataaaatgctaagcctaagagctttgtaacttttccctttaaatcatgtttggaacacttttataaagggtctttccttgttatatttacaacttattccaattcggntgagaaaaaagaaagattaaaagaaaaaaaaatacggtaaaggagaaaaacccatggatagataaaa

SEQ ID NO: 194541 - DNA, 417 bp, Gossypium hirsutum
cccacgcgttcgcggacgcgtgggcaaccacagggcgaaacatggatgaagtgatgcgggcggtggactcactgcagaagacatcgcagtacaaagtggcgacaccggcgaactggaaacaaggggagccggtagtgatttcgccatcggtgcccaacgaggaagccaaaaaaatgttccctcaaggttttgagaccaaaaacctcccatcagggaaggattacctgcgcttcactaacgtctgaattacatatgtcatggctaagaacttttgcactccaactcttgtctttcaagttttaccatgtaagcaccgcttgcaatttcggttaaataataataaaaaagttgtacttggttgaaaaaaaattaaaataaccaaccttttctttctctttcattgcatgttaaaatttt

SEQ ID NO: 194542 - DNA, 1182 bp, Gossypium hirsutum
ataccccctcccccccccccaatttaaaaagctttcttctccatcttctctggcgttttcttttgcttctgccttttgaggttgcagaggaattagaagtttgaaaagtttcatctgtgttgatttttttattgttttgagactgggtgatgttgtggctctaaaaagagagaaagacagatatgggttcatgtgtttcagtgcataagagctctcaagagccagcctcagccatgaaagttggactttcttttgggtctaaaactgataataacctcatcattccaccatcacctgttaaggagaaaccagttgccaatggtgactttgctttcatatctcaatcgccctatactttcaaagattttggtagtaaagaagaaacctttttcgattcccgagcatatctcgattctgattgtgaggatgatttcttcagtgtcaatggtgattttactccgtctcgtggtaatacccctgttcatcatagcttctccgtcgggacaacacctcgagttagcaaggtcaccgtggaaggatcacctatgtctgttctggaaacatccccgatgggaaaaaagaagaagctcctcgaactgttccgagagagcgttagagaagaccgaaaccttacttcaaaatcgtgcaaacggtaccccctatcatgtctctggagctacctctctttgcagtagtgaaaggtactgctaatggacatcatgattaccctatgtttcaaggacaagccattaaagtctttgcaatgttgccttccaagctttgttacatgcagtagcttcaatgagaggaagaagaagatgagccctgcaatagctgtaaatgataggcctcaatatccatcaattcactagcacgtaggtcgacgaagccagattctcgacttctagaggctcgagattaagttggaagttttgttggaagtagtgaagtcgttggataatggtgatacataaatatggggattagaaggcatgtaaagaggatccaagtaaatgtttgatgtaaaactcctattaggaattttaccaactcaatcaaccataagtgaaaattttcttttcaacaagaagttagctcataaacaagtgttttgtaataaaagggcaaaagaatcaaaggaaaaatagtatatgaccctcgtaatgatatgttaagcaactg

SEQ ID NO: 194543 - DNA, 1059 bp, Gossypium hirsutum
cccacgcgtccgcccacgcgtccgctgatttgagcagcagcagctaaagcagatcccaaaatgaagtttaatatcgcaaatccgactactggttgccagaagaagctcgagatcgatgacgaccagaagcttcgggcatttttcgacaagcggatctcgcaggaggttgctggagatgctttaggcgaggaattcaagggctatgttttcaagatcatgggaggttgcgacaagcaaggattcccgatgaagcagggtgttctgactcctggtcgtgttcggctcttgcttcatagaggtaccccatgcttccgtggatatggaagacgtaatggtgagcgtagaaggaagtctgttcgtggatgcattgttagccaagacctttctgttttgaacttggttattgtgaagaagggtgagaatgatttgcctgggctaacggacactgaaaaacctaggatgagaggtccaaagagggcctccaagattagaaagctctttaacctttcaaaggaagatgatgtccggaagtatgtcaacacttacaggaggactttcaccacaaaatctggcaagaaggtgagcaaagccccaaaaatccagaggctggtgactccattgacactgcagaggaagcgggctagaattgctgacaagaagaaaagaatggccaaggccaagtcagaggcagctgagtaccagaaactgcttgccacaaggttgaaggagcagcgggagcgccgtaccgagagtttagcgaagaggaggtccaagctctctgctgcttctaagccttctgtttcagcttagataagttttgataaaccaaaaggggtcttggtgagtacccagttttttgcagtgccatatgctgtcataatttatcgcttagtatccaatgtggtaatgttatttttccatctactatgttaggtcatctttttgacaattatcaataactaaattgcttcatctattggcaaatcaacaaaataaataaattattccaatttcaataaaatttcatcctgtttcattgaattaacagaaaataacatt

SEQ ID NO: 194544 - DNA, 391 bp, Gossypium hirsutum
cgtgcacgcgtcccattagttgcatgttgtttatctgccgcagaacaagccagcgttcccatcactggtcactttgaccatggtacttcaaagcaagaactattggaatctcttgagctgggctttgattcagtaatgggggatggttcacatcttccctttaaagataatatctcatacacgaagcacatatcaaacttggcccacttgagggatatgctcgtggaggcagaacttggaagattgtcaggaacggaagatgatttgactgttaaagattatgaagcagagctgactgatattaatcaggctgatgaattcatagttgagactggcgtagatgccttggcagtatgcattgggaatgtacattgaaaatacccagcaagtg

SEQ ID NO: 194545 - DNA, 715 bp, Gossypium hirsutum
tcttcctgcctccggatttcccgtcgctgaacctgtaaactaatcgaagccttagccatctccttcgccaactaaactgtctgacaagaaacaaagacaaaagaaaaatggtaagagaaagagaaactccaaagcagcaacaacaggtttcatacacagtggagcagcttgtagccgtcaatccttacaatcccgacatcttacctgatctcgagaactacgttaatgaacaggtttcatcacaaacgtatagcctggatgctaatctctgccttcttcgcctctaccagtttgagcctgagcgtatgagcacacaaattgttgcacgcattttggttaaggctctcatggcaatgccagctccagatttcagcctctgtctctttttaattcctgagcgagtgcaaatggaggagcagttcaagacactgattgttctttctcactatctggagacaggaagatttcgtcagttctgggatgaagcagctaaaaatcgtcatatagtcgaggctgtaccgggttttgagcaaccaatccagacgtatgcatcatgtctttctgactacagagattcaaactgactgcgagctataccatagctatctgaaaatctgacacagcgccaaaagggggtttaaagttggggggaattaactactaacaatactctggtgaaaactttattggtggaaatccgttcctttgtgactcg

SEQ ID NO: 194546 - DNA, 994 bp, Gossypium hirsutum
  unsure (1)..(994): unsure at all n locations
aaagaaactaagacaaaagaaaaatggtaagagaaagagaaactccaaagcagcaacaacaggtttcatacacagtggagcagcttgtagccgtcaatccttacaatcccgacatcttacctgatctcgagaactacgttaatgaacaggtttcatcactaacgtatagcctggatgctaatctctgccttcttcgcctctaccagtttgagcctgagcgtatgagcacacaaattgttgcacgcattttggttaaggctctcatggcaatgccagctccagatttcagcctctgtctctttttaattcctgagcgagtgcaaatggaggagcagttcaagacactgattgttctttctcactatctggagacaggaagatttcgtcagttctgggatgaagcagctaaaaatcgtcatatagtcgaggctgttccgggttttgagctagcaatccagacgtacgccattcatgtcctctccctgacttaccagaagattccaagacctgtacttgctgaggctattaacatcgaaggtctatccttggacaaattccttgaacaccaggcggccaacagcggttggattcttgagaagggtcatggcaggggtcaactaatagtcctacctcgaaacgaatttaacgatcctgagctgaagaaaatcgctgctgatagtgttccattggagcacatcacccgcattttccccattcttggttaagcctctagctgggatgaacacttttttggagttatttgtgccatgttttcggtgacattgcgaccattctctttgtttttttgtcttggatatatatatataactgagaacaagctattttaggatagacttgtcaagctaccccaaagattagctttgaatcggttcctttttatatctattttttcacttatcagaatttcagaatatatttatttactgcgcgttcttctnnnnnnnnnnnnnnnnnnnnnnnnnnnnnnnnnnnn

SEQ ID NO: 194547 - DNA, 921 bp, Gossypium hirsutum
cgaagaactacaaagttcttatggatgagtttcatcatgtatctactgcttttttggaactcgaaaaaggttatcaggaggcaattgaggatattacgaaaagaatgggtgcaggaatggcaaaatttatttgcaaagaggttgaaacagtcggtgattatgatgaatattgtcactatgtagcaggactcgtggggttaggtctttccaaacttttccatgcatgcggtacagaagatttggctcctgatactctctccaattcaatgggtttatttcttcagaaaacaaatataatccgagattatctcgaggatatcaatgagataccaaagtcacgtatgttttggcctcgtcaaatttggggtaaatatgtcaacaaacttgaggacttgaaatacgaggaaaactcagtcaaggcagtgcagtgcttgaatgacatggtcactaatgctttaatacatgtggatgattgcctaaaatacatgtctgctttacgtgatcctgcaatctttcgattttgtgctatccctcaggtcatggctatcggaacactagccttatgctacaacaacatcgaagtcttcagaggcgtagtgaaaatgaggcgtggtctcactgcgaaagtcattgaccgaaccaacacgatggctgatgtctatggtgctttctatgatttttcttgtatgttgaaagctaaggtcgacaaaaacgatccttgtgcacaaaaaacatcgagcagacttgattcgatcctcaagacttgcagggactcaggggtcctgaatgaaaggaaatcttacataattccaaatcagaccaattacactccacttctggctgtcttgcttttcattttactggccattactttggctaatccaggacccaatgagccaaattaactagaccatgctttcc

SEQ ID NO: 194548 - DNA, 996 bp, Gossypium hirsutum
cccacgcgtccgcaaaaccaagcatcatttcagttaaaactatataaaaaaagctccaattagtatcttccagtataaaatccaagaacctcaattcctctctttgaaagtgtacgatttaaacatatacccagattttaattttgttgatttgggtttgatttgaagagagaataaaaatcttttcaatggggagtttaggagctcttgtgaaacacccagatgatttttatccattgttgaagctgaaaatggcttcaaggcatgccgagagacagatcccatcagagcctcactgggctttttgtttctctatgcttcacaaagtatctcgtagttttgctctcgttattcaacagctcgacatcgagcttaaaaacgctgtctgcatattttatttggttcttcgagctcttgatactgttgaggatgacactagtgtggcaacagatatcaaagttcctatccttaaagaattttatcgtcatatatatgatcctgattggcacttttcgtgcggtacgaagaactcaaagttcttaggatgagtttcatcatatatctactgcttttttggaactcgaaaaaggttatcaggaggcaattgaggatattacgaaaagaatgggtgcaggaatggcaaaatttatttgcaaagaggttgaaacagttgatgactacgatgaatattgtcactatgtatcaggactcgtgtgaataaggtcttttcaaacattttcatgcatgcggtacagaaagatttggctcccgatactctcttcaattaatggggtgatttcttcagaatacacattaatccgaataatctcgaggatataatgagatccaaagtcctatgtttggcctctcaaatggggataattttaccaactatgctgaaattgagaaactgtcaagcatgcagcttatgctgatctagttatacactgaattctaaaatgttgctactgactcatttcattggattctcgagag

SEQ ID NO: 194549 - DNA, 442 bp, Gossypium hirsutum
ttctcattcaatcaagtaacatcaactgtgaacataatcataagatcaagatggtgggtcaatggacggcgactaaaccaagccggagcgatgaagctttggactcggatcaacaacaacgaatcaccaaccaggtcagagctcagttcgattcgagggtcccaaaacgacccaccaaacccaaccggagtgaaccggatttgacatcctccaatcccccttcagatgtggaccaaaacatacccgagcttgacaagtgacggtcccttcaatctcaatctcaggcgaagatctcagaggggggagctacagtggaacaagaggagtttgtggagacacagtattacagggagatgaattccattgacaaactgcatcccacgacaggaagtgggttcataagagtgatgaaagaaggaggtgaaggaaatggatatgatat

SEQ ID NO: 194550 - DNA, 613 bp, Gossypium hirsutum
atgaactggtggaccccagattggaagatcgctattccgaacatgaggtatattgcatgcttcatgctgcatcattatgcgtaaggcgagatcctcattctaggccgcgcatgtcacaggtgctccgcatactggaaggtgatgtgctcatgaacaccaattacacgtcgccagggtatgatgttggtaaccgtagtggccggctctgggcagagcaacaacggagctacagtggaccgctcacgagtgattcattagatgagttcagcggaaaagctctccctcgacggagcacggccaagaaacaaggaggacttcatgcgaagataatttgtagaaggctcatttaccaggtttacttacgcccatggtgcactatattctgttttgtattgttttccttcattgccaggttagattctgcttctgtatggtaagtaggagcattggaagcaaggtttcaattatggtttttgtaattctttttggaatggcagtttcaaaagctatggtgaatgtgcctctgctaattaaatcaaccaatcaatcagctttgagagatttggttctttccctctgctttagtactaatggagcaatttatttatttgat

SEQ ID NO: 194551 - DNA, 792 bp, Gossypium hirsutum
gtttagtggtaacgagtggagtgcataagcccctttagagagaggggcgagcagcaagcagacccccgtatagggttccaaacctatcttactaataataagaaaggggcaagccaaaacctactcctaacaagttgctggcttttcagccgttgcgcgctagcgcgcttctgtttttcagcaggcttcttcaaatatcccaaaaaagtacgggttataactaacagtcgctagctggcgcgctagcgttttcccttactaggaaacgcgctgcttgttgtagcgcgcagtgtactagtgaataggaaaagcggattgatattactaatgacagatggaggttgaggatagaacatgttcggtgcctcgcccttgtctccttcgccggagactcaaaatgataggaatcctatcgataaagaagaggcataggcatcgcctctcgatccaatccgtcttccctggcctccccaacacactcttgatacgaaataaacctcccgccatagagaagagatctaaagtctgggtcccctcgatcacccttcccttgaacctgaactggtcgagagagatgaacccgcaccacattttttaaccttcgaaccgaaacccccaactagagatgtaattccataacctaaacaactcagttgagagctccgtgactggttcaagggaaggtccaccaataattgataggccagagggatgggctcattcgactaatcagagagccctggccctacctaacacagagatgtccctgaaataggggaatagttgatcgga

SEQ ID NO: 194552 - DNA, 603 bp, Gossypium hirsutum
  unsure (1)..(603): unsure at all n locations
aatccaactagtttccatcaaatcttttagctttttcaagaaaaaaaattaaaacccagtttttttttttcttttttctgaatcacccatcaccatgaatggtgaaaaaaacagttcaaacaatagggtacttaaattgaagtacgttaaacttggttaccattatctcataactcaccttttaaagctttgtttagtccctttaatggctgctatcatcgtccaagcatcgaggttaagccttaatgacatccaccaaacatggcttcaccttgaacataaccttgtctatgtcgtcgtgttgtcggctttcgttttggtcgggtcgaccgcttactttatgacccgaaaaagatccgcttatttggtggattatgcctgttatctccctccttcgaagctaaaagtggaacacgaccggttcatgaaacattgtaagctaatgggttgttttgatgagacctctttggtgtttttagacaagattttgggaagatcanggcttggagaaaaaacatgtgcnacaaaagcaatgcattgtcttccaccaaaaccatcaatggaggctgcnagacnagagacagaacaggtgatgtttggtgt

SEQ ID NO: 194553 - DNA, 937 bp, Gossypium hirsutum
  unsure (1)..(937): unsure at all n locations
tgaagaggttgattatgttgcttgggtattctaccaggatgcttatgcatgcagtgatganaaatgctcagctcaatcaatgctattcatgcatgagaattggtcaacgagttcactcatatctaaaataaaagatcttgctgagagaaggaagttagcagatttaactgtcggtcctgtccttactgtcacaactgaagcaatgttggagcacaaaaagaaattgcttcaaatttcaggttcgaagttactttttggcggtgaacccttagaaaatcactcgattccagccatttatggtgctataaagccaactgccatatacattcctctcgaagaaattttaaagccagctaactatgagcttgtaaccaaagaaattttcgggccatttcagattataaccgattataagaaggatcaattaccaatggtattggatgctttggaacgaatgcatgctcatctaaccgctgctgttgtctcaaatgatcccatcttcttgcaagatgtgatcggaaaaacggtgaatgggacaacctatgctggattgagagcaaggactactggagctccacaaaaccattggtttggaccggctggagatcctagaggagcagggatcggaacaccagaagccataaagcttgtttggtcatgtcacagggaaatcatatatgattttggtccggtgccaaggggttgggaaattccaccctcaacttgaggagtgtattcaaaatcatcccttggggtttcattgatgcttttgacagggcagattgcagctttataaataaaaatgtgagggcaatttttgtggctttagtcctagtcttagggtaatgatacgaatctaagatatcagtatgtggcggagctttttcgtataaataaaagatcgtgcatgcacatagctgaatatgtgtaggacacg

SEQ ID NO: 194554 - DNA, 547 bp, Gossypium hirsutum
ctcaaccaaaaagcactctttctttgttttcccctcgtcattcacacttcaaacaaaaacatactcgtcttttaggctttgaagaacgctagaggcagtctgtcacagccaaaggccttctttgaaactgtactctgtccaaaggcctttgaaactgtgctctgtccaatatgagtatggagaaacaatatttggattgcctactagtcccgatggggattcttttaatggtggcctaccatctatggcttctctatcgaatcttaaaacatcccaccaagactgtcatcggcgtcaacgccatcaaccgccgtttttgggttcaagctatgatggaggacgggtcaaaaggagtattggcagtgcagtcgctgcgaaacaatataatggcgtcgaccttattagcatcgacggctatcatgttgagttccctcatcgccatcttgatgacgagtgggagcagcaatagatcgtcctggttcttattctgagatagaagcgacgttgcattttcgatcaagtactttgccatattgcgttgtttcat

SEQ ID NO: 194555 - DNA, 582 bp, Gossypium hirsutum
cggacgcgtggggtctttattgaggaggctttgcacctgaaataggactaatgaaaatccagaagaatgggtctgggctttcaaaaagatgaaaatgcaaagggtaaagagaaagtcttttgaacaaccaacctgacataaggattctagctcgcccacttagagcagatggagattatcggacggggaaaagcggcactcgacatctattaaacaacaccaagaacaaagccataccatgccctcgggagaaagacgtgatgattgccatgaatgctgccttcgaggacgtgttgtacaagaaggtctttgccgattcctatcaacatggtgcacccctcagtagaggggcgtgaaaaggccgtggagactttgaccgaatgaatagggatcaattgatagacatttttattgacgaagagaatccaatccaggatgaacgcttttttcgttcgctatgtgctgactggatgcgtactcgcgtgatcgatcaatggacgggggaattgcgtgaatgacgagacccgccctaccctatagtaaaggctcttccctctctggatggcgaatcttgattgactg

SEQ ID NO: 194556 - DNA, 645 bp, Gossypium hirsutum
gctctacagcacaacaaaaaaggcaactagacttgagaaagaaaaacagtctcaaaatgcagcagaagtcaggcttcctgatcctcttgctctccctcattttccttcctctcatcttctccgacgccagaaaggaggctcccctcggaggatggagtccgatcaaagacaccaaggacccacacgtgataaagatcgcggaattcgccgtcgaggagtataacaagcagtcaaatgggagtttaaagttggttaaggtggtgaaaggcgagacccaggtggtggccgggacaaattaccggctgattttgcaggcgaagaaaggggcagtcgataacacgtatcaggctgtggtgtgggagaagttgtggctgaatctcaggaatctcacctcctttaacctcgtcaagggttagattggattataatgtaatttatgttcatatatgttatccttgtccttttctattacttaacagagtggagaataaaatcttaataatacataattatgtgagtttgagatgtttcggcttcaaaaaaaaaaaataaaaaaattatataaataaccgcccatattaacttgaaccggtgaaggtaaaaagacgtaaaaaattttaatataaattgtaaataaataaattg

SEQ ID NO: 194557 - DNA, 545 bp, Gossypium hirsutum
cgtacgcccacgcgtccgccgagatctcgtcttcctgtctcaagttagctgatctccaaagctctgtattttgctgagttctcgacttcatttgcaatggcggacgaggaacctgttgatcagaaaaaatatcttgaagatggttgcaagcctaaatgtgtgaaacagcttcgttcatatgaggcatgtgttaagagaatccaaggtgatgaaagtgggcacaagcattgcactggtcaatattttgactattggtcttgtgttgataaatgtgttgcaccatcgctattcacaaaactgaaataaccagggccagagttgtacaacggtagcatcatgtcatgctgttgaatgattgtttcagacaatttggctccataaacttgacaagtgttaaaatttttttgtgttactttggaagcatttaaataaatttggatcctgggatacatccctcttgggaataggatcacaagtgttatgacaagcttgagtgcaaaaatattgactgttggataccatgatgttagcccctgagagtcttc

SEQ ID NO: 194558 - DNA, 609 bp, Gossypium hirsutum
gagtgaccttccaaagctcttcactgttacatttttcatttcatttgcaatggcggatgaggaacctgttgatcaaaagaagtatcttgaagagggttgcaagcctaaatgtgtgaaacaacttcgtgcttatgaggcatgtgttaaaagaatcgaaggtgacgaaagtggccacaagcattgcactggtcaatattttgattattgggcttgtattgataaatgtgttgcacaaactctattctcaaaattgaaataattgtgggccaatgttgtgtaacattagcatcatgtggagctgctttgagttgaaaagcgagttaattgcttcataaactattggtatccttgtaccttagacatgagatgatgcctgctgcgtctctaatctgagcactggtaaacatttttgttattgttattgtggaaacgtttactcattgtcaataaatttggttcctagtaggcatgcccatgggcgacagagttggaacgatctttgcttacatttcccactcttcatttggaatagacttttgatgatgcaatgggccactagtgcttaagttggtttgtgtaaaaaaaaaaaaaaaaaagtcgacgcggccg

SEQ ID NO: 194559 - DNA, 526 bp, Gossypium hirsutum
ttcttcgcgtccgcccacgcgtccgcccacgcgtccgcccacgcgtccgcccacgcgtccgcccacgcgtccgcccacgcgtccgcccacgcgtccgcccacgcgtagaagcagaagaagaaagaaaagattaaagagctttgcaaaaatggtgcttcaaagattggagatgtgcgttgaattgatgaaactagccgtagagttcgtcgtggttgtggccgaagcagtcggaatagtcattcatcaaaaccactcgccgccagtaatgacggctagccggtccttcgctactccggttcccttagtcgggtttcttccttgctgatcagtttcaattttccgaatttttcttcttctttccttttcattagagaaaatgatcggtttgaatcctcttctaatttttgctgttgttgctttactagctacgtttgggaatttgaatgtgtaaatttaggctaatcatgtattttaaggactggagaagtctattttctatttgaatttctttaactttcaacaattt

SEQ ID NO: 194560 - DNA, 564 bp, Gossypium hirsutum
acgcccacgcgtgcggacacgcgttcgggttgtgcattgaacatggattgtcaattagcacttctttataataggaaatgcatccccttcaataataatgtttgaccattgcatgtccctgcctatttgagttgctgttcgacacgctattgcttctgcggcaaaggctgatgccacatgatgatgaatctctgtacatgataaaagtgtgtttccgtcactatccctggccacgatacccgctgctgattgccgtgagttcccatcaaatgctgcatcgaagttaaccttcacaaactggaccgatctattagtcttttcatgcacctctcctattcctttctccccatattgcccaaagagcacaacaaaagatccgtcgccgattggtggaattctgttcaaaaacccaggacattctcggaatatatgatttgcagactctgctgcactgccacacccgacgcatgtcacattgtttaacagccttctgcagttcaaggtgactcgagtcgggatataattccaagttatttttcagattgaaatttttaccttaagagg

SEQ ID NO: 194561 - DNA, 878 bp, Gossypium hirsutum
cccattctttcactctttaaactctaaaccccaactctccagatttcatattgcaaacgatggcgtcattggattcaaaagaatcacctgccaataacccaggccttcattttccccctgacgaagccaccaaaggctacatcatgcagcaaaccatgtttcgtattaaggatccaaaacgtactcttgaattttatagtcgtgttttgggcatgacgttgcttaacaaagtggatgttccatatatgaaaatgacattgtatatgatgggatatgaggatgtttcatcagctccaagtgacccagttgagaaaactatttggacatttggaagaccagctactatggaactaacacacttttggggtaccgaaaacgatcctgagttcaaaggataccacgatgggaattcagaacctattggctttgggcacattggcatcaccgtggatgacatgtacaaggcatgcgagagatttgaaagtcttggagtagaatttgtcaaaaaaccaagcgacggttttgcattcatcaaggatcctgatggttattggattgaaatctttgatttgaaaggaattagacaaatagttaacagtttagcttgagttaatgcttcaccaaattcaggaaacaatgatatggcatatgttgtagattccaatgtctactctcatacgttaattcctttgctttccgaaacttgtcgagggacaaactcaagcgaaatcttaaatgaagcacatttcattctagttgtgtttgtgttttcttcatgtttgatatgtagaacaaataaggtgaaaataaagaattttgtaagagaaaattcaacctttattaaattctatataaattacattaaaaatttgtatgcc

SEQ ID NO: 194562 - DNA, 484 bp, Gossypium hirsutum
cgaaaacgatcctgaattcaaaggataccacgatgggaattcagaacctattggctttgggcacattggcatcactgtggatgacatgtacaaggcatgcgagagatttgaaagtcttggagtagaatttgtcaaaaaaccaagcgatggttttgcattcatcaaggatcctgatggttattggatcgaaatctttgatttgaaaggaattagacaaatagttaacagtttagcttaagttaatgcttcaccaagttcaggaaattgatctgacaaactcaagtgaaatcttaattgaagcacatttcattctagttatgtttatgttttctttatgtttgatgtgtataacaagtaaggtgaaaataaagagttttgtaagagaaaattcaaccttgaaatttactaaattctatttatattacatataaatttgtatgccaatgtatcatgtacgtgctttacaaagtcatgaatgaagtag

SEQ ID NO: 194563 - DNA, 688 bp, Gossypium hirsutum
atttcctttcaattttcctcccctttcttctcatttccttccttcaatggctaacgttctacagacttctttccttccttctacttcttcccttcgccggccctccatttccggttccaaagggaagtctcaatcccttcaagtgaaggccaagatacgagagattttcatgcccgcactcagctctacaatgacggaaggtaagatcgcgtcttggatgaagtcggaaggggacaagttgtctaaaggggagagcgttggtgttgcggaatccgacaaggctgacatggacgtcgagagtttccaccgagggattcctcgccgctattatggtggaggaaggcggcgttgctcccgtcggttctgcaatcgccctcttggctgagactgaagacgagatctctgaagccaaagctaaatcgcagtcttcttcgagtagcactcctcaggtagtagaagaaaagccaaagcaaattgaagaggcggctccggatgttccggctgctgctgctgctccatcagttccggtcgcaaaggctgtaactttggggtccgccgtgcatccggcttcggaaggagggaagaggatagttgcctcgccgtatgccaagaaattggctaatgagttgaaggtggatttgggaacagtggtgggggagggaccattggggaggaatgtggcttaaga

SEQ ID NO: 194564 - DNA, 374 bp, Gossypium hirsutum
cggacgcgtggggaaattgcaagattttatgacgcaggaatgggtacaatcatatttgcaccagtagcagtgttgtcatggttcccattcatctcaaccttccagtctcgccttctctttaaccaagcctttagccgtgggctggagatttctctcatccttgccggaaacaaagctaatgtcgagacatgatttctactttctggctgcggttaggtttgcttgaactagttattgtttttattttttggcctcgatttattaatttatgaatttaactacaatccttttatagtatatattatttttgatggagtacaatctttctataattgaatttatgtgcattcacagatggttctgttagtagtatg

SEQ ID NO: 194565 - DNA, 726 bp, Gossypium hirsutum
tgtcagaccgacgcgtccggcgcacgggaacatactgattggatggggatatgaagaatcatatatgggtcgaccctacaaaagactaccataactatgctgtaaaagggaaccctagtgaaatcatatttttcgtagatgatgtgccgatcagaacgtacccaaggaagagcgacgccacattcccaacgagaccaatgtgggtgtacggatcaatatgggatgcgtcatcttgggctaccgagaatgggaggtacaaggctgattataactaccaaccctttgtaggccggtacacgaatttcaaagtaagccccggcaccgccaacagtcccgccccttgccgcccgccttctgcctctccgtacgggtccagcagccttagcccacagcaagctttggccatgaattgggtcaaaaacaactatttggtgtatgactattgccatgatcctaagagggatcacactcagatacccgagtgctaattaaatgtgagtcatttaaaactttacaaaaaggaaaatgtaacaattgttgatcaaaagggggtttcttgagatgggcccttgaagagtggttaagcgtccaaaaccctctaagatttgcatcttttatttctattgttttgttgcttttaagtgctctgctttgttgttttctttggaataatttattacaagagttattttttaataaaaaagggttaattgtatcaaatatctc

SEQ ID NO: 194566 - DNA, 478 bp, Gossypium hirsutum
ggacaaggtaatgatatttgttttaacaaagatgattcatcccatccactctcctccctaaacttccagcaattaacgacactttttgggaacattttcttacaggaagtccactcactggggacacagatgagatatactcgagttccctcgaaaatggtgcatacggtggataggaagcagttttaagggaggagagtggatgggatgaatcatctttgctgacaaataggccttctttacatcacattagcaggaaggggtgatgtcgtacaagttgtatacgcaaatacttgtttgtttttcttgcttttatgaggtaaaacttggtaccgctgtgttcctgctcaatatgtgaccggtttatttatggtttagaaaggttaatattattttcaaatttggttttgtttctaaaaaaaaaataaaaaataattattaatagggggggccgttttaaagattcaaagtttacttc

SEQ ID NO: 194567 - DNA, 599 bp, Gossypium hirsutum
cccacgcgtccggtacggagttgcgtcagctgtagatatagactaggctaagggacggagccttccactgtagaccgggactacgcaaaggtagaacaccatagaaacttcgcttactttctcataaaccttgattttgctacgaaaaataagaacccggaatagcggaaatcggttcgtgttccgctttcaaagtaagttgtctttgcccaagtgtgaactgcagacgactctccagtggttccatttccttcttactttacttttgggtcaacccaacccgaatgggaataagagggtcagccaaacagcgggcagctccactttgtacattttctgaggcagaccaatcaggtttagaaaagggaggggaacttctcaccgaagcgaaggaggcagtacgaatgaaggaggcgggaagctaccgcttctagaatgcaagcttatccttgactttttttagagaaaaaaaaaaaggtttttggatgaacgaattggagtgacaaatggttacggttgcggaaaccggagaaagtcgggaaccgtcggttcacttttgaatcaaatagcgacgagccgaggactacgactacaggggg

SEQ ID NO: 194568 - DNA, 379 bp, Gossypium hirsutum
acctttcctcgtgaatggcattttcagacacgtggataaatgaatataatgaagcggcgcgaattgctgatgatatcaatggcatgatatctgaaaggatttccttgcctgcgtcgggaccagaaactcagcgtcatgcatccgccataagaaggaagattacgattttagggaccagacttgatggattgcagtcccttttgtctagacctactgggaaacccttaacagataaggagatgaatcgccgcatagacatggttgcaaattttgagatctaaagcagaatcagatggcttctgcattcaacatgtcaaactttgccaacagagagagcttgctggggccagaaactaagcaagatgccatgagtagaaca

SEQ ID NO: 194569 - DNA, 389 bp, Gossypium hirsutum
  unsure (1)..(389): unsure at all n locations
agacatctcgctcaggattacagttgttggtcgagtggaatgcccgacttgttgctctggcggttccatggggactacaaaggtgaagccaaactcgtcgaggttaagggccctagagatcaactctccgaacaacaaagagcatggctgctgcttctaatggattggggattcaacgcggaggtttgtaaagggagccctacaggatcatccccttgtggttagttaccctactaaaaacctgtattactcggacgtatttgaaagtgttgtatagttatgtataccatgtgagtatattcaattatttcaagtttttgttttacgtgtatttggactgtcaaattcttatatactntgatctaaatatgcaatcgatacatgttatt

SEQ ID NO: 194570 - DNA, 353 bp, Gossypium hirsutum
tcgtttactcggatatgtaggataggtagtcataataagaatcagtggccggggagggtaggaggtggcgattcaaggtgccaagaagcgcatagaagagaacacccgccacatgcccaatcttcgccgcctcatcattgcttgtaatgttgtatacgtcttgggtaggatgctgatcttccattcctcattcacatggaaacattgggttggtctacttttgacctctgcggcttactttataccctatcaacaactttcacagatggcaaaacctgcttattctgatgatggagaacttcttgacggtggatttgatatgagtactggtggaatatgtggctatttacatg

SEQ ID NO: 194571 - DNA, 384 bp, Gossypium hirsutum
ctgtggtttctgagtgttgttttgggattttgaagatgggtgagaataggatgaccggcaaggtgaagtggttcgatgaccaaaagggttatggcttcatatcccctgacgacggcggcgacgatttgtttgttcaccaatcttccatccgttccgagggtttccgtagccttgctgatggtgaagaggtcgagtacgttgtcgagtcttctgaaggtcgccccaaggctgttgaggtcacgggccccaacggcaaccctgttcgtggatcatctagatccggacgcggcggcggcggtggtagcggttatggcggtggatccggtggttatggtggaggaggaaggagaagcggttatggtggacgacgcggtggtggtggtg

SEQ ID NO: 194572 - DNA, 1322 bp, Gossypium hirsutum
  unsure (1)..(1322): unsure at all n locations
cccacgcgtccgaaaaaaccctaatttatttttaaaaaattccaaaaaaaaagactgtatttgacagctctcaaatttgtctgcaaagcttaaaatcagaagtcagtaatgttgggcgctttaaggagaaaagttgcgagcggacgctcatcagcttcgatattaggaaagtcattacaggcgattcggcctggtgtttcggcttccagagtttcttctaatgctggagaagagatgctatcagttcaactgagagggatcgctcatgttcggaacttctctcatcttgttctgcctggatgttctgctggtttaacaaaaacaagagatgccatttgtatcatccaaccggaggctatcatgcaaacatcatgcagggctttctcttctggagatggggatctcgttgatgctgttgtcccatttatgggagaatcaatcagtgacggaactttggcaacattcttgaaaaaaccaggtgatagagtaaaagcggatgaaccgattgctcaaatagaaacagataaggtaacaattgatgttgtcagcccccaagatggtgtgatacaagagtatgtagccaaggaaggagaaactgtggaaccaggtactagggttgctgtcatttcaaagtctgctgagggggtagcagctgctgctcccactgaaaagaaatccgaaaaagctgcttctgagccatctcctgctgaagctgtaaaggaggataagccaaaagctaaagttgaagcttctgctgctgcggcgaaacctaaagccccttctccaccacctccaaaacgaacagcttctgaacctgtacttccacccaaggaaagggaaagaaaggttcctatgacaaggcttangaaacgagttgctacacaattgaaaaattctcaaaatacttttgcaatgttgacaacgttcaatgaatttgacatgactaatttgatgaagctccgctccgattacaaggatgcctttgttgagaaacatggtgtcaagttgggatttatgtcaggatttgttaaagccactgttagtgcacttcagcatcagcctattgtaaatgctgtaattgacggggatgatattatttatcgagattatgtagatatcagcattgctgttggtactcctaaggggcttgtcgttccggttgttcgtgatgctgacaagatgaattttgcttgagatagagaagacaatcaacaaccttgctaagaaagcaaaggatgggaccatttcaattgatgaaatggctggaggctcatttacgatatccaatggtggtgtctatggcagtcttttgagtaccccca

SEQ ID NO: 194573 - DNA, 811 bp, Gossypium hirsutum
agattgagttagccttttatgcttgtgatttcaattttgagttttgacttatttgtggtcatacttaaaatgcactgagttttgacttgcggctttaatagctactgttacattgggtgaagaattctacttgggagggtaagccttaacttttaacccatacattgttgcctacaatcatactttgcagggtaggagtgactttgaatatagcttgcacaaatatgtgaaactggcagggtagtaggagcagcattgataatggctggattgtatctggttatcctaggaaaaagtgaagagagcaagtatctgtctgaaaatgaaccaatctattcagtgtctgaaaataatgcacatggaatccaccttcattcgaccgttgctgggaaataaattgcagagctgaggcaaatggatgaattttcatatcagctccatggcaaagtcaagtcatccaatctacactaatgccatttgaagcagcttgctgctattgaaattgaaggacaacaaacgtgaatgatggagtttccaacaattgaaatgggacaaagaaaagttgaattgttttgatcaacatgcatcatggatggcatatgaaatattttttattattaattttgaatggaacacagagggtgccttctctgagctctaacaaccatgcttatgtatttatttatgtttatttgaccctgttggtttggattatcattttgtgaagaaattcaatggtaatgttgtaacttattgatgttgtaaaattttataacatatggattatgacatataaattaataaaatcatg

SEQ ID NO: 194574 - DNA, 453 bp, Gossypium hirsutum
cccacgcgtccggtaacagtcaatattgagagagagtgagaaagatgggagagacagacaaagacagggaacaggctgagcatggatggatctaccaactgattctgttgtttctccgcccatgcactgcctcttccctggctctgcctcctccatttttttcctccctctttttttatttaactttttcaccttatcccattttggaattattattatgactgtaatttagatccaggttcatgataggtaccttttaacaaggtaattgtggtgacttttgttgagccccaatggccccagctcttttttcttcattttctctctattcttttcaatccaagtatagagattattcgttttactggtaatggaaatttgcattttgattctccaaccatttccaggaaccttattgttttttccactatcaccattgattggggggaaatg

SEQ ID NO: 194575 - DNA, 456 bp, Gossypium hirsutum
cccacgcgtccgggaaaaaaaaggggggttgctctgttagggtttcaaccctagcaccccccacgtcgccgccgtcaaagatccaccgccaccaggtcgtcccttggcctccgacgacgctccggcaacaccaggtgtgggcgttggagaatgtgggttgtgcgaggtgataaccgctggaggaagaacgtgtgcggcactggggaggctacttgctgctgtagcactgatgcgaagagggttctttgatgggtttattgggctaggttaaatttggttttaggctaatgtaattgggttacaatttgggcttgtaacatttgtgattgggccacgtgaattaagtttttaaatggactgggcacctttgtttatttaggcgtgggctaaaattgggtattatagttataaaatacataaattatttttataataattttttttgtgatttataat

SEQ ID NO: 194576 - DNA, 458 bp, Gossypium hirsutum
cccacgcgttcgcccacgcgtctttcagaaacgaccggcagagaaataaaaatgggaggctgggcaatcgcagtgcatggtggtgctggtgtagacccaaatctccctaatgaaaggcaagaggaagctaaaagactcctcaatcgttgccttgatattggaatctctgctcttcgttctaacctctccgccattgacgtcgttgaacttgtcgtgagggaattggaaacggatcctttgtttaattccgggcgtggatcggcacttacggagaaagggacggtggaaatggaagctagtattatggatggaccgaagagacgatgcggtgctgtttcgggtttaacgacagtgaagaatccgatatctcttgctcgacttgttatggataaaacaccacattcgtatttgggttttgccggcgccgaagaggttgcgaggaaacaaggtgtggaagt

SEQ ID NO: 194577 - DNA, 585 bp, Gossypium hirsutum
gcccatgtaaattcctaatctcatgggttgtaatcttgtatgtgcattcgccgtaaacggagttgctatatcggagtgaacgaccgtctttgatgccaagatctcgctcctcacatctcgtactatcagacccgaagcagatttgaaagattgttggtcaaaggctacatcaaaaaagattgcaacctttgttcttcgattaacatgtttagggcctctgtcaacttgaaagattaaccaaagcccacaacagattagttgactctgttcactagtcccccgactaaaaacccaggacactgtcaaaatatatgattactatcttccttatattggcgacaccgagggcaataatcgtccacagccactttcttatgcttgaggttaataagagtaggaataaaactccatgagattcttcatactgtaattgtaacttttgagggaatgtataaattccgtagctttctgtagaatttcttgtttcagcctgtataatataattactaggacccaagttagtctcctgtaatagtttataggcacttttaactaagaaatcaccagactattctttttttcaaa

SEQ ID NO: 194578 - DNA, 1053 bp, Gossypium hirsutum
gaagattctacagagaattgcctatgtaaatgttggaatctaccccttcacctccattttcttgattgtctactgttttctcccggcactttcgttgttctctggccagttcattgtccagactctcaacgtaacattccttacttacctcctcatcataacagttactctttgtttactagctgtgcttgaaattaagtggtctggcattgagttagaagagtggtggagaaacgagcagttttggttgatcggggggacaagtgctcatcttgctgccgtgcttcagggtctgttgaaagtgattgctgggattgagatttctttcaccttgacatcaaaatcagcaggagatgacttggatgatgagtttgctgatctctacgtagtcaaatggacatccttaatgataccaccgatcacgatcatgatggtcaacttaatagcaatagcagtcgggttcagccgaacaatttacagtgttatccctcagtggagtcgtctactaggtggagttttcttcagcttctgggttctggctcatctctatccttttgctaaagggctgatgggaataacatgaaggtaccctacaattgtgttcgtatggtcaggtcttatggccatcaccatatccctcctttgggttgcaatcaatcccccatccaccactaaccaaatcggaggatcattccagttcccttgattggacattttttatgttaaaggtgaaacacttctattatcgtattcctttatttattccttttttcttcctcctccaagctgatatgctggcgaaaaaactacgcatgctctatgttatcatgtgccaattggaatatacttttagcagcatttttagtgagttttcatgggatagatccaacaaaaaactggtttccctgctcttttgttcttattggatgatgtttacgtgtactcactgaatagataaacttttttcttcaactttttctggtggatcgccatctatatttatgcttcaatgcaattagtttttttgggtagcttttaattgattgatgaaca

SEQ ID NO: 194579 - DNA, 530 bp, Gossypium hirsutum
tccacgcgtccgcccacgcgtccgagagaggtgggtcgatggcgacgacggtggtgaagagcgcgttgcaggcgatccgtgagaggggtctccgcactttcttaagggagctcaaggatgatggcttcacgaaatgcttcttcgatggaaaccttctgcaaaccaaaatccacaacataggggcaacagttgtgggtgttgataaattcggcaataagtattatgagaaactcggagacacacaagctggaagacacaggtgggttgaatatgcgaaaaaggatcgttatgatgcttctcaggtaccaccagaatggcatggttggcttcacttcataactgaccataccggtgatgagcttttgatgctaaaacccaagaggtacggggtggagcacaaggagaacttatctggtaaggggaatgagtttatctaccattctaaaggacatgcacttaatccgggtcagagagactggacaaggtaccaatcatggcaaccaaccaaggctgagtagtaatcttttgac

SEQ ID NO: 194580 - DNA, 511 bp, Gossypium hirsutum
caaaaatacaggcaagatatgtcagtgatccatcgtgaaaacaacttaacccaatcaatcctccatttataggagcctcgatctgaattcattttcaagatcaaaaggaaatgatggatgtgagggtgaagcttttaatccttttggcaacctcactcttgatttactcgctcatagttttactcaaagtcctgtatgactactggtgggtgcctctccgtatacaacacttcttgaattcacaaggacttaaagggcctccttacaagttcatccatggatgcaacaaacaaattaacaaaatgagaagtgaagcattaagcaaacctatggggctgacacatgacatacttcccagagttttccctcattattactcctggatcaacttatacgttgattaggaaagaactatctttcttgggacggtgttcaagctcaggtggtgactactgacccagaactaataaaagaggttcttaaaaatagtgaacaaactttttggaaaaag

SEQ ID NO: 194581 - DNA, 566 bp, Gossypium hirsutum
agctattggaataggataattattcttgtagcttgatgtgagagtgataagagttttgttgaatgttcaatattgtaagtgtatggcttaagtcctgataatattccatggttctatgataattgcctttgtggtattttctttgataggtaacccttatatttcattttattctgcagcaacaaaggactttcatacagatgagaactgttctaaaagtagtggacaactcaggggcaaaaaaggtgatgtgtttacaagcattgaaggggaagaaaggggcaagattgggagacaccatacttgcatctgtaaaggaagccatgcctaacggaaaggtgaagaaaggaaaggtggtatatggtgtggttgtgcgtgctgccatgcagcggggtcgttgtgacgggagtgaggtcaagttcgatgacaatgcagttgttcttgttgacaagcaaggccaaccaatatggaccagagtttttgggccacttccgcatgagctgaggcagaaaaagcatgtcaagatcctcactttggcatggcacattgcctgatgcatggatcca

SEQ ID NO: 194582 - DNA, 600 bp, Gossypium hirsutum
tgcaagtcgataatgaagattttggaagacctgttgcatattattttggtgtcagtggagacggtcccaaactccttgcatacactggaaatgacgatgctaggaagttcgtctttgatggagaagtgacgttggataaaattaaggcttttggggaagattttttagaagacaggcttaaacctttctacaagtcggatccaattcctgaaacaaacaatggggatgtgaaagtagtggttggcaataactttgatgaaatcgtattagatgagtcaaaggatgtccttcttgagatctatgcaccttggtgtggccattgccaagcacttgagccgacatacaacaagcttgccaaacatctccgcggcattgactctttggttattgctaaaatggatggtacaacaaatgaacatcctagggcaaagtccgatgggttcccgacaattctgttcttcccggcaggaaacaagagttttgatcccataactgtggacactgatcgaactgtcgtggcattttataaagttcctaaagaaacatgcatcaatcccattcaagctccaaaaaccagtgtcagcacccaaagctgaagca

SEQ ID NO: 194583 - DNA, 469 bp, Gossypium hirsutum
aatttgtagcagaaattgtgagtattggtcgtctgcgacaccggaatttagtccaactcttgggatattgccggcgcaaagatgagctgctgggggtctatgactacatgcctaatggaagtcttgataagtatttgcatgaccagccaaaagtcaccctaaattggagacaaagattcagagtcatcaaaggtgtagcatcaggattgttctatttacatggagaatgggatcaaggtgtggttcatagagatgttaaagccagcaatggtttactggatggcgaattaaatggaagattgggagattttgggcttgctagattatatgaccatggaacggatccccaaacaactcacgttgtgggaactcttggttatttggctcccgagcatactcgaaccgggaaagccacgccgtccaccgatgtgtttgctttcggggcatttttgcttgaagttgcgtgtgg

SEQ ID NO: 194584 - DNA, 472 bp, Gossypium hirsutum
ataccctcccaaagcacttgcattgctggctgctgtggctgcattgtgtgttcaatatgaagctgattttcgacctaatatgagcattgtagtgaaagctcttcagcctcttttgaatccaactcgtccagcaacaacatcccgtgcctacggtgaaaggtgacatcgtgatgatgagccaattagtggctggaaactgaatcaagacctgttgaagtcgaaaaacctgcctgtcattatgatttgttttgtaaataggtagctttgcttgtattccacccttaaaccccacaagttgaattactagagctgccagataaagagtagctgtagaatgtagagaatatttcatataattcatttgcgcagtctgtctgttttttatattggttgtttccatgaattccaaagaatgagattgtgacattagagaggaaaagacaatggaaatagatgaaaatagtatagtttg

SEQ ID NO: 194585 - DNA, 304 bp, Gossypium hirsutum
ctctgaaaaataagaaatgccattctggcatttctgctgctgtcaccgccactgctgccagtgccggtggtggcgaactctaaaaccgtttctccaacctattattgtacatttgttgggtgattattctctttgaatgacttgatttctgcctcctaaatagcccctgccattattggtttcttgaattttaaaactattcttttctcttgatttctaagactaaaagtatttgtttggtttaaaaaatattataatataattttgtattataatttctttttattttaatttattaattggt

SEQ ID NO: 194586 - DNA, 441 bp, Gossypium hirsutum
atcaatcccatcagaccttttcattaccccagtgcacattgaaaaatcaaaacccattgaaactctcagcataatcaaaattctagaacactttcttcagccccttcatttcttctccacctctcctcacccactacctccgtccacctcctgtcttcagccaccgcctctaccgcactaggagataccagctttcgcagataagtagattctcttttcttgagtccttcttgtgctaaacaataggcaactctgttagcctccctgtttgcaaaaggaaaaacacaaagattaaattgacagctgagattctgagcatctttgatatacacagaaatctcaaatctgtcatccttttcctcttgcagcttccggatgatcgttcgagaatcaccttcaacctcaatctccctcaacccaagttgtaaccccaacttcagt

SEQ ID NO: 194587 - DNA, 633 bp, Gossypium hirsutum
  unsure (1)..(633): unsure at all n locations
cccatttcttgactatttaaggctccaaattggtaaaccagtttggggtgttgggcccctattgccccaacagttttggaaatcatccgattccttgctccacgatcgtgaaatccgagccaacaaacaatcgaacgttacggatgatgaagtgatgggatggttagattcaaagccacatggttcagtgctatacgtgtctttctgtactgaagttgctcccaccaaacaacagttccagcaattggctgatgcattagaagcctcgaacaggccatttatatgggtgatccaacatgggtcgggccgaccaggttcaccatctggtccaccacctggcccacctcaattcttagggaaccaacctgattccaatgatggagtctttgaagaaaagggttactttccacatggttttggaccaaaaggtcggtcaaaagagggtttgatcaatacacggatgggcacctcagttgttaatattaanccatgcatcgacgggtgggtttctatcacattgtggatggaattctacggtggaagcaatcggacgtggggtgccattattggcatggcctattaggggtgaccancactccaatgccaaattggtattgaatcatctcaaagtgg

SEQ ID NO: 194588 - DNA, 425 bp, Gossypium hirsutum
ccgatgttcaagctggtttcacagctttatgaagtggtgcctcctattcttactgagttaggcaaggttaaaaacccttggcccaatgttgatgcacacagtggagtgctgctgaaccattttggtttaactgaagcttgatactataccgttctttttggtgtatcaaggagtattggaatttgctctcagctaatatgggaccgagcactatgattgcccctcgaaaggccaaaaagtgttacaatggattggcttgaaaattattgcaagaaagctaaagcagcttaaaatcggtggatgaattaattaagcataataatttctcacaaggattggtcttgtgatgagggtagcagctacctacatgggcaaacggcaagctgtttcgttttttttaataatttactggggaaattagatgt

SEQ ID NO: 194589 - DNA, 800 bp, Gossypium hirsutum
  unsure (1)..(800): unsure at all n locations
cccagattctgagaaaggcaaaaatgagagggaaatcaattcttcgcccatttcttacctgtcgaactttcagtgtccgctctgtttcttcttcttcttcttcttctcggattctttttaatcagagttacttaatgtcaaccccccagacaaattcttcaatccctaaaaccccatttccagtttggacccctaaaaaccttaatctctcccgacccttctcggactcttctcctgattttttcaaaccatccttcatggaaaccgaaccggtgccggttccagagaatgttgtccccgttaagtcagaagaagagtttgatgctgcacttagcaaagctaaagacgaatctgtgccggctgttttctatttcactgctacatggtgtgctccatgccgattcattggtcctgtcatggacgagttggctcggagaactcctgaagtaacagtttataagatggatatcgatgaggaaggccttgcaagaaaactggaaaagctaaagattacagctgtgccaactgttcaatactttaaagaagggcaacaggaagttgaaattgttggtggtgatgctacacgcataattcaaacaatgaagaaactttacaacatgaggtatcccaagacagatgattcatagcaagatgctacttcaggggaagaagtaaacgaaaaaaactgatgcttgatgatgattacggagcctttctcaacctatatcagaaaaaaggaaataaagggttttangatnntcttttgtgaaatgactgtaanaattggtgtcngagagtac

SEQ ID NO: 194590 - DNA, 464 bp, Gossypium hirsutum
gtcccaccacgtcctgcatgccatcccatacagaacttttaactactcgatggtaccgttctccagaagtcttgttgcaatcttcctcttacactcctgctattgatatgtgggctgttggtgctatattagcggagctttttacttcatctcctatttttcctggtgaaagtgaaatagatcaactgtacaagatatgctgtgttttgggtgcgcctgattggacttcctttcctgaagcaactaacatctctcgtctaatcaatattagttattcagagattttacctaccaacctatcagatatcattcctaatgccggcccggaggctgttgatttaatcatgcaactttgttcatgggatccattaaggaggccaacagcagatcaggcattgcagcatcctttttttaatgtggatgctcgcattcctcatccacgactgcatgatccacttgagctc

SEQ ID NO: 194591 - DNA, 263 bp, Gossypium hirsutum
tccttgcgtccgcccacgcgtccggtaccggaggggctgcccacaaaaaaaaataattaaaaaaaaaattcgactttgttattagtttaccagcatgtgctccaataaactataagatttgggatactatatatttcaattctgatatttctttttctctattttcttttaatcctctctgctttcatctttgggtagagttttctgttattcgatgtccttttgttaaaaacgactgacaatgaaatttaattattgctgag

SEQ ID NO: 194592 - DNA, 432 bp, Gossypium hirsutum
ggacaatgaagggcattcaagctttggataatgcttattccaatcaaataatagcacaacatgggaaggtcctctacggactgggaaaagacattaatctccagaaatcagtatcagctggcaaattcaagggatattccatctcaatcagctcctacttgaatagcatggaatctggaaacagcctagactgtggtggcagaatgagacccacagtctccattatcgatactgaaaacatcagttgtacagatttgggagagtatggtgttgtaataattccagactttgttctatcaattgatgattatcttcaaattctcacgaggatggcacggcacacagtcaatggtgtattgcatagctttttaaacttaagatgattcgcagcatgctggcccgttgatcgaaatccttgaacaatgtgggcag

SEQ ID NO: 194593 - DNA, 412 bp, Gossypium hirsutum
cccacgcgtccgctcttaccacctgtaatcagagtccagtaagagaagcgacgacaatcacaaatgggttaggttcacggatcgttggcacgtgccgggaaagtgagagggcaaactccaaaggtagccaagcaagacaagaagaagaagcccagaggtcgtgcctataagcggatgcaatacaatcgccgtttcgtcactgccgttgttggctttgggaagaagcgcggacccaactcgtcagagaagtgaggccggacatgtaggagtcttacattatattgataattttctagcttcattagcattacattgttatgatttagtttggagtctttctttgctttaagaaaactataacatccgtatctgttgttttgaaatatttactaaggccctccatttctgatcc

SEQ ID NO: 194594 - DNA, 374 bp, Gossypium hirsutum
aagcataaaaagcacaaggaccgagataaggacaaggataaagagcataagaagcacaagcaccggccttaagataaagatcggagttaagattaagacacgggaaaaaagaaggatagtagtgggcatcatgattctggtgctgatcactcaagaaagcaccatgaaaagaaaaggaagcatgatggagatgaagatcttagtgatgttcacagacacaaaaaaagtaagcataaaagctcaaaaattgatgaagttggtgcaattaaagtagcaggctgaaagggtggctctctagttcatattgtctcagatggttttcagagtatgggagggtttgcttaatgctctctacattggttgagagtaacctt

SEQ ID NO: 194595 - DNA, 678 bp, Gossypium hirsutum
tcaaaagcatcgacttgataacctaaccaacccgaaaccaaggctggtgaatactgagaattatcgttcttcccctggtttcagccatgaccttgagcatatcgataatttgaagtgcagacgtactatcaagacctgaagttggttcatcaagaatcaacactttgggatcatgaatcacatctacacctatagaaacccgtcgtctttcaccaccagatatcccacgaacccgatcatcaccaactcgagccatggctacatgctctagtccaagttcctggatcaaggacttaaccctactactcaactgagcttgaggaagccttaaacgtaacttggcactaaacatgagggtttcttcaactgtaaggaggggaaaaagattgtcagtttgggtaacatagccagagattttcctgaactgagctttatcaatggggctttggttgacgaaaatagaaccactttgtggggtgaatttcccagcaagggatttcaagccaggaagatttccctgctccacttggaccaacaatggcgaggatttcccatggcttggctttgcactttacatcctttaggacatgtcccatcccaggacatgcatcttgaaactgggatgatggctcttgttgtttacgtcctgatcaaccactttttgctgggtttttattg

SEQ ID NO: 194596 - DNA, 546 bp, Gossypium hirsutum
ggaatttcaactcgggatgcagctttgtccttcgagttaggtatgcgagcactcgatttagctgtcggtagagccatgaacgtgtcaaatgataatttccaaaatgaaggagagtcatgcccttgtagtccatatgataagggtgtattgctggccagagggcatctcgtcattaaccttctggagagcgaagatacaaaagaattgagccagatttgcaaaccactcttcaaaaaatcaacatggttaaggcccaaggctacaagatcctcattcagagagatttatttaatttgtcaagatttaaagtctcagtaaggttcagaatctttacggtggcggcaactatttgttaccccaatgacctcccggatatgaatgtcgaatatgggtatgtttaatttcttttaatgtatttggagtatcatatctctatactcatatccaaaaaacatatcgaacccagaatatgaaatgctcttgagaaaaaaaaaaataaagataaaaaaaaaataaaaaaaggatagattattaatatcataaaaa

SEQ ID NO: 194597 - DNA, 571 bp, Gossypium hirsutum
aattgctctccaatcctattagacaagttcccagttgaagtcagcaaggagaatgaagacctttcagtgaaagcgaagtctagggggagtatatcactgcgcaccctggcgcagcctatgtcacttggtgagatagcaaggacttgggatgtttgtgcccgagcagttatttctgatcacgcaaaactgagtgggggaggcagctttagttcaaaatacgggacttgggagaattgcttgagtgctgcataggcatctatacagactctagtagaacacctagatcagctttattttgtcacagctgccatcttgaggactgcataagcaggtttcggatgcatatatttataataaagtcggttcaagggagcagcctcagttgatgtttgtcggcttgagagaactctccaggagagttcaaacttgtgtcattaggtaatatattgttatagacttgtagggtctggaacatgcttagcattttgataaattcttctgttcaaaacaaggctacatacattatcatatttctggagaaatgcggactcgaattatgatagttatcaaa

SEQ ID NO: 194598 - DNA, 620 bp, Gossypium hirsutum
cccacgcgtccgcccacgcgtgcgcaaaaaggtcagctaagagatccctattagccatcttcctcctcctttccttcctctccatatcaaccgcaacatcaactcgaaaaacccgaacccgaaatccatgcaagagcatggtgttttatttccacgacataatctacaacggccataacgcaaagaacgcaacatcagccattgtaggttcaccacaatgggggaacaagaccattttaacaggaaaaaaccatttcggagacctggtcgtgttcgacgaccccattaccttagacaacaacttgcattcgaaaccagtgggtcgagcccaagggttttatatctacgacaagaaagacatattcacagcttggttgggtttctccttcgttttcaattctacccaaaataaaggaagtataaacttcgccggtgctgatccgttgatgaaccagacgagggatatatcagtgattggtggaacaggtgatttcttaatggctcgaggagtggctactttgatgactgatgcctttgaaggggaagtatattttcgtcttcgaactgatattaatttgcatgaatgttggtaaaccattggaaatttaattttcgatttg

SEQ ID NO: 194599 - DNA, 801 bp, Gossypium hirsutum
ctgccttaatcattgcacagctggttgctactgtgattgctgtatatgctaactggggatttgcaaggattcaaggaataggatggggatgggccggtgtcatatggctttacagtgttgttttctacatcccacttgatctaatgaagttcgccattcgttacatcttaagtggaaaagcttggctcaacttgctagaaaacaagactgcattcaccaccaagaaagactacggaaaagaagagagggaagctcaatgggcacttgctcagaggacattacatggacttcaaccaccagaagcttctaacctcttcaatgacaagagtagctacagagagttgtctgagattgccgagcaggccaagaggcgagctgaggtggcaaggcttcgagagcttcacactctgaaagggcatgtggagtcagtggtgaagctgaagggactggacattgatacaatccaacaacattatacagtttagaaagttgctgctgaatgagaaatgcaggtccaagctagagcaagaagaagtaatgttcaagtccgaaaattttctacattagtcacaacatgtgtgctataattttcctgcccttcccatttagttttttactttgcctgtcttatgtaattcaaggccgaaaaaggtgtgttagtcacgtcttgctccaataaggagctaggccatgtaatcttccacttcaatctttattcttagctgcaaatctactttttttcctatgctttcttgaaggtatattatgagaaatagctgcctgccattcagccactatgtc

SEQ ID NO: 194600 - DNA, 653 bp, Gossypium hirsutum
caagttagtagcgatgaaccccatgaatcttagccgatgcagatctccccttgcccttccctttaataaactccattctcgctcttccctcagaaatcatctacagagacgaaagtccaaaaacattcggaagcgcatgaaaagactacgatcagatatgcaagaaataagtagggaacaagggaagatcaaagaagggcaaagacaagtacgagaaaaatttgaagccgttgaatccgaatgcgaattgcttcggaaggagactaacatcataatgcagcagagtatgagcacacaactccgccttgctttcatgttacaaatcttgaaagcaagagaaaaccacgacctcgaccaggctgccaaactcacttccgctcttcgggagctgatagcgagagagaatcagcaaaaggaaactatgtgattaagaagagctgctgtttgtatcttagcattaatatattatatgttggtgagagtgatcaaccacggtgcttctattcttctggtcttcatcttttatgcagtgtttgctgtgtggtgttatcttcggtctttggtttgttaagcaggtggattcttaaattgtcccctcaggttttgcttgaccatctttttttttcattaaaatttgcttagatttccctttt

SEQ ID NO: 194601 - DNA, 1209 bp, Gossypium hirsutum
  unsure (1)..(1209): unsure at all n locations
caagaagaaggtgaagaaaacaaatgtcccggtggcagagttggtctacggtgcaatgttgtctggtgaccttcaaaaagcagtcgagaaggagtttgaaatggctttgcaagatcgggtgatggaagaaacaaaggataaaaagaatgctgtagaggcctatgtttatgacatgaggaataagctttgtgataaataccatgattttgtcactgcttcggataaggaagagttaatggctaagcttcaggagacagaggattggttatacgaagatggagaggatgaaactaaaggtgtttatattgccaagcttgaagagcttaagaagcaaggggatcctattgaagaacgttacaaagagtattcggagaggggaactgtcattgatcaacttgcttactgtattaacagttacagggaggcagcaatgtcaaatgatcccaaatttgatcacattgaacttgctgaaaagcaaaaggtcttgaatgagtgtgtagaagccgaggcctggttgagagagaaaaagcagcagcaggatctacttcccaaatatgccactccagttctcttgtcagctgatgtgagaaagaaggctgaagcactagataggttttgcaggccaataatgacgaaacctaaaccaactaagccagcctcgcctgaaacacgagctaacccaccacctcagggggagggtcagtcccaaggagcggatgccaatgcaagccctaaccacaacaatgtgcctggtgaaaatgcaacggcaggcagtggtaaggcagctcctgcttctgcagaaccaatggaaactgacaaatctgaaactgcttcgactactgcataattcagtagcttggtggtctgttgatgatatatgtggccaaaatttccgttcctatgtacaaccgctattttcggaaccactattttaagaaaggcttgggttcggctgtgttattcgggtcataatttttagattgtaaaagccatctttttgcattgccttccgagatttgtctctattgaagaccgagggtttttcacaagacngttttaacacggaaaatataactgctattgtgaattccttgctaacctgtttttttgttagtgggaggctaaaaatttacacttcaaaatggtgcgactgataaatgtctacgtcgtgttgggatcactgaaattatcttttgggtatcgtccgac

SEQ ID NO: 194602 - DNA, 361 bp, Gossypium hirsutum
  unsure (1)..(361): unsure at all n locations
tcgaaatgatgtagcttttaattatggttattgttgtaaaaatagtgtatccatgagctattgatttgcagggattcattcaagttgattaactgcagaataagatggaaaagtcctgcaaaatctgaaacaaagcccttccactctttctctagagggcttcttctgtgattctgttatctagaagtaaaagcttttcttgggttttccatttttcttttttcctttctaaattggtttccactttttttagcaagaatgaagcatgaatctatttctcgacccttattggcccnnnnnnnnnnnnnnnnnnnnnnnnnnnnnnnnnnnnnnnnnnnnnnnnnnnnnnnnnnnnnnnnnn

SEQ ID NO: 194603 - DNA, 441 bp, Gossypium hirsutum
gcgcccacgcgtccgacaaacttacgccgcttccgtatagcagagctttcttcgacgagcagccatctgtaatcaatcatgggtcattctaacgtctggaactctcaccccaaaacctacggccctggctctcgcgcatgccgagtgtgtggaaaccctcatgccatcatcaggaagtacgggctcatgtgttgcagacagtgcttccgtagcaatgccaaggaaattggattcattaagtaccgctgaggaatgtttatatggctagaagttggaaacactttttggctagtatgaacctttgtttcgaaattgtagcaacttttaagataacattgctgttttttgttgaatttagtttaagagcttgaagttttgtttctgcaaaggataatttgttgttttctcaatgaagtaatcatactgtttttatcttaaaaa

SEQ ID NO: 194604 - DNA, 402 bp, Gossypium hirsutum
cccacgcgtccgctactcttaccctttttcagagctttgatagaggaagagcagctcaccgaatccatcatgggtcactctaatgtctggaactctcaccccaaaacctacggccctggctctcgcgcctgccgtgtgtgcgggaacccccacgccatcatcaggaaatatggactcatgtgttgcaggcagtgcttccgtagcaatgccaaggaaattggattcattaagtaccgctgaagaatttatgttgggaagaactttgttagagtatgagcctttggtaatgtgattattgaattagaaggataatgtttattggtttcagtctggacatctaaaggggttggtgaactaaggatactttgttgtttctcaatcaagaatcatactgtttttttt

SEQ ID NO: 194605 - DNA, 855 bp, Gossypium hirsutum
cccacgcgtccgcccacgcgtccgcccacgcgtccgcccacgcgtccgcccacgcgtccgctgccttgtacgtagtaacagtagcgggaaagagagaagcctcaccgccgctgccgcagccaccatgggtcgtatgcacagtcgcggtaagggtatttcagcctcagctctgccttacaagaggaccccgccaagctggctcaagatctcgtctcaagatgttgaggaaaacatttgcaagtttgcaaagaagggcttgaccccatctcagattggtgtcattctccgtgattctcatggtattgctcaagttaggagcgttactggcagcaagatcttgcgtatcctcaaggctcacggtctggcccctgaaattcctgaggatttgtatcaccttatcaagaaggcggttgccatccgaaagcatttggagagaaacaggaaggataaggattccaagttcaggttgatccttgttgagagccggattcacaggcttgctcgctactacaagaaaacaaagaagcttcccccggtctggaaatacgaatctacaacagccagcactctcgttgcttaagctaggcatgtggggtggtgcaattttgggggaatccgggttcgatgttgatgctacggtggaagctagattgtgttttgttgttctagtgagatgtcctgatataagactttaattatagctgttaaaatttttgttatgcttggaaaagaaagtcgaaaacttgttttacttatgagattgtacttgttttcttttcgtccatttgaaattttaagcaagaaatctttgaattttgaaaataaaacctatcaatttctttttcctctttccta

SEQ ID NO: 194606 - DNA, 445 bp, Gossypium hirsutum
cttcgattatattccttaaaaccatgggaggaaactcaccttgtgcttcttgcaagttgcttcgtcgccgttgtgccaaagactgcatctttgcaccttatttcccttccgacgatccccacaaattcgccatcgttcacaaggtttttggtgccagcaatgtcagcaaaacgttacaggttcattaacaaccccctcatctaatacgttcattaacattttgggtaaattgcaatagtagccacccaactattagtaatttcttttttggtcactcaactatttagttttgtcttttttgatcacccaactatcttggattgtaacttagattgttgggtgtttctattttttagttagtgatgacaaaaaagaagaagacaaaattgaatagttgagggctattttgcaactttttatggttgggcgaccaaaaaaagatact

SEQ ID NO: 194607 - DNA, 708 bp, Gossypium hirsutum
gcatgacttaagagctaaattgtgaataaaggttaaattttaagaatcattgaagccgaacaaagattgagccctgggtattaaagccaaacacgattttattttcctagatttcattttttgagctccatatgttttgtttgttgtatgctcccaaaaaggggtaaagagatgatttcggtttgtcgaaccaaaccaactcggatccaagccgactcactcgaaaaaagcccgtctccatttcgggtgccattattaattgtcacagtaattttcaaaccctagaaaccgcagacactctctcgcccgctccccggccttgggactttttggtgctgtttactgatcatctcctacccatggcggacgtggatgccgatgtcgccgcaccaggtgtaccgaagaagagaacgttcaagaagttcagtttcagaggtgtcgatctcgatgctctcttggatatgtccactgatgaactcgtcaagctctttcccgcccgtgcacgccgaaggtttcagagaggtttaaagaggaagccaatggctctgataaaaaaattacgcaaggctaaacgtgaggcgccacctggtgagaaacccgagccagttaggacacacctccgcaacatgattatagttcctgaaatgattggtagtattatcggtgtttacaatggaaagaccttccatcaagtggaaatcaagccag

SEQ ID NO: 194608 - DNA, 1313 bp, Gossypium hirsutum
  unsure (1)..(1313): unsure at all n locations
gtaagttggaagagggtcatgcttcggtggtaggtacaccagagccttcactttggtctcattgcatagagttatgaactgtgcctacacctaacattttccccatctctatcttttcttctctccctctaaaccaaacccaaccaaagcccctctctgcaagcaaaacttaaactaggaattaaacctattctttataaattgctacgaagggttgggttttgttcttaagatcatggatttggagttcctgcaatccatggatgttcagattcttgttggtttaggagtagctgttttagccattcttgttgctgctgcttatctcttttcctccaggaaacccaaaggctgcctcgatccggaaaatttcagagagtttaagcttgtcaagcgccagcagctgagtcataatgtggcgaagttcacatttgaacttcctactcctacttcagttttgggtcttcccatcggacagcatataagttgcaggggcaaggatagccaaggtgaggaggttattaaaccatatacgcctactacattggattctgatgttggtcattttgaattagttattaagatgtatcctcaaggaaggatgtcacaccatttcagagagttgcgtgttggtgattatcttgctgtgaagggtcccaaggggcggttcaggtatcaacctggtcaagttagagcatttgggatgattgctggaggctctggcattactccaatgttccaagtagccagagccatattggagaacccaaaagacatgacaaacgtacaccttatttatgccaatgttacatatgaggacattcttttgaaggaagagttggatagccttgttgccaagtaccctggtcgcttcaaagtctactatgttttgaaccagcctcctgaagtctggaatggaggtgccggctttgtgtcaaaggaaatgattcagacccactgcccagcaccggctcctgatatcaagattctaaggtgtggccctccaccgatgaacaaagccatggctggccatcttgatgctctcggctattcacctgagatgcagttccagttctaatcccgctagacgaggtcaagctttactcagacctattttaatcttcttcattggtgagaacaaaaccatttgctatcaactcttgttgtaattggaactttttaagcattggaaccaagattcagatgtttttaactgttattacaagggttttccatggccatgttattgaataatataaagttattgaagcagtagaccctttataaaagcngagaagcgcccgcccgacccc

SEQ ID NO: 194609 - DNA, 670 bp, Gossypium hirsutum
tattgatcaacaccgcgaaagtttgctgacttgggagaagttacagtatcctttcaagatggtggaactgcacaacaattgcgatttcacgatgatacctacacctaaagccccaaatggtgctaatggacaaccatcgcctgatgataatctggtcaattcctcaagcttgatgttgactggaccaaagaaaagaaatctggaagctgaaggagaaggcatcaagaaacagagccggccccggctaacggttgaatcatcaaatttggtagaagagaatacggaagagcgtattcagagatacaatgaggggactccaaaaaacaaggacaaaactgcactttcggaagctagagtacaaggtattgccattaatgatgttattcctattgatcaagacaatggaagtttgctggctcgaaagatgatgcggcgtgaatatagttcctggaatttccaacattttaatgaagacaatgacagctttcctgccttagaacaagcaccgcaagttactgagtttctccgtcaaaatattgaagttttggtttccggtacaatcaaagagatgcaagagtggcgtacacctaaggattccggctgggatcaattgaaaaagtggaaggccgcgctcaacttgggtaagacaattggtgttgaagtgaaagct

SEQ ID NO: 194610 - DNA, 652 bp, Gossypium hirsutum
ttcactcgtccgaatccccaccaccagttctagtccttcatggacattatggaggttgcgtgggcgaccttccaagttacgatgcttttacacttgggggcccctattcggtgagaggttataacatgggtgagttaggtgctgctcgaaacattcttgagctcggagctgagatccggatacccgtgaggaatacacacgtgtatgcatttgcagagcatggtaacgatcttggaagttcaaaggatgtaaaggggaatccaacagaagtctacaggcgaatgggacatggttcgtcatacggtgttggcgtcaagctaggactagtaagagctgagtatgctgttgaccataacaacggaactggtgcactcttcttccgatttggagaaagatattaaaatgtgatttcgggtctaattctgctaaggtgggccgttacaggttccggttatggttgagctgttcttgatcttagaaaatcctgttgagaagtatggaactaggcatgttcttgtgtcaaataaattttgtttcgattttgtgctatataattttatcttgatctgtaaaaccaaggatttataagggaattgttggtgttggattacatacttttttatgttctcaaagaataaaaacagaaccgaat

SEQ ID NO: 194611 - DNA, 497 bp, Gossypium hirsutum
cccacgcgtccgcccacgcgtccgcccacgcgtccgggagaaaggaaaccaaaccaaactagtgagccgctgcttctcttcttctgtatcccaaaatggttgcttttaggtttcatcaataccaagtggtgggcagaggccttcctacagaagcagatgagcatcccaagatttaccgtatgaagctttgggccactaacgaagtccgtgccaaatccaagttttggtattttttgaggaagctgaagaaggtgaagaaaagcaatggacaagttttggctatcaatgagatctttgagaaaagccctaccaagatcaagaactatggcatttggctgcgatatcaaagtcgaactggttatcacaatatgtacaaggaataccgagacacaaccctcaatggtgctgtagaacagatgtacaccgagatggcgtctcgtcatcgggtgaggtttccttgtattcaaattattatgacatcttccattccagcaaaa

SEQ ID NO: 194612 - DNA, 581 bp, Gossypium hirsutum
  unsure (1)..(581): unsure at all n locations
acacacaacatctagttttggctcaatttgacaaggcgactcgtacaaagagcagatggaagtgcacacttaaggatggcatcatgcatataaacaataaagacattctctttaataaggcaacaggcgaatttgatttctgattttgttagataaaactgtagtcgccatcgtattgcagcagttgccctaaaagagcaagtcaaggggtgttattctgtgtttcgtaatttgtcttttaattattattagagtgaaaggttgattgaggggcatgggatatgctttattttaatgtcttccttaagacttgggttcgatggttgtcgtattgtacataaaggaagagagcattttcggccttagaatggatgactacttgagacagcttctttgacttctaaaaacttttgcaatggaatatgtaatttcatttataccatatacttagacattttggttaaatttnnnnnnnnnnnnnnnnnnnnnnnnnnnnnnnnnnnnnnnnnnnnnnnnnnnnnnnnnnnnnnnnnnnnnnnnnnnnnnnnnnnnnnnnnnnnnnnnnnnnnnnnnnnnnnnnn

SEQ ID NO: 194613 - DNA, 487 bp, Gossypium hirsutum
gtttttgtttcttctgtctgagttttgagctcaaactttgagaccaaaaacatgtggagaagaaagaagaagaagaagaagaacactgcaaccattagtaaccatccctcttctgcttactcctcggagaggatttgaaagggggcttaaaaggcaagtcatttgaggcacagggaaggccatgcctttctttctatttttactttattgtgtctttatcttcatttctgcatctttgttttcaatcagagttcagatcaaaatgagcataaaacacatgaagaaagtccaaatttgtagcagattaattggttgttccaagctgttttatgttttttcccctcaaagtttgttgaacaaaaatggttggttatacgtctgctatttcatctgaataattagtgcttcattgcttgaatttctttcagctgacaaaatgggtgggtttgaaatgtttcagattatgaataaattgttcttcattcaa

SEQ ID NO: 194614 - DNA, 601 bp, Gossypium hirsutum
ttttcatagaaattaaacctctgcgattagcagcagcattcgaatgtagggaaagaagaaggtgaaagggcttctatactgcaatttgtgatggtggatgcgtggtggtcccttcttggggctgccatcccggctgtaattgcaggacaagcttttagaatgaagaaaaagcatgccgaagaagagagaattaagagtgccaggggaagggagaagagctcggatgatatctttgttgcgagagagtctgcacatcaaagcgaatgttgaaaaaagttggggcattttcaaaggatccgattcctgatacgggtgtaaccgtttgtggtgtgtctgagctcgatgcttgctccgatgcttgtgctcgtaccgtttgtgttaaccaacatcaggtacccaactggaatgacattggccttcgaaggtgtcaaagtgaatgtcttagactatctgcttcccattcttcttagaacattggcttttaattacagtgactgccatatcagtttcaaaacttgggtctctcaatggtgtgatccttttagcagtcattacgtgattggtgaatttgtttttgtgttttgacaattagtggttaaaa

SEQ ID NO: 194615 - DNA, 699 bp, Gossypium hirsutum
cccacgcgtgcggttttcaaggacttaatggctgcaagttgggatgagcttccctattcggttgtacaagatgcaaagaaagccttatcgaaaaatactgatgacaaagccggtcaggaagctttaagaaatgttttccgtgccgctgaagctgttgaagagtttggcggtattctaatcaccatgaaaatggaactcgatgacagcatcggagtgagcggagagaatgtaaaacctttatcaagcgagtttgctgctgcacttaagacagtgttccaacgatacgcgacttacttggatgcatttggtcctaacgaaacctacttgcgaaagaaggtagagaatgagttgggatcaaagatgatctacctaaagatgagatgtagtggcctaggttctgagtggggaaagattactgttcttggaacctcgggactctctggatcttatgtggaacaaagagcttagcagtaaattgttgagacatttcatgtgaactcttttttttgttctgttttagatcatgtttatgaatagtaggagacaagttggtgttgttctcctagaaaaccttgggagtttgcttggaaagctaaataaaaaggcttatgttgtcaaaaaaacaataaatcaaaatgtaaaatcatgtttctgaaatttttttcatgggaaaattttgcatgaaaattttatgggaaa

SEQ ID NO: 194616 - DNA, 1438 bp, Gossypium hirsutum
cggacgcgtggcttcgaagtcgtagctttggaagcatggacttcatagctactatcctgtttctagctcttgtcatctcctccaccaaagctttggacccttgcggccctcagccagatgactcggaccttttggtcatcccaatctatggcaaatgttcaccattcaacccacccaaacctgactcatcgttcaacacagtcatgaacatggcatcaaaagacccagcaagggtcaagtacttgtcgagccttgtagcccaaaagaccactgcggttcccattgcttcaggccaacaagtcctaaacattggcaactatatcgtccgggtaaagattggcactccgggtcagctcatgttcatggtattggacactagcaatgatgtggcttgggtcccatgctccggctgcaacgggtgctcagccaccactttctcacccaacacttcttccacctatggttcgttagattgcggtttgccccaatgcgcccaggtccgtgggctgtcgtgcccggctacggggtctgcggcttgctcttttaaccaatcctacggtggagattcatcattttcggccaacttggttcgagattccttaggattagccaatgacattgtcccagattttgctttcggatgtataaacgtcatctctggtggatcagtaccaccgcaaggactgttgggtttgggtcggggacccatgtcacttatttcacaatccggggccctctactctggtgttttctcatattgtctacccagtttcaagtcctactacttttcgggttctctcaaactcgggccagttggacaacccaagaacattcgaaccaccccactcctaaaaagcccacaccgaccttcactttactatgttaacctaaccggaataagtgtaggccgggttcaagtccccattgccccggaatacctagcgtttaaccccaacaccggggcagggaccataatagattcgggtacggttgtaacccgattcgtccagcccatttacaaggcaatccgagatgagtttgtgaagcatgtgaaaggtccatttactgccattggagtatttgacacatgctttgatgctacagcagaagctgaggcacctttaataacattacatttcgaagccttgtcgatgccattgccaatggaaaacagcttcttacacaccagtgccgggtctcgggcatgcttggccatagcaccggtccccaacaatgtgaacgccgccatgaatgtgatagccaatttgcagcagcagaatcataggattctctttgatgtcatcaattctcgcttgggaattgctcgtgaagcttgcaattagtttcttattggctttatttttttttgtttgttctttgtttgctttcttgtctttatgcgtaagctcttttttttagtggttttatatgatgaaaa

SEQ ID NO: 194617 - DNA, 669 bp, Gossypium hirsutum
  unsure (1)..(669): unsure at all n locations
gccatttccagtgatagatcttgctgagctccatggtgacaaaaggagcaaaacaatgacttctcttcatgaagcttgtgagaaatggggcttctttcaggttgatagccatggagttgataagaagttaatggagaaagtgaaggagatggtgaatggttactatgatgagaatttgaaggaaaagttttatgaatcggagatgactaaaagtttgaacaagaatgagaaaatctccgacatggattgggaaagtactttcttcatttggcaccgtccaaattctaacatcaatcaaatcccaaacataactaagcaactatgtgaaacaatggaggaatacatagcacaattgattaaactagctgaaaccctatcggagctgatatgcgaaaatctaggactagaccacaaccacataaagcanacattctgcggcaccaaaggccccttcatcggaccaaagtggctatatancaacaatgtnctaacccagacctctncgaggtcttcgagagacaccgagcccggtgcataaatctacttctncaagagaccaagtnccnggccctcgattnctcanagacnngtcatgggttagaatccaccgtcganaaacacacatatcgtcacaccgcgaccaaatgagtgattacantggagtccaca

SEQ ID NO: 194618 - DNA, 608 bp, Gossypium hirsutum
aaaaaagaagcaaaaatggtgctgtgggagatcgcattgggaacggcttatttcttggggcttaaacgaagttacaagcttgctttgaagattcagcgacggattattagtcgtaaccagccacggcttcaacaatttgttcaaagaagaacgcgtgttgtattcgacatagcactcaaggttcacaggaacatacagcatagagacttagaagttggtcgaaaccttggtgattgtatcctccgctggccccataaaataaaaccttcagctcaaatccgaggtcctccgcctcatcaagaacccaaccacggtactggcaaagcaaacatgaacatgccaaagcaagtgacaaacacatcttcaccgaaaactccacgaagcaaccagtcacctcgaaaccatgatgctggtagacatctttttagttcattaacaagtacatggcctaagtccttccctactaccattgcaatgatgatgcaaccaccaactgctaccggaaacatgactcggtgccggcatttgagcattaacggacccgacgcatcgaggctgaactacacgagagaccagggagttgttagaaaggacataatgcaatggat

SEQ ID NO: 194619 - DNA, 932 bp, Gossypium hirsutum
gaggaactttaccgaccggggaactcgttgccatcaaacgagctcaacaaggttctatgcaaggtgggctcgaattcaaaacagagctcgagcttctatcgagagttcatcataaaaacgtcgtcagcctactcggattttgcttcgaacgaggtgaacaaatactagtatatgagtatgttgccaatggttctcttggtgatagtctatcagggaagtcgggaatccgactggactgggcccggcgactaaaagtagcactcggtgcagctcgaggtcttgcatatcttcacgagctcgcgaatcctccgattattcatagagatgtcaagtccacgaacatattattagacgaacgcttaaatgctaaagttgctgatttcgggctctcgaaaccaatgggtgatagcgaaaaaggtcatgttacgactcaagtgaagggtacaatgggttatctggatcctgaatattatatgacccaacaattgaccgaaaaaagcgatgtttatagctttggagtagtgatgttagagatagtaacggcgagaaaaccgatagagcacgggaaatatatcgtaagagaagtggcgacatcgatggataaatcgagaagtttatataatctccaagagattcttgatccaaccattggttcagatacagatacaataccccatgggttggaaaactttgtagatttagcaatgagatgtgttgaagaagcaagaactgataggcctacaatgggtgaagtagtgaaagagattgaaaacattatgcaagcagccggcttgaatccgaatgcggaatcagcttcgagttcggctacttatgaagatgcaaataagggaactcctcatcatccgtacgcttgtaaaatttggaccgaatttaatttggggtgaacccggttgagtgtcatttatattact

SEQ ID NO: 194620 - DNA, 1081 bp, Gossypium hirsutum
  unsure (1)..(1081): unsure at all n locations
gaacaaacgatgctcctgccctgcatgaagcagatattggactagcaatgggcatttctggaaccgaggtggccaaggagagtgccgatgtcataattctagatgacattttctcaacaattgtgacagtagccaaatggggtcgttcggtatacataaacattcaaaaatttgtacagtttcaactgacagtcaacattgtcgcattgatcgttaacttctcctcagcatgtttgacagggactgctcctcttaccgccgttcagctattgtgggtcaatatgattatggatacactgggagcacttgcgcttgcaaccgagcctccaactgacgaacgggggaagcgtgcaccggttggaaagaaaggaaactttatcagtaatgtgatgtggaggaatatattaggacaatccttttatcagtttatggttatatggtaccttcaggtgaaaggaaaaggaatgttcagtctcgacggtcccgattccgacctgacattgaacacaattattttcaactcattcgtcttctgtcaggttttcaacgagatcagctcacgtaacatggaggaaatcaacgttttcaaaggcatattaaataactacgtcttcgtcgccgtccttggttgcaccgccgtgttccaagtcatcatcatcgaattcttgggcacttttgctagtacaactcctctcacttgcttgcaatggttcgtaagcgttgtcataggattcttaggcatgccgatcgctgctgctttgaagacgatacccgtatgaaccactatactagcaatgctgttttccgagtgaatagcaagaaagttttctctgctttatttacagcgattgattgctatcggatcgtaaatagagatttcgggactaaggatcaccataaaaacaaacattttgaaacattttctgtattgaaattcttttgtttataggtgaagctctaggttgttaaactcttgttaatttcattttctaattgacatgtaaggcatgtaagtattttgtttacacgctttctagtaatcgaaatttatgcaccttgttttgtctttgcnnnnnnaaaa

SEQ ID NO: 194621 - DNA, 732 bp, Gossypium hirsutum
cagttcttcaccatttcccctcgatttccattcctttgacttcctttcatcatttcaagaaatgggttcaggagaaaaggtatttgtttatgaagatctggtgaagcacaaagacagaaatgattgttggcttttgatctctggaaaggtgtataatgtaacccaattcttggaggaccatcctggtggagatgaagttttgcttgctgctagtggaaaagatgcgaccaatgatttcgaagacgtaggtcacagtgatgatgcaagagagcagatgcagaagtactatattggtgaggtcgatgccaccaccattcccgcacgaaggatgtacaaagcacagacgtcaaccgcggcaactcaacaagaggagcctggctttctgtttaagattatacagttcctggtacccctcttgatcttaggcttcgcattcggtttacagttcttggggaagaaggaaaaaaccgaaacttagataactttcccatcacggaacctgcttgttcgtatgtatgctcgttaaagctgctgctgctgttgttgttgttgttgttgtgtaatgttcgtgacagtctataactgattgctattaataatgtcttagaatgtcgttttcgatctattttctattgtttgagtatgtcgttttcgatctattttctattgtttgagatacttgcattgcaatttgcatagccttagactcggcaattcatttgtttgtatcgt

SEQ ID NO: 194622 - DNA, 572 bp, Gossypium hirsutum
gtcatcaccatgattcaaggaaaataattatcatatataatcaatctctttgttgtgctattgatttcaatatctgatatatattggcaagatatactcaaacaagtgagcagattgttctttctctgaaacttacaacttcaccatgaacaaaagcaagctccagctgcaactttgtgcagggatatttactttaagcatcctctccaatggtgcttatggtagtgacaaaatctttgacataactcacaaaatcacttctcagttgccaacttttggatcacagaagggtcttggtcaattcatttggcttctttccagcatcaaaaatgggtccacagtgaatgtgtcggagttcaaattgggaacccacactggcactcacgttgatgctcctagtcacttctttcagaagtactatgaacaaggatttgatgtttcaacccttagccttcaaactcttaatggtcctgttctagtagttgatgttcaaagaaataagaacattactgctgaagttatgaagtccttgaaaattcccagaggagtacatcgtgtgcttttcaaaacac

SEQ ID NO: 194623 - DNA, 1331 bp, Gossypium hirsutum
ccctctcgtccggacaaggtgagggaaaaaacaagaggatctgatgtacttgcctgtggatcttaattatagacaagatcatgatggcccttgaaaataaagaaacaatgcagaactgtgaggcaaccttaaaatgcctccagacaaaggggttcccgtacaacctgcaatgtaacaggaattcagttgaaggcattccagagcttaaacatgaattcggtactcatccgggcagagatgttgtagaaccagtttgctctttgagtggagagtttgtggaacttccgaatgaattttaccacaaacctacactccaccacgaatgtggctcatggtcgaccttctatcctgactctcataagttgcaggcataccagttgaatgcttttgggggccaagtttaccactttcctgtggataaccgatttcattatgccccatttaatgtgatcactcatggatacccttgtgaattccagttccaagattttcagtactttgtggtcatagattttgaggctacctgtgacaaggagagaaacccacatccacaggagataatcgagtttccatctgttattgtgagtagtgttactgggcagctggaagcttgttttcagacatacgtccgaccaacttgcaaccaactcctgagtgatttctgcaaggatctgactggcatccaacaaattcaggttgatagaggtgttactttgagtgaagctctcctttggcatgataaatggcttcgggaagatgggcataaagaacactaactttgctgtggtgacatggtcgaactgggattgccgggttatgctggaatctgagtgccggttcaagaagattcgtaaaccttcttactttaaccgaagggataacttaaaaagttccgttccgtaaggttttcggcggcatgagatgcaatctgaaggaggcagctgagatggccggtctagcctggcagggccgtgcccattgcggcctcgatgatgccaaaaacactgctcacttacttaccctcatgatgcgcaaaggttttaaatttgcgatcacgaactcactgatgtggcaggctagtgatggtccattgatgtggaacccggtccccgagaacatggccttctttccacatcacccccacaagccaaaggatcagcaaatgcccctattccattaccacccttactgtttctgtggggtgaagagtagcaaaggaatggttcgggagcccggactgaagcaaggaagtgtgttctttggttgtggaaactggactgtcaaccgaggtgcccgctgccactacttcgagtgggcttcgtcctgaaact

SEQ ID NO: 194624 - DNA, 461 bp, Gossypium hirsutum
ggaagaacaaccttgttcgacttccgatattaaacgcccggagctaactttcaagctcggcaaggggaaaacttgctcctcttgtcgcacatcagaaactcttgctcataataccaaggcgccaacgctgtcaaacttgtgtccccctcgccctccgaaattagctttacaattcaaaaaccttgtggaggattgggttatgcctacactgcaaagcgagtcaaccagttctggcgatgatgactggctgcttcagaagaagcaaaacctcaacaccgacgttaaaacccacaatgatggaaatcttaactctaaccaaatgagctcggcaacttggccacgtgcttgcttcttgcccgaggccgatatatacgcagtaccattcacggtaccgttctgaactatattttgcataggagaaaaaggcctgcaaagtgcgagaaactagaaaaaaaatagtg

SEQ ID NO: 194625 - DNA, 616 bp, Gossypium hirsutum
  unsure (1)..(616): unsure at all n locations
aaggcaaggatatttcttccttttttgttttaacactagtttaaaaagagaatagataaaatagaaagaacttaagaacaaaaaaacacctttgattttctttttctgttctcttttttgtatcttttttacactgaatccccccctcccattacatattcgataacggctttaaatagccgaaaatgaggaaaaaacgaacccaaatccaaagaaatctatcctgttttttcgttggcatattgttgttctgttcccttttctttgttgttctgttttgcgtttgttgctgcaggtaatgctggcgtacggaacggcgcacgatggggagggtcgtggtgcgtgattcgcggcggcgtgcaatggtgagaggcggcagcgttgaagcaaataggctcctagggtttctgctattttgtttttgtgtgggctaggtttagtgggttgggtctagtatttacgctgcttgttgggctttgtaaaaaaattggacttcatttatttatttggtttatgcatgcgggcccgggctaattgggcctgctacattggttacatacattgcattcctaatgagaaaatgtaaattcgaactttaaagacaaaannggttgat

SEQ ID NO: 194626 - DNA, 498 bp, Gossypium hirsutum
cggactcgtgggcggacgcgtgggcggacgcgtgggttcttgtttgtgttttacagaagtcaggaagctctccacaaagcttctaccgaaaatgccgaagcaaattcatgagatcaaggacttccttctcactgccagaaggaaagatgcacgctctgtaaaaatcaagaagagcaaagactttgtcaagttcaaagttcgctgctcaaagtacttgtatacacactgtgtgtccgatgctgagaaggctgataagttgaagcagtctcttcctccaggtttgagtgtccaggacctgtgaaaatagggccgcttcgagtttatcatccaattactaggtgatgaaagctagattttgactttgcttttatcatatttcatgcctttcaaactcaaaatttactgtaatggatttgtattctggttatttttatggatatgagtaaggtcgagttactgtttaatggttaatgaatgtgttttgcttttggttgtcct

SEQ ID NO: 194627 - DNA, 682 bp, Gossypium hirsutum
  unsure (1)..(682): unsure at all n locations
tgccggaggttggtgcatctctcctctttatcactttgatatggctcagcctgcctgggaaaagattggtatttacagaggtggcattgtgcctgttttgttccaaagggttccatgtaagaaacatggtggagtcaggttcactatctccgcgagagactactttgagcttgttttgattagcaatgtaggtggggcaggatccatccaatccgtatccgttaaaggctctaaaactgggtggatgtcaatgtcaagaaactggggagctaactggcaatccaatgcctacctcaaccgtcaatcgttgtcgttcaaggtcaccactaccgatggtgttacccgactgttccctgatattgtgcctgcaagttgggggtttggccagactttctctagcaaagtacaattctaagctcactaaaagctttagttcccggcggaggcgtgctacattattttacaaaaaagctgcccgccatacatggtatttatcgatacatcacatggtcaataatatcaggctacttgtttttctggagaactggttgtttagatggaagtgaaatctttgtttttgatacaagtcgatgtttgaaattatttcatgatcataataaattgtcaataagaagtgcaagaaaaacatngcagcttcagaagatgtaaattttgtcatcac

SEQ ID NO: 194628 - DNA, 688 bp, Gossypium hirsutum
  unsure (1)..(688): unsure at all n locations
agtgtaaatacattcattcccagtacttctccagcatttgttgtcttttaccctaccgagaaatggcaaaatccatttttgcattaccaattttgcttggattatgctatctggctactgatgtgagtgccttcacggcttctgggtggaccaaagcacatgctacattttatggaggcagtgatgcctcaggaactatggggggagcttgtggatatgggaacttgtattcaactgggtatggaaccaggactgctgctttaagcacagccttgttcaatgatggagcttcatgtggacaatgctacaagatcatgtgtgattaccaagctgaccctaaatggtgcataaaaggaacatccgtcaccatcacagccacaaacttttgccctcctaactttgctcttcccaacaatgccggaggttggtgcaaccctcctctccagcactttgatatggctcagcctgcctgggaaaagattggtatctacagaggtggcattgtgcctgttttgttccaaagggttccatgaggaacataacaacagcaacaacaacggtcagaatctgaccaatcacttcaaaactgatagtgttgctcatgttggaactaatggctgctcttcttcttnctcttgatgctgcctgtggtgatgatgatgatcaacttcaatggtctttttaattt

SEQ ID NO: 194629 - DNA, 690 bp, Gossypium hirsutum
cacatattttaatatggcatctgcagggtgagacatgtgatcttgggaaagatgcaagtggaaagaatagtgcatttctagaactgttaccaattgttcgacaacatattattgatggtttcacgcccaaggcccttgatgcatttcgaagagaatttgagttctttgacaaagttacatccatttctggtgtcctatttcctcttccaaaggaggaacgccgggctggcatcaggagggagttggagaaaattcaagtgcagggtgatgacctttatttgccaactgctcctaataggcttgttaggggcattcaggtcgatagtggaatacccttacaatcggcggcaaaagttcctattaatgatcacatttaatgtggcttgatcgggatggcttgatccagaatgatataaagccccaggcttgcattttcaaggttggagatgattgtcgacaagatgttcttgctcttcaagtgatagctcttctaagagacatatttgcagctgttggacttaatctctatttatttccctatggtggtctcccaactggtccagagagaggtattattgaggttgggcctaatacacgaagcagaacccagatgggtgaaacacctgatggggtgacagattttcacggatattgctgtggtctctaatcgagttccgcagaccttataat

SEQ ID NO: 194630 - DNA, 497 bp, Gossypium hirsutum
attccggggggatccaaaaaaaaaaaaaaagaagtcattttttcagggctaagaaagagaaaaaaaaatggctttgcaaaaggcgaaggacatcgtatctaccaatcctgtcgtcgttttcagcaagtcctactgtccgttctgtgtggatgtgaagcaattgcttcaacaacttggagcttctttcaaggccattgagctcgacagagaaagtgatggatctgatattcaagcagctctggctgagtggaccggccagcggactgtgccaaacgttttcattggtgggaaacacattggtggctgtgattctacaatggccttgcacaaggaaggtaagctggttcctctgctaactgaagctggagctattacaaaatcatctgtttagaatagagttaagctgcttgtctcccctaaaattaataaacgaataccaagtttggattcatgttgattctgtcctttaacgtgaatccatagcatagcatatagat

SEQ ID NO: 194631 - DNA, 445 bp, Gossypium hirsutum
aaacaaccctaaagttttgagattccctcactctcccctccgctcttcgccgaaaggcctatgcgccaagccttcaaccgcctccaaaagcccttgcgatcagcgaagcagggtcctccgacggtgtgagcacaatgcgcggtactgtgatgttgtagaggagtgcatgatcgtggggcgtggacgtgcgagctgggggtcgtgcgtgggcgtgtcgatgtacgtggtggagaggcgtataacgtgggggctacagcgcagggagaaagaagggtttgttgtttctgaaaaaaaaaattagggtaatggggcttgtgtagttgggtattaggccattgtaaaattttgggccttggatttattttgtatgttttgggtttgttgggcccgggcgaaaattaagccctacaaattatatttagtttgttggcctctaaaatctaaa

SEQ ID NO: 194632 - DNA, 678 bp, Gossypium hirsutum
  unsure (1)..(678): unsure at all n locations
ggaaaaaccctaaaactcccctaaaaccaccacggtcaatacttcggagtctctttctagttcgttctcactgtcaaagcaagcggtggtaccggcaccggcgcctcattcacctcagttctcaccgctcagattccttgtagtctccccgttcattctcatttcggtctcaccgttctgccttcctctttcagattcactaagtttttgcagatagtgattttgaccttttataagcagtcaaagtgaatacagaaaagaaacaagatgaaatcggttgtgggcattgttgtatcaaataagatgcacaaatcagtggtagtacgcggtggacaggctcttccacaacaagatttacaaccgctatgtcaagcgcacctccaagttcatggcccatgacgaaaaagatgaatgcaacatcggtgacagggttaaattaaatccttctaggccgttgagcaagcgtaagcattgggttgttgctgaaattctcaagaaagctagaatctatacacccccatctgtggatactgctgcaaatgcaagtgccaagaatgaagcaccactttcttcaacctcataaggttcantttgatttcgttgcacttggttgtaaaaatcaagtttttgatttgcatttaaaaaacccccattactgtctttgtcgtgcttttgagc

SEQ ID NO: 194633 - DNA, 516 bp, Gossypium hirsutum
tcgcttacgcgtccgcccacgcgtccgatatttaggtgttcctgcaaattgaagaatacgctgaaatcttcaatccaaaatgcctaagcagattcatgagatcaaggacttccttctgactgctagaaggaaagatgcacgctctgtaaagatcaagaagagcaaagatgttgtcaagttcaaggtccgctgctccaagtacttgtacacactttgcgtgtcggatgctgagaaggctgacaagttgaagcagtcccttcctccaggtttgagtgttcaagacctgtgaaaatatggcagcctcaggtttgtcacctgatttataggtgatgaaagctagattttagttttgggtttattgtatttctggtcattctgcaacagtgaagctcaattttctgtaattggatctatgtttttttgttgattaaggattttagtgatatatgcacttttcaattacaatgaatgttctttttaatgaaaaacacagaaaaatttgatgttgcttcgcta

SEQ ID NO: 194634 - DNA, 565 bp, Gossypium hirsutum
cccacgcgtccggaaacacaaggttggactgcgagctcggaattttaggtgttcctgcagagtgaggaagctcccctgaaagcttcagttgaaaatgcctaagcaaattcatgagatcaaggacttccttctcactgctagaaggaaagatgctcgctctgtaaaaatcaagaaaagcagagatgttgtcaagttcaaggtccgctgctccaagtacttgtacaccctttgcgtgtctgatgctgagaaggctgacaagttgaagcagtctcttcctccaggtttgagcgtccaagacctgtgaaattaaaactgcccttagcttgtactaggcaatgaaaactagattttgacttttagtttattgcttgcatttcgaatcgttttgcaacgatcaaaagtttttataatggatttttatttggtgtttttttatggacgttagtaatgttattaaaaccctttatttattttagtattcgtgttctacatcttagtttggcacatattggataatcaaacatatgaaaaagaaaagaatcaatatattctgattcagtaaaaa

SEQ ID NO: 194635 - DNA, 612 bp, Gossypium hirsutum
gggatgccttccagtcttttccagccacaattaatgcagctgaaactgattctgtagttgagaggacagtaaaagaatcggaccatgatgagtccatctcttctgctttggaaatcagtactgataatagtcagcaatatttatcttcagaaaatcacaatagtataaataactctaatgcggagcattcagaggttgcaacagaaatattatctgattgctcaggtgacggaggtaacagggagaagattttgtgtgatcttgcagttgaagaagtgaaagacatatccacaaagatagaggagcacgtgcagggaagggcatcaactgaaactggaaatagcgtagatgctgaaggatcaatcgatgtcgcaagggatgatgtgccgcataaggagagttcacataatacagtcgttactgctttattattagatactctgcctcatgtagggctttccgatactgaacataatatggatcaggaacagcattgaaagctggggagggacattgatgattggaagataagttttttattttttccctcgtgaagttttgtatgttttggctgccaactgttttgagatagagagagacagagagagagtt

SEQ ID NO: 194636 - DNA, 402 bp, Gossypium hirsutum
cccacgcgtccgcaatctccaagtataagctgcctccacacttggaagtgcattggagcattccaagcctcttgcaattcaatcttcagaattatcgagtaccagccatccattagccgctgtaatgaagtgtggaatcctctccagcacttcatttactggaagccttcccactaagatttctcaagatggggggcaaacttctcagccttcagccccaaatcggcctcctgctgttttaacaacctcacgtttgatgcttgatcgtgcaattgcatctggttctgctacccatgattcaatatcagctacaccaaatagttcccgggaaaaagttgaacagctgccactgtctgctggaccaccaccttcatctcttgttagtaatgccccatcaccaac

SEQ ID NO: 194637 - DNA, 367 bp, Gossypium hirsutum
cgctataaaaaggtcttaagaatacatctggcatcaaaatcaatgcaacaaagtcgatgatagggcactgtctgggtgcagcgggcggtttagaagccattgccactgtgaaagccattaccacgggatggctgcatccctccataaaccaatttaatccagagccatcagttgagtttgacactgttgccaacaaaaagcagcagcacgaggttaatgttgcaatctcaaattcatttggatttggaggacacaactcggtggtggcattttcagccttcaagccatgaaagtctgttacttacgtgttctgcatttgctaggaaagatgatgatagagaaatattgatccttaaaagagcgagtc

SEQ ID NO: 194638 - DNA, 408 bp, Gossypium hirsutum
tcgcccacgcgtccgtgaccctgtttatgtaagggctgcttgtgaaggtagcttgaaacgtcttggtgttgattgcattgatctttattatcagcatcgggtggatacaagggttcccattgaagtcacgattggagaactgaagaaactagttgaagaaggtaaagtgaagtacataggtttatccgaggcttctgcatcgaccattaggagggctcatgcggttcatccaataactgctgtgcaattggagtggtcattgtggtctagagatgttgaggctgacataattcctacttgcagggaacttgggattgggattgttgcttacagtcctctgggaagagggttcttttcatctggccccaaaatgatggaaactttgtccgaaggtgactttagaaagta

SEQ ID NO: 194639 - DNA, 434 bp, Gossypium hirsutum
gccacatacatgattctcgtgccgatcataggtgtttcggtgatgaggaatgcggaggggactctagtacgtgtagaagaagatcatgctgcatggctgcttactgcgggttgcggatccaatgatcactgaagagcaaaaccatgtattctttctagcatagacttatacattgaaatcacaaaacacaaaagtcaaaaagtatttcctcagtttgtaaactacttagatgaaacagaaaaagcaagcttagaaacacatgtagcacttgcaagataatatggatacgcattgtcacctaattttccttcaggaagtagctattaggctgccatattgtccctgaatccattatccaacaaatacaacctattgggcgacgctttgtcttttcttttattcattttttgaggtgtaatagtgcgtcgtcaata

SEQ ID NO: 194640 - DNA, 307 bp, Gossypium hirsutum
acccacgcgtgcggccacgcgttcggggtttcttggccaatagataagtgtcctcaaatgctctgctacaaagggaaacgggcttctggtacatagagatgaaattttcaatgcattttgggtgtgggggaaactttgagttactcacattatcattccttattaatctgccaagttatattaaaattttgagttcataggaagaatgcataaatttaatgtttgttgagatttactttattgtttaaaattattaatttttataataagtttatatctaagaagataattttagcccggggaaaaa

SEQ ID NO: 194641 - DNA, 429 bp, Gossypium hirsutum
cccacgcgtccgtttgctggaacttcttgctcctactgtctagtgtcggctttatgagccgtgagtttatttttcattagcctaaaggatgttgggttacaggaggtacagaaagtggtgggtttacaagtatgcatagcaagcttggcatttgccacattaagtacatcatacagcaatttaccatctgctccttcaagccaagctaatattgatcttccatattttacaactgagataacaaaggaatcacgtccttttgcgctttctcttgcaaggcatctacattctatatgagctaagatgtatggggctttttggtgttctcactgtctagaacaaaaagagatgtttggacgtgaggcagcaaagttgttggactacattgaatgctttcctgatggatataagacgggaacaaaaatgatc

SEQ ID NO: 194642 - DNA, 727 bp, Gossypium hirsutum
atctaatgctctcagagggtttcgagttcaagctccattggttgattctgtatcttgctattgtaaagtggattctggattgaagacagttgttgaggcaagaaaatttgtcccgggatcaaagctttgtatccagcctgatatcaatcccaatgctcacaagagtaaaagctctcgcaaagagaggagtcgagtccagcctcctctcctccctggccttcctgacgatcttgccattgcatgtctgattcgagttcctcgtgctgaacaccgaaaactccgcctagtttgtaagagatggtatcaccttttggctgggaacttctttttttctcttaggaaaagtcttggaatggcagaagagtgggtttatgtcttgaaaagagatcgtgatggaaagatatcatggaatgccttccatcctatccatcagctatggcagccacttcctccggttccaagggagtactctgaggcacttggttttggttgtgccgttctaagtggctgccacctgtacttgtttggaggaaaggatccactaagggggtcaatgagacgagttgttttctatagtgctcggacaaacaagtggcacagagcaccaggtatgcttcgaaaacgtcatttctttggttcctgtgtaataaataaccgcctttatgtggctggctgagaatgtgatggaattcataagactttacgctttgctgaaatttatgatcct

SEQ ID NO: 194643 - DNA, 408 bp, Gossypium hirsutum
cccacgcgtccgcccacgcgtccgcttttcttcctcacttatactacccacttcgagcatcagagattggaagctcttcatatacttactctctagcggaacccgtttgtttgcctcaaacgccttaatcagtctcttgctagccattggacattacacggcaaaaacatctttctcagctcttgtttcatctctggccaatcggtgataggttggcgtgaagaatcctcaactctgggtttccaccatagttttttcatcacccacaagatacatggaagtaatgctaactttatctgcttccggtatatgagccactctgaaaaactgttagacatcgaacacgttggcctaaggaccttccttggaactccgagcaccattgaaaggcctaagcttcagggttcc

SEQ ID NO: 194644 - DNA, 435 bp, Gossypium hirsutum
attcctgcggaagcagagcggacgagcgagaaagaaagaaaaaaagaaacaaacaggagagggaaacaatgagccggagcttgggcataccggtgaagctactgcacgaggcatccggccacgtggtaacggtggagcttaagagcggagagctttacagaggaagcatggtcgaatgcgaggataactggaattgccagctcgagaacatcacctacaccgctaaagatggaaaggtatcacagcttgagcatgttttcattcgaggcagtaaagtcaggtttatggtcataccggacatgttgaagaatgctcccatgttcaaacgcctcgatgctaaaatcaagggtaagagctcatctctaggagttggcagaggtagagctgttgcaatgagagccaaagctcaagctgttcgggcgtggcacaacaagt

SEQ ID NO: 194645 - DNA, 454 bp, Gossypium hirsutum
ttcacgcgtccgtaaaaacaggagcaaaaagttcattagaccaataagttcaagtaaaagcacattagcacttgctgttgcaatgagtggttcagagactgatagtttttcaagcgctggtgaggattcttcttcaacttccagtcctaggttattactacctccattacacccacaaacgaaaatggtttctttgtataataacagtattagtattaccccttcttcatcaccgtcgagtggtggccggaatttctctaactggcggtctttttcattggctgatgtacgtgaatataactgactgttatagttttacatggagtttgatatactttttatgattggctcctccttgttaatctttatttgatggaaaaaaaagagagagagaagaaattgttggcctccacaaggatttttttgtcagtctgtagttttcatttttgagatc

SEQ ID NO: 194646 - DNA, 637 bp, Gossypium hirsutum
gattttcgtggcatggctggatgtggtgacttaccttcaccaccacggatacgagcagaagcttccttggtatcgtggcaaggaatggagttacctgagaggagggcttacaacaatagaccgtgattatggtatattcaatggtatccaccatgacattggcacccatgtcattcatcatctctttcctcagatcccccattatcacttagtcgaagctacaaaagcagcgaaaccggtgataggaaaatactaccgggagccgaagaaatcagggccgattccgtttcacttaatagagaatctagtgtcgagcatgaaacaagatcattacgtgagcaacagcggagagattgtattttatcagacggatcccaacctgttttcgcctcccaaatccgcatgagccattttatttagagatcatagagctgaaacaaacaagggccttcattcttttcgcttttagaagggactttgtatttgttttggttttgttttgttttttttttctttttgtgtcttcaaaataattaaggttgaagttcctgtagtctcatcaaaaacatgattattgttaccaaacatacacacggtactgtaggagaatgaaatacaaattttattattatttttt

SEQ ID NO: 194647 - DNA, 786 bp, Gossypium hirsutum
cacacgcgttctactacttggctgagaacattgttatatttgagggcatcttactcaagcccggtatggtaaccccaggggctgaacacaaggggagggctaatcctgagactattgccaaatatacactcacaatgctgaaaaggagagttccaccagctgttccaggaataatgtttttgtctggaggacagtcggagatggaagccacattgaacttgcatgcaatgaatcagagccccaacccatggcacgtttctttctcttacgcacgtgcattgcagaacactgtgcttaagacatggcaaggacgtccagagaatgttgaagctgcacagaaggctcttttggtgcgtgcaaaggcaaactctctggctcaactcggaaaatactctgccgagggtgaaagtgaagaagccaagaaaggaatgtttgttaagggctatacctattaaggcgtaagacactgtaatatctggtttttgggcatctatggctttttgtgcgaggattattacttgctgttagataagttttttacatattattgttatgcctcctgaaactagggaggttgaataagttacttgggagagtagaagaaacattcctcgaatcacttcccttgacgccttttgaacgaaacaggttcatatttaagatagtttatttggctggcagatcaatttcaatcaattttaggcttggatgattttgtatttcgatgttttttttttttttgaagatattttaagttcgggttaaaaaaataaaatttattttttt

SEQ ID NO: 194648 - DNA, 296 bp, Gossypium hirsutum
  unsure (1)..(296): unsure at all n locations
angtgcactcgtttgcaagaaggtgttttattgctagtgaaatggctaataggggtctgtgtaataaggctggaacatgaaaattatcccaaattgtaattaaaaagaaggcagaattcatgtttctgtatattggtgaaataatgttgtattgttacctttggaagatgtataatataagtgtacaaatactgaatcagcctgcttctgtgaaaccagaaaaaagagctgaaagacgtgtttcataaattcaaagttgacttctatcaatgaaattactcattattgattcanaa

SEQ ID NO: 194649 - DNA, 577 bp, Gossypium hirsutum
ttttacgcgttcgaagagaggggacaagagaggtagagaaatagtgtgatggcatccgggtggggaatcaacggtaacaaaggcaggtgctacgatttctgggtcgacttcagcgagtgcatgtcccgttgcagagaacccaaggactgtggtcttctccgtgaagattatctcgagtgcctccaccattctaaagagtttcaacgaaggaatcgaatttataaggaggagcaacgtaaattaagagctgccgcacgaaaagacaaggaaggcgaaaatggtgttcatcatcatgcatagtcataatttgtgatcctttaatttgccaataataataatgcgtggagattgttgtatttatgttgggattggtattttaactctttgctaaattaccttttggtttccctttcgttggaatggacattgttgttttctgcctgtggctgtgggagcaaagttaaattggagtgagcgaaacttttttactttgaaaaaatttcgaattttaaattaatcgaatcgaattatttggtttttcgagtctaaaaaaaaaaaaaaaaaaaaaaatgtctac

SEQ ID NO: 194650 - DNA, 531 bp, Gossypium hirsutum
  unsure (1)..(531): unsure at all n locations
gacttacgtgtgccaaataagggaaatttagggttttatttgaattaggggaaaatggcgatgaggaaagtttacagcgagataaaagggatgaaattgaaggaagttcctggctacttcaagccgatgctatctatgggttacttgaagaaatctgttcagaggggtttggacaattaccatgctaagtacattgagactgattctatcgaacctctctaccatgtctgtttcggtgggatgatcttttcttaccttgttgctcttcccaacgagcgacgccacctcgagcacaagaagcatgctgagcaacacggtcatcattaatcccatctagctttaaagatggtttggatcgttgttgtgcccttctcggttttatccagtaacaattcgatttgcttaatgctttttggttgtaatttgtgaacaatgtangcagaggaagatgctggcttgatcaaatgcaaaaataaaagagtacattttctttaaaaataagtgaaagactattagactaccatggaaaac

SEQ ID NO: 194651 - DNA, 654 bp, Gossypium hirsutum
tctctccaactttcctttgctgacccgccatgaacatcctcaaaaacctcggctttggggccaacaacaagccaaccgcttcaatggagaattgcgccatcgctcagggtcctgaagacgacgtcccgccttctggtcaactgtttgctcagttcggggcgggctgctttgggggcgttgaactggctttccagagagtttcggggatcaccaaaactgaagttgggtattcccaagggttcatgcataatccgagttatgaagacgtgtgttcggggactaccaaccacagtgaagtcgtgagggttcagtatgaccctaatgagtgtagctatgacactttgcttcatgtcttttgggctcgccatgatcctactaccctcaaccgccagggtaatgatgtggggacacagtacagatctgggatttacttttacagcccagagcaggagaaggcagcagtggaatccatggaaaaacagcagaaactcctcaacagaaagattgttactgaaattctgccggccaggaaattctatagagcagaggaatatcaccagcagtaccttgcaaagggaggtcgttttggttgtaaacaatctgctgagaaaagatgcaatgatcctatccgatgctatggctaagttgcccttt

SEQ ID NO: 194652 - DNA, 811 bp, Gossypium hirsutum
caaaaattgggtgagacaaaatttggaaaatacacaaagtcaggaagctgagtgggaaggggtctgtttggttgcgctgctggtgagcgcgatgatggagaaaggcaaagagcccgccgcagccaacgaggatggcgaagttggtaaggccgagagcgaggagattcaggaagccttagaaattgtcctctttcaagtctctgaatgttatgtttatttgatacctccaaggaaaactgcagcatcttacagggctgatgaatggaatgtcaacaaatgggcatgggagggaactttgaaagtcattagcaagggagaagaatgcattatcaggcttgaagacaagaatacaggtgaattgtatgctcgagcatttctgagagatggagagccacatccagtggaatctgtaattgatagcagtagatatttttgttcttcggattgaggagatttggggtggtcgccttccgcttgctttcattggcctttgcgtttccagagaagacataagctttttgatttccaaccaaggcttgttgaaccttttgaaatacttgaccaataggaaaacttgcggagaaaatggagccgcatttccagaaatcttccttagtggattaccgttaaaggatggggtaccttggccttaattaaaaattaaggggctttctttgatttcaaactctcgatctgggcttgacaaaatgtttggttgccatgcattcggaaaaaccttttttatttaaccaccatttccctcgatccgtttaacttgtttatgccttattctcctccatatccaaaattt

SEQ ID NO: 194653 - DNA, 558 bp, Gossypium hirsutum
atccatcaaaatcgacatctcttgttgtttacagtgcaagggcaatgtgttcaattgactttggaaaggcagtagatgaagatgatgaaagtcagttggtccatgaagcatgggtgaagcttcaaggctctatcaccaataagaaattgaaatatttgttgatagatggtcgtcaaacagagtcaaaacatactagtagaaaaaataattttgagataattggttttagagacccagttttatttattggacacctttctaaaaattccatcttgatggtagacaaaccatggatggaagtagttaaatcttttgatactgccccagttcagagacatatatatgggacataacttcctgtggacgaaaggatgttcatcacttgagtgccttgttaggagaagaaaaaaatgcagcatccaattaccccatttggagtcccactttaacgttaactatatgttgttacaatgggggtggtagggttgggggatcaaaagcattgtgttgtgtattgtactcaatttttgttaacgagcttatattagtttttctgtt

SEQ ID NO: 194654 - DNA, 429 bp, Gossypium hirsutum
cccacgcgtcccagatgcaattcagaaggtagctgcagcttatgactgcaaaattgttgaaggtgttcttagccatcaactgaagcagtttgtgatagatggaaacaaagtcatactcagtgtctccaacccggatacaagagttgatgatgcggagtttgaggagaatgaagtttatgcagtagatatagttgcttcaactggtgaaggcaagccaaaactattggatgagaagcaaaccactatttataagagagcagttgacaagaattatcatttaaagatgaagacctctagatttattttcagtgaaataaatcagaaatttcccattctcccattcactgccagggctctggaagagaaacgagctcgtctaggtttagtcgaatgcgtgaatcatgatctggtgcaggcatatcccggtct

SEQ ID NO: 194655 - DNA, 722 bp, Gossypium hirsutum
  unsure (1)..(722): unsure at all n locations
aaaaatccgggcggcccacgcgtacgcccacgcgtacggttgagcagctgtttttacatgcacgtagactccaggtatcggggtagacttcagattggtgtgggtgagaaagggtatgagaaagatcctgcaattgtagcaaaggaagcaattcatgaggccactcgtaatggttctgatgttgttctcgtcgatacagctggtcggatgcaggataatgaaccactaatgagagccctctcaaagcttatatacctcaacaatccagatctagtctgatttgtgggagaggcacttatgttggaaatgatgctgttgaccagttttcaaaactcaatcacatattggctgacctctctacttcttctactcctagattgatagatgggattctgctcaccaaatttgacactattgatgataaggttggagcggcgttgtcaatggtgtacatatcgggagcaccggtgatgtttgtcgggtgtggccagtcatatacagacctgaagaaccttaacgtcaaatcaatagtcaagacactgctgaaatgagtgaatgcacggtgtgggataaaagaacgaaaaagaaaaactcataaatgcattttcaatgctccactcttttatgactntgttttctttnnnnnnnnnnnnnnnnnnnnnnnnnnnnnnnnnnnnnnnnnnnnnnnnnnnnnnnnnnnnnnnnnnnnnnnnnnnnnnnnn

SEQ ID NO: 194656 - DNA, 667 bp, Gossypium hirsutum
gaagacctagaaccagctttgaaggctctcaaagatgggcttatgaccaagaatgtggctgaagagatagcttacaagctttggtgatcaataacctgctagtcttgaagggaaaaagctggcctcattcacaagggtctcttcgacagttcgggctgccatggaagatgccctggttcgtattttaactcccaggcgctccattgacatactgagggatgtacatgctgccaaggaacagaggaagccatatgttgttgtctttgttggcgttaacggagttgggaaatcaactaatctcgccaaggttgcttactggcttctgcagcacaatgttagtgttatgatggctgcttgtgatacattccgttctggtgctgttgagcagttgagaacacatgcacgtagactccagattcctatttttgagaaagggtatgagaaagatcctgcaattgtagcaaaggaagcaattcaggaggccactcgtaatggatctgatgttgttctcgtcgatacagctggtcggatgcaggataatgaaccactaatgagagccctctcgaagcttatatacctcaacaatccacaccttgtcttatttgtgggagaggcactagttgggaatgatgctgttgatcagttatcaaaattcaatcagaaattg

SEQ ID NO: 194657 - DNA, 438 bp, Gossypium hirsutum
ggtatttttagcgtcgcagtaatgaaagaaaaaaaggaagggaaaaccctacgagttcgcccccttgctatccggccaccgtcattccaccattgaaatcggtttcggatggcccgtagaggaaccggcctacatccgggatgtaaaccccatatcgaaagccagactttagcctcgagggtccgatctcaaccttcggtttcgacgaagaagaaaccgtctccgatggctcggttgaaggtaccgggcgtgtgctggcactaggcgtgagggggggcgtactgggctgtcgaacgggaggcactagccggggtggggctgaagcacttgcatttgacataagcactgtctggttgttgttgctgcgcgagccaaggctgctagggtttttggcctggtttttttttaactttaagccacttgggttaattgggtatt

SEQ ID NO: 194658 - DNA, 554 bp, Gossypium hirsutum
gcccacgcgtccgcccacgcgtccgggcacgcgttcgcccacgcgttcgcactgaacagaacaggcgaaaaattgctggttggaccataatgttattatgtgtaggggcatttggccttacctttgcagcttcaaatgtgtggattccgagtcttattcggttaacatgttgcggagttggtggtgttcttcttctgtctggtttgattgtgctcacctgtatagatcaagatgatgcaaggcataatttcggccataccggaggtttcatatgcccttttgttccacttctaccaattgtctgcattctcatcaatgtctacctgctcatcaatttgggggctgcaacatgggctagggtatcggtgtggcttttgataggggggggtggatatggggtctatgggccatcccacagctctctgctggatgcagtctatgtgcctgcagctcatgcggatgaaatttatcgatcctcgggtgactcgttggtttaattccaccttgaatgcaggaaccattgtggaatttttgtcggacccaagggtgggggg

SEQ ID NO: 194659 - DNA, 234 bp, Gossypium hirsutum
acgcgtacgctgatgtggactagttgaccatcgcccctccgaagtgaaaacatggcgattcaagtcttctcccaccaggtgagaggtctctcctctatctaaagtgtcctttgctagtctatgtgcttgcgagttccctaatctgtgaatatgcgcatagcattaatctcttgagagcaaggcttcttattctggatatcactgataattgctccaatcactgatttgtctggt

SEQ ID NO: 194660 - DNA, 554 bp, Gossypium hirsutum
ggcgaccacgcgggcgatctccataaaaatgactgactgccatcccctatcaactcttatttacactgctctccaacaagctatggcttcagcagcaaatgcagaggtaatgtctctttgtatctttgaataggataacaaaactcttccttcggcatctctggccacaatacctgaggctgaacaatactgactctcattatatgctccattgaaatttatctttataaactcacgatgtgggtgctgccatctctttttttctatgatttttgccgattttcttttttcaaagttagctagctcagtaatgtaattgctggtgaaatttgcaatctcttttccattactgactttttcttcgtgtattctcctgtttcgatctccccatatggctcacaaagccgtagcacaattaaacggctttgccaagggttgaggtgttcttatacccaggtcaccctcggtacagatggtccattgtttcagctcgtgcttcacatcgtggacagcttgtgcttatttatagctttttgtgctgcatattcaccttt

SEQ ID NO: 194661 - DNA, 478 bp, Gossypium hirsutum
tcgcccacgcgtccggtcaatggcaagaggagcgttttatcaagttccatacatgttacaagcaggcaggcacatgatagcagggatgggtggcatgcctttttcatctggtcttcctacaatgccagcagcatctccattttcagaaccagcagacctgccactaatgtctggaactggaaccagaaatcttggcctcccacttcttcaaatgccattttttcattcacagttaccactaccagcagctgccactccaacaatgttcccaaattatcttacagctcgtgatacatataacattgtatccaccacttccattgattgccaacaaatcccaattaccattcagtcccatgacaatagtttcctcggtgaaaattatcttgcctcgtcatcgccagcaaagcttccttctagttatcagtaatcgagagcttgcatggcatcacaatgatgaattgatttcccttgttga

SEQ ID NO: 194662 - DNA, 478 bp, Gossypium hirsutum
cccacgcgtccgcccactcgtccgattgttttcaaaatcattggaagcaataaactgttgtgcccagcatctgtagacaacttgggagcatcaagtatcccatgtaatgcccatgcttattcgagcttatgatgacggggatcctcgtatacaagaagaggctttgagaaagtctctattccttgccaaacagcttgatatgcagggatgatgaagatgattctgctgccaagatgaaggcagctgaggaagccttcgaagcaaaacagaaagtaacaaatagcttgtctgctacctgttctttttttttttatcatgttttataattttgtgacaaattgttcttggtactctgaagatatttatgcaaaattaccctatgattctattgtatttatactgcacgactgcaccatgtatttcttaactagtttgataaattttaaagaaaaaaaaaaaagaaaataaaattacatat

SEQ ID NO: 194663 - DNA, 492 bp, Gossypium hirsutum
tcccacgcgtccgcacgcatctcaaagttctcgacttgaggggatgcaaaagccttggggatgaatcgctggcggcaattggctctctctgtgaattgaagatgttacacttggataattctgatatatccgatgtaggaatagcatacttgcaacatggcattattagctcattggtttcgttatctgttaggggatgcaagaaacttacagataaatgtatctctgttctatttgatggctcttctaaactggagttgcaagagctggacctatctaatcttcctaatctctccgacaatggagttttagctcttgcaaaaagtcggcttccaatttcagaactccgaatgcgacaatgtccactcataggtgacacttccatcatggcactagcctcaatgcaggctgatgacgatagaggacatggcagtaatctgcgattgttggatctttacaattgtggtggcattacacaactttcattccgat

SEQ ID NO: 194664 - DNA, 449 bp, Gossypium hirsutum
ctaggaaattccatgatatcttccaagctgtaatttttatctttgaaggaagatctagtagccatagttttctgtaaaagtccttatagtcggcttgtaaagcataagctctaggatcatcttcagtaccgtccgatagtttataggcgctacgtattgtgtactcacccgacgcttcggcactccagacttggaaatcttcgtgtggtctttctgccagcaggataccgagaatcatctcggtaacatcctccgaaaagttatacattatcaactcctttttccaaagaaaaaaaaaagacggagccagcaaactctacaatagaaaggtacattaggaaaatggctattaataaacaaaaaaacatgggaagaccagtgccgcagctagtctgggtatgatactattgtgagatgtcgactaatagcttgctaaaatcggggggggc

SEQ ID NO: 194665 - DNA, 814 bp, Gossypium hirsutum
cccacgcgtccgcggacgcgtgggcaaatatccgatatcgtctttcccaaaaccagatccaaaagccagcagattcatccaccgatggccgacgaagccaaagccaaaggcaacgccgccttttcctctggtgatttcaacgccgcaatcaaacacttcaccgatgctataaacctttcccccaccaaccacgtcctttactctaaccgatccgctgcgtatgcttctctccatcaatacgaggccgcattgtcggacgccaaaaggaccgttgagcttaaacctgactggtctaaaggttacagcaggctaggcgcggctcacctcggtttgcaccaatatcaagatgctgtttcggcgtataagaagggtctggagattgatcctaataatgaagctttgaagtctggattggctgatgctcaatcggcggcgacggcttcggcttcgcgttctagggctgctccgccacctaatccgtttggtgatgcttttcagggaccggagatgtgggcgaagttgactgctgatccgaccactagggtgttttttcagcagccggattttgttaaggcgatgcaagagattcaaagaaatcctagcaaattgaatgagtatttgcaagatcagagggttatgcaagctttgggtgttttgttgaatgttaattttaaggcacatggtggtggcgatgatatggagattccaaaagcggattcacctccagctccgtctccttcagaccagctaaggaggaagtgaagaaacctgagcccgagcctgaaccaaaaccgatggaaattacagaagaaac

SEQ ID NO: 194666 - DNA, 663 bp, Gossypium hirsutum
cgcccacgcgtccgcagtaccagatggggatggtttaaatgtgtatgtgaatactgatgatccgggggagtcgccgaacatacctagagccgttcttatggctgtggttcgaagatcaaaagcacgtgctaagaaaaactatgccagagctgatgaacttcgccagaagattattgaatcaggataccaggtcatagaccttcaaaacgaagagattcttgctcgaaagtatcggattcgactgaggggtatagatgcacctgagatgtcgatgccgtttggaaaagaagcaaaagaagagttggttaagcttgttcatgggaaatgtttgagagtgcttgtctacggggaagatcactatggtcgttgtgttgcagacatatattgcaataggcattttcgtgcaggaagtaatgctaaagaaaggactcgcatggcattatgtagcctgcgaccaacgggttgaattcgcaacttggcaaaaagaggctcggacaaagaaaaccggcctttgggtacaatcaaacccagagaagccatgggaatggaggaagaagaacaaacatgaaggtaggtaacactgtccttaaggatccataacatcttgagaagtgataaaagtacacagttatcatatttgtgtaaagaaccatgtttgatcca

SEQ ID NO: 194667 - DNA, 560 bp, Gossypium hirsutum
catgtgcctggttatttttgcttcttcaaaggttttttttttttaattaattttctcttggaaggagaggaagatagttaaaaactcaaagaagggcttcaattagatcctcttgcttgctatcattccaaacttggagataagagaaagctgacccctggtttgcttatctgtaggatcccctggggaagctgctggtggtggtttttacaggcatttcaaataccattttctatggttctttggctgttctgattctaattgatgttggaggggttcactgaggattaagctcctcaatcatggaaggtctttgtgaaacaccagaaaatggtaaagtagcagatcccgaccttcggaatattcagtacttgccatcacccctctaccggattatcattactttggtttgatatgagagtcttctatgttagagtcagcaattttcaggttgatgattcaacccccgagtttctgactctcaatcatatccccttagaccctgacacccttttggaagttaatggcattagaagcagcatatactctgatggggtctc

SEQ ID NO: 194668 - DNA, 580 bp, Gossypium hirsutum
cggacgcgtgggtgctgatgtatggtcatgcggggttacgttgttcgtaatgctggttggggcatggcgttttgaggatcctgacgagccgaaagacattcggaggacaatacaaagaattatcaacgtacagtattcaattcctgattttgtccaaatatctcctgagtgtcggcatctgatttcgaggatttttgttgcagatcctacagctagaattacgattccagaaattaaaaatcatgcgtggttcttgagaaatctccctgctgacttgatggatgagaacacaatgggttatcactttgaagagcccgatcaacctatgcagagtattgatacgatcatgcagataattgctgaggccactattccagccgctggagcccatggcttaaaccatttaatggtagacaaccttgatgatgaggacatggatgactttgattctgaatctgagcttgatgtttatagcagcggtgagatcatctatgcaatgtaatatgaagaagaaaacttctctccaatgttgtagttgattcaggcatgtcacagctgcagagggtggtaagatgctggt

SEQ ID NO: 194669 - DNA, 643 bp, Gossypium hirsutum
ccggaattggaggaacgaccccgacccacgcgtgcggtaggaaaaaagcaatacaatgttttctcctctgtgcaaaccctaaagtttatagggttgggcgattttgtttctctgttgataaaaatgggaagaggaaaattcaaggcaaagcccaccggtcaacgccacttctctactcctgaagagatgcttgcgggtacctcatctcgtcctcgcacttttaagcggcaagaagctgcatacaaagaggaagaagaatccgaggaggaatctggacaggagtctggagaagaatccgaagatgaaactgaacaaaagcgcaagggaactcaaggtgttattgaggtcaacaatccgaatttggtgaagccaaagaacttgaaagctagagatctcgatgctggtaaaactaccgaactgtcaaggcgtgaaagggaggaactagaaaagcagagagcccatgaacgatacatgaggctgcaagagcaggggaaaacagaacatgcaagaaaagatttggaacgcctagctcttattcgtcaacagagagaagaagctgctaaaaaacgagaagaagaaaaagctgcgagggagcagaagaaggttgaagctcgaaaatgacattccttcatacaaagcttca

SEQ ID NO: 194670 - DNA, 662 bp, Gossypium hirsutum
cccacgcgtccgcccacgcgtccgccctcgcgtccgggtggagagaaccggagctactgccgtcgccgtcgccatggtgaagtttctgaaacccaacaaggccgtgatcgtcctccaaggccgatacgctgggcgcaaagcggtgatcgttagatccttcgacgatggaacacgtgaccgcccctatggccactgtttggttgcagggataaagaagtacccgagcaaggtcatccgcaaggactccgcgaagaaaaccgccaagaagtcacgcgtcaagtgcttcatcaagctcgtcaattaccagcacctgatgcccacgcgctacaccctcgacgtggacttgaaagacgtggttaccgtcgatgctctccagaccaaggacaagaaagtggccgcttgtaaggcaactaaggagaggtttgaagagaggttcaagactgggaaaaacaggtggttctttactaagctcaggttttaagtgttttattggaacatgttttatgcttaagtagttttatcgaacaattttgaatttaatgacggattttgaatctgtttggataagatatttctgggttattatttttgttattttatggaacgtgatttgctcatttctataagaagtttaagcttttgaactaaaaaaaaaaaaaaac

SEQ ID NO: 194671 - DNA, 553 bp, Gossypium hirsutum
tttcgtccgttaaaaccgaacaaggccgtgatcgtcctccaaggccgatacgccggccgcaaagccgtgatcgttagatccttcgacgaaggcacacgcgaccgcccttacggtcattgtttggtcgccgggacaaagaagtacccgagcaaagtcattcgcaaggacttggccaagaaaacggcgaagaaatcgcgtgtgaaatgcttcgtcaagctagtgaattaccagcacctgatgcccaccccctacaccctcgacgtggatttgaaagacgtggtcaccgccgatgctctccagaccaaggacaagaaagtggcggcttgtaaggccactaaagagaggtttcaggagaggttcaagacggggaagaacaggtggttctttactaaacttaggttttgaatggttcattctaatggtgttaaagctttttatgtagtttctttaacattttggatttgaattttgagtctgttgtgcaatgagatattttctgggtttcttattgatttttctcgtttctgttacaaattcatataattatctgagt

SEQ ID NO: 194672 - DNA, 484 bp, Gossypium hirsutum
ttcccggtcgagcgcaggcgtccgattcatggtttgcatggttcacaagcttggttatgggaactgggaggagttgaaggcagcatgtggtacatcccccttgtttcgatttgattggtttgtgaagtcgcgaacgactcaagagctggctcggagatgtgataccctcatccgattggttgagaaggaaaaccaagaatgtgaccagagggagcgacaagcccgcaaggaaaagaaacttgccaagaacatatcaccatcggagcgcggagggaggcacccaactgagagtcctactcaacaaatgaaacgcatgcagctatcaatggatgattatgcgaattcgcgtaaaaagaggaagtgagcgagcaatgtgaactacaaattttgggtctaaaatctctgatatttatttgggtttaaaagcagaaatatcagaacgaggaattgggctgtagtttgcatttggtatttcatggaactc

SEQ ID NO: 194673 - DNA, 411 bp, Gossypium hirsutum
gcgcccacgcgtccgcccacgcgtccgcccacgcgttcgattctattctagaaccactgatagggcccgggtgtacgtttaggacggaccctatgttcactccggacctgctgacaaccactgcccctctcttcttggttctgccacctacaacttctctccaagtcatggtaactacttcggctaccagtatcaggttccctatcttcactaatttcccaaaaaaatggctaaaagagtgactgtgatcctctcacattaactattagccttaaccttccatgttgcagagtatgaatgaattttgctttaaaaaaccaacataagataaaattgccttgttaattttaatatgttgcacaagaagatattgtgatcctctaatatatgcactgggttgtgatgtatatc

SEQ ID NO: 194674 - DNA, 781 bp, Gossypium hirsutum
gcgcccacgcgtccgttaaagatgaaggcctctagatttattttcagcgagataaatcagagattccccatcctgccattcaccgctcgtgccttggaagagaaaagggctcgtctaggtttagttgaatgtgtgaatcacgatctcttgcagccataccctgttctctatgagaagcctggtgattatgttgctcatatcaaatttacagtattgctaatgccaaatggatcagatcggattacatcccatcccctgcaagaactgcagccaaccaagatgatagacgatcctgaaatcaaggcctggttggctttgggaacaaagacaaagaagaaaggtggtgggaagaagaagaaaggtaagaagggtgataaagctgagggtggagccgagggtgaggccatggatgcatcgacaaattgtggtgcatcataaggaaacaataatgaaaatgtttttgcgcatattttctaatctgccctgttatatattatgatgattgccaaaatttttgatactgtgttcacttgtagcttgttggttatgagttaaaattttaatagagtagttttttattttatggcatgacatccacttggagtcttgtgtttgtgtgtgatgtgcaacttaataggaaattcaattttcttcatttctcttaaaaaaaaaaaattaaaaaccaatttaaaaaaacttcttattttcaaaataatttttttttcttcctctataaagagaggggggtctttctctttgatttttggggtggttttttttg

SEQ ID NO: 194675 - DNA, 454 bp, Gossypium hirsutum
cccacgcgtccgtctaggcctcggaaaatgatggaatttcacaatatcaagataagtcacgttgggcgcgtagttacatatgagggggccagatctgttgtaaatgatctcaagttgctgatggatacatttcaccgtgtggagttcactgggacttggagaagactgttctctcgagttaagaagcatattatatggggagttctaaagtctgtaacaggaatgcagggtaaaaaattcaaagacacggcgcatactcaacagccaagtggaactggtgttcctgatagtgacctcaatctcagtgacaatgaccaggttgagaaacctggcccgtacccgatagcttttcttaagcgtccaactgatggagctggggatggatttggtacttccattacgggcctcttcaacactcaacggcggaaagtccaacaattcgggctacgaacta

SEQ ID NO: 194676 - DNA, 582 bp, Gossypium hirsutum
tctaactcataccaaaccctagcgccaagatttagtgttgaaaatctcgagcacaatggccaccggtgaactcgcctgtacttacgccgcgttgattctccatgacgatggaatctcaatcaccgccgagaagattgctacattggtgaaggcagcgaacttgagcgttgaatcttactggccaagccttttcgccaagctcctcgagaaagtcaacgtcgatgatctcatcaccagcgttggctccggtggtggtgctgcccctgttgccgttgctgctgcttctggtgcagctggcggtggtgctgctgcggcagcccctgctgttgaggagaaaaaggaagaagagaaggaagagagtgatgatgacatgggattcagcttgtttgactagacacaattcttcccagtttggatttttcttttgttttgttgtttgaaattgcggaaaattaggactcgttttaaacattagttgaatttttgtattgggttttgagaacttttgcagagattcaagaagttacatggttaatcttacttggtttaattgatattgccattgaaattgttctttgtttc

SEQ ID NO: 194677 - DNA, 905 bp, Gossypium hirsutum
  unsure (1)..(905): unsure at all n locations
ctgcaattgcatacgcactctctctagatacagaaaaaacaggggaagatgactgaggcagtgataaggaagaagccaggaatggcgagtgtgaaggacatgccacttctccaagatgggcctcctccgggtgggttcgcccccgtcagatacgcccgtcggatacccaacaagggcccaagtgctatggctatctttctagctgcttttggtgccttctcgtatgggatgtaccaagtcggccaagggaacaagatccgcagggcactgaaggaagaaaagtttgctgcacgtagagcaatattgcctgtgcttcaagctgaagaagatgaaagatttgtcaaagagtggaagaagtatctcgagtatgaggcggaagtgatgaaagatgtccctggttggaaagtaggcgaaaatgtatacaattctgggagatggatgccccctgcaacaggtgagctccgccctgaagtttggtgatacctttttttatcaactctttgtccatattgaactgttttcagttcatggatgcttggtcttgttcacattaagcaaaataaaagatattgggaattaagaaacttctgtatggagagtattaccaataccggatatgattctnntcttctttctttaccttctacatcttctgcatggaaggctaacactcgccattgccattgctggcgaaatatagctgggaagccatcccactgttcggatgggggtaataaaggttctcttcttgatgtttgtaacaacttttggtggaatttatntgagtnntgttttaaaaataaaaaataattttaatgtaatatatttaaattatttataatcatattatattatttaaatatataaaaaacttaagggggcccggcccaattccctttggaatg

SEQ ID NO: 194678 - DNA, 485 bp, Gossypium hirsutum
  unsure (1)..(485): unsure at all n locations
ttcccgggntcgaccccacgccccgtccgggaacaatcnnatctgaagaaagggaaatatattggttgtgtctcaagaaagaaagtgctttttccttgggagggtatgtcgttccgccgttccattgatgagtgaagggagggtaggcaaaatggggtaccacccccaggaatcaacccccctgatcactgccgcagtattggcccaggcaccacatctgatgtaaactcgggagaaacttatatccagaactttgagaccagtccaaatgcagatgttcttccttctaaaactaatgaatcatcttatatggtttattccatgggtcagaacttgggatctcgaaacttggaaagtaattttaacttggaaggtgtatctactccacaactggaaattaatggtctgagtagatccgactcattaggggctattggtggggttgctcataattatgagacttcatcaagtttagatcttaatca

SEQ ID NO: 194679 - DNA, 620 bp, Gossypium hirsutum
aattgaagggccgacccaagcgacccgtgcgtccactcgttcgtttacgcgtgggttgaaatttccttcgtgagcttctcaaaattgggacggacgacatgaatgaaggtggagctgggcaaaaataagatagccgagaggatcctacatcttggacattgcaacgagccagcacttgctgttaaggctgccaaaacgattgtgttgttgggactaaacgaacagacaggtaatcccggtttcgtgccaaagcgcatttgctgtaacatgtcatcgaatggaagaaaggctaacatactctaacacagaacaggatatggttttgttgcaccatgaagtggaagtagatttccctgatagcaaacagaccgagcgccataccgcgactttactggaattcgggaaggctaagaatggaaaaatgatatctgctatggcccttactgttggcgttccagtagcaattggagctctgcttttaattgtaaacaagatcaaaacaagaggtgtattgaggcctattgttcctgaagtttatctaccagctttggaaattgctcaagcctatggtatcaaactgatggagaaaaccgagtgaccaccatttctcaagatatcta

SEQ ID NO: 194680 - DNA, 826 bp, Gossypium hirsutum
  unsure (1)..(826): unsure at all n locations
tttttctcttctagtttccttttaatttcaacaatggaatctacagataaaccggcggcggtagcggcgacgacaaccacaccaccatcaacgacggttgctgctagcatatgcccttttaattatgcagctgtagatgttggtcttagggtggtattgtttgctgcagctgtaattgctgtggtggttatggctactagcaagcaaactgaaatggttcctgttccaggcttgcctacttcagttagggttcctttttcggccgagttcactgattcacctgcctttgtatactttatggcagcactgtcaacaacaggcttatacagcatcatcactgctctcgcatcaactttgctcggccgcaagccttcttataccaacaccatctggctcgcctttgcattaatggatgtggtatttgtgggaatcgtcgcctcagccaccggtgccgccggtggcgtcgcatacatcggattaagaggcaacagccacgtccggtgggacaaaatctgcaacgtttacgacgagttctgtcgacatattggaacggcaatcgcattctcgttatttgcggccatcttgttggtgttcctcaccatgttctccaccttcgccctttacaaaaagatccggtgatattttttagaaacacagttcttaattactctcatgtctgaatttggattgcgtgttcatcttttgactatataggtggcaagtgttattgtctgtaaatgatggcttagtttgtattttgttattttcttagattagtttgtatgttttttttattacatactaaattgaattgtttcacattntt

SEQ ID NO: 194681 - DNA, 408 bp, Gossypium hirsutum
gtccggaaataccggggcggaccaagccgtccgaataaggaacattctgctgaggtggttaaagaaaagggcaaccaagcatacaaagataagcaatggcagaaggctattgggttttatactgaggctatcaagcttagtggcaataacgcaacatattatagcaacagggccgcagcatatctagaactaggaagtttcctccaagcagaagcagattgttccaaagctatcagccttgataaaaagaatgtaaaggcatacttacgaagaggcactgctagagagatgcttggttactataaggaggcaattgaggattttagctatgctctggtgcttgaaccaaccaataagagagcagccctttctgcagataggttaaggaaggtatttcagtaagtgaat

SEQ ID NO: 194682 - DNA, 391 bp, Gossypium hirsutum
cccacgcgtccccaagaaacccctagaaggatttggagttcttataccttcaaaggagcagcgaaggggtttaaaaactctcggccctcctttctcatctgtgatgtttcctgatcgtgcacctaataatttgtatctctttacaacctttgttggaggaaaccgaaataaggagctggacaaacgtctcaacacacgaattgaagcatattgttacttccgaccttcagcacttgttgggagtggagggagaaccaacattcttcaatcatttctattggagcaaggcatttcccttatatggccgtaactatgcttcagtctttggagccattgaaaagatggagagagatctccctggatcttttatgcaggtaaccacaaaggggga

SEQ ID NO: 194683 - DNA, 743 bp, Gossypium hirsutum
ccaattcgctgctgcttttagtttccctagaaaatttgcagtttgtttgagttcatcttcaggctccaatggtgtcgtcatctttggcgatgggccttacaatctccttcccgatatcgacgtctcaaagtctctcatgtacaccccactcattctcaatcccgtcagcacctcaagtgcttcctttcaaggtgatccatctgcagactacttcattggagtcaatggcatcaccattaatactaaaccagtgtcattcaacaaaactttgctttccatcaacaaagaaggccaaggcggaaccaagatcagcactgtcactccctacactgtgatgcaaacatcaatcttcagagcagtagttaatgcttttatcaagcaaacttccaaggttgccagggttccagcagtggctcctttcagtgcatgttacaatgctaaaagccttggcagcactcgcgttgggccagcagtgccacaaatcgatctcttgctaccaaacaaagtggtatggagaatatttggagcagactcaatggtgccaggcaacaaggacgtattgtgtttagggtttgtagatggaggactggaacccacaacgtcgatagtgatcggagggcatcaaatagaggacaaccttctgcagatcgatctagctgcatccaagcttgggttcagttcttccctcctcttccgtcgaacaacatgttccaacttcaactttacatcaactgcttaaaggg

SEQ ID NO: 194684 - DNA, 668 bp, Gossypium hirsutum
gaattgtcattgcggacgcatccatttctgacaaagaaaagtccggtggtgaaagacactccaccgacgccaaccaatcagtcaccagaatattgataaagttggtcagagtgctagagtaacttcgcatttcaaagtcaaaacaaataattccactgaagcgataattaagaataccaccaattcccctggaaagtaagagatatggaaggagataaaggaacagtgtgcgtgactggagggaccggttacgttggctcctggttgatcaaactgcttcttgagctcggttactctgttcataccactgttagagctgacccaggtaacaatagtcgccttagcttcctcaccaacctaccaggagcaaatgaggggctgaaaatcttcacagccgatcttaatgatcccgagagttttggtactgccatcgagggatgcaaaggagttttccatgttgctgctcccatggatttccaggacaacgaacccgtagcaggtgtgacccaaaggtcaatcgatggaacattacgcatcttgaagacatgcttgacatctaacacagtgaagaaagttgtatacacttctagtattaccgccgtatatttcaacaagatcaagaatgtcgagatcattgacgatagttattggagtgatgtggatttcat

SEQ ID NO: 194685 - DNA, 371 bp, Gossypium hirsutum
gtcatacctcactcccctcctcccatatttttgttgcgggggaaacccccgcgcccaatatggagatgtagatttaaaagactgactgccatcccacgtggtcggcggagcttaagtgattagcatttcaaatgcacaaggatctaattctactcaaaacagttaaatctttttgtgaaatagctgtgggggaactggagctccaactaaagtacgacacaggttctccggaaaaagtaagcaaccccctatatgagtccacaaaggacctcctgcatagtgctctccgaaagggcatagccaaaattttggaaaaacagaactttggcgctccccgagataatgacccattctgagctagttgataaatt

SEQ ID NO: 194686 - DNA, 689 bp, Gossypium hirsutum
acctcatcggttcaaccaatcaagtgttttcgctggttttcgcggttatacttctcattggattagctagtccgttggcggtcccgatatatgcttttgtaaagagttggcgcttggtcgggttcgaagctgacatggagcgacaacaaccgttgctgaaagaggaaactacgtcgccgccgtcggagacaaaggacatcattaccgaagtggcagcagcagcttcggcggatgacgcgacggtgttagtggaaaagacaaaaccggtgataggagaggagcacacgataatggaggcgatgcagacatgggacttttgggtatcgctcacatcgttcctttgtggggtgggaacaggtatggcggtgataaacaacatggcacagatcgggttagccttgggtcacgccgacgtttctatattcatttcattgaccagtatttggggcttttttggacgaatcattttcggctctgtttccgagtactttctcaagaaagcaggaactcctaggccactttggaatgcagcatctcagatcttgatggcgggtgggcctcctttaaatggcatgggcatggcctggttgccttaacatgggtccaattgttgttggcttgtgttacggagtccgtatagcattgactgtcccggttgcctcagaactattcggtctcaaatactacgg

SEQ ID NO: 194687 - DNA, 894 bp, Gossypium hirsutum
cggagaacaaaaaaaaaaaaaaaatcattatgagcacctaacactaacaggattcaccaaaacagcagagaatggcggccaatttctggacttcttctcactttaaacagcttttggacccggaagaggtggatgtggttcatcaacaagataaagataaaggcatcacgcttgaagaatttaagctgattaagatgcatatggcgaactatataatgaaactggctcaaaatgttaaagtgaggcaaagggttgtagcaactgcagttacgtatatgagacgtgtctataccagaaggagcatgagtgaatacgatcctcgtcttgttgctcctacttgcttatatttggcatcaaaggcagaagaaagcacggtgcaggctcgacttcttgtattttacattaaaaaattatcttctgatgaaaagtatagatatgaaatcaaagacatacttgtaatggaaatgaagatcttagaagcacttaactattatttagttgtatttcatccttaccgcacattatctccgttgttgcaggatgctggcatgaatgatatgagtatgactcaattatcttggggacttgtaaatgacacatacaagatggaccttattcttacacatccgccatatttgattgccttagcttgcatatacattgctagcgtctacagggagaaagatatcacaacttggtttgaagaacttcgcgttgatatgaatgtggtgaaaaacatctccatggagatcctcgacttctatgagaacaaaatgattgcagatgagcgaataagtactgccttcctcaaacttgctcttaagccttagatggttgattgagcgtggaacctgataataccggcatcgaccactgcatgacttgatattattt

SEQ ID NO: 194688 - DNA, 748 bp, Gossypium hirsutum
ctcacgcgtccggtgatgttagagaatcgcaatgtaggaaatggaatgaagagcgtcgggagaagggagaggctgcatataatgatgtgatatttgaggatttagttagaagatttgagaaaccggatagaagaaatcgttgggattcacctttgttcgagctatgggctcataatgatggagtggagagatcttctattgccattgtagatgtggtttcgtatttgacaaaaaaagcagactcgaaatctcgggatgttaagattttgcagccaaccattgccacacaaaatacccggttttcagaggcaaattcactgtatgagatggacagagccacgcaggaggtgattaatgctattgtggaagcacaatcccagtcaattggaggacctcttgccagtatctccattggtcaaggtttaccgaatatcgatatttctagatcggttgggttgccggagctacggacattgcggagaacattcatcaagttaacaggacaaacacgtttgagtggacgacctcccccttccgattccagcagtgcaaagaggatgttcgtagactatctgaattgagaacttggaactattgcttgaaaaagggtaatactactaatacttacctagttttataccttgaacagtgttgtcaaaagtcactaatttattttttacttttactttctccaaagatccattttagattgtctcatacatatctttaaaccttgcattgagagtca

SEQ ID NO: 194689 - DNA, 487 bp, Gossypium hirsutum
ctttatttaattcaagtggctcaaacaaacttcgatcccatctcctatatatataatcgaaacgtaagctaagtgttagccatctccaagatttaagacagcaaaaatagattaaagaagaagaagcttaagaacaaacctcaaaaactctaaagtgtctttcaagctcgcatcaatctagtggggtggaccttttgtagcaaatgactgcactgtcgacaattttcgggattgtataaacgttcgtttgttgccatgggctgtgcacagctcgaagagaagcaaacaattacatggttatgaagatccaagtgttcttgctgctgaaacaccttttacggctagtgaagatagagtccctggaggagctttatttgaaactaaccacttcgataattgcagatggacttattcacaaggaagaattccatttagccctcttcaagaacagaaatcagaggaatctttttgcagacagggtttttga

SEQ ID NO: 194690 - DNA, 809 bp, Gossypium hirsutum
gaccttcctcaagtttcccatcaatggcggctaacaagaattcccatctgggtttctctttaatttctctaatcttcttgttttcaatccccaaatcactctcagcccttgatcctcaacccgcagtttgggatatgcttcccaaatacggtctccctagtgggcttttacccagcacagtcaccgactatgtcctccacgaagatgggaggttcatcgtcacgttgggcagcccttgctacgttcaattcgagtacttggtctactacgataagaccatcaccggaaaactgggttatggttccattactgatttgaaaggtattcaggtgaagcgattcttgttttggctcgatgtcgatgagatcaccgtcgatttgccaccttccggttctatctatttccaagttgggtttatcaacaagaagctcgacgttgaccagttccagaccgtccattcttgccgtgatggggttactggctcttgtaaatattcttggaaatcagttcttcagcttccgatgccaacgaacgatattcagatgctaattactgagtagctgccagccacagagtactgttgctgtatgtgaaaccgataggagtaagcttttatctatcacttgtgtataaaaggaatgggagtgaagtacttgatggttgcagactcaaaaaagatgggtctgtcaatggcttgccaaaatgtgctataagtaaaaaaaaatgtacttatatttgaactctagttttaaagtatgagatgtgaagaacaatgttggccacaacttttgtagtgatattgttatatg

SEQ ID NO: 194691 - DNA, 625 bp, Gossypium hirsutum
ggaaggcccgggccgaccgacgcgtccgccgacccgacaactcacacgtggcttacgttgccaagatgactcatgtaaggggcagcaagcctagagagcgtcaagcagtgaacgactgtatagagaacatgggtgatacaccggaccgacttagccaatccgtgaaggagctcagccatatgcgacgagctggaggtgagggtttcatgttgcacatgagcaacgtgcagacatgggtcaccgctgcactgaccgatgagaatacttgccttgatggcttcgcaggcagagtcatggatggaaacgtcaaagttgcagtgaggcgcagggttgtccatgtcgctcaagttactagcatgctcttgcattagtgaatcgctatgctgcaagacaccgagctgctatacctactgagaagccttagtttcaaccttaaaaaaatctccggtttatgtaaaaaaactgctctgttttccaaaagtaagggttatacctgtcaggattttgtctaaaaggatctagggcctgcttgaattacatgtaactatatcatataatgaatccaagtgtgtgcttgccttgtatgatagtgaagtaattaagtataatggaataatatgctact

SEQ ID NO: 194692 - DNA, 639 bp, Gossypium hirsutum
ggcgccgaagagtttgcgaggaaacagggtgtggagttggtggacaatgaatatttcattacagaagacaatgtggggatgcttaagttagcaaaagaagcaaactcaatcctgttcgattaccgtatcccaaccctcaccacctgcggtggcagcgcagccatggaaaatcaattacaaatgaacggcttaccaatcagtctctacgccccagaaacagtaggttgcgttgtagttgacaaacaaggtcattgcgctgccgctacttccaccggtggattaatgaacaagatgaccggaaggattggtgactcgccgctgattggttcagggacttatgcttgtgacttagtggctgtttcatgtaccggtgaaggtgaagccattatacgaagcactttggctagggaagtagcggcggtgatggaatataaagggttgaatcttcatgaagcggtggattatgtgattaaaactagactagatgaaggcaaagctggtcttattgccgtgtcaaagaatggggaagtggcttgtgggtttaatactactggtatgtttaggggttgtgctactgaagatgggtttatggaagttggtgtctggtaaatttgtgtttggtttagatgctgggttcat

SEQ ID NO: 194693 - DNA, 600 bp, Gossypium hirsutum
atgccgccgaagttcgacccaacccaagtcgtcgacgtattcgtgcgagtcaccggcggtgaagtcggagcagccagttcactcgcacccaaaatcggtcctttgggtctatcccccaagaaaattggtgaagacatcgctaaggaaaccgccaaggaatggaagggcttacgcgtcaccgtcaagcttactgtccagaaccggcaagctaaagtcactgtagtcccatccgccgccgctctggtcatcaaggcgttgaaagagcctgaaagggatcgtaagaagacgaagaatattaagcataatggcaatattagccttgatgatgtgatcgagatcgcgaaagtcatgaagccttgatccatggctaaggacctgagaggaaccgtgaaggagattttgggaacttgtgtttccgttgggtgtacggttgatgggaaagatcccaaagatctgcagcaggagatctctgatggggaaattgatgttcccttggagtaaaaccaaatgaaagaaactgggtttttctcttttgctttacttaattgttttcttttcaaaaatttgtgttttataagttttttaagtagttggtaaaaa

SEQ ID NO: 194694 - DNA, 611 bp, Gossypium hirsutum
tcgttcacgcgtccgctttaaaattaaaaaaaaaagaaaaagaaaaaaagataagcaatcattttccattgctttcctttttcttgttttctggttttctttttccccatttgtttcccattaaaaaaaaaatggcgacaatcaatggtgagactgcaatggaaaaggccttggggtctataggaagctttagtaacaacaacaacaacaaggaggtgtttcttagagcagataagatagatttcaagagctgggatttgcaactggataagcacttgagcagggcctggtctagggacagtgatggttcaactctcacaaagaaggaagaatgggaaattgatttggctaaacttgatataaggtatgttatagctcatgggacttatggcaccgtttaccgtggcgtttatgatacccaagatgttgcagtgaaggtattggactggggggaggatgggattgccacggttgctgaagctgctgctcttcgggcgtcattccgacaagaggttgctgtttggcataagcttgacaacccgaatgttacaaagtttatcggagcttcaatgggaacttccaaccttaaaatcccgacaaaagattgaact

SEQ ID NO: 194695 - DNA, 696 bp, Gossypium hirsutum
tcggaacctagaaagctctttctttggcagtgaaaattgaaaatcgacggcgaaaatgttgaggctggcgtcgaaacggttgcttgggctaacgtcaagggagatcccgtcacggtccgttcagattctgccacgtctttaccacgaaaacgtcatcgaacactacaacaatccccgtaacgtcggttccttcgataagaacgatccgaacgtcggcaccggtttggtcggagctcctgcttgtggcgatgttatgaagcttcaaatcaaaatcgacgaggaatcggggaagattgttgatgcttgctttaaaacattcggttgtggatcggcgattgcgtcttcttctgttgctactgaatgggtgaaggggaaaagcatggacgaggttcttaccattaaaaacacggagattgcgaaacatctatcacttccaccggttaagctgcattgcagtatgcttgcagaagatgctataaaggcggccgtaaaagacatggaacttaaacgtgccaagttgaagggcaattcaagtgctgatgctgctaatgcacccatcgagaaggctgctgatgcctgatgtctgtttatatgcccgattgtaaaaaaagtctgaacggtttgcttacagagagcatgtaaggtaagactaaaataaaaccagggggggacattctgaggacacatgtaatgtta

SEQ ID NO: 194696 - DNA, 662 bp, Gossypium hirsutum
  unsure (1)..(662): unsure at all n locations
agccctaactcagtgaaaatgttgaggatggtgtcgaagaagctgctcgggattccctccccatcgcctcccctgacagactctgccacgtctttaccaccagaatgtcatcgatcactacaacaatcctcgtaacgtcggttccttcgacaagaacgaccccaacgttggtaccggcctggtcggcgctcctgcttgcggtgatgttatgaagttgcaaatcaaaatcgacgaggattcgggcaaaatcgttgatgcttgctttaaaaccttcggttgtggctcggccattgcctcttcttctgttgctactgaatgggtgaaagggaaaagcatggacgaagtgcttactattaaaaacacggagatcgcgaaacatctatcacttcccccagttaagctgcactgcagtatgcttgctgaagatgcaattaaggcagctgtgaaagatgctgaagctaaacgtggcaaaatgaatggtagttccaaggctgctgatgcctgatgtctgtggatttgctaaggaaagaactctggaaactttgattatcatctaatcgtatgtaaagttagaagatagcatgcacccnnnnnnnnnnnnnnnnnnnnnnnnnnnnnnnnnnnnnnnnnnnnnnnnnnnnnnnnnnnnnnnnnnnnnnnnn

SEQ ID NO: 194697 - DNA, 759 bp, Gossypium hirsutum
  unsure (1)..(759): unsure at all n locations
ttaaaaccgaaaaaagggagaaacccaagtatgttgttggagtgaaacactgtctgtttgtgaagttaagaagtccagtgtgtagctgtgtacggaaaaaaaagcatggtttctgcatcagagattgcaacaaagttgaatctggcttcccaccctgaaggtggcttcttttctgaaacttttagggatagttctgttatgctctccacatctcaacttcctcctcaatacaaagtcgatcgtgccgttagcacatctatttacttcttgttaccggctgggagcgtgtctcaccttcaccgtataccctgtgctgagacctggcatttttatttgggagaacctcttacggtcttggagctggatgagaaagatgggcaagtaaaactaacatgtcttggacctgatttgttgaataatcagaaggtgcagtacacagtgcctccaaatgtttggtttggtgcatttccaacaaaagatttcaacatttcgactgatggggcagtgacgaaaaatgatccaagggatgctgagagccattattcacttgtaggatgcacctgtgcacctgctttccagttccaagacttcgagctggcaaaacgatccgagcttgtaactcgcttccccaaacatgagcatctcatttctttactcacttatcctgattgatacaaagcttcacaaattcatctcacaatcatgaaatcggtntattttcccatcttcttgctgtgtagtataaagtaaaaacgatct

SEQ ID NO: 194698 - DNA, 709 bp, Gossypium hirsutum
ttgaaactggatgactctgagtttcgtaatgcattttctcgggcatatgttcgggttaaggaatatgattctaggcgggattcctctcgaagccctagtcgtggccgatctctctcaagaagcagaagccgaagccgaagtagaagccgaagcagaagccgtggtcggagctatagccgaagcaagagccgcagcaagtctccaaaggcaaagccttcgcgcaagtcacctgaaaagtctagatcaaggtctcctcgttcccgctctgcatcaaggtctcgctctttgtcaagatctccttcaaggtccaggtctcctttgccttctcgtcaaaaaggaaggagcaagagtcccaaaagacgcagtgttagcaggagtccaagtgggagcaggagcaggagcaggagcaggagcaagagtgtatccgggtcttgatctgaagctcctctgttgtcttttcactggtgagatgctattgcggggtgtatcaggagctgaagatgcctatgaagcttttatgtttggataaaaattagcatggagtagtgcgtaacttattagagttggatcaactatgctggatttgatcttcattgctatattcataacattggacggtgtgtgtgttattttaactagactgttacattacctggttttggattctttttaaaatgattggattgtgggttgcaaaaagtagcatttt

SEQ ID NO: 194699 - DNA, 886 bp, Gossypium hirsutum
cccacgcgtccgtttttttggacagagtagacaaaccactctttttttcttttgatattgcgggaccgctgaaacgaatatctcgaaattggatatgtaaaaacaaagaatcaaaaatttctgattatacagaaaaaaagatcgagaaaaaagacgaggccaaaagagaaaaatacaaaagagaagagaaaatgaggatagaaatagcagaagcttgggatagtcttttacttgctcaagtaataaggggctccgtgttaataacccaatcaattcttagaaaatatattatattaccttcactgataatagttaaaaacattgcccgtatgttattatttcaatttcctgagtggtctgaggatttaacggattggaatcgagaaatgcatgttaaatgcacttataatggtgttcaattatccgaaaccgaatttccaaaaaactggttaacagacggtattcagataaagatcctatttcctttttgcctgaaaccttggcacagatttaaactacaaccctctcataaagatccaatgaaaaaaaagaaaggtcaaaagaatgatttttgctttttaacagtttggggaatggaaactgaactacctttcggctctcctcgaaaacggcgttcgttttttgagcctatttttaaagaactaaaaaaaaaaataaaaaagggcggcccggaatgttttatagctttaacaattttaaaagaaaaaactaaattgtttcgaaaagcttcaaaagaaacaaaaaaatggatcactcaaagcattctatttctaaaaggaataataaaagaacttttaaaaataaatccaattccattttttgggttgagaagaccatatgaattgggcgaaacttaaaaggattc

SEQ ID NO: 194700 - DNA, 797 bp, Gossypium hirsutum
cccacgcgtccgtgctaatggaccgttcaatcatagaggagctgtgcccatcaatagatcttgcgttggttaaacgcattctctgcaacttcactccagatgaattttgtccagatcctgttccaggagctgtattggaagccttgaatgctgagactattgttgagcggaggttatcaggggacccagccagaagtttcccttatacagctgccctcgttgtcgatactcctccatcctcagcagatgtggctgaaaaagttgcggaggcaggagggaagtcgccactgtctaggaatgcgtcagtggtacagaggaaagggtataccagtgacgaggaactggaggaattgaattctccactttcatcaataattgagaaatttccattgtcaccaacaattgttaccaatggaggagtgaatggaaaccatgaacatgcaggctatggtggtataaatgcaagatacaaactccttcacgaggtatggtccgtgtgagtgtttatgttagatcgttgtgtatatctctcatgttttgtagccatggaaaagtgagggtgaaggtgaaaaaactcaaggtgaaatgtttagatgatcaaagttacaggaaattctcaaacatcgtttattggcttgattgtacagttggaagaacttgctttctttttgttgaatgctgagaggcttgaaatcaactgcaattatgtcttcgatatacagaataaattcttactgttttttttaacggacaatgaacttcattggcaaagtgttcgctggcatctctttgaaagt

SEQ ID NO: 194701 - DNA, 704 bp, Gossypium hirsutum
gtaccgaatcggtgggtcggcccaggcgtacgtttgccttatctactccaacaccctacggacaccaccattgtcgttcacgagtcaggcagtcaccaacggtccaccatcatcgttcaccagtcaggtagtcaccatcggtccaccagtcaatcgctttcaatgaaggataccggcaaccagtaccctttccgcttggttttgggcgactagcatctgcatagtgtaagaatggagtcaggggcgaaggaggaagggaaagtgctgggatacaacagcaaaaaggtgaagaaagtggcgatactttcaacactggccgcactccttgacgatccaattctcgccgatgtccctaagaaacccagcttgtccgatgttgataccctaatcaaccttgaactggggagtgccatgtgtatctctatcttcaaattagatggaacctccttcgatgttgcggtgatgaattcagccacggtgaaagacttgaagctcgcaatcaagaagaaagtgatcgagttagagcaatccaagatgggtcatcgacacatttcatggatgcacgtttgggctaatttctgcctatcacaccacattgggaagctccttgatgatgacgcttcacttcacgattttggcgttcgaaataattatcaggttcattttttaccttatggtggctcaaaaggttctgggagacattc

SEQ ID NO: 194702 - DNA, 552 bp, Gossypium hirsutum
  unsure (1)..(552): unsure at all n locations
taaaccccataatttcctgtaaaattacttagattcggtctgtaatacataatcagtaggatttaaagtagcctcttgtaatagtttataggcgctacgtacagaaaattcgccggataattctccattccaaacttggatgtcttcatgatctaatctagctaacggcatctgtaaaaatttctgagctattttcgcttgaaagtcctaccaaatagagattntgtctgccctacctactctccagcataatcctttttggagtagaccttttgctgtccaaatactccaccaggtttgattaccagaataacacaagcaccacttttcccagacttcagaacaagtaaaaccagaagcgtagagatcaattgataaaacaaaatatagatgaaataagaaaacaagacaaaactcgtgccagcggcatagacctaagcgtgctagggcaacagacaatagtcctcgattttttattctacattcctaattcaatttttaaaaaaaaattgtctaaatcctttgattttattttattcaatttttgatggc

SEQ ID NO: 194703 - DNA, 619 bp, Gossypium hirsutum
gtttttatttgtacgataataaacgcaaagctaatcccgatcccgaactaaaaatgtacattgagaaggcgaggagcatctctggtgtagctgttgaccctaagtttgtgaaattgtcggagaaggacattgtggaaatgatattctttccagtggttaatgaggcttgccgagtggttgcttgaaggtattgcagtgaaagcatctgacattgacattgctgctgttatgggcatgggattcccaccttacaggggaggactcatgttttgggctgattctcttggttctaagtacatttattcgagacttgaggagtggtcgaatttatacggaggatttttcaagccttgcgctttcttggctgaaagagctgccaagggtgctccattgagtgcaccactggagatgggaaaatcaagactataaaactgctttgattgcggtgctcggagatggccattgatgttttggttttaccaatttgctgccattgatagaatgataaagctctcaagatgagcctttcaataatgttgtttcaaatccaaaaaaggatatgagatagggaagcagataagctaaagaatgaaacatgaataataaatgtaatatgaca

SEQ ID NO: 194704 - DNA, 681 bp, Gossypium hirsutum
cgcgcacgcgtacgctcttaaaacctttagtgttgacacacatatacggcaagacctcatgctccaccgatgggggcggtttggccatgaacaaccctacccccgcggcggtcacgcatgttctccataacacgagagatttcccgtcggttaacggcgtggaggacctgctggttatgtctataggcaacggtccctcatgcggaaggccgcaggtccatatcaacggtgaatgttcaacttcttccggcggcgacattgcgcttgacagtgtctccgatacggtggaccagatgttggcgaactctttctgttggaaccgtacagactacgttagaattcaggcaaacggagtggagactgaaaatacggtggggccgaaaacggaggcgatactgaaggaaagaggggttgaatcgttaccgcttggcgggaaacggttactaacggagactaacggagagagaatcgagtgctttgtgcaacgccttgttgctaccggcaaatccagccttcctccaagtccttgcaaggaaatcagccgttagcccacttgccaacggccgctagttcctcttttcttcaaaattacttttttgtccttaatttaactcttttaaccgcttgtaataaacctcctcaacctttttttttttttactctttaactgttccctacttt

SEQ ID NO: 194705 - DNA, 562 bp, Gossypium hirsutum
cggacgcgtgggttcagattactggcccgttctttatcccgtttgaaaagcactttttcacccaaaagtggtggtctcttaaaagcagctaagaacaggcttctttttctcttaaaatatctgcatcaaaaaagtgcttctctctagatggagaagctaaaaaattctccttttcttctgctggaactgcttttggatgaaagggggccaaattcccctgtcttctcccccaaacggctttcccctctgctggttccctaaatgttctttcccctctgctggtgaaattggagctttatacccgatttcttttccccattttcggctttcaaagctctactttctgttctttgttcctcttccgcagcagattttatggaatacgaagatattaactgggcatatgagaatattattgattcagaaaatgtgcattgtccagaaagtgatgatgatgacgaccaccacgatggtgattattacgattaatcaaacaatttcagtggttttaaaatggaattaacaagagatgttatagcttctactttaatgaattcacttt

SEQ ID NO: 194706 - DNA, 403 bp, Gossypium hirsutum
ctaagccagctcctgttatagaaaccttttgttctgatgaactggtttcaccttatgtggggctggatggagttgtaactttagttgactcgaagcatgctatgaagcatttgaatgaagttaaaccaagatttgttgtgaatgaggcagttgaacaggttgcttatgctgaccgtataatcatgaacaggatagagttggtctctgagggtgacttggagaaactgactgataaaatcaagcatattaatagcatggctcaaatcaagagagcgaattttggagtcgttgacttggactttgttttgggagttggtggatatgatcttgacagtattgattcttgcagttaaagtagatgattctcacggtggaaaccatcaccatgactcacatggacacc

SEQ ID NO: 194707 - DNA, 840 bp, Gossypium hirsutum
gagtgatgatggaaccagtgctgaagcgatggctgaaagtggtgctatagaggccctcttagaacttctcagatctcaccagtgtgaggaaacagctgcaagactgctggaagtattactcaataatgtgaagatcagagaaacaaaagtaactaaaactgcaattgtaccactatcccaatatctattggatcctcaaacgccaagctcagcaggcaaggcttttggcaacattggctcttggtgacctttttcagaatgaggcacttgctcgaagtgctgatgctgtttcagcttgtcgtgctcttgttaatgtgcttgaagaccaaccaacagaagaaatgaaagtggtagccatatgtgctctgcagaatcttgtaatgtatagcccgatcaaataagagagcagttgctgaggctggtggtgttcaggttgtattggatctaataggttcaagtgatccagatacatccattcaagctgctatgtttgttaaacttctattttctaacaataccattcaagagtatgcttctagtgaaacagtacgagccataactgctgctattgataaggatttatgggccagtggaactgtcaatgaggagtatctaaaagctctaaattctttatttagcaacttcccacgtttgagagcaactgagcctgcaacacttagcattccccatttggttacatccctcaaaacaggttccgaggcaactcaagaagctgctttggatggtctttttctgctgaggcaagcttggtcagcgtgcccggctgaagtttcaagagctcaatcagttgctgctgcagatgcaattccattgctgcag

SEQ ID NO: 194708 - DNA, 510 bp, Gossypium hirsutum
gccaaacaagccggagcagagggcggattcaccgcaacgggaactggtgcttacaaagcagctgggactcactcttattccaccactggggaacgtggacaatccactggagctcatcagatgtcggcgttgcctggacatgggagtgggcagcctgcagggcaagtggttgagggtactgctgctgcccatcctattgggtcaaatcctggtgtgggaggggccaaatcacataatactcgaggggagggaaatccccatggatatggtactggagggacttacagttaatcccttttttcttgttttgtttgaggaaataagtaatgcacaagatgatgcaggtatgttatgatagaaatcaaatattgagcttagtactgtgaaacgaggtttttgcatgaagcttgagcttaatggttatgataacgcataaacattatcttcaacaaaaatcaactttgaattctgttgggacaaaataaaaaaatgatgggtaggaaattttac

SEQ ID NO: 194709 - DNA, 508 bp, Gossypium hirsutum
cggacgcgtgggtggtggcctctctgagaaacatcatggattgtccaacttctgggggggggatcgaattaatgagatagattcggaggcattgcagatagtaaacatatgctacgagcgagccgaagagatcttacagcagaaccgaaagctgatggatgcagtggttgatgaactggttgagaaaaagagtttaacaaaacaagaattctttggacttgtggaattgcatgggtcacttcagccaatgccacccagtatagttgacattagggttgccaagcgaactcagttccaagaaatgatgatgaaccccaatgtgaaggttacagggagtagttcttcataaaccaccacctatctacttcctattcacatgtataactttgcatcaatcacttccaggtcataccatcaggcattgcttggtataagattttgatttctttttcttgtacttagaaatttcacttattttatctttttaaattaatttacaactttttac

SEQ ID NO: 194710 - DNA, 749 bp, Gossypium hirsutum
cccacgcgtccggcttgaggcaacggaatacatatcaagggacctcctcgggtaagctgctgaatccctcgggtaaaattggtgagcaaggctctcagttgagctcttttgatcctatgcatcatgtccaagaatctgtatcccatgtagctgaaattgttgaaagttcaagaaggaaagctcgatcaatggttgatgcagccttaaaggctatgtcatctttgagaaaaggggggaaaaacattgagaggattgaggatgcaatagattttgtaaataaccagctttcattgaatgagtttagtgcacctgctccgaggtctgcggccccagtagactctgtacgtagtcatgataatctgactgcttgttcatcatatccatttgcaactagtcatatacctgagatgaagctgcaaaacttgtcagaccaagatgaacttaaaatcccttcagaccttatttcgcaatgtgtagccaccttgctcatgatacagaaatgtacagaaagacagttcccaccaggagatgttgcagaggtgctagattcagcagttacaagtttgaagccatgttgttcacaaaatctaccgatttacacagagatacagaaatgtatgggaattattaggaatcagatattggcattagttcccacatcatgaaatcaggtatgttgtaattcctccattgttgttgtaaaaacaatccaacactcttcttatccaattttatttactccttttttt

SEQ ID NO: 194711 - DNA, 550 bp, Gossypium hirsutum
  unsure (1)..(550): unsure at all n locations
gaaaggagccgctgagatgtacgagagtgggacgttcgtcacagtcgatcttcagttcttggtggatgctcacatctgcgtctttgaagatgtttcatcctacggtcgatatctatgcttcaatcacgccattactaaccatgaagatgctattcacctcgcccgtttgcttacaccttctgctccttcccctcctcccagttatgaagaagcttacatgatcatccaacaaagattaagcaacaagaaattgaacaaagtgatggtggattttgagagtgagctgcttttggaggattgatccattcaggctgagggggaaggtccttatgaaacaacagcagaaagaaaatcaattagtttttctttccttccttcctcatccagaagcaaaaattatttacagtttgtcttataattaatgggaattgcaaactattttatccctcaacatgcccccttgcaagggatgtcccaagttttgggctttgctgtagctcgaaagctggatgatatttactgtttaagtaatcctacttnctattgtttc

SEQ ID NO: 194712 - DNA, 442 bp, Gossypium hirsutum
acgtgttatcacaatatgtacaaagaataccgtgacacaaccctcaatggtgctgtagaacagatgtacaccgagatggcgtctcgtcatagggtgaggtttccttgtattcaaatcatcaagacagctaccatcccagcaaaactttgcaagagggacagcaccaagcagttccacaactccaaaatcaaattcccactggtattcaagaaggtcaggccaccaactaggaagctcaagacgacatacaaggcaaccaaacccaacttgtttatgtagttatttttcatggctggtggtggtaggtctaatgccttatagtttgattacttcccttgttagattgagaggggttatcaaattttgaacactctatgtttacttttatagctcttttatgtttcgaagattgtgttttgatgactttactttttaatttaat

SEQ ID NO: 194713 - DNA, 461 bp, Gossypium hirsutum
accacacgttctgtcacgcgtgcgcatggaatgggtgcagattctattgcatatagaatacgaggggaaagaggcatatgccccatccactagtgggtatccaggatcagctcatggtgctttttctggatccaaaaggccttcttcttatatggaatctcatgccggattcgcacaacctgtgaagcacaatgaccaatatctcacagaatgtatcgcacctgcttttcatcatcaaaggcaagcttatgcagggtatcttaagctagatcactatgaaagacaacctcctgctaagtacttcaaacctgctattgggaatgatgccctacctcatgcaggatttcttgagtcttctttcagaaagcaaagttttgatggagccagaaggattgccgagtatagtggcccggacaatcaaaggcctgttcatggatcaggtagtatcaccaatctagata

SEQ ID NO: 194714 - DNA, 1060 bp, Gossypium hirsutum
gcgccacgcgtgcgcaaagaatgaagaactacactatttatgcagcttcaatcaccatccgtatggagggtggattcatgtttattgccttgatatggaagttccactttgcacccttcatggttttaattatcgccattctgaacgatggtacaatcatgacaatttcaaaggacagagtgaaaccatctccacagccagacagctggaaactcaaggagattttctctaccggcattgtgcttggaggttacttaccactaatgactgtgatattcttctgggcaatgaaagacaccaatttcttctcgaacacatttaatgttatatcactgaggcatagtattgatggtgagagagaaatgatggcagctttataccttcaagttagtattgtgagtcaggccctcatttttgtcacaaggtctcgcagctggtcctactttgaacgccctggacttctactagtcagtgcctttctagttgctcagttggtggccactttaatagctgtgtatgcagactgggggtttgcaaggattaaaggtatgggttggggatgggctggtgtaatctggctatacagtgtggtgacttttatcccactggattttatcaaatttgcaatccgctatgttcttagtggaaaggcttgggataaccttttggagaacaagactgccttcactacgaagaaagattacgggaaagaggaaagggaagcacaatgggcagctgcgcagaggactctgcatggccttcaaccacctgaaaccacaagcattttcaatgaaaggagcagttacagggaactttcagaaatcgcagagcaggccaagcgcaaggctgaggttgcaaggctgagggagctgaatacactgaaggggcatgttgaatcagtcgctaagctcaaggggcttgatatcgataacatccagcagcattacaccgtttaaagatggatgctatttcccgtccaagaaaaaaagtagttataatgacgaacaatcacccccgatattaatattaatattggtatcaatcggcttatagtagtagt

SEQ ID NO: 194715 - DNA, 643 bp, Gossypium hirsutum
ggaaaatcatttgacaactatatttccggaggttcgactgaagaggtacttggagatgaggggagctgggggagggccttggaggaggttatgtgctctgcctgcattttgggtaggtgggttatatgatgaggtctcgctccagagtattctagacatgacagcggattggacatgtgaagaaagagaaatgttgagaaacaaggttccaaagactggtcttaagacgccatttcgagatgggttgttgtggcacattgcggaagatgttctaaagttggccaaggatggtttggaaagaaggggcttcaaggaatccgggttcttgaatgaggtggcagaggtggttcgtacaggtgtaacaccaagctgagaagcttttggaattgtataatgggaagtggggacaatctgttgaccctgttttcgaagaactcctctactgagggattttatgtattttcagggctctttttgaggagggaatcaaattcttaaaatcttagtgctgtcatgcaacatctttcgttgtaattcgctaaggaacctcggatcatctttagacttcaaaaacttcctactaccgaatgcttttttttcttttatgtgattttgttagaggaataaacgatgctgtaactga

SEQ ID NO: 194716 - DNA, 521 bp, Gossypium hirsutum
  unsure (1)..(521): unsure at all n locations
cacgcggncgcaaaccgntagctaggcctaggcagcttcctcaatctgatcccaccattcattcaaaacaccaaaagtgttactatcaaagtaatcaattttctttttctagttgatccagatcccagtcaaaactctcacgaagaagaaacatgagtggtgacgagaaaaacccggctgtagttgtagatcaccagcatcatcaatatgggactttccaaggagtatccaactaccctcctccacctcctcctcagcaccatggcccggctattgggtttcctcagcctgttccgccgcctggcctccatgagccctctgctcctcctcctcagtattacccccaaggttatcaaaccgttccaggttatgctgttgctgaaggaagacctgtaagagagcgtcgtctaccatgctgtggcattggttttggatggttcttgtttatcattggtttcttccttggggccatcccctggtacattggattgtttgttctaacttgtgcgaggatagactac

SEQ ID NO: 194717 - DNA, 452 bp, Gossypium hirsutum
acgcgtccgcccacgcgtccgctttgtcctccattttttttctctttgatttttcattgctttacactatttgatcaatcagaagctcaaccctaaaagtttcattagaatgaacagtgttaacctttctcatcaatatcctcgaacatcaagctttacttgtcttaactcttgcttgacagaacactggggtgatttgcccttaaaagtcgatgactctgaggatatgatcatctacaattcccttcatgaagctcttaacttcggttggtcaccgacgacgacgggttcaacggcggcaactacaattaaacctgagccgaaagatgaatcagcagagatcatggaaaacgcgaagccaatggagttgactcaaaaagtggtgaaagggagacattaccgtggagttaggcaaaggccgtgggggaaatttgcggcggagattatggact

SEQ ID NO: 194718 - DNA, 536 bp, Gossypium hirsutum
cccacgcgtccgggctataaaaacggcaacctaaatacgagaagtgtacaaaagttgtacagaaatgagattggaaacaacggtggaagtgtcagcggtgacgggaatagcggtgggttcagaattaggatcccaaccggagttagtatagctcagccagggccaagattttatggaaaaatagatcacaagtacggtgcaaacccaaatcctaaccccaatattaacgcgaattctcactcccagtacagggtaattttggtggggccggctccggatcggcttatgggactaggattttaagagggtttgaggatctgcccgagaaaacggcagcatcagggaagagggaaagggaaagagttgtctgtttcagagatggtgtcagctatttaggtgttttgagatgggttcgcaaggatggatcatattaagacgcatatggccagggagatttagtcgatcaggatgtagatggagatctattggcccctgatgtttttttttgttcagtttttcatattttaaatcattat

SEQ ID NO: 194719 - DNA, 552 bp, Gossypium hirsutum
agcgctgagccggtccggaatctgcccgcactgcgacccacgtcgtaccgatataccacgcagctaaactctttatggatacaacatggttacagcaatcccaccagctaaaatgtggcacggcttgtatccttgatggtgacactctcattccccagatgcttcctcaggcttttaagagtgttgagtacattgaaggcaatggtgaggccggtagcatcaagaaggtcacttttggagaaggaagccaattcaaatacgtgaagcagaaggttgaagcagtagacaaagacaaatttgtgtatatttacagtgtgatcgaaggtgatgcattgatggataagcttgagaagatctcttacgagacgaagttagagacctctccggatgggggatcagtatgcaagactactagtaagtattacaccattggtgagtttgagctcaaggaagagggaatcaaggcaggcaaagaaaaagcattgggaatgttcaaagccattgaagcgtacctgctggcaaattcttacacctattgtaatgatccccata

SEQ ID NO: 194720 - DNA, 438 bp, Gossypium hirsutum
gaatgccacaaggtcttggtgagggattaaagcaacaatgatctcccaactggtccccgatgggagcttagcaagggattaaacgatggtcaaatctccaccagtcaacacctgggggagctttcaatttttgtatacacatcaatgcacaaaatgctcatatatatgctttttaccatgaaactgcgttgtggccttagttttctgatggaactcacactctttattctaaaatgccttgatgacttaaaaatatctgttcaacttcaaggtcctattgcacattccaaaatggaaatatgatggttcagtgcatgcatccttccatggatttgtaagtttaaacagtatgttacttaacaatatgctaactagaaacactatatatgttacttgaaaccctatgtccaatgtatcaaaaatgctatcttgcataac

SEQ ID NO: 194721 - DNA, 423 bp, Gossypium hirsutum
cccacgcgtccgcccacgcgtccgcccacgcgtccgcgcagacagcttcaattctacagaaaagtatatccacagaatgccaaggaatgacggtgatcacaatcgcacaccgtatttcaacagttttgaatatggacaatgtatttgttctcaatcaaggaactctggtggaggaaggtaacccaaatgcgcttctacaagatgaatcctccatattttcaagctttgctaaagcgtctacaatgtaatagatggttgatctccaaactcactaaaactaccactccaaatgtaagttttaagcgggtggaaacttggaagcagctagcacaacttgttttggtagattagttcttcaatcttctgtaacatcaagttggaaaggagagtggaagagagaactacaatcgaatgtttttgttg

SEQ ID NO: 194722 - DNA, 532 bp, Gossypium hirsutum
  unsure (1)..(532): unsure at all n locations
cccacgcgtccgggagtttccttcatggttgataactgctctaccacagcacgattgggatccaggaaatgggccccacggtttgattacatcctaacccaacaggctttggtggctgtcgacaagggcactcccatcaaccaagatcttctcagcaacttcttgtcagacccagtgcatggtgccatcgaagtctgtgctcaattgaggccgacggttgacatttcagtgacccccgatgctgattttgtgcgaccggagttgcgtcaatctggcaattgagtcggtagaatctcagaactggaatgagcaactatatttatagtgtgtttgagccagaacttgctcgtcatgtatgtagtgatgtagtttttgcaatgtcttggggctggctgtctttttatgtttcatttttaaatgttttatataattgaaggaccaaaaccatcagctgttttgagataatgagacttaataatgcatatctagcttgtttttgggttttcgnnnnnnnnnnnnnnnnnnnnnnnnn

SEQ ID NO: 194723 - DNA, 576 bp, Gossypium hirsutum
agaaaacgtaaaccaggtagtggtccatatgttgttattgataatagaaccaagggctcagctagtacccaggaaacatcaagtgatgatggagacagtgacactgaagaaccatctggagctgaggatgctgatgcttcaaacaaggatgaactgaaaaccgtaaagagtgatacagtacaggatccagaaaactctgtaccagctgcaaatgaacagttggaaaggactattgatgaaggtgctcaagcttgctctactttattcatagcaaatctaggtccaaattgcactgaatatgaactgaagcaagttctatccaagtatcctggattcaatatgctcaagattcgggctaaaggaggaatgccagttgcatttgctgattttgagcaagtagaacaagcaacgaaagtgatgacggatcttcagagcagccttttgccttcatcagaccgaggcggcatgcacatagagtatgcaaggtccaagatgaggaagccctaggaaaaaggtaatggagctggctatctgcaaaaaatggtcccaccagttgtattttagaagcagtctcgt

SEQ ID NO: 194724 - DNA, 1064 bp, Gossypium hirsutum
  unsure (1)..(1064): unsure at all n locations
attgctgagtcaggggctaccgagttactgagttcttcatggctgattttcatacatcgactcatagagctaactggatcttctcgcctcaagaactggttgagaaatacaaggctgcaaatcaaagagcaatacaagcactggagaagtatgggacaacacaaatggaagtagacgctgatggttcactatcataccctgaacctattgcaagagataatgctgacaagcattctcgtccaaaacctcttaacattgaagaagaacagttcatgcgagtgttttatgagaacaaacttcgagaagtgtgtagtgcattctactttcctaataaaattcaggcaactgctctaatttatttcaagaggttttacctgcaatggtcggtcatggaacatcatccaaaacatataatgttaacctgtgtgtatgcggcctataagatagaagaaaatcatgtgtcagcagaggagcttggtaaggggatttcacaggatcatcaaatgattctcaattacgagatgatagtgtctcagagtctggaatttgatctcattgtttatgcaccctatcgttcagttgaaggttttgtcaatgacatggagaagcttcacctgtagtacatgaagagacaggtccatcagaggcaaatctcttctcaggcaaatatatactagatccaaatcaagctccgagaaagcaagtaaaaccggtcgctcgacttcagaagattctcaagttcagattgttactcgacgaggatgttcaagtcgaaacaaattcccaaaataattcaattttgtaaactagcaaactcaaaatttgtagttaaatgttgatccttaactttgaaagtaatttaatgaaattttgaaagtaatttaatgaaattcaagcttagttatgctctgaggaagagtccatatttttaagcggtggatcttgtatataaactattttagcagattgcaaattataatgcaacaaatgtaactttttagtnnnaaaaaaaaaaaataaaataaaatttttanntttttaaaaatttaaattttattttaatt

SEQ ID NO: 194725 - DNA, 815 bp, Gossypium hirsutum
gaaagtttctataaggataggtcattggaattcaagccccctaaattttatggagaaccgctaaactgccttaagttgtggagagcatttattaaattgggtggctacgaagtggttactgcatcaaagttatggtggcaagtgggagagtctttccaccccccaaagacctgcacaactgtctcttggacattccgcatattttacgagaaggcactgttagaatatgaaaagtataagagagagaatggtgagattcaacttcctgcttcttcactccctcatgcaagtggtgaaaaggagtcaagtggtttcctagccttggggtcaggtagggcacgcagggatgctgccgctcgtgccatgcagggttggcatgctcaacgttctgttggatatggtgagattaccgagcccattgtgaaggagaaaatcatgggttctgctccgaaacgtgaaagacatctcaaaagtattggtttgcagaagcagaagatgccaataagcgcagagcttgataaatctgcacatgataagcaactgatcactgaaattgttgatgttggaacccctgctgattgggtgaagatcaatgtccgtgaaactcatgattgctttgaggtatatgctctggtccctgggcttctgcgtgaggaggtacgagttcaatcagatcccgctggacgtgtggttatcactggccaaccagagcaagttgacaatccttggggtatcacgccctttaagaaggtagtgaacttaccatcgagaattgatccgcttctgacaactgctgttgtgagcttgcatggtcg

SEQ ID NO: 194726 - DNA, 670 bp, Gossypium hirsutum
cttttggccaaaaactctccactgcttggtgaaccgaatctgggattcctccaatcaggtaaaagctttctcttctctccggggcttcatttgctataacatgagcgtagacattctttgccttaggaataaaatgaaagtcgatctcttggaatctgtcttttttgctttgtatgtctctgataattgctccaatgaccgatttgtctgtatcaatactttggcatttcttaatgatagttttcgaatctcccactacttctattttgtttaaccccaatagaaatccccaattttattgcctgtaatattgcatatacttctgccgtgaacggagttgctatctcggagtgcatgactgccttcggtgcgaggatctccccctcctcgttccgtacgagcaaacctgtagtccatctggacgatagtcggttgaaggctgcgtcaaaataaactgtgatccttccccttctacgcatttattaaccaaagaccacaacaaaatagccggatctactcatctgttcctttatcaaagacctagatggacattgttgaaaaatatgagtgttgtactattcttcttggcgaaatctaggacattgggcatccaccacaaccctcttgagcctaaggttgacaagagatggaatgaagttccaagatattc

SEQ ID NO: 194727 - DNA, 445 bp, Gossypium hirsutum
  unsure (1)..(445): unsure at all n locations
ttttatttcttctttaaccaggctttaacctttgggccaaaacctctccacgcctgggtgatccgaggctgggatgcctccattcagagttgctatctcggagtgcatgactgccttcggtgcgaggatctccccctcctcgttccgtacgagcaaacctgtagtcgatctggacgatagtcggttgaaggctgcctcaaaataaaactgtgatccttccccttctacgtatttgttgagtattttcagctggttgaagaattaaccaaagaccacaacaaaatagccggatctactcatctgttcctttatcaaagacctagatggacattgttgaaaaatatgaagtgtgtactattcttnctggcgaaatctaggacattgggcatccaccacaaccctcttgagcctaaggttgacaagagatggaatgagttccaagata

SEQ ID NO: 194728 - DNA, 1091 bp, Gossypium hirsutum
  unsure (1)..(1091): unsure at all n locations
aaaacatgaagatatatccagctttcctcagtttcctcttcatatccatcttcatttcaccttctgtctcagaccactgcaacgctcaagacaagaaggttcttctcaagatcaaaaaggccttaggcaacccttacctcttggcctcatgggaccccaacactgattgctgtgattggtactgtccggccggccatcccaatacccaccgtgtcgtttccctcaccctgttctccgatgatcgtctcaccggccaaatcccccctgaagttggcgaccttccgtaccttgaaacccttcttttcagacacctccctaacctcaatggaaccatacaacccgccattgccaagctcaagaacctcaagacgcttcgcttgagctggaccaatctttccggtccagtccctaattttcttagccaacttaagaacttgacttacttggacctttcatttaataacctctcgggatctattccaagctccctttcaacactcccaaatctcgaggctttgcatttggatagaaacaagttaactggtaccataccagaatcttttggtatgtttcctagcaaaaacctgtatttgttcatcttgtctcacaataaactttctggtacaatccctgcctctttagccaacatggactttaacaccattgacctgtcgaggaacttgctgaagngtgaccttcagtnngttgtttggcccgaaaaaaacgacattcgaaatcgatctttctggaaacatgttcaatntcgatcatttnaaagtgcagttcccaaggagtttggcaggcttggatctgaatctaacaagaatccgggaagtattctgcnnggtgaacggaactgaggggnncagtcatgaatggttagtaccataagggtgtgcggacaatcccgtggaggggntgtgcnanagtttcgattcttcacgtattttcacaaccgtgcttgtgccgtgctccgctcgacactgcagtaaagtgcgctgcgacatataagntaggctttatatgctaaaagcagtngaagtgnattancccccctgtaattagctaacattcaggaattctttatcaca

SEQ ID NO: 194729 - DNA, 435 bp, Gossypium hirsutum
cccgggcggcccgacgcgtccgaaaagtgagagcatatgttttaggagctttgtaagcatttcaagaaatcaataaaaaatctccctcacggagaatttccagtaaaactattctcaggaggcttatagccaaaatctaggatttaggagattcaaagagtttctgaaaattttcagagatcttttctggaggcgttgatacggcttggtggtaagacccgagaggcggcagtaaattccagtagccatccgcttgaaaagagaaaatcagcagaaacaggagaatcattccaaccaaacaaatccagaagaacgatggaaggtataaaaaacttaaattttatacaggagtcatatctgaggattcagagtaatctgaaatatttatctgaggaacggcagtgccgtactatctctatgataaactatctcgat

SEQ ID NO: 194730 - DNA, 596 bp, Gossypium hirsutum
cccacgtttccttccacgcgtccgcccacgcgtccggttttggttctttcatacaagtttcaagcaagtcctacagtgaagctaagagaagagaaattgaaatccttgaggcggcggtccaatggcggagaaacctcaaccggtcgtcgttcaatactgtcaagtctgcggtttgcccgccgaatactgcgagttcggatccgaattcgataaatgcaagccctggttgatccaaaacgcgcccgacctgtacccggatctcctcaaagaagcgaatgctaaagaagctgataaagttgctgatcaattacaatccactggcatctcttctgctgattcaggtagtagttcagaagctaagcaagaggaagttaaacgtcttcctggtgggaaaattaaaaagaaagagaagaaagaagttgtaattgaaaaggttgtgcggaacaaacgcaaatgtataactactgtaaaaggcctggaactttttggtgtaaaattaagcgatgcttcaaagaaacttggaaagaagtttgccacaggagcctctgttgtaaaggggccaactgacaaggaacagattgatgttcaaggagacc

SEQ ID NO: 194731 - DNA, 601 bp, Gossypium hirsutum
  unsure (1)..(601): unsure at all n locations
gtgagaagtgagttccattggtatgatcagaggtaaataaacacagttttagaatggatgcgttgcaaaagtgttgcaacagttgttggtctccaagatttatccattgtatgcatatgctgcaacaatcgtaagccaagactagcaaggagaactagatttttgaatcgtgatatgttgcaactgtcacaatactctgctgaacggcaagtgcagctctgctctagcaaacaaataattgggttgggttgggttgggtggtttggaattttgaaacacaaaagtgagtgtaaaaagtgtgacgatgattggatttagtaattaagaaaaatagaagaatattgcggattggtgttctatgatggctctgggtcagtctcttttccacaaaaggcaataatagaacaaggattcttgtgacaggaatgctggggtatgaaacagagttgatgattcagtcttgcaaattggatgttntaggtcttcagtggacccactgatgcttttatgtttggtactgctttgtttaaccccagcaatggcatcactgatgtaattaatttttgggaaatttcaaatggtgttttttttataccagctt

SEQ ID NO: 194732 - DNA, 661 bp, Gossypium hirsutum
tttttctggtatcgacatggtaatggtgcctctcagatataaacagttcatggatgatttgacgtttctggttgaatctggggaagtactgatgtccaggatagatgatgccgttgaacgaatattgagagtgaaatttgtttccggtcttttcgaatatcccttctccgatagatctctgctggatatagttggcggcaagctacacagggaactagctcgtgaagcagttcgcaaatccttggttctattaaaaaacggaaagaaccctgaaaatccgtttcttccattagaccgaactgctaaaagaattcttgttgctggctcacacgctgacaatctcgggtaccagtgcggtggttggaccagtacctggtttggaggcagtggtagaataacaattggcaccaccatcttggatgccattagagaatctgcaggagacaaaacagaggtgatctatgatgaatacccctcaacaaacaccttagcagggcagtactcttttgccattgtagttgtaggtgaaccaccttatgccgaaaccttaggcgacaacaaagagcttgtaatcccctttaatgggagtgatataatcagttccgttgctgacaaaatccccacattggcaatcttgatatccggaagacccttggtttta

SEQ ID NO: 194733 - DNA, 459 bp, Gossypium hirsutum
ggctaactctatcctgtttgattatcgtatccctgctgttggcacctgtggagccggtgccgccatggacagtcctttgcagatgaacgggctgccaatcagtgtctacgctccggagacagtcgggtgcgtggtggttgacaagcaagggcgatgtgctgccgccacctccaccggtgggctcatgaacaagatgagtggaaggatcggtgactcgccactaataggatcggggacctacgcatctgagttatgcggggtgtcgtgcaccggcgaaggggaagcaatcatccggagcacactggcgagggaagtgtctgcagtgatggaatacaaagggttgaatctgcatgagtcggtggattatgtcataaagaatacgttagatgaaggcaaagcggggctgatcgcggtgtccaaggacggggaaatgggatgtgggtttaacaccaccgggat

SEQ ID NO: 194734 - DNA, 908 bp, Gossypium hirsutum
cgtctttgttgttaaccagggtgggaccctttgcatgggaaattgctccggttgaagttcctggggggaggggaaagccatccatcatagtcgacaaggatgaaggtctaggaaagtttgatgctgcaaaattgaggaagctgcgaccaagtttcaaggataatggaggcactgttactgctggcaatgcctccagtattagtgatggtgctgctgctttaatcctagtcagtggagaaaaggcacttgagctgggattgcaagtgattgcaaagattgcaggatatgcagatgctgcgcaggcaccagagtttttcacaacagcgccagcccttgcaatacccaaagccatttcaaatgctggcttggatgcttctcaagttgattactacgaaatcaatgaagcctttgctgttgtggctcttgcaaatcagaaactgcttgaccttaatccagagaaggttaatgtgaatggtggagctgtatccttgggacatcctttgggttgcagtggagctcgtatcttggtcacgcttttggggggtttgaagcagaaaaatgggaaatacggagttggtggtgtttgcaatggtggtggaggtgcatctgcactcgttgtagagcttctgtaagcggttttaaagtaggttcgatattgtacgatgttgcgaccatcttctttttcgggggataaattcatgctctgccaaaacacagtttgatgttgtgcaatttttattccgctctcaaataagtcatgtgacgaatggaatgtttaattaggtttgagaagaaatatatgtccaatgtagagtttgattttcctttaaaagctgtctctagcatatggcataaggaaatctttatcattggattctctgaaacttagttacgttgtgattaatttt

SEQ ID NO: 194735 - DNA, 421 bp, Gossypium hirsutum
tgttacgcgtgcgatggagaagccccgactttgcgttaagaaatcagtgaatatcgtaagcgggtgcttggcttacgttagctccggcaacaataacagtcggaataacatcatgtacgagattgaaggctcgtattcgcaacgaaattgcgctgctttcgatgataagaggcgggtagtagccgaaatcaagcggaaagaagctgttggcggtgtcgcctttggaaccgacgtcttccgccttattgttcggccgggatatatcacaacggactccgccatggctctacttatccttctcgatcaaatgttcggatcttctagacgataaaaactttctttttcttcaaccgaaaacatctttggtttctatgaactttctccggtcgtccccagtaaatcatttcacttttgtaagaat

SEQ ID NO: 194736 - DNA, 477 bp, Gossypium hirsutum
cgacaattccacgctcttggccaatcccgccctcacagggaattaataataatatctccctctggcgctgactatgctttccaaaggcattatggatgtgagacttgggctcttattcctctttgtattgggtgcaagctgggtttgcgatgctagacaactagaagccgctccggtagtactctctggtgcatcagttgtgcagacaaaccaggggcaagatgaggaagtagtagaaaacattgtttggaaggacaatgtgtgcacattgtgtgaggaatttgctactgaggcaattaatttcctttcacagaacaagacccagactgagatagttgaggtgcttcacaagagttgctctcgtattccttcttttgagcagcagtgcatcacactggtggactactatgttcctctcttctttgtggaaatctcttcggtacaacctgaagttttgtgtaaagaggtcaacctatg

SEQ ID NO: 194737 - DNA, 520 bp, Gossypium hirsutum
gtttaattttgtgcaaaatctttgatgggattttcttatagtacttctttgctgaaacttgaaggctttggtttctctttcatcctacatgttgtggtttagtttcaagtattgaaacacaaagaatatgacttgttgcattatggatgtgagacttgggctcttattcctctttgtattgggtgcaagctgggtttgcgatgctagacaactagaagccgctccggtagtactctctggtgcatcagttgtgcagacaaaccaggggcaagatgaggaagtagtagaaaacattgtttggaaggacaatgtgtgcacattgtgtgaggaatttgctactgaggcaattaatttcctttcacaaaacaagacccagactgagatagttgaggtgcttcacaagagttgctctcgtattccttcttttgagcagcagtgcatcacactggtggactactatgttcctctcttctttgtggaaatctctttgatacaacctgaagttttgtgtaaagaggta

SEQ ID NO: 194738 - DNA, 376 bp, Gossypium hirsutum
cccacgcgtccgcccacgcgtccgggcggctgaatagtttattgtttacattgcttttcggtccccgctccactatctacagtgtgctgtgtcatggccagcgtgtgagacccaagagtggcagcggtacacacgagagtattggtggccatgcatgcgaggaaggtctgcacgagtgtcctaatatgatttggaggtgttcccagtgcattcaaatggaactgggcttgaagctttctgagtatagcttccaatcattgttctcgttctgatagaaattccgtagtgcatgaatgaatgaatatcaatattttattttgttaggaatgaacgtgccttgggtgagaaacaagcctgttccgataattttattcta

SEQ ID NO: 194739 - DNA, 395 bp, Gossypium hirsutum
atgatagtgacgttcggaagaggatgaaagagatgagtgcccggagtaggaaggctttgatggacggtggatcttcacactccacgttatgtcgttttattgatgatgtcgtgggcaacatgccatgaaacttcagcacattgccattgctattattatttctaaaataatgtattcataatcaagatttagcttagcttatttaatatacttatattagaaatttataaatttggcacgctcattttgtgataaaatgtataatatgttgccatttctcctagtgcaggagaggggtttctttatagaatatttttaataatgttgaggttgttacgagattatgcgtgtaactactcaagtttcatatgtgaaaatttatcttatgaaggaat

SEQ ID NO: 194740 - DNA, 468 bp, Gossypium hirsutum
cggacgcgtgggctgcgagacgcgtttgtgaaacagacacaggggttgccgagcgcgagtggggtggcgttgttcgacacgtgttacgacttgtcgtcgaagagcagcgtgaaggtgccaacggtgtcgctccatttcggggaagggaaatcacttgatttaccggctacaaattatttaatccccgtggactcctcgggaacgttttgcttcgcttttgctcctacgtcgtcgtctatgtctattattgggaacgtgcaacaacaagggacacgtgttagcttcgaccttgctaataatagggttggcttatcttctcataaatgttaacgacactaattaatttaataattaccctttttcttattgctgctgtaatatgagtaacgcttttttctgtttgaaaaggatgggtcccactggaataaattataaaaaaagaagaagaaagtattagggttctgttag

SEQ ID NO: 194741 - DNA, 638 bp, Gossypium hirsutum
ctaagatatcgagccatcccccaaatctaatagtcagtttttacacgatggcggagttgttggacaaggcgaagaactttgtggccgataaggtggccaatatgaagaagcctgaggctagcatcacggatgttgatctgagccatgtaggccgtgacggcatccagtatgacgctaaagtctccgtcaccaacccctatagcgctcctatcccctcctgcgagatctcttacactctcaaaagtgctggcagggtgattgcatccgggaaagtaccagacccgggttcactgaaggcaagcgactcgacgatgttggacgttgcagtgaaggtaccgcatagcgtattggtaagcttgataaaggacatcggtgcagactgggatattgactatgaattggaagtgggactcaccgtggatcttcctatctttggagacctgaccatccctctctcataaaaaggagagatcaagctgcctactttcaaagacctcttcttttgacttatatgcatccctcatgtattctttcttttccgaaacttgaatagtatgttaaaaatacgatatgtgctgtaggttgaatagattgatttacccgatcgaggtaatattgcatctttttttttaataaag

SEQ ID NO: 194742 - DNA, 1216 bp, Gossypium hirsutum
cccaacgcgtccgcccacgcgtgagctgatttttcttggttagcatatgtctcaaaggcctaacgttccccactcttcttcaatagcttttggtctccattctcatctcctggtttccagtgagatgaaccctaattccaactggtcttaatagttccatctctttctttttcttctattgattttttgtttaaacttcttttatttcctttttgaaacaaagtaattgccttgttgatttgcaagcaaattttggtaaagttcttaagtatttgagtttagatcttctttgagagtgccgctatgggagtgaagggttttgttgaaggaggcatagcctcaatcgtggccgggtgttcgacccacccgcttgatttgatcaaagtccgaatgcagctccagggtgaaagccatgttcccaatccggctgttcaagcactccgccctgctttagcctttcagacaaccactactaccacctcctctgctatccacatgcctcctccgccggcgcgtgttggacctgtggccaccgggatcaagatcttccggaccgaaggcgtcgctgctcttttttctggcgtctctgctaccgtcctccgccagaccctctattccaccacccgcatgggactctacgacatcctgaaacagaagtggactgataaagagaccaaaaccatgcctctctcgcggaaaatcaccgccgggctttatcgccggggggatcggcgctgccgttgggaacccagccgacgtggcgatggtgcgaatgcaagctgacggacgcctccccgtatctcaacgtcgtaactataccagcgttgtcgacgccatcactcgcatgaccaaacaagaaggcgtcgacctccttgtggcgcggctcgtcgctgacggtgaatcgtgcgatgttggtgacggcatcgcagcttgcctcctacgatcagatcaaagagatgattttggaaaacgggctgatgaaagatgggctggggacacacgtggcagcgagcttttcagccgggtttgttgcggcagtggcgtccaatcccgttgatgtgataaaaacaagggtgatgaacatgaaggtggaggcagggcaaaagccgccttacgccggcgctttggattgtgctatcaagacggggaagtcggaagggccgatggctttgtataaaggtttatacccacaatctcgagacaagggaccatttac

SEQ ID NO: 194743 - DNA, 454 bp, Gossypium hirsutum
ccaacgccgtccgcccacgcggtccgccattgtacgacaaaagcttcagaattgcaaatggagattctttctcaacgaccatcttctttctcaactttgaatcccaacgctccattgtttgttccgttagcgtatcggacggtggaggatttctctgatgagtggtgggctctcgtccaatcctccccgtgtttccgcgactactggcttcaagaacgtttccacgatccccaaaacgacgacgccgatcttctttttcccgacgatcttgatgccgtctttgacgattacgacgactttttcgttgaccctacctgtgaagggaaggaagaagatactcaaaaggaattggtacccgttggagcattcaaatggcggaaggggcgagttgtgagcgagtcaactaggtttcttgagaaagcgcccaagatcgtgaatgtgaaagtgagtccga

SEQ ID NO: 194744 - DNA, 409 bp, Gossypium hirsutum
tctggtcgtgtaggaataatgactgagatggctccagtgtggttatgttggtgtgagtcccaaatgcattctaggctttaatatgaatcatggagaagaaatatctctccgtcttcgaaccgatgacctcaaaggattcaggaaatatgagagcataaaaaaaactcttctacatgaacttgctcatatggtattttctgaacatgattcaaattttcatgcccttgataaacagttgaatgaagaagctgctagcctagactggaccaaatctaggggccacgctttaagtggaatcagacactcggagaactatgaagaatattatgttgaagatggcagaaattctcagaaggttggtggaaatatgtcaactttgctggaaaatgcccgtgcgtcttctgtagct

SEQ ID NO: 194745 - DNA, 541 bp, Gossypium hirsutum
atatttcctcgcttccgcctaggttttccttcgcagaactctctctctaagcttcttttctgcttctcgagtctcgaccttccgaaacacggctctgcatcgtcggcggcgttgcagaaaggaagagaaagaagaagctatgatggccgcacctgaagctcctctccgctatgttggcatccctcgccaatctgctgcttttcgcctcatgaagcaaatgggatgggaagaaggagaagggcttgggaaagataaacaagggatcaaaagttacgttagaattaaaaacaaacaggacacaattggggttggattggaaaagccgaatccgtgggctttcgatacagctcagtttgatagtattctcaagagattgaaagtgcaagcagcacaaatcaatgatgaagtgaagggcaagttgtcaaggctacccgaccacagggaagatataagaaaagagagagagggaaaattgtgcaggcatattcttcagaggatcttgaaggaattctggccaaaagggttgaggagtcatcaccag

SEQ ID NO: 194746 - DNA, 554 bp, Gossypium hirsutum
cggacgcgtgggcggacgcgtgggcggacgcgtgggcggacgcgtgggcggacgcgtgggtcatattcgaaatcttcgaaatctctctctaacatcttaacatacgattttggttgtgtgggagagagagatggacgcccttgacaacgtggtagatcctttgagagacttcgccaaggacagcgtccgcctcgtcaagcgttgtcacaagcctgatcgtaaagagttcacgaaggtggctttccgtacagcgatcggtttcgtagtgatgggattcgtcggattcttcgtcaagctcatctttattcctattaacaacatcatcgttggctccgcttaggaattgcaggctcgtagaaattggtgggggatatgaccagttggcgtagttgcagattctcatagaaaatgaatgttagaatgcagcagttgggggctgtccctcttcccttctcattttacattttattagttgaaccaatagtcttgaatctaaagtaaactctcttggaatttctttgagcaatttgtaatagattatggttaatttttgc

SEQ ID NO: 194747 - DNA, 580 bp, Gossypium hirsutum
tatctgttcacttagtgcttgccttgttgctgttgtttgttcttcagaacaaccaccgttcagacccctcggaatccctgccggtgatggtgcttcagttattctaaaatccgttctcgaaagagccactcaagtcttaactcatccatccggaaatttcccaatgcctcattacacattctggagagcatcgtttgatgaattcttcactctcctcaccaaatactgtgtcaccaaatacgagtcgataatacaatcgatacacaaccagtctctaccaaccacagaagtaattggttcagaagctataagacgtgaaatgccttgcgagctcttacgtgctagtctccctcacaccaatgaagctcaaagaaagcttttaatggacttctcgcaatgttctgtcccggataacggatccaactcgcctgccggaagtaatagccaaataaactctgaatcagtaaggggctaacctaaaagaaaaaaacgttttagaggtcttttacactatgggttcttggttgaatggcacccctttttttattttttattatatcattttctttcttgtcctttt

SEQ ID NO: 194748 - DNA, 414 bp, Gossypium hirsutum
cacgttgtgcttccaatagcttccaagtttgctcccgactttactataatatcagctggatttgatgctgctcgtggtgatcctttaggatgctgtgatgtgactcctgctggttatacacagatgacacacatgttgagtaccctctcgggtggaaagttgctagttgtacttgagggcggctacaacctccgttcgatatcatcttctgctactgcagtgattaaggtacttttgggtgaaagtcgcgagtgtgaaccagagaacatcgttccttctaaagctggcctgcttacggtggtggaagtcctgaagattcacatgaagtactggccaaatctaagttcaagcttcgaacaactgcagttgcaacgggcaatgtattctgtggagaagaaacaaaaacaagttaaa

SEQ ID NO: 194749 - DNA, 358 bp, Gossypium hirsutum
cccacgcgtccgcccacgcgtgacgcccacgcgtccgcccacgcgtgcgagttactcattgagtgtaaccctatacccatcaatagatattaatttgttgtcatccattagtagtctaaattaatgcatataaataatgtcagattgtctaatgcacgcacgacagaatctatatcccattgcttcatgtgtttttgaaaaaagagttattgcgctcattttgtcccaaataaaattttactcctttgtccgaggattacttatttattttgtagtataactttcaaaacaccgagtatctgctgtctgtgatgcaattttgtgcccaaaccatcatttatgctgagcgatcttactt

SEQ ID NO: 194750 - DNA, 670 bp, Gossypium hirsutum
cccacgcgtccgaaaacatttcagagtaattgacattcatattgcaagaccttccactcaggaacgggctccatcagcgaagccggtgcctacaaaggggagagaatcaaggctttccactctgacgactccgcaaaaggagaacggagggtcttctaaagttagtagtatggagacaagaatgctaaagctgctccatcttattctggcttgaaaagtgatgaaagacctgagagaagaaaggagctctccaagaaactggaaggaaaatccaatggaagggaagccgaaaggaaaaatctccagacaaaatcaaaggataacagagacgcagagatcaaaaaattaaggcagagccttaattttaaagctacaccactgcctggtttttatcatggacagagaacatcaaaaagtcctctcgataagataggttccaagagtgacatccattggcaacctggcttcctcgggtaaacgaattgggcttcatctacaactagtgggaggacatatcaagaattttttaaaaatgaaaaacagtaggaaaagacggaagcataagaagtacaacagctttggaggctaactacattgctgggcaaaaagaaaaggtctatctgaattctgaaggcatgtttttcattgaggacacatgccatgatattac

SEQ ID NO: 194751 - DNA, 396 bp, Gossypium hirsutum
  unsure (1)..(396): unsure at all n locations
gttcgcatgatgaatgaagctcagttccaaaaccgacccatggttttccctcaactcgtggcgaccgacttgtctcggttccaagttcagcctcattggcaaggtcttagccctcgagcacagccgagacagaagcaggattcacttcctccggatcttaatatcgggttccaatctccagggtcaccggtgaaacaatcggcaggtgttttggttgattcccagcagccagatctggctttgcagctttgagttgctgtgacggatttatctattttttctttcttggagctatgtatttattacaagtttaagaaagttttaattttgttttcaattgaaacttgaaantgattaggctgtgctttaattttaagctgctgccattttattttt

SEQ ID NO: 194752 - DNA, 723 bp, Gossypium hirsutum
aagaggggaaaattagacaacatgtctaagatgaggtacgatcgtaagcctccgcttgctaaatcgcctatccgcgtacgaccccgtcgagtcctccgttccaactcaacctccctgcaaaccccgccaggttctttgacgaaatcccaaaagccggttcgtgcttggacaggcgaagaatcagtgattcgacccgaatatcggtccatttcttgcgagttacaggctttggctacgatggttaaacgtgaagttgggaatggggaaaaggaaaacgctggttttggtgagaccagtgtgggcgccaagtcgactagtctgtttgagagaggcaggttctacgaggagtactcggcgaggagaaacgagaggcttaagagaaggaaaggcgaaaccgggacggagtcaaagagtgggcaccatcatggacttggtgtaaacattgaatcatcaaagaaaagagagtcgaagaagctggagagctttaggaaatcggtgtctgctgcttattccgtggagaggaatgagagtcagactcccaggtatctgctccgaagcatgagcaaggctaatgagaataagtataagaagcctccccttgctgtcaataattacaactcgtctatgtctgtgacaggcactgcaagcaaaactactactagacgagttggtagaaaggtctgaaaattgaaaactggatttctattaagattttgttttttt

SEQ ID NO: 194753 - DNA, 498 bp, Gossypium hirsutum
gatcgcgagcgcccacgcgtccgctcctgatatttctggtaccaccattgatgcgcacttgcgatacgctgccggagtcaagggatttgcttgaaggtacttcaaaggtgacgacttttctgaacagaactacattgccaaagcaggggagctcgctcctcaataccgatgatttcgtggtttcttcgtccatgaaagagagtccaaatgtgttcggttggtagttaaacgtagctactattgaaataatgtgatgtttagtatgttgcaaataatgtgccatctatattgtgctttgaacttgatgttacgttgtaatgagttcagcttttgatggttcatctttttatgagtggtggttgtcatccaatgaaggagagcctatatgtaccctttcgtttttcttcaagtatcttcatactaataaatttttgcaaaaattttgaaatacgaatatcctaaatatatataaattaaaacgtgggttaaatggttttt

SEQ ID NO: 194754 - DNA, 567 bp, Gossypium hirsutum
  unsure (1)..(567): unsure at all n locations
cgcccacgccgtccgggttcgcaaggattggtatctacacttagggaggaggtcccagaaaatgaagcgcgggatcatntgagttcaaaggggtgaggaccaattcantttccacacggaggcgtagatggaaaggaaatgatgntgtccatcnagcatctagtgcagagaanttgttagcttttctgttaagaggcataaggagtggtatgctatagtgacattgcaaatggttagaacatggatcggtttgagttgaaaagtgacagtttatcagatgtagatgatggcaggaatagtatagtcaaattttgcacttgttgtgaaggtaatagtgtacgatgtccactatatataacataaattatgtaaaatccgaatcaatcagggtgtccttttgtcgcgtgtacggaggtagtcataccttcgtattgtgatatgtgaatgtaagttaaatacataatcaaatgtttcaattaagcaatatcgttggtnnnnnnnnnnnnnnnnnnnnnnnnnnnnnnnnnnnnnnnnnnnnnnnnnnnnnnnnnnnnnnnnnnnnnnnnn

SEQ ID NO: 194755 - DNA, 750 bp, Gossypium hirsutum
  unsure (1)..(750): unsure at all n locations
tacgcctgcagtaccggtccgggaatccgtgcggtgcgatgcccttctataaaaaagaagaagaaaaaaacagaggaaagaacggacttttggaggaacaactggggctccacctacaagaataggacttgctggtttggctgttatgggccaaaatcttgctcttaacattgccgagaaaggcttccccatttctgtttacaacagaactacctccaaagtcgatgagactgttgaaagagctaaacaggaaggggatcttcctttatttggtttccatgatcctgaatcttttgttcagtcgatccagaaacctagagtgataatcatgcttgttaaggcaggggcccctgttgaccaaaccattaagactctctctgcatacttggagaaaggtgattgtatcatcgatgggtggcaacgagtggtatgaaaacactgagagacgacagaaagagatgtcggcactgggtttgttataccttgggatgggagtttcaggtggtgaacgaaggtgcacgaaatggtccctctttaatgcctggagggtcctttgaagcttacaaatacattgaagacattcttcttaaagttgccgctcaagttcctgatagccgacctgtgggactacatgggaaaagtgatcggtnatntgtcagatgtcactatggattgatattgatagcactgatgctgagcttatgagtctaattgttgaaaatatcatgaaaacatacgtgttctgaagga

SEQ ID NO: 194756 - DNA, 507 bp, Gossypium hirsutum
ctgagactggccaaatttgaccaattggggctctgaattttagttccttttttttttcccctcttttatacagtcatctgctccaattctgaatacccattgtctagtttgtttaaagatcagatctttgatacatcctcggattttttttgggtcttttttctctatcaaaacagagaagatcgaaagggagaaacatggctccacctacaaggatagggcttgctggtttggctgttatgggccaaaatcttgcacttaacattgctgagaaaggctttcccatttctgtttataacagaactacctctaaagtcgatgagactgttgaaagagctaaaaaggagggagatcttcctgtatatggtttccatgatcctgaatcttttgttcagtcaatccagaaacctagagtggtaatcatgcttgttaaggcaggggcccctgttgaccaaaccattaagactctctctgcatacttggagaaaggtgattgtatcatcgatg

SEQ ID NO: 194757 - DNA, 665 bp, Gossypium hirsutum
aaagaagcaaacgcaaaacaaacaatggctgatttgtttataggcgtatcacagtcgtctcttcttcatcttcaaccaaagcttgcaagttttctaaggcttaccggtggcccaagatttgccgtagctagcaaccgtcagcttcatttcagacggttgactgtaactggggtcgtatcttctgattccaaagcacccacgactgttaccagcactgtgggttctgaaaaaggaggaatcgacatcgaagtagacacaggaaacggcggaggagataaatttgacgacagaagcggcggcggaggagacggtggggataacagcggcggcggaggcgatagtgagagtaaaggagaaggggagttttcggacgacggtggtaagaaaaagatggctttgtctatgtctcagaagttgacccttggatatgctgcacttgttggagtgggtggtgttatgggctatgtgaagagtcgcagccagaaatcgcttgcggcaggaggattgtcagctgcggtgctctattatgtttatactcagcttcccacaaatccagtttttgcctcatccgttgggcttggtatatctgctgcacttttgggagtgatgggttcccgtttcaagaggtcgggaaaagtctttcccgggggggttgtatcactcgt

SEQ ID NO: 194758 - DNA, 607 bp, Gossypium hirsutum
caacatatggaaggagcaactctgattttaacgaccacgaaaaccaagaaaatcagcttccccctatgaataatgtcgataaatcagagttgagcaagagtttcagtaaaggacatagggttgcctgagaagcctaaagttgaaacaggtttcaaagaaaacatggttcctttgaaggaagaagttcataactggactgcaactgcggagtgtaatccacttttggggagtgaaaacaatgaacccaagccaccaatcaccatagaaggtgatcaccctttcaacaacaatgggaatcaagcttcttcaccgatgcttcgatgttgagaggtacactatgcagattctgttcttattatacactctttgagtgctatcttttaagcagctatatggtgttttgagcatcttatgcgcaagtaaaaaacttaattacttgttcttgagattatatatatatatatatatataaactgaaatttgtatgtttattagttcatcaaatctacttgacaagaatgtctgtggtatgtagagattaaatggtggcttgtagcatatgatatatatatatgatttatatatctacattagcatcttttgtttc

SEQ ID NO: 194759 - DNA, 249 bp, Gossypium hirsutum
gaaacaacggcccttttcttccctattgctttttctttccctgcctctacaatatggggttgctgtgaaatcactttgtgctttacagtgggatttagtgatcattttctttcttttcccccctactttttcaaggttttccagttttcaagtcttgcaagtgtaatctattgaacgaacttgagaacagattctgtttcttattaatctgatgttttacatgtttcactgcccacattaaaaataatt

SEQ ID NO: 194760 - DNA, 585 bp, Gossypium hirsutum
  unsure (1)..(585): unsure at all n locations
gacccacgcgttcgcggagaaggaaaagaagaaacatcagaccaaggatgtagagaatgctgaagttggagagaagaaaaagaaaaagagaaagcacgaagaacaagaagataaagaatctgaagtgcagaccacagaagagaaaaagaagaagaagaagaagactgaagattgagaaaaatcaaaggccttacgtggtgattgactaccagacaaattttgggtccgaaaatagaatagaacttatgcttgtaaaatgtggtattgtgttgggttaatcatctgggaatatcaaaacaaattttttgttatccttttaatttgagtttaatatcttcttgcaatgatatgggaatgggtaaccaagagcctccaattggttactcttgaaggaatgagatgtttagcttaccacttttttttcttgtgtactgtcaaagacacttgtgatgtttggagtacaaattctagaatgttcaattcctttcaagatccttgggcngcaccacgagtaatcaaacactagacttgtgcttcatcagaaccagctgctgcctgcttctgctcccgcaccaaacacaaata

SEQ ID NO: 194761 - DNA, 485 bp, Gossypium hirsutum
cctacgcgtccggttcgtggggcacaggggactggtggtggcaatgatggtagtagtagtggtcttgccgataatgcgcagaggtctgccggggataatcgaacggtggagaggagtttcaggatatcgcttccttggccatttagggctcgtgggtcgggttcaggatcaggcgataatgcggagaccaggcaagaagatctggattgagaactattgaaatacaacaaaaagtatcaggatttcttgtataagacatgatgatagaacagcttgtttcaaagttgggatatgcagagttatatgtaaacatgaagaactaagattagtttggtaacctttttaaggaagtgctagttttggtattttaatattacatgcccatctgattttatttttttatatatataacagatttgcttggctatgacacaacttcatttactcttgtacaattgatagattcactggtcgaatcttaattc

SEQ ID NO: 194762 - DNA, 326 bp, Gossypium hirsutum
caaattgtaggtatagttcttatatgtacaacaaagctgctggatttttgaaaattaagcggaacccatttcttgttgtggatgttatcaaagcttacaggatggaaaagtgttcagttaaccttaaaatgtttaaggttgttttgaatttgtgtaaagaagctaatattgccgatgaagctttgttgctattgaggaaaatgcctgaatttaatttacgtccggatactactgcttataatgtggttatcaggctgctttgtgagaaaggggatatggatatggctcataaattgatgaaagaaatttgcttgattgatctttat

SEQ ID NO: 194763 - DNA, 829 bp, Gossypium hirsutum
cccacgcgtccgaatagatataaatcttgcatttatgtatataaccaaatggtgtctggagcaagaaagaccgaactgttcagggggtgtacatataaagctggaaaggaaggttactgtaatggaccaggcacaatagagcttgcccctcacaacgctttgcacacatggatcgggagcagcttaaaccctggaagggaagatatgggtaagttttactctgcagcaaaggaccgtattttctacgcacaccatgcaaacatagatcgcctatgggaagtttggagggaagctcataaacaacaattggatatcaaagatccagattggctcgactctttcttttacttctatgatgagaatttgaggctcgtgagggttaaagtcggtgatgttgtggatacaatcaaactgggttattcttatgaacaggttcaccgtccgtggttgaatatgcgtcccaagccttcttacccaccaaaactagctcgtcaaacgttgaaaacgaaagagaagaacaaattagaaatgttgtcaaggacccatgtttcgtcctccgagttggatactcatggtcgagctctggacgctagcttgacagtaaaggttaggaaccattggaggaagatggagaaacaacaggataaggtcctggttgtgcccgggattgaagtgaagggagatgcatatgttaagtttgatgtgtgtgttaacttgattgatcagttcaagaatccacccaaagttcagggaatttgcggggacctcccctcccattcccggcggcggaccccggatgaatatcattgaccttaaacttggaattttc

SEQ ID NO: 194764 - DNA, 901 bp, Gossypium hirsutum
  unsure (1)..(901): unsure at all n locations
cccacgcgtccgcccacgcgtncgggaagaacttcaccgtgaaacatgccacactgatcaaaagcacttcatcagtatgattgcctgagagctaacaaagcaacatcagcgtggggattggaggctcgagtacccttcttagacatagaatttatcaacgttgccatgtctatagaccctgaatcaaagatgatcaaaaaggatcaaggacgcatcgagaaatggattcttagaaaggcctttgacgatgaagagcgtccatatttgccaaagcacatcctctaccgacaaaaagaacaatttagcgatggcgttggttatagttggatcgatggtcttaaggcgcatgctgccaaaaatgttactgataagatgatgcttaatgcttcttacatatttcctcacaacacgccaacgacaaaagaagcatattactacaggatgatattcgagagattcttccctcagaactcggctagattgacagtccctggaggagctagcgtggcatgcagcactgctaaagctgttgagtgggatgttgtctggaagaacaaccttgatccttcagggagggctgccctgggagtccatctctcggcttacgatgcagaggctcctctcatcagcaacgtgccatccaaggttatcgatagtataccacggatggtggaagttccaggagttgccatacacacttagtacctgcctgcctactggaaagggatcggaatcgatgaaatcaataagtgatagtagtatgttgtggcatattcatcaaaattctcatttactaaaatactttatgattgtttggatcttccattcttgttgttgcttatgtttgaatgtgtgtaactgttatcgtggaagtcaatcagatatttgaatgtttgtaacc

SEQ ID NO: 194765 - DNA, 651 bp, Gossypium hirsutum
cccacgcgtccgggccagcaccagaggcagctccaaaatggttcagcggctcacttaccgcacgcgtcacagctacgccaccaagtccaaccagcaccgcgtcgtcaaaaccccaggagggaagcttgtttatcaaacgacaaagaaaagagctagtggacctaaatgtcctgttaccggcaagaggattcaaggaattcctcatttgaggcctgctgagtataaaaggtctaggttgcctagaaaccgtaggactgtgaaccgtgcttatggtggagttctatctggaagtgctgttcgagaaaggatcataagggccttcttggtggaagagcaaaagattgtgaagaaggtactgaagattcagaagacaaaggaaaagcaatcatccaagtgagagctaggatttgctaatggattgatagtgaatcttggaatagtagtttgaggggatttaagatttggatttatgtttttacatttgttatgaatcatgttctactttttcatcttgtcgacaaatcaactttcatgtcaaaattttggttttggaacactcactttgtttgctcttctccaaatttggtatttccactgaatgtgcaatgttgcctggttatgcgattgcccccaaaaaaaaaaaacactttt

SEQ ID NO: 194766 - DNA, 648 bp, Gossypium hirsutum
cccacgcgtccgaacttcttctctccaatctctctatctttcatccccattcctccatggctcaacgtccctccctcttctctcaaaacccaactcttctccccctcaccaacccctccgatccccggcttttctccctccaatcagggcaatgaaatccatgcaaggccaggtcgtttgtgccacaaatgacaagacagtggcagtggaagtggtgcgtttagccccgcatcccaagtacaagaggcgtgttaggaagaagaagaagtttcaggctcacgacccagataaccaattcaaagttggcgattatgtgcagcttgagaagagccggcctattagcaagaccaagactttcattgcggtggctgtaccaagtaggaatgggaagcaggagaaggaggaggcaggggagcttgggattccattggagtctaaacagactcaagagcagccgcaggcttagtgttaagcccttcgcgtgggctccttttgttgttggtaaatttgtgatcttttgcaagggatttcactgtttcaaaaactgcttttccttaatgtaataattgtcgtttttcaagggtctggattgttttttgagtttgtcatgacattcattctctgctctatttttgattggtttatttg

SEQ ID NO: 194767 - DNA, 770 bp, Gossypium hirsutum
atgtggatgaagatatttacgaataatgatgtagtaagattttacaattttttaattatatgtaatattataattttaatctttgtcatgttagggggttaactattttatatgtactactattgttgtaatttgttactaaaactttaattattttatgtgtattgcaggaaaaatgcgtagaagaagagtacgagatttaagtattgtccagaatactccaaattcggaagaaagaaatagtgaatagcagacagttgttggatctttgaatgtgccggagacacttgatgagcctgaagaatttcaaactgaaagtggtgggacgcgcaaaggtcgaggacgtacgctgcttaaagatttatacgacttaaatcctgtcgagcgtgtcaaagtaagtagaaatagtcatggtcagcctgttggatctgaagctcgacttttagcaggctatttgggcattttagcacgaaatgccaatatgttgcccatcaactacgaatcatggcatcacatgcctgatagcaacaaaaatcaggctctcgataatattaaggagagatttgctttagaggtctccgatgactatatcaagaaaggcattgggtaaaaaatggagagaccataaaagcactttgagaaaactatattttaagaaagacataagcctcgaggaaaaattgagagatgtcccgccgggaatgctgaggtaccaatgggaaagatgcggttagattctggaattaaaagaaagggagagaccgtgagcg

SEQ ID NO: 194768 - DNA, 1200 bp, Gossypium hirsutum
ggaaaaccaccaagtgaaccaaggttgcaggatgttaactactatggttcctcagggatgccaaatatggaagagaaatctgtttcagtggtttctgatgtaaattctggtagtggtttgattgaatactcttcaagtagtagtaggtcagctagaagtaggacagagaaggagccaattggtaggagcaaaccacataatagggtggccatctttcgggatcgcgagactgaccgcaaggaccctgattatgacaggaactatgataggtacatgcaaagatttgatcctgggtttgggttcaatagtggtccatacacaatgcaacctatgtacacccctgcaatttactacaacaccgaatttccacaacttggatccactcatcggcctcaaatagctactgaacaccaacctcggcctctcccacaacatatacctgggccctgggtcgctccaccaaccgctacaggaatcagttatggtcatcctgaaacaatgatgcctccttttaatccaaatcatgttggagcacgctccacatctgccatatatctgcattcttctcagtatcctcttcagcgtcctggaatgccttttatccaccctcatgagcatgttcaccagccgttttcgcagcctcatcaacatcagcctgatgctagttttggattagcccggccccagtgtagggcttgggccatgcctgcaccctgccagtgaaacaatgatttgggatgtgatgaagcaatgcagtctcgagttatgtaaactggcaggagtgcaggcatagaagaccggggtgaactggaccataataatgaaggatacatggatcgatccactcccccgcagtcggtttatgttggagcttctataactttggttaaggttggagtgttggagaagctcatttggtttgggcatattcactgccgttgatggtgatgatgaaaaatacaggagctaagaatgtaatcagtcatcaatgatgaagctattcgaggagccaaagagaaatgggaagatcttgttttggagtcgacaaattgcttgtgtcctattgcctatgggtaaaagcgttttgccgtgaaataatatgcctttactggaataataaagtggaccacattatgtatcatattactatttgacccaggtgtattttgaaccttttgattactatctcagctagtctat

SEQ ID NO: 194769 - DNA, 563 bp, Gossypium hirsutum
  unsure (1)..(563): unsure at all n locations
gtaatttatcagcaattcaccgtcttagctcattcgccgtatcagtcatggcagacgcgattgaactgaaaacagccccagctgactttcgtttccctacaacaaatcaaactagacattgtttcacccgctacattgagtttcataggtgcttggctgcaaagggtgaagagtctaatcaatgtgagaaatttgccaaatactaccgttctctttgtcctggtgaatggattgacaagtggaatgaacagagggagaatggtactttcccgggtcctctgtgactgtgatcacatattggaaaggaggtgaagcattgcttctttggcatggaaaacttgtctgtagctagtttcaatggttattcttgaacatttcgaattaataagctacaaatggaaatttgtggccgatgagttgttaaaaaactggaatatgctctgatgttttaattcatgaacctgcttttttcagcnnaaaaaaaaaaaaaaaaatttttatttacttttaaatattaaaaatttttatagtattttttataataagttcttttataaaaatat

SEQ ID NO: 194770 - DNA, 727 bp, Gossypium hirsutum
caatgcgtgcgtcctctgtcattgctatggatactttgtgtcacagtgcacgtggtgactctatggaaagtgttgagaattatcgcggagatgttgacgatattcattttccctcatctagtacatatggccaccttgacatgaatgaaacatcagagttgaattatagtaatcaagctcagcagagtatttgtttccaaccagctgcagaggaagttccaggtgaaatgggcatcagcagtacaaatgacggggaggaaatattcaatgctgaacctgaaactgtgacagctcaagctagggatgggctttagttttggaattagtggggggagggttggtatgtgtgccagccatgaagctgaaattcatggagcagatgtgtctgtgcatagaacagatagtgtagttggtgatgtggaacccagaatagaagatgttgattatcagggtctaactggtgaatctgctccagatcctgggttgatggatgaattttgtccctggcgaaataaatatggaggatacttaaggtgacaagctttaaatgttgtcacgctccttggggttgctgcagtgcttattatttgtggttctgtcaatcttagtatgttgaatttttattataatctatatttttatttatcttaattacgttgtgtttttctttgtctgcttgtaatttctttttgatatgaatcttattatgttaatatttcttgtaaag

SEQ ID NO: 194771 - DNA, 603 bp, Gossypium hirsutum
ctttcaagacagtgggaaggttgactttaatgtgtggcgacgggaccaatgatgttggagggcttaagcaggcccatgtaggtgttgctctattgaatgcagtgcctccaactaaaagtgagagctcatcgggaacatctaaagatgaaaacacaaaggcattgaagtcaaagaaatctaagcccactgtagaagcaacgggcaattcagaagcctcttcaaaaggaaaggtagtccccagatcagaatctagcaacaatgcaaccagtaaccggcatcttaatgctgcagagaagcatcgacagaagctgaagaagatgatggatgagctgaatgaggagggtgatggtcgctctgctcctattgtcaaactgggggatgcctcaatggcatcaccatttactgcaaagcatgcatcagttgccccaaccactgacataattcgtcaaggacgcagcacccttgtgactacccttcaaatgttcaagatcctcggccttaactgccttgctacagcctatgttttaagtgtgatgtacttagatggtgtcaagctgggtgatgttcaagcaactattagtggtgtatttacagctgcatttt

SEQ ID NO: 194772 - DNA, 468 bp, Gossypium hirsutum
acgcccacgcgtccggagaaaaatgaaactgaatatgaatctgaagaacatgtgttagggaggagaaagagtagaaaagtgtcatctggaaagaaggaatctgctggaaaagctaaaacgaagaaagtgtcgattcccaaaaagtctactccacagaaaagaaccccaaaaacatcagcatctaaaagttcaaaggcagatgatgatagtgacaaaagtccaaaggtgtcttcgaggaagaaaccggagaaggtcactaaggaaaagtcctctacaccgagtacatctgtgtcctaggagaaaaccagcataagggctggaaaggggaaggacaaacctaaagagcaaaatctgaagccaagtcatcatgaactaagggattctatttgtaaaattcttaaggaagtggacttcaatacggctacattcactgacattctgaagcttcttgctcaacatttcaatact

SEQ ID NO: 194773 - DNA, 502 bp, Gossypium hirsutum
ggcaaaaagtgaaggagtctgttggcagcagtaagcgcaagggaattgagtcggatgaggactcacctcctagaaaagctcccacacatcgtcgcctggcagttgtttatgatagtgatgaggaatgaaacaagattacaggggaataatcgtatcctcaaacaatgaactattgacacacaactttggtggctggaaaggatgttggagctgagcttgctgctaacttcactgagttatataacactgctggagacaacttaaggtttaaatgttaattgttatatatgacttccaaattaagttgagctcagaaaagtaattgctctagaatttgaggaaaagaattgcaggcaagttattatttttctgtcccataatgtgaaaacttggtgttatagattcttactactaacatgtttgaggtttgccttaaactaaacttgaaggttgacataatctaaaggccctttctggaaaaaaaaataatataatataatat

SEQ ID NO: 194774 - DNA, 1000 bp, Gossypium hirsutum
  unsure (1)..(1000): unsure at all n locations
tgaaaagaagggaaaaaaaacttgttcgtcactgaaaaacagttgattttcttttttttcttctttaaaaaagaattagtaatcaaatcgaatggcgggaatttgctgtgaagttgttggagaaagtgaagcagcggctccggttgagccaacttcaagagcttctcgtcgccggagattggagcttctaccgtttaagttagtggccgaagctgctgttctaccgccgttagagaacggccggaaacgtcagaagctcgatctcgttcgcccgacttctcgtgattgtgataacgctgttcaaaactcggatactgataagcttgagaaagatcaagaacttaatggaagtctaaattttaatggagcagtaaaatcagaagccgtagaagaagaaaaggaatcgccgaagttcggcctgacatctgtttgcggaaggcgacgagatatggaagacaccgtttcgattcacccttcgttttgcaaacaaagccggcaagttcaaatgtcgtcggatattcacttttacggcgtcttcgacggccatggctgctctcatgttgctatgaagtgtaaagatcgatttcatgagatattaaaagaagaaatcgaagcgtgcggcggagagaaggcggtggactggaggcggacgatggagaggagctttgagagaatggacaaggaagttcaaaaatggacggtggacgctaaggagcgttcaagttgccgatgcgaacttcaaactccacagtgcgacgccgttggctccaccgcagtggttgctgtcgttacgcctgatgagatcatcgntgctaactgtggtgattcgcgcgctgttttatgccggaacggcgtcgctttacctcttttcgacgatcacaagccggaccgacccgacgaaatgctccgaattcaagaagccggtggccgagtaatttactgggatggtcctcgtgttctttgcgtgttagccatgtccagagcaaatggggataattat

SEQ ID NO: 194775 - DNA, 811 bp, Gossypium hirsutum
gtaaaagcatttggtcggatcgatattctggttaacaatgcggctgaacagtacaaggctagcagtgtggaggagattgatgaggagaggcttgatagggtgtttaggaccaacatctattcccaattcttcctggccaggcatgctctgaagtacatgaaagaaggcagctccataatcaatactacatccgtaaatgcatataaagggaatgacaagctacttgattacacagcaaccaagggtgcaattgtggctttcactagaggcctttcactacagctggtgaaccgaggcgtacgtgtgaatgccgtagcacccgggcccatatggactccattgataccagcatcatttgatgaagaagaaaccgctcagtttggagctcaagttccaatgaaaagacctgggcagcccagcgaggttgcaccatgctttgtgttccttgcatgtaaccactgctcctcctacatgactggccaaaccctccatccaaatggtggtaccgttgtgaatggttgatatgcgccatacagggtttactcgagcttctgcttttcgttcctttttatgtttatataaatacggtgtgggtgttttgagtcttgctgcatgcaagagtggcaatagtaaacggtcgtatctatttccaactgtatgtataactccaggcaaggcagtctcaaggatactaggaggagcctaagcccaactagtgcggtttgtgtaaaaaacaactatgaaactttgggtcttttataagaagcaagaaagtataataatggaacaaagcaggagccatctttacgac

SEQ ID NO: 194776 - DNA, 397 bp, Gossypium hirsutum
cccacgcgtccggaaaatcaaaacagaaaagatctaattttcctatccccttcaatcggccggattcggcggttccttgccctcaaccgccaattcgccaccgtagttggcagatagcgtcaaatgaaggccgaacccgatcctattggaggctctatctctctaatcccccttttagcttcgattacaacgaagcaaatgaggaatcggaggcgttcttccaaaaagataaggcccttttttttgtttatatttctatacgagagaactatatggggggataaaaagaaaaaaagaaatgaatcgaaaacctaaagtaaatctgaaatgaccccttttcctttcttctatttttttttttggacttaaaactcaacaatctgtgtaaaaaaaacaa

SEQ ID NO: 194777 - DNA, 366 bp, Gossypium hirsutum
aaagaaatgaaatgaaagcagaacaccctctgctagggtttcatcattcgccctaaatcgccgcttgcctaccgttcaaaggcgcttcgcgtctcagcccttcgccaggctcccgatttgagcgaagcgagtgtgggtcttcaacggcgaagcttcacaggtaaagcccctccctcctttgctgatcttatttgtaaaacacaatcattatacatcaaaacaaggacgcgattcaccttccagttcctctgtaccttcaggattgctttcctcttttcttcttcttttctttacagattaaaaatcggccatttatagccaagaagcacaaaaataaaataaaatcaaattataaaaactatttat

SEQ ID NO: 194778 - DNA, 702 bp, Gossypium hirsutum
  unsure (1)..(702): unsure at all n locations
ggatcccctgcttgtacagcttcttcttaagtcttcacaagacaaaaggtttgtatgtgaggcagctgagagagctttagaggtcatgactacttctgtcttccctatgtcgttgttgcccaagttgcaaccctatcttaagaacagaaatccacgaattcgagctaaggcatcgatgtgctttagtcgcagtgttccacgactgggtgttgaaggaattcaagaatatggaatcgacaaactgatacaagtagctgcatcacagcttagtgaccagctcccagagtctcgtgaggctgctcgaacccttctattagagctgcaaactgtatatgagaaatccaatggactctcaacaacaatacccgaacaaccagagatgaactcttgggagcatttttgtcagtcaaaactctctcctttaagtgcacaagcagtgcttcgggtgacaaacatagctcgcgaaggcctcgttattggttcctaacagtgagttcttatatacatgtgtgtagcacgtaatgttatcttcttttttattttccatttacccacatatatgagatttagtgtgcagactgcagggtctacactccacagtcaccttttattgcttgggtttgggtcttatctttttttttttaattttttctttggtaatccccctgaatcatccaaatgtcttcnatcgtggtaaaaaat

SEQ ID NO: 194779 - DNA, 1012 bp, Gossypium hirsutum
cggcatatttgagtttcgctcagttttcattgaaaaccctagacctcccaacgaagtagcagagccgcagtttctctgtcgatatccgaaacaagaaatggctgtcacattcaacgacctgggttctgctgctggcttgaagaagctggatgagtatctccttactcgcagctacatctctgggtaccaagcttcaaaggatgatattaccgtctacgcagctctatctggtgccccatcgtctagctatgtcaatgtttctcgatggtacaaacacattgatgcccttttgagaatctcaggtgtttctgaagaaggctgtggtgtgactgttgagggatttgctcccgctgaggctgttgccactccttcagttgctgattccaaggctgcagctgctgaggatgacgacgacgatgatgtagatctgttcggtgaagagactgaggaggaaaagaaggcagctgaagaacgtgcagctgctgttaaggcctctggcaagaagaaagaatctggcaagtcctctgtgttgttggatattaaaccatgggacgatgagactgacatgaagaaacttgaagaagcggtaagaagtgttcagatggaaggactgctttggggagcatctaagcttgtgcccgttggttatggaattaagaaattgcaaattatgatgaccattgtggatgatttggtgtcagttgacactctcatcgaggaacatctgacggctgaaccaatcaatgagtatgttcagagttgtgacattgttgcattcaacaaaatataatttgctatctgggatgcctgcaataggagtttcttggagaggccttcaaagttatgtttgagattttcatgttttttgttttgctagaacttaatttaagttgtcgttattcttgtgttggacaatggatcgtttatcatggatttggagcattaaacacctgatggttttttttaaaaaaaagagatctagtttgtgaaaaaaaaaaaaaaagggcgaaaa

SEQ ID NO: 194780 - DNA, 654 bp, Gossypium hirsutum
  unsure (1)..(654): unsure at all n locations
nncgcccacccgccgcgccgctcatctgcttctcttctccttctcttgcctttccaggttccaaactctcgttcttcctccagctcctatcctttaacaggaaatggcggttacattcaacgacttgggttctgctgccggcttgaagaagctcgatgagtatctcctcactcgcagttacatctctggataccaagcttcaaaggatgatatcaccgtctacacagctctatctggggccccatcgtctagctatctgaatgtttctcgatggtacaaacacatcgatgcccttttgaggatctcaggtgtttctgaagaaggctgtggtgtgactgttgagggatttgctcccgctgaggctgtggccactcctccaactgcagattcaaaggctgcagctgctgaagatgacgacgatgatgatgtagacttgtttggtgaagagactgaggaggaaaagaaggcagctgaagatcgtgcaactgcactttacggcctcttccaagatgaaagaaatccggaaagtcctcggtattattggatattaagccatgggacgatgagacagacatgannaagcttgaagaaacaataagaagtgttcaanatggaagaatactttggggagcttctaagcttgtgcctgttggt

SEQ ID NO: 194781 - DNA, 412 bp, Gossypium hirsutum
  unsure (1)..(412): unsure at all n locations
agttaatatagagagttcatatcataaaatgtcgaaccatagatcaggctggaatttctaaaacaacatagtcataaggtaggcacggcacagcctccaagccatgaacaaaatatacgtaactagatcgctacacaactaataaaaggataaatcaacatcaactgttattcctatagtaaaatagtcctaccatacacgctgatgatgatctcctaattgtaggttgatgagaaccttaggactgctttggggagcatctaagcttgtgcccgttggttatggaattaagaaattgcaaattatgatgaccattgtggatgatttggtgtcagttgacactctcatcgaggaacatctgacggttgaaccaatcaatgagtnatgtcagaggtgtgacattgttgcattc

SEQ ID NO: 194782 - DNA, 717 bp, Gossypium hirsutum
ctcccctctgtcttcgaaaaatatctagggtttttcatcttctcctttccttcgcctctctctcttttgaaactttaatcggaaagaaaaaatgcctaggtatgatgatcaccgtggtggcactcgcctttatgtcggtcacttgtcttcaaggacaagatcacgtgatcttgaggacatgtttagcagatatggaagagtacgtgatgtggatatgaagcgcgactatgcattcgttgaattcagtgaccctagagatgctgatgatgcaagatattcgttgaatggtcgagacctagacggatgccgtatcattgtggaatttgccaagggagtgccccgtggccctggtggatctcgtgattatgctggaagaggtcctactcctggatctgggcgctgcttcaattgtggaatcgatggtcactgggctcgtgattgcaaagccggcgattggaagaataagtgttaccgctgtggggaacgaggccacataaaaagagattgtcaaaacagtccaaagaaactgagccgtagaccacggagttactcgcgttcacccagtgcccgacgtggtcgaagcagaagccgcagttacagccgaaggcgtagtgacagtagatcaaaatcacctgttgaaccgagaaagaagtcctcgagcgtgaccaatagaagatctagggagtcctaggcgccacaaggcgttctcctttcccc

SEQ ID NO: 194783 - DNA, 415 bp, Gossypium hirsutum
tttcaacaactttagggtttttcatcttcttcgcccctcctctctagtttcatcgtaaagaaatgtgcctagctttgatgaccgacgcggtggcactcgtttgtatgttggtcatttgtcttcaaggacaagatcacgtgatctagaggacatgtttagcagatatgggagagtacgtgatgtggatatgaagcgtgactacgcatttgttgaattcagtgatcctagagatgccggtgatgcaagatatgcattgaatggtcgagacttggatggaagccggatgattgttgaatttgccaaaggagtgccccgtggttcaggtggatctcgagattaccctggaagaggccccactcctgggtcaggacgctgcttcaactgtggaattgatggtcattgggctcgtgattgc

SEQ ID NO: 194784 - DNA, 339 bp, Gossypium hirsutum
cccacgcgtccggaaaaaaatccaaaagcttattcaactctgtgtttctttccaacttgttgggtctgcggcttaaaactctcaaatggagcaaagaggtccaaaatcaaagaacccagaaccaggaaatcaaggaaacgactatctcttatcggagtttagtgtgagcttcttcagcatcaggatttaactaaccagtttgcttctgtatattagaaatgcagtctactggattgacagaggaacctgttaccaaaggtgaaatgttacatggtcgaattattcaacaggacacatagacttccaagtccttccataaatgcataagctcctttttgg

SEQ ID NO: 194785 - DNA, 493 bp, Gossypium hirsutum
  unsure (1)..(493): unsure at all n locations
cccacgcgtccgaaataagttaaaaaattacaacatacatcatatactataataaattatcataaattaaaagtgaattagaagtcactaatgtaattttaaaagtcatatactcttttgctcttatttaaagagtcatcatgatgctgatcctgatcatgatgctgatcctgatcatgatgctgatcctgtaagttttggcgtgtatatattttttaaattcaatttgcttagatttggggtcagatctgattgtcttctggatataggttgctctgtatatgaatttgaaagactatggtggtggttttgagttctgtaatctgtcagatgacaagatatacgatgatttaggtgaaggcaccagtggtgctagaacaaatctacacaatatggaactgtcacaagagaacacctttgccgttgatcctgttcttctgtctctgccgngttctctgatatggaaaactttgggattttggacttgtgatct

SEQ ID NO: 194786 - DNA, 647 bp, Gossypium hirsutum
cccacgcgtccgcccacgcgtccgggtttttggaatcggcaacaacataccatcaacaggttcaagccgctgtgcaagaaaatttgaagaagcatgagctgacaagacctcttgcaaccaaagagcttgagtggtttgcggcatctgctctattggctctacctattattattttgttcagaatattttcagcaattttctgcaaaaagacaaagaagcgtgttcgacatactaacgcaacccaccatggtcgtcgtaagggcaaaagggggcacacagacaagtagactgcgtgtatttaggttttggtctcttaatgttgggaaatattagaggggctctaggtgatcatgttgggtatggagctgtggtgtcgcaattggaagtatttaatcttctcttacctctcaaggtccctggttttaatattattattattttttggggacggtgtggaattagaaaaagttaagaaccctagtgacgctacaaggttgaaatcttgagattcctagttgtagtaggagttgtgtattttatttatgttagtgtaactttattttgttttgcttttcttttcttctggattcacaaacgaaacaactcagtctctgtttcagaaatcatcatactttttaagttgagac

SEQ ID NO: 194787 - DNA, 524 bp, Gossypium hirsutum
cccacgcgtccgtgttgataaaatttctgtggtgatgaagccctatacaaaggaggtagttaaagcttatgggaggtttttggaatcagcaacaacataccatcaacaggttcaagcctctgtgcaagaaactttgaagaagcatgagctgacaagacctcttgcaaccaaagagcttgagtggttttcggcatctgctctattggctctacctattattattttgttcagaatattttcagcaattttctgcaaaaagacaaagaagcgtgttcgacatactaacgcaacccaccatggtcgtcgtaagggcaaaagggggcacacagacaagtagactgcgtgtatttaggttttggtctcttaatgttgggaaatattagaggctaactggacgtgtgtttttactttttaggggctctaggtgatcatgttgggtaggcagctgtggtgtcgcaattgggaagtatctaatcttctcttacccctcagggaccctggttttaatattattattatttttt

SEQ ID NO: 194788 - DNA, 759 bp, Gossypium hirsutum
  unsure (1)..(759): unsure at all n locations
cccacgcgtccgcccacgcgcgcggcgtgttttgtatttcatactcatttagcccctttcattagcatcgaaatcactccagttttctttatcactgaaaaatgtcttgctgtggtggaaactgtggctgcggttctggctgcaagtgtggcagtggctgtggaggatgcaagatgtacccagacctgaacgttgccgagatgaccacaactgagactctggttcttggtgtagcaccccagaaagcacactttgagggagctgagatggaattcggggctgagaacggctgcaagtgtggagacaactgcacctgcaacccttgcaattgtaaatgattagagaccaaagccaaagctccctggaagcagagacgcctttgtctttaagaaataatatgttttgttgtttatgtgtttttagaataaagtagccatggcttgtcgtaggttttgcctgttgccgccacggttacttggtgcttgccaatagatagagtgaagtactaatatttacttgtttttctgtccagtgtgagcatctctgctatctcaggatatattgtgactattacataattaatgtaaggaagtgagtcagattcctaatgaatgagaagaagctcctatttcgtttaaaaaaaaaaaaaagtgaaagtggcgaatgaaaatacgatcaagttatgtaannnnnnnnnnnnnnnnnnnnnnnnnnnnnnnnnnnnnnnnnnnnnnnnnnnnnnnnnnnnnnnnnnnnnnn

SEQ ID NO: 194789 - DNA, 890 bp, Gossypium hirsutum
cggacgcgtgggttagaaagtgctaagcaggctttgcaagaagctgttattttgcctgtcaagtttcctcagttttttactggaaagagaaggccatggagagcttttctgttgtatgggccacctgggactgggaagtcatacttggccaaggctgttgcaactgaagctgactctacattttttagtgtttcttcctcagaccttgtatcaaagtggatgggggaaagtgaaaagctggtctcgaaccttttcgagatggcgcgtgatagtgctccttccatcatattcattgatgaaatagattccttgtgcggccagcgtggagagggcaatgagagtgaagcttcaagacgtatcaaaactgaacttcttgtgcagatgcagggtgtcggacataatgatcagaaagtcttagtgcttgcggcaacgaatactccctatgctcttgatcaggccatccgccggcgttttgataagcgtatttacattcctctcccagatttgaaggctcgacaacatatgttcaaagtgcatttaggtgatactcctcacaacttgaccgaaagtgattttgagaacttagctcgccggacagaggggttttcagggtcagacatatctgtttgtgttaaggatgttcttttcgaacccgttcgtaaaacccaagatgccatgtttttctacaagacgcctgaggacatgtggatgccttgtggacccaggcaaccggctgctgtccaaatcaccatgcaggaattgggcgccaaaagactcgcagcacagaatccttccacctcctatttcgagatccgatttcgactaggtgcttgccagaacaaaggcccaccgtgagccaaactgatcttgaagtccctgagagaattacc

SEQ ID NO: 194790 - DNA, 741 bp, Gossypium hirsutum
cttggaggctgggattggtcgagtcaaagccaatttgggaagccgggttaagaaagggcaaatgactcgagaaaagtttgagaaaaccatgtctctgctcaggggagttcttgactttgaaagctttcgggatgtggacatggtcatcgaggctgtaatcgagaatgtgtcattaaagcaacaaatttttgccgatcttgagaaatactgtccaccacattgcatacttgcaagtaacacttccactattgatttgaacttgattggtaaaaggaccaaatcccaggatcggattattggagctcatttctttagtccggctcatatcatgccgttattggaaattgttcgtactgagcatacatctccccaaataattgttgacttggttgatgttgggaagaaaataaagaagactccaatcatcgttggaaattgcacaggttttgctgtcaataggatgttcttcccgtatacacaagcaggccttttccttgttgaacggggagcagatgtttattggattgaccgagcaattactaagtttggaatgccaatgggcccgtttaggctggctgaccttgtcggctttggtgttgcaattgccactggctcacagttcattgagaactttcctgagcgaacctataaatcaatgcttatcccaattatgcaggaggataagagagcaggtgaaagtactcgaaaaggtttttatttgtacgataataaacgcaaacc

SEQ ID NO: 194791 - DNA, 441 bp, Gossypium hirsutum
aagagagtgagaaaggttttattcctttgcctgattagagacatggagaagtggagttttatgctagttattgcattagttgttgctcacgctagtgcaagaaatgtgcccacagctacaactgtgcccactagcactactcgcagtagtgtaccaagtggtgctactggtgttggcgaccaaaagaacttcctcacttacggtggcgttgggggctactctggaattggctctaatggcttgccatttggtggagtggggggtctgggtgggattactcccctcggtggtgcacgtggacttggaggtggagtcgggggcattggtggagtacgttgacttggaggaagtaatggactcggtgggctcgggggatttggtggctttggtggcgagcggggtgcttgttgtggatttggaggtggagtcagaggtgctgtt

SEQ ID NO: 194792 - DNA, 585 bp, Gossypium hirsutum
ttcattcgtccgcccacgcgtccgcgagcagcatgcatcggataatgttaacaagatattggtagggaacaaggcagacatggatgaaagcaaaagggctgtgcctacctcaaagggacaagcactcgctgatgagtacggaatcaaattttttgaaaccagtgcaaagacaaatctaaatgtggaggaagttttcttttcgatagcgaaggacataaagcaaagactcgctgatagtgacactaaggctgagccttcgacgatcaagatcaatcaacctgacgctgcaggcggagctggtcaagctgcacaaaaattgggatgttgcggttaaacctatgttgaccaaattcggttaaaaaaggggtaaatatttgatcttagacttccattaaaacaaaaaggaaaaaaaggggaggaggtgaagaaactaatctcattgactgcatgatgggtgcttgtgttttacttcatgttttagtgcgtgaaatatagtattttcctataatttgatagttcttcttattggttaaaaaaaaaaataatattaattaatattattttttttatatttaaaaatatggg

SEQ ID NO: 194793 - DNA, 955 bp, Gossypium hirsutum
cccattctttcgcatatctacaaaaatcagtcaacaaccaaatgataagcctgcaatgcgtttaaagatcttgttcaatctctacaatttgttggaaggcccagatagccggttctttgtgtacatgcaagccttaaatttagcactgaatgggaaagttattgatcatattgtaccatctttcaagaagatagatagtttcttgaaggagtggaatattggggtcaaggatcaaaggaacctctttcttaccattgcaaatgtactgaaagaaaacaaaagctcgggaaaggattctttcaaattcttgaccaagtacttggcaactttcgctggtgaggactcgtgtgtaattggtgaagccaaggaggaagctgttcgtgctgtcatagaatttgtgaaggcacctgacacgtttcggtgtgatctattagatatgcctgctgtagggcaattggagaaggatgctaaatatgcactggtttatcagcttctgaagatctttttgactcagcgattagatgcctacctggaatttcaggctgcaaattctaccttaatgaaaagctatggtcttgttcacgaagattgtataacaaagatgaggttgatgtcattggttgatcttggctcttatgaatctggacaaattccatatgccctcatcaaggatactcttaggatcaacgatgatgaggtggaattgtggattgttaaggctataactgctaagttaatcgactgtaaaatggatcagatgaaccaggttgtgattgtaagccgctgtactgagcgcatttttggacagcatcagtggcattctcttcggttgaaactagcaacatggaggggtaatgttgctagcctcatcagcaccatccaagctaacaaggctgtggaagaaggctcacaagctatgcaagggatggcaattcggtagagctattatttataa

SEQ ID NO: 194794 - DNA, 916 bp, Gossypium hirsutum
cccacgcttccgatgcgaggccatttcttcaaattagagtatgtaaagcatcggccgtctgtagctggtgcaatgattgattcacacgtcacagcggaatattggaagaataggactcaagagcggttgaagattaaaatgcctgagacctatgttgttcaccttggaaatagcaatgaactgatgcaagttgcagaagacagtgtggctaaaagggttttgcgtgaacatgttcgtgaatcgcttggagtgcgcaatgacgatttactctttgccttaataaatagtgtttcacgaggaaaagggcaggatctctttctacgcgctttctacgaggccttacaactgatcaagcaaaagaaaatgcaggtgccaccattgcatgcagtaattgtgggaagtgacatgagtgcgcacacgaaacttgaaatggaattacgagcttatgttacacagaagaaaattcaagatcgtgttcactttgtgaacaaaactctaacagtagctccatatttagctgccgtagatgttcttgttcagaattctcagggacggggagaatgctttggacggataacaatcgaagcaatggcatttcagttgcctgtgctgacagggaacagctgccgggggcacaacggaaatagtagtgaacggcacaacaggtttattgcaccctgctgggaaagaaggggtgacaactctggcgaaacatattgtgaaactagctacgcatgtagagaggaggcttacaataggaaagagagggtacgaaagggtgaaagaaagatttctagaacatcacatggcagagagaattggtgaagtacttaaagaagcgttgaggaagtctaaaatcagatcaagtaaacacctttgacagtgaatacccccgcccaccatataattacaatga

SEQ ID NO: 194795 - DNA, 541 bp, Gossypium hirsutum
ctgagagaactatccgggaaggccctaggaacgactggactcgccaacagatcgactccatctaccattctccccttcttgatctccttttccatggagctcaagttcacagatatgctcataacttcagagaggtgcagcagtgtactctcctctcaatcaagactggtggatgtagtgaggattgttcctattgccctcaatcctctaggtaccatactggcctaaagccccagaagctcatgacgaaggatgccgttatgcaggcagctaaacaggctaaagaggctggtagtacacgcttttgcatgggtgcagcatggagagacacagtccgaaggaaaactaacttcaaccaaattcttgaatatgtaaaagaaattagggatatggggatggaggtgtgttgcactttgggcatgctggagaagcagcaagcacttgaacttaagaaggcaggtcttacagcttacaaccataatctcgatccttcaaaagaatattatccccaacattattacaacaaagaacctatgatgag

SEQ ID NO: 194796 - DNA, 457 bp, Gossypium hirsutum
gaaattttccagactgtaattttgagttttgaaggaacatgtaggttccatagttttctgtagaaagttttaatcttggcctataaattattaattactaggaactagtgtagccctttgtaatagtttgtaggcacttttaatggagaaattaccggatggttcccctccccatacttggaaatcgtcgtgcacagcccttgccaatggaatctgcatgatttttttaacaatctctatgtgaaagactagatagaaatgtgatcccccttcccgaccctccagtacaatcctttctccaaaagtcctttagatgcccacacactttttcagggctcctaccgcgcattgagggggtggtgtgaatagtgtaggttattttgtggacgaatgcctcattccatacttgggagttagtcggattcaaaacaagcggcattgatctgaacaattgatt

SEQ ID NO: 194797 - DNA, 455 bp, Gossypium hirsutum
gagagggggagaggacaggaagaaaagaatatggtgggggcttcgtctttgcatccaagactcctctcttcttttgttggtgatcgtttagctcaatcgagacaaccacttgctcagctatttcattacaacccaggtcgtaagcatatatcaatgcaattatccagaacgttttctggcttaaccaatattttatttaatagaaggaacaatttggacgaagttccagatggcaagcgcaaacgtctgagacctgggaagttatctcctcgtcgacctgttccaaatcatataaaaaggccaccttatgtcaaaactcgtatggcacctggaattgctagtggcccggaagtgcatgatctaaagggcatagaacacatgagagcttctggaaggctcgcagctcaggttctcaattatgctgggaccttagtgaagccaggcataacaactga

SEQ ID NO: 194798 - DNA, 576 bp, Gossypium hirsutum
caaattcttatccctttttatagagagacactcgaaacaaaattatacgtatttatatacggaggtgatagcggcggcgctggtggcggttgtacaatcggaattcagatcggcaatctaatggctgaagacaagtataacctcaagaatccggcggtgaagaggatcttacaagaggttaaggaattgcaatccaatccttccgatgatttcatgagcctaccactcgaggagaatatatttgaatggcaattcgcaattaggggtccaagggattctgaatttgaaggagggatttatcatggaaggattcaattgcctgctgagtatccatttaagcccccttcatttatgttgctcaccccaaatggacgttttgaaacgcagactaagatttgcttgagtatatcgaatcaccacccggagcattggcaaccatcttggagtgtgcggactgctctagtggcattgattgcattcatgcctaccagcccaaacggtgccttaggttctctagattatactaaggaagagcggcgtacccttgctgtcaaatctcgtgaatcaccacctaac

SEQ ID NO: 194799 - DNA, 419 bp, Gossypium hirsutum
aaacactcgaaaatacgtatttaaatacgtacggacgggttactcagcagatcgtaacggaggtggtagcggcggcggcggttggatatttgatcagatcgtgatccaaatggctgaggacaagtataacctcaagaatccggcggtgaagaggatattacaagaggtcaaggagatgcaatccaatccctctgatgatttcacgagcctccctcttgaggagaatatatttgaatggcaatttgcaattaggggtcccagggattctgaatttgagggagggatttatcatggaaggatccaattacctgctgagtatccatttaagcccccttcatttatgttgctgactccaaatgggcgttttgaaacccagacgaaaatttgcttaagtatatcgaatcaccacccggagcatt

SEQ ID NO: 194800 - DNA, 523 bp, Gossypium hirsutum
atcgaagaacagtcacaaagttgcttttctaaaaggagtgaaagcaggaaaaaattcgattaagagatagaaagatggcggtgatgcagaagctgaaaatattcgtggtgcaagagccagttgtcgcagcttcttgcctcatcgctggttttggtctctttctaccagctgttgtaaggcccattctagattccttagaatcatcgaagcaagtccctcagcctgctttaagagatgtggttgctggtgtgactggtaaaaagcagggctgatgtgatttatgagttgggaagaagcagacactcaaatgtagctagtaatcagcaacaaaataaacttgactttaaagttgaactcttgcgccttcaacttcatctttagcatgaggaatttgagtgttaatttgttttgattttcagtggtggaggattactcaaaaatcatggatgattcatatcagactggaatttgatatcatctaaaaaaaaaaaaaaaacctaactccattaaaaaaagggcggcc

SEQ ID NO: 194801 - DNA, 391 bp, Gossypium hirsutum
cggacgcgtgggccaaattcaccagtattgtattataatctcgatttctaatttcctaaagagtggggtcatccattcaaattctggggcattccatcaacgaacacagagtagtctcgtccagaacaaaaggttgtaaaagacggttattcccgattcaagatatcgctggcgacggagaagcttcagatattcgcagtgcaagagcctgttgcagctgcctcttgcctcatcgctggttttggtctcttcctaccagctgtggtacggcccattttacattccatggagtcatcaaagcaagtccctcaacctgctttaagagacgcggtttcaggtgtgaccgggaaaaaacggggtcgctatgatttatggatcgaaaagaggcaaa

SEQ ID NO: 194802 - DNA, 423 bp, Gossypium hirsutum
ctttctcagtatgtggggatattgtagctcagctgaatcggagaactcgaaagccgcctccgaattgatacattaaacctcagttgaacttggaaacattgacatttgagcacttcatgtttgataaaatgaggaaatgggggattcttaacctttttaaaacacctttatgctctttcgtcaaagccccgaaccaatctaatctttaagaaggaaggcttcaaacagcatataagataaaaaatcaaatgtataccactttgatatgcttaatttctttcccacaattcttttacaaaatcaatttgcttgtaatgagattggtaattactgtcaataaattcaataatagaatgagtattatacagggcgagcgtcagttaaagagctcgctccccaaaaaatatggcaccaacacacttt

SEQ ID NO: 194803 - DNA, 736 bp, Gossypium hirsutum
gcgatggatggcagcccggccatgggaagtccgaagcacaactgataacaatgaccgtggctcagtcaagagtatgggtgctcgttcaatatctataagtgaaatcagcagagcttattctcgaagagatcttaacaatgataacaaaccaagtccaacacctcagaagtcaagtcgagttcctagccaccagtctccatcgactccaccttcaaaggcaccttcgatttcatcggtttctggtaaaacaagactgccaagtccgagatgaagtcaatggggagggtatgaagactcaaggagcatactcagtacccggtctgatcgttataggagacatagcattgcagggtcctcaatgagagacgatgagagccttacaagctcacctgcagttccgagttatatggcaccaacacagtccacaaaggccaggtcccaaataccaagccccttaggaagtggcacaccagataggagagtggcagggtctgcaaagaaacagcttttgttctcagcgtccccagccagtagtaggagacattcagagcctcctaaagtggacataagtgaggttagaaagaatcaacatgcaccaagcaatggaaggcaagtggtttggtgaagagtgcaacaaaagttagattgaataaacaaggaagggttattacaacttgaagctcttgagtgtgtttgtgattatctttttcttcctaggttttatgattattaatta

SEQ ID NO: 194804 - DNA, 423 bp, Gossypium hirsutum
acgcggtcgaaattataacagattacagaaccgattcttcgcttagacatgggtgcaatgatatgctcaaggctgattgtgttgatctgttggttaaatactacaaagaagcgagacgtgcagtttacttgagcaatgaagaagacgatactcgatccaagagggatgcaagtggagcctctttaccaatagagaaaacatctagcgtgagaaacatggtggttaagtctaaaactagacggggtggaagatgttgtttgtgtttccatcctttctcgatacaaaaggtgtcggtcattgtgttcttttgttgtcatgcttatcacacgacttgcttgacggactctactgacagtaatagcaacaaaaaagggaccggaccgacttcacaagagccatacggttatgacaatgatgatgatg

SEQ ID NO: 194805 - DNA, 912 bp, Gossypium hirsutum
  unsure (1)..(912): unsure at all n locations
ccatggtgtgcttcatcacgctattgtattcctggacatcctcatcgctgggcgcagaaatattatgttcctgtatgcttctgatgctaatgccattcgtcaagtaatagaacgggatatagcatatgttgatactgtgaattacactgcagactaccgtccagattggggttcaatgagcttgctaatagattttttgcgacccaatacatcagaaggatcttcatggtacagtctgcttaaaaaggctgggggcggctgcaatgaccttgtatacagtggccacatgtttgttgctgtgctgactgcaatggcatggacggaggcttatggagggtttagctcagttcttatatggctgcttgttatgcacagtgctcagcgggaagtacgagagcgccaccattattctgtagattgtgttgttgccatctatgtgggtattcttctttggaagatgactggttttatctggtcggctaagggtggaactggagatagcagactcactaagcttgggaaaattcaaggtagactgctccaagcggccaaggattccgacatggatgaagtaagggagcttctcaaagatgttgagttggggaatcaagagagcctgaaacaagggccgagcaaggtcatgtggttgtttgctagcggaactattttcttctcacttaccattgttattttggccttcacatggacaagcgatggctaacttctccagcataatattaccacggtgttgaggttctttactccgttacgacacaagaaaggcttcgtcttggacagtgttcgcatgggacgaggagagttttacagttacatgtgaaacttggttgtagcttttggttaaggaagtcaatgtttagctagacttgagcttacattatctngttctaagag

SEQ ID NO: 194806 - DNA, 456 bp, Gossypium hirsutum
ctggataccacgatcaggatgttttcaatattatattgtttgatcctttaatctcagatatgggattaaagattaaatttttggatactgcttattttggtggtctttgtgaacctagtaaagatttgaatttagtatgcacaatgcatgcaaattgctgttatggtatggatagcaagcttcatgatctcaaaattatgcttcaagattggagagctttcacgtcattgccaccagatctgaagaatgaatctgttatctcctggagggttcctcagaaactgcaggctccattcgttacgccattttgattcaccatctccagagattaatgtcgaacgagaggaagaaaattgattggaattggacatatgtttatattattaaccggcacaagaaccttgagaggggtaagctttcgttttccttcgggtgttgggatccttctcatttacg

SEQ ID NO: 194807 - DNA, 658 bp, Gossypium hirsutum
ttttcgcgtgggcggacgcgtgggcggacgcgtggggtaagttcgggccaattaagagcttgagctgactctggtatttgtaacgctgtatttgtttaacgagccatggagatttggttggtattttagaagacaaatcccataaggatgacaatatacgagcaactaaaccaaataagccggtggggagactcattcaatcgtggtgatagtccaaatacaggatcatccacaattgtagagggggatgttaggctagagaacaaggctggatatatttcttgtgatcaagttgaaccttcaagaagtgatcaagaaacaaacaagcccattgataagacacagagacgtctggcacacaatcgagaagctgctcctagaagtcgtctacggaaaaaggcctatcttcaacaattagatatcaagtcggttgcaactagctcatctggaacaagagctcgaaagaactaggcagcaggggatatacataagcagtccatcagatactggcgattttggactgccgggaaccgtcaactcagggagtactgcatttgagatgagaatatcgacactgcgttgaggtgcaaaataaacagacttgtgaacttagaagtgcactccaggcacatatcactgatatagagctacaaatact

SEQ ID NO: 194808 - DNA, 613 bp, Gossypium hirsutum
tcggtttgatatgaatcctcaattgagagaaataatgcacaaccctgaagtactacgtcagatgttttcccccgagacaatgcagcaaatgctagctttacagcagtcgcttctgtctctcaatcggcagcaatcaaccctggactcagcacagactggcggtactacagcggcaccgggaactgccaatctagacttgttgatgaatatgttaggcggtctgggcgctggtggccttggtgtccccaaccaacccgatgttcccccggaagaactttacgctccacagttatcacaactccaagaaatgggtttctacgatacacaagagaatatcagagcattacgagctactgccggaaacgtccatgctgcagtcgagagacttctgggaaattccgggcagtagtaactccttgaaatttcatgttcttttttttttcttttttaaatttgaccaagaaaaactgtctcatgtaagattagttgatttgggttggtgccttagcaaaccacagatttatgttgcatatacattgttgattccttgtttttgccgcgtttaataagcaagtaaacacgataaatatatatacccgagaacttgttggtt

SEQ ID NO: 194809 - DNA, 746 bp, Gossypium hirsutum
gtgtttctctctgccaccaccgtcttcatcatcatcttcccctctatccctctttgtgcatacatctcagaagagctcatactttatctgtttctcatgtgactctgaagcctctttctttccttcaacatacccaagggcatttgaaattttggaagaagaaagcagttgggattgagtttgcaaagcattttagatcccacctggatcccattgaaggtctctttgggaccaagtagagagcacaagtgagagcgaaggcagtgcaagtgatgaagtgcttgttgttccttatgataacttagcacctatgtcttgtgatattgctgaatctaagcaacttttggataagcttgttgtggtgaagtataatggagctttgggaaagaatatgggtttcggtggtcccaaaaagtatttggcatcgtttgaagcaaatggggtttcagtcactgtgcatgaatgcagtttgctaaaaagcttttccacttcattgacagtagcacacctgtatgtagttatatgtccctatattgaaggtgtagtggaggattcaatctcttcaagctggaaaacccaaggcttagcactttttcaagtagagtgttatttaatgttgcattccatggtcggttatcttagtcagaacttgaattatgtgttattgaaacagggttttgtagctaccttgtgtactagcttctttaatcatgattgttaattattacgtgttttgtagcttcttt

SEQ ID NO: 194810 - DNA, 622 bp, Gossypium hirsutum
  unsure (1)..(622): unsure at all n locations
cttttgccttgtttgtacttgcccacgacttcttttcacgctggacagggaccaagtagagagcacaagtgagagcgaaggcagtgcaagtgatgaagtgcttgttgttccttatgataacttancacctatgtcttgtgcagatattactgaatctaagcagcttttggataaacttgttgtggtgaagtataatggagctttgggaaagaatatgggtttcggtggtcccaaatgggggttggagaatacgatcaaagggaaaacatcagatatggtgattcccagccaaacagtggcttcttaaacacccaacattttgcacaaccaaacatgaccacaacttctaaacctacatgttgaggattcacactcaaggagcaagaaacatctcagcaactcattgggatcgagcagtcaaaattcagaatcaagtggcgcacaagagctagatttggagcttagactgtcactgtaatcagtaatatttttttgctactttaaatgcatgctcatggaactacattttatgctttcctagaattgtaagttcaaataaggtgttgatctgcaatttatacatacaacttgagcaagttgatatgaactgcgaaaaaacaaa

SEQ ID NO: 194811 - DNA, 561 bp, Gossypium hirsutum
ttttctagctaaactgctagaaacaaaactactgcagcttctgcgattcaaacatggccagatctactctgcaagtgtttcggaattcattcatggtgatctgccatgtctaaccggagatattggtggtgacattccgatcgatttttcctgtgatccaaaaatctccttgaagctggttgatatggctttgaatgaaatattacgtcttcaagaggagggacctgcagatcaagatgttgaaaccatactcgaaatcgaacagagagcccatgaaaatggattgcaggagaactattactggcttaatctgattctcggcagttatcagtcacggatttattccggcgatatcggaacttctttcaagattctagatgaaacgcgttcgaaagttagaaattcgctgacatcattaacgatgcaattggcgctacggcggataatgccttgcaacaatccgcacactgttgtgattctaatgccccaaacatcatggtttaagaggataaagtcattttcacaatggacccttcatgggatcgatatgaagattttagc

SEQ ID NO: 194812 - DNA, 903 bp, Gossypium hirsutum
  unsure (1)..(903): unsure at all n locations
cacacttttaaatgcttaggccattttgctttaaatccccagccacaacgcccttattttttaatttctccaagcatttccaaaagggttattccgattcttctttctttaggtctaattggagaatcagcaattacccgtctttcatggctaccatctcctccgtttccacccacaaagaccctgtttctactcacgatgccactcccaatatcacccaccaaccagttcaggttgcgaagcgattggagaagttcaagactacaatttttactcagatgagtatgcttgcaatcaagcatggagcaataaaccttggccaagggttccccaactttgatggtccagattttgtaaaagaagcggcaattcaagccattaaagatgggaaaaaccaatatgctcgaagatatggggttccaaactttaacaacgccatanctgctcgcttcaaaaaggatactggacttgtgattgaacctgagaaggaagttactgttacctctgggtgcaccgaagctattgctgcaaccatgttaggcttgattgatccaggtgatgaagtgatcctctttgctccattttatgattcttatgaagcgacattatccatggctggtgccaaagtaaaatgcatcacattgcgccctccggattttgctgttcctattgatgagcttaagtcaactatctcaaagaacactcgtgccattcttataaacactccacataatccaacggggaagatgtttactcgtgaggaacttaatacaattgcatcgctatgcattgagaatgatgttttggtttttactgatgaagtttatgataaattatcattcgaaaatcacatttcaatggcatcccttcctggaatgtatgagcgaacggtaactatgaact

SEQ ID NO: 194813 - DNA, 461 bp, Gossypium hirsutum
  unsure (1)..(461): unsure at all n locations
tttcattcgtcatcggggacgctcgcaacggttgcaacggttaaatgatggtggaggcattcgctgccaaacatacagtcaaagttcccttcacatcacgtggaaaaggtgaattcaaggctgcaagtttaatgttcaaagctgatacagccaggacaagaatcacattctacagctcttactaccacacgaggagtgatgacttcgggtctctttgtggtcctgttctggatgaagttacggtttaccctattgcttagatgccaagttaatttttttttatgaagcactagagcatataagatggtaagtgaaggggtttgtaatgggtttacgtttgtatatttatcggttctggtaagctgtctaaaaccagatggaggaatgcgntgccaatgttgactttcagctatcatngataacaattttaagatgctatcttggtttgatcattctttgga

SEQ ID NO: 194814 - DNA, 636 bp, Gossypium hirsutum
cccacgcgtccgcggacgcgtgggttttagtaccgatttagaagtttccattcccgattaaagccatcatcggcccgaagagctttacagcccaaaatcttatttccgggaaatccaccgataatcgacgaactctctctcgatctcacctaagattcgccgataatcgaaattttaaaaataacccgacaacaacaaagatgaagaaagaagacacagtgaaactcattagcgctgaaggaatggaattcgttatagacaaagaagctgctatggtttctcaaacaatccgtaacatgcttacttctccaggtggtttcgctgaggcggagcatggggaagtgactttcccggagataagtgctgtgattcttgagaagatttgtcagtatttttattggtctcttcaatattccaggggcaaagagactgagttccacattgaacccgaactgactctggagctgatgatggctgcgaattatctccatacttagccaattttcgtattttaggtctgttattctgcccgagaggagtatgtatgtaagcgtgcttttttgcttttattcttcaatgctaattgtgttgtttttataatattctttttatgattggtttttacttattagtatt

SEQ ID NO: 194815 - DNA, 672 bp, Gossypium hirsutum
  unsure (1)..(672): unsure at all n locations
ctgcactctcgtctcttcacgccccaacactccgatctgtctttatcggattacccgacctgaaaccggaaagatccaaatagaagttaagttccttcaggaagatatggccgacgaagttaacaaaactgcatttttagagattcaaggtcgaatgattgagctcaccancaaattgaaacaggtgcaaaaccagatgcgaacgaaggaaggtgaaaagaagcgtgctttcttaacattggaggagctgaatcagctgcctgatgatacaaatacatacaaatccatagggagaacgtttgttttagagcctaagtcagttttagtgaatgaacaagaacagaagctgaaagatagtgaatctgcaattggttcattacagagctcaaaggagtacatggaaaaacagctggcggaggtggagaacaacttgagggagctgctgcaacaagatccaggcctcgctcgtcagataatgtcgatgagcgtgtaacttctttaactctttcttattggaaaaatacttctcacgttatcttgtgtttgtggttgctttaaaaatttatcttagtactggataagaatccccctttggggttaatgatatgcgtttttgggtattgacctatggagctaaaaggtccccaatttccttaaggtataatattttat

SEQ ID NO: 194816 - DNA, 413 bp, Gossypium hirsutum
cccacgcgtccggcctcatcatgggctatatctgtgtaccatgcctaccaacgtacatggaaaccttttaatcctattattggggaaacatatgagatggttaatcatggagggattacattcatttctgaacaggtcagtcatcatcctccaatgagtgctgggcatgctgaaaatgaacattttacttatgatgtcacatcaaagttaaagacaaaatttttaggaaattctcttgatgtttatcctgctggaagaacacgtgttactcttaaaagagatgggggtcgtttaaatttggtgccctctcctacaaaaggtaaccattctaattttggaacaacttggggtgattcaacaggagagatgatcatgaccaattttacttcttgggaccaagttgtgctttattt

SEQ ID NO: 194817 - DNA, 656 bp, Gossypium hirsutum
  unsure (1)..(656): unsure at all n locations
cgccggttcaactttgatagcttcagtttttgagtttttcagggaaccctagaagaaggggaaatgccaggaataaagggaccctctgattattcacaagaacccccacgccatccttctcttcaaatcaactccaaggtgcccttcaatgccgagccgccgcgttctgctttagcttcctcttatgtgactcctgttgatttgttctacaagagaaatcatggaccaatccccgtagtcgatgacatagagagatattgtgttgatatatgcggtttaattggaactccaaaaaagctgtatatgagagatgtaaggatgctgccaaaatacgatgtcaccgccactttacagtgtgcaggtaataggaggacagccatgagcaaaactcgaaaagtgagaggagttggctgggatgtttctgctatanggaatgctgtctggggtggtgccaaattggctgatgtacttgaactcattgggataccaaagttgacatgtagcactcagtctggtggaaaacacgtagaatttgtgagcattgataactgtaaggaggagaatgggggcccgtacaaggcatcgattccacttattcnagccactaaccctgaagcagatgttttattgcttatgagatgaatgaaaagctctct

SEQ ID NO: 194818 - DNA, 777 bp, Gossypium hirsutum
gtccctctcaatttctgtggtgggattttcaattaacaatggcctccaaagcaagcagctccctcttccaaagcctgagacgctacatcaagaagccatgggagataactggaccctgcgccgacccagagtacaaaaacgcagtgcccaaagccacggagtatcgtgttcgctgccccgccaccactttgcaaaagcccatcgtccctacctccgaccctgaaaccgtcttcgacatcaaatactacagccgcgatcaacgccggaaccgccctccgatccgccgtaccatcttgaagaaagatgacgtggtgaagatgatgagagagaaaacatttgatgtcaacgattttccaaaggtctacttgactgctaaagttgaagaggatgagaatgccgttggcggaggctaccagaaataggcgagcactgagcactgagcacttatggctgaatttaatggtgcaccagtcccatctgattcactctcttagtagcttgttattgaacaaatgcaggtattgtagcatagcaatttcttgagacacttgaagttaaaaggggttgcagtttcggggtttccgacattaataagggtggttgtccacattttttttatttgtttggtttttctttttcagttaatcagcatgcttgtattaatccagatgcaacagcagttggatgatgaatgatataattgactcgttcaagcttttgatggtttttgaaccatgaacaataagaaatgaatcagatatgttgatgaagaattgc

SEQ ID NO: 194819 - DNA, 662 bp, Gossypium hirsutum
gttgaggaaaattctggcttagaggttaattccggcaacaagtccgacgaatccgataagaaatcatcggaatcggactcgttccttgacgtaccgcaacaaaagaaggtaagaaaaacagaaaccaagtgtctgtttgaattaggaaacatgcccctttggggatttacatccatatgtggtaggagaccagagatggaagatgattttgtggctatacctcaatttttgcgagtccctagtcaaatcctcaaagccgaaagtgtaacaaacgggatgaaccgtgacctaacggctcacttctacggtgtctacgatggacatggagggtgtcaggttgcgaactattgtcgtgaacgtatgcatttggctttagccgaggagtatagaaagggcgaaatcctgtatccgcgagggaaatatcaagcacgattggcaggagctatggaagaaagcgttctccatttgcttcatcaaaggcgatgctgagatcggaggagtttgtaacggtgtgaatgataccgattacaaacctattgcccccgaaactgtcggttcaaccgctgtagttgccgttgttagtccaactcatataatcgtcgtcaatagggtcgaatcaagggcagtctctacagtggaaacatccatgccgtatcataaag

SEQ ID NO: 194820 - DNA, 536 bp, Gossypium hirsutum
ccacgcgtccgcccacgcgtccgcccacgcgtacgtgcctcttctcctgagagcagtttagactcgccagatattcatccatttcgggtctcctcatcgggagctgaagaatcaagaaggctaacaagtttatcttctgtcaatatggctgttccaaagggatttcctttatcaaggtctactagtgacgggtatgaagcatcaggtggggaagacagtgatcgagttccttcgagaattatcgagacatcaacaaactggagcaacgttcttttcgattccgaacaggatgatagtatcgttaaactaaaagcaccatcttcatccagccaggctaacattagaatgcttgtgactgatcatgatcgatgaagttagctcgattctggttccgaggctcattctttaatttatgggactaagaatttcaagtaccagagtgataatcctaattcaattgatttgggactttgaatatgtgaagagatgacaatggctgtaaaggcaactctgatttccgtcgaggcaagactagc

SEQ ID NO: 194821 - DNA, 568 bp, Gossypium hirsutum
caggaactgcggggatattttctgtgacaagtgtacccatgctagaattgctcgagacgtgctgatgagaatgctccacaagttagggtttgcgaccgatgcatggctgaaggcactcagaggctgaataatgctaagcaaataccaagtaaacctactgtattgcagagccacgaggatcttgctaggaagcttcaggaagagatggggagaagtcgcagagcatcatcaggctccatgtctgatggctctggtaggcggatgaaggaagttgcctgtcctacatgcacagttcatttgcaggttcaagttccaagctcaggttctgagaccattgaatgtggggtgtgccagcatccttttctcgttagtgcccattgatcaatgcgcttttgtcaccagtgaattgctctttttctctattaatttcttgttgaggtcgtgtttataataaactaatacggatgagctctctattatctcttttgtcatctcttcaagttattgtgaatatggaacttatctcttgatctttaatcaagtcttttgtgtttgaaaaatgtaacat

SEQ ID NO: 194822 - DNA, 724 bp, Gossypium hirsutum
attagcttctctttttgcccccttgccttctctgtttatttacggatatagcattcaggttatgatagcttttagtgaccggaaacctgagagccgccgcaccgctcccgctctcggtttccctcgcgttaggttcttccgtttccggcgcttgacgcaatcgtcgactccgctccacccgtattcccaacaagaaaaaaaaaacggagaagagaagttcatttattacttttttttttattttcttctttatatttctcgtttgaattattgtataatatgacacttggaatatgccgaattccaaaaataatcgtaaggagcaggagaagaaccggaagggtaagttatctgaaaaggcgtcgtcgtttcacgggaaattcccgacggtggctccgtctgatctgaggcggccgaagacgctgcccgacctattctcagagaggactacttccgtcttaccggatgcgaggccgaagttgacgaagctgctgttgaacgtgaccattcaagggagtctcggagctgtacaagtagtgctgtcgccggaaaacactgtcggtgacttaataaccgccgccgttcgtcagtactcgaagggaggtcgccgtccgatcttaccgtcaacggacgcctcgctgttggacctccattattctcaatttagcttagagagtttagaaaggggagagaagctgatggcgctgggatcgcgaaatttctt

SEQ ID NO: 194823 - DNA, 576 bp, Gossypium hirsutum
gtcagggtgtttctagagcactggttgagaactcaagaacattaagattgcctacatatttgcatgaaagattgggattaatccgaaatgcaaaatataggctggaggagaaaggaataacaccgactattgataggattgctgagagtctgaacatgtctcagaggaaagttaggaatgccacagaggcagtcagtaaggtcttctcccttgacagggatgctttccccgctttgaatggtcttcctggagagactcaccatagttacattgcagataaccatgtagaaaacaatccatggcatggagtagatgagtgggcactcaaggatgaagtgaacagactgatcaatataacgctcggagaacgagaaagggagattatacggctttatcatggtttggataaggaaagtcttacatgggaggacatcagtaaacgcataggtttatccagggagagagttaggcaagtcggactcgtggcgctggagaaactaaaacacgcagcgaggaagaagaaaatggaagccatgctagtcaaacattgattttgtaacgcttcaacatacacat

SEQ ID NO: 194824 - DNA, 254 bp, Gossypium hirsutum
gttcaaaaacagggatcagatgtttatatgtacattactagaaatccttgtactctttcctccttaggtaggtggaagcttcatgaagatgaagctttccgtgttcctgtatgttgagtttagcaaaatcgcgtatctgactcagttattggtaatggctaagactcatgagagactgtgaattccatagttttcaactcatatttgtaggataattttatgtcttaattttttttggtttttatttgatctat

SEQ ID NO: 194825 - DNA, 370 bp, Gossypium hirsutum
gaaatgacaattgagaaactatagtaaagacatacaaatttgttcaactgggtccaacttgtttaagaggtgaccataatatgtgtttgttgttagttaattaaatagatttagttgattttcatgtgtctttgctcaatttttcccaattttaagatgaatttagagaagcaatggaggtacccatttttctctttgaaatttcatgcacctagaaaaaaaaaaaagggaaaatctggaaagcttataatttgaaaattatgctagtgtttgtgttggtttgaattaaataagcatattttgtcaacattaaatgctttgttatttttgtttgtctcaagttatattttagtcacttatatttgaaatg

SEQ ID NO: 194826 - DNA, 460 bp, Gossypium hirsutum
ggacaatttgcagtccagcttgcagaactggcaggaaacaaagttgttgccacttgtggaggaaaagagaaggccaggcttttgaaagatttgggggttgttcgagtcatagactacaaaactgaagacatcaaaaccgttctgaaaaacgagtttcctaaaggagttgacattgtctacgaatctgttggtggtgacatgtttgatttgtgtttgaatgctttggctatccgtggacggctcattgtgataggaatgatctctcagtatcaaggggagcatgggtggaagccaaaaaattatcctggtcttgtcgagaagctcttaaccaaaagccaaatctgtggctggcttttttctggcacaatattacctatttatggaaagaacaccttgctagacaatttgatctttactctttggggaagcttaatggtgcaataaattcaaaaagattttt

SEQ ID NO: 194827 - DNA, 395 bp, Gossypium hirsutum
ccattttagtgccattttctccctcccttgcttttgggtttttctttttagggtgcttggtatacatgcttcgcgcggttcaagaagacatttgcttatgtttttcttgccaatggaaaatgtttagttttccctatagtcattccccaaacagtcttcgggtcactatgtacaacagaagtgtagttaaagtttgagggatatataatgaagtatatatagttgctttctcatatgatgtaccatatgtcgggttttatgtattgttggtttcaaatataaaaaataacatgggagggcattccgctttaatagatatttatttatttctttctattttacttttttataataatctttactttgttgccctaataaattaatcctattttaat

SEQ ID NO: 194828 - DNA, 464 bp, Gossypium hirsutum
atcagcaaacatgttgaagacttttgatgttcttgaagtttcaagaaggtatgggtctttttataagattcaaccctcaccaaaatatatattggggttaaaatataaggcattgtttctacatttggagccttctatgttactagaaacaaaggacgtcgagctaacatccttgttggtgcagacagcttcttcctaggaggagctagcaatgcaggtgcggtgaatatcacaatgttgatcataggacgcattcttcttggtgcaagcatctaaatgtgtttggtattttaggtatccaacatttattgatgcacttcagagatttggatgatcctttttacaatgctgcacctgtttgcaatgttaactttgaatctttgaatctttgaatctttagatttaggatttgtttgaattatccttctaattagttactttttctcattttctacttggataga

SEQ ID NO: 194829 - DNA, 497 bp, Gossypium hirsutum
gcggggtactttacctgtagtaggcgaatgcctggttcacttggttatgaagagcaggatgctaaaacctttgcttcttggggtattgattatttgaagtatgataactgcaataatgatggctcgaagccaacacaaagataccctgtcatgactcgagctttgatgaaggctggccgccccatcttcttttctctgtgtgaatggggagatatgcaccctgctgaatggggtgctcctttaggaaatagctggaggacaactaacgacatatccgataattgggaaagtatgatctctagagctgaccagaatgaaatttatgctgaatatgcaaggcccggtggttggaatgatccggacatgctcgaggtggggaatggagggatgacaaaagatgaatacatagtacatttcagcttgtgggctatttcaaaggcacctcttcttcttggttgtgatataaggaatatgacaagagacacgatggatatcat

SEQ ID NO: 194830 - DNA, 914 bp, Gossypium hirsutum
gccaatcaaccgtggaggcttatcacttgcttctggctgcacgctggtgttattcatcttcttgcaaacatgttgagcttgatcttcattggaattcgccttgaacaacaatttggattcagtacgttatctgttcccttttgcagtggtagcgtactatcgtctcttttcattcaacgtagcatttctgttggtgcctctggtgctttatttggccttcttggagcaatgttgtcagagctgctgactaattggactatctatacaaataaggctgcagctctgatcacactcacggtcatcattgtcattaacttagcagtgaggattcttcctcacgtcgacaactttgcgcatattggaggtttcttaaccggttttctcctcgggttcgttttgctgcttcgtccccaattcgggtgggtgggacgtaaacatcttcctgccggtgctcgtgtaacatctaagcataaggcataccaatacctatttttggtgatcgctatggttttactcattgttggtttcacagtggggttggtaatgctgtttagaggagagaatggacatgaccattgcagctggtgccattacctgagctgtgttcctacatcaaaatggcactgtgggaactaagcagacctttattacatatcgttccctgattcttttctggtttcctttacattttttacatttgttaatttcttggtgttgttacgtgcctatgtgtatatatatacatacatacgtacatggttagtttttagacttcgagttattttattcactgttgttatgtgatttgacattttatacgcagcttggtctacatatatattataagcgattttacttgaagaaaatacaagaatatctttcagtttttcccaaaaaaaaagtcgacgcggccg

SEQ ID NO: 194831 - DNA, 900 bp, Gossypium hirsutum
tttacgcgtccgcccacgcgtccgatcggcgacttcattccggcgcttgaatggctggatctgcaaggggtgcaagctaaaatgaagaaactccataacaaattcgataggttcttgagtgccattcttgaagaacacaaaaccaaagctcgacaaagtaatgggcaagtgaaacacaaggattttttaagtacgttgatttcattggagaatgttgatggcgctgaaggtggaaagctctccgacactgagatcaaagcattacttttgaacatgttcacagcaggaactgatacatcttcaagcacagttgagtgggcaatggctgagctaattcggcatcccaacatcatggctcaagttcgtaaagaattggactcagtcgttggtcgagaccgcctcgtctccgacttggacttgcccaatctaacctacttccaagccgtcatcaaagaaaccttccgcctccacccgtccaccccgctctccctccctcgtatggcctccgacagctgcgacatcaacggctaccacatccccaagggcgccaccctcttggtcaacgtatgggccatttctcgagaccctaacgagtggaacaacccgcttgagtttcggcccgagaggttcttgcccggcggcgaaaggccgaacgctgatgttaggggcaatgattttgaggtcataccgttcggcgccgggcgtagaatctgtgccggaatgagcttgggattgcgcatggttcaactgttgacagcgacgttagcgcatgctttcgagtgggagttggctgatggattaatgcctgatatgctggacatggaggaagcttatgggttgactttacaacgtgcggcaccattgatggtgcatccaatgccaatgctatcaaagcatgct

SEQ ID NO: 194832 - DNA, 759 bp, Gossypium hirsutum
ccttcttcgtccgggcaacgcctccaccatatcttccgtcaaaaatcgacatctggaccatcctatccgaatccaggcgcatactcaaagcccacagtggccacttccaagctctctcactcctctttctcctcccttcctcttgttttttatccatttatcccttcatctatcaacacttctctcccaccattgaatcccacctcagcttccttgagcaaaatccccgcatcttccccattaaactccccatcttcaatctcctttacaccctcatcctctccatcttctctttcttcgctatcggtaccatcacttacagcgttttccacggcttttacggtcgacccctcaaccttttatcctcttttaaggcagcatccacttccttcttccctctcctctcgacttcccttgtaacccagtttatcgtttatggaatcagcttagttcttggtttggtcttttttgcattaatcaaagcaacccaattttactcttcacctactttcatcgtacttatcctcgtctatgtgatcattttcacgtctactataacttatctccaactgaactggatatttgctcatgctgtcgtagtagttgaatcaagctggggacttgaaccattaaagcgaagtcgaaatctagctaaaggaatggaagggcgtgcctttaaagatgatgctgtttttcggcttcttctttgcgtgtaatatctggctctcaattcaaagactggaggatccagctggtgat

SEQ ID NO: 194833 - DNA, 389 bp, Gossypium hirsutum
  unsure (1)..(389): unsure at all n locations
aaccagtggaacgctggatattatggatacagccaaggatatggttacggctatggcgctgccccacaagaccccaacatgtactatggagggtatcctgggtacggaaattatcaacagccgcagcaacagcaacaagtcggatatagctaagtgctgatattaactgtctttcgtcgctgctgttctctctttaccagtattatgaacttgtgctacttgatttctcctttgtttcgctatagggggatataaacttaaagctgtgttattcacttgttaaatagcatatgcactgtataaaccttcttttattacaaaaattttgtacttaanaataaatatttattttattatttaatatataaatttttattattttttttatt

SEQ ID NO: 194834 - DNA, 464 bp, Gossypium hirsutum
cccacgcgtccgctaaatcttcgctaattgtttatgcccattctgctctcccataaaaaccgttagagatattcctagggtttgcatttgcggtttggggtatagggttttagacaacgccaaatcttggatttgaggaatggcgactgcgacgggacaggtgaacgcgaagagaaagccggtgttcgtgaaagtggaggatttgaagcccggtactagtgggcacactttgatcgtcaaagtggtggagatgaccccagtcaagacttccgccaggcccaacaggtcccgtgctctcctttctcgacctgtccctccggtccggatcgctgagtgcgtcgttggggacgagactggcaccatcatcttcaccgcacgcaacgaacaagttgatcttatgacaaaaggtgcaacccggattttacgtaatgctaagattgttatgttcaagcgaacaacaatga

SEQ ID NO: 194835 - DNA, 427 bp, Gossypium hirsutum
  unsure (1)..(427): unsure at all n locations
cagtgcgcggtttgtatggacgagttcgagcaaggggctgaagcgaagcaaatgccctgtaagcatctttatcacaaggactgcatacttccgtggctggaattgcataattcctgccctgtttgtcgtcacgagctgcctaccgatgatcctgattatgagaggagggttcgtggggcgcaggctactggtggaggtaatgacggcgatagtagtggcggtgataatgagcagaggtcgggggataatcggacggcggagaggagttttaggatatcgctgccctggccgtttcgggctcgtgggtcgggttcaggatcaggatcaggtgataatccgcagaccaggcaagaagatttggattgaagactccttgaagtgctgccaaatatcangcatttctatcatgagacatggtaatagatcg

SEQ ID NO: 194836 - DNA, 1001 bp, Gossypium hirsutum
ctttgttcatcaatactaccttatcttacatcaatcccctgagctggttcaccggttttaccatgatagcagcaaacttggccgccccgaagaaaatggcggcatgagtattacaactactatgcaagccatcaatgagaagatactctcacttggttatggagaattcactgcagaaataacaactgtagacgcacaagactctcacaatggaggagtacttgttcttgtgactgggtatttaactggaaaggacaaagtgaagaggaaattcactcagagtttctttttggcacctcaagacaagggctatttcgttgtaaatgatgtttttagatttgtcgatgatacgaaacatcaacctgggagccaggacccagttaatggttttgaggcttctcttactcctgagcaagaccattctcctgttccagagaatcacattgagcaaccggctgcattgcctgaagaatgtaattgaccagaagtgtacaatccttccgagattggagatggctctattgaggaagaggaatcaccagcggctgaggttgttgatgagattcctgatgattcaaagatggtttctgattctaagcccgaaatggaggaactgccaaagaagtcatatgcgtctattttaaaggttttgaaagagaatgcagtccctgtatcggcacctacacatccccctgtgaagcctgcagttaagagccaggagcatcctcgaattgctgcaccaccttctgctccgatgcctgcctctgatgctcaggtttctagcaacaatgttactgaaaatgggaataatcaagatgcagaggctgagggtccctctgtctatgtcaaaggtctgcccttgaatgctacgcctggcatgctggagaatgaatttaagaagtttggacctattaagagtggtggtattcaagttcgaagtcagaaggggttctgttttggttttgtggaatttgaaatggcaagttctgtgcaaagtgcta

SEQ ID NO: 194837 - DNA, 741 bp, Gossypium hirsutum
cggaagtatcgagagtctctcacggagggcttctacatttcaagatggaatgaaccaggacgagcggaggctgatttcggacgattcgatgctaaaaccgttgtgaggaacatctacatactgttctcgagaagtgaaataccaatcgcagatgaaaaacaaggaggtcatggatatggtggatgcttctgttcctcttccaccttggttcaccgaggaagatctcgcaacatacggagctttatatgagaaatccggattcaagactgcattacaagttccatataggtcattcgatgaagactttgggataacagatccaatagttaaagttccggcattactgataatgggttgcaaagattatgtcttgaaatttcctgggatggaagaatacataaagtttgggaaggcaaaagaacttgtccctgatttggatataatatatttgcctgaaggaacccactttgttcaagagcaatcacccgagctcgtgaacgagctaattctggacttcctccggagccatatgtgatagtgtgccgtgtctaagatttgaatggtgtttgtatggatatgaaacacagttactgtaatgtaattaggggacaacaggctatgtgtatggttttattgactggaataaatcagagacccactggtagtggaggaccctgaatgcaagaataccattaatttttagatgaatttgattctccgcgttgggttgtttatttttat

SEQ ID NO: 194838 - DNA, 1080 bp, Gossypium hirsutum
aaaaaatgatgaatcagatgcttaaacaagttattggagttccaatcaaagcaacgacatatggagttgggagaagaacatcaaggcaatacttacctgatgttgcaggccaataccacatttcacaacaagggtctacaaaaagttggcctccctttcaatacttactaatggtagatatgggatgttttcattttctaatgggaaattgtttgtaactgcaggcaaaggaaactttgtttttaaaaggatgaacttgctagggaagaaagctgatacattcgcccatggtgtccgagagcatggtatgaaccactctcatgctatcagctatattaacgtctcttaagattaaagggaaatgaaagcttaaggttaccggttttttaaaccggcgaggaaattggggacaaagatcagtgaaacagtgaagggaaagctgagtttaggggcaaggattcttcaagtaggagggttggagaagattttcaagcaattctttagtttcagagaaggagagaagctgttgaaggcttgccaatgttatttatcaacaacagcaggccctattgcaggcctacttttcatctcatctgaaaaggttgccttttgcagtgagagatcaatcaaagtcccttgtccaaatggagaatttctgagagtccattacaaggttgtggttccagttgagaaaataaagggggtgaaccagagtgaaaacatgaagaaaccatggcaaaagtacatggaaattgtgacagtggatggttttcgatatctgcttcatggggttcttgaattatcacaaagctttcaagtgtctgcagcaggcaatctcacagagactggaagatgtagacactttcaaggtggcttaacaaatgtttcatgaaccatgagattgttttgataatgaaatgtggaagagtaatcagtaaatcccagttacaaacgtaaaaaaaaaaggttgttctagattgagtatacattccttaattaaggatcaaaattaaattctattttatgttgatttttactggaatattttatatccggcatgaatataatatgttttggacc

SEQ ID NO: 194839 - DNA, 448 bp, Gossypium hirsutum
cccacgcgtccgagctgattggcttgttgagaagtgtactgaactgggagctagtagtgtaacacccgtcctctctccccgttcttctaccatctctgacaatcgggtggagagattgcagcgcggcattttagcagcagctaaacaatgccaacggttgcatgaaatgaaactgaatcatcccatgaagattgataatcttatacctcttggtgccaagtcgaagcagtcttttatagccatagccgaagggactcccctaggtagtgcattgactgcaacaacaaaaggaacctagggggctgataatagtcggaccagaaggggacgttacagagaaagaggtggatttgattacagaagcaggagctacagctgttggtcttggccctcatcgtttgcgtgttgaaactgcaactatagctattttggcaacccttactctatg

SEQ ID NO: 194840 - DNA, 594 bp, Gossypium hirsutum
  unsure (1)..(594): unsure at all n locations
ggagcattcgcggcacctgacaaaatacattgttcacctgccctcccaaaaacaaggagtgggaagataatgcggaggattctgaggaaaatcgcggccagacagttggatgaactcggagacacaagcacactggccgatccaggtgtagtagaccagcttattaaacttgctgatacctgaaactgaaacagaaaaacacactaaagtacctagtcaaagaaccaactcaattgcacacttgttgctggatatcattcccatttcgacagtgagttcagtatctttctggctctttatttttatcttgatggcttatatagcttcatctagtttgatttttaagtacttaatttgtctcttttttttacccatctttggaggttgcttcatccatattgatatttttattttctaaaccccccccttcccggccccggccaacctaatctttgtatgtatgtaaactaatgtacatttgtactctttcaaaaataatatagggatatgataataataaattaaaaaaaaaaaaaaatttcttcatttttttanttttttttatattatatttaattttatttatattataaa

SEQ ID NO: 194841 - DNA, 583 bp, Gossypium hirsutum
cccacgcgtccgtggacataagaaagcttgtaaaggataatcttattataaaaaagcctaacataagtcgatcgggatggaggtacaggaaaggtaaggatgttgggaatcctaggagaaaaggatatgggaagagaaagggaacaaaggaagcaacgctaccatccaagctttcgtggatgagaagagctcgagtcctaaggcgactccttcgaaagtacagggaaatgaagaagattgatatccgcctgtaccatgaattttatatgaaagccaagggaagcgtttttaagcataaacgtgcacttcttgaggcccttcataataaggctaagagtgagaaggatcagaaggttcattttgatcaggttatagctattaaagccatgggtaaattaggtagcaaggagactagggttccacggaggaaacaatgttcgagtccacctgtggaagttattgatgtgttgaataatgcttatttagtttgaaagtgtatgtataaaataaagttgatgtaataatgcttattacatttataagtaagatttcggaattttgtattagaaaccaacacgaatga

SEQ ID NO: 194842 - DNA, 398 bp, Gossypium hirsutum
ccaagctctccataccgccgccgccgcctgtctaggccgatccacggcctccgtcgtcccagtctccgatcttgacggagatggaatggaccgcgacaaagccaggtgtcgtgcgcgcgaatgacgcgcgtggggaggccaatctccgagtcctgcggcgactggacccttgctggaggcaggggcttgcggcgctaccggcttctagggtttcccaacccttcccttttccattaggttcgggcctgggctggggtgaattgggtattgggttttaacttttttgggcttgctattgtattttattattggtagggccgggcaaataattggtattacaggttttatttatttgtatattaaaatgtcatgtcattaatttctacaaggtttaacgg

SEQ ID NO: 194843 - DNA, 650 bp, Gossypium hirsutum
aaaagaatttataactctctcaatacagcaggcatacaccttgaatactcacattggtaaactcaaactcccagtaacatgcatgcctgtatttcccggcctcagcatatttcttatactgtgtctctattactccgtattcgttcctgtatcacgacgcatcaccggtcatccacacggtgcttctcagcttcagagagtaggcattggtctgtttatttccatcttatctgtagcctggggtggggttttcgaaaggtttcgaagaggctacgctataaaacacggctacgagtttagtttcctaactcccttgcccgatctaagtgcatactggttgttgatccagtactgcctgattggtatagctgaggtgttttccatagtggggctattggagtttctatacgaggaagctccggatgcaatgaagagtataggctctgcatatgctgctatagctggtggcttgggttgtttcgctgccagtataatcaacagtatcgtcaaatcggttacaaggaacccagagaataagcagcggtcctggctatctcagaatataaacaatgcgaaattcgactatttttactggctgcttacagttctttctataatcaatttctgcttttttctgtattcagcacatt

SEQ ID NO: 194844 - DNA, 410 bp, Gossypium hirsutum
acgcaactttgcgccgctcttcagccttaaacccgatcggactccgattcagacggagcaaaacaggttacgatggcgcctactctggtatacgggcgtgagggtgcgcatgtacggagttgcggcagagtgcaggcagaaggcgtggtccctggtggtggcgtggctcggctcggaggcgctacacgagtgagggggaagcctggctcagttgcggcgctggaggcttaccctagctgctagggttttctgattttggtctctgctaggctaggtgttgggccatcaggctattaggtgttgggctagtgttagggtagtttaggttaaaagtggtttgggccacgtaattgggtctgtaattggacattttgggacatttaattatttttggtttttaaaaagaaaaa

SEQ ID NO: 194845 - DNA, 400 bp, Gossypium hirsutum
cttgttgatactataagtgcagtagcgtaagaggatgtcctgctagaaaacatgtggaaagagctttagatgatgcttcaatgctaatagttacatatgaaggtgatcataaccattctctatctgttgcagaaaccaccatacttgaatcttcatagatgaacaatattttttcctgttattaatgttagtaagttttactgttcatgttcgggattggaggatattatctaatctgctcgtttatttccttgtaaattatatgctttgtgctttctttaattgaaagaccatttgagatcaaaagggaagaaaaaagatgttagatttggtattagattttgcaattattgagggattgaaaattcaattccaaattaaagtttccaatgccaccttt

SEQ ID NO: 194846 - DNA, 670 bp, Gossypium hirsutum
tttatgcgaccaagttactaggcagctcagaatggatggatggcctgccctgtcgatccatggtgataaaaaccaggctgaaagagattgggtcctggctgaatttaaaagtggcagaagtcctataatgactgccactgatgtggctgcacggggtcttggtaggatcactgtgttttaggagtcttagcatattcatgtaggtcttgaaatggtgaagataagcgagtctgccggctgctttccagtttcctgagacagtaatttgtggcttgggtgcgagttgccatgatgtacatttatatttttgactgataggcatgatcctccactttaggggagttactggacacaaggagcataatttgcttagacagctgaggtggtgatctataatttggatggttgtgcaatacaaagctcaggcaactctgttcctttgtttgagaagttttatatcccgattttaggttgagggaaaagaaaaattagaaagctctgttatgtctagttgtatgtacttgcttgaattgtctgaattggcacgactccttataatcaagtgtaagtaatatggttgaagttgtagtgtcgcccatccacggttatggagctggtctttgtggcagcctggttgactcagatttgcttatgttccttgattgggtac

SEQ ID NO: 194847 - DNA, 293 bp, Gossypium hirsutum
ctgcttttgcacaaggtatgggctatgatttactccacacatgaactgattacaaatggtgggtaatatattagttaccactataggttgactaggatggtagaccaggcaatgtttcctcatttatttcgttccttcttctttcttttcttatttttatgatgattgccgaaacagagatcataagctatgtagatttatcttctcattacagtccttcaagaatggttcaccctataaagttgcaaggtacatcataatgcacaatataatcctgtgtttgtcagctatta

SEQ ID NO: 194848 - DNA, 973 bp, Gossypium hirsutum
ttcacgcgtccggccacgcgtccgcccacgcgtccgatcgagttctttgttaacgaataaggatcttttaagatacgccggatccgctaaaatacgccgatccccgttcgtcttccgatcatatggggctgcttgaccagttgtgggatgataccgttgcgggtccccgacccgataatggtctcggcaagctccgaaagcactccactttcactttccggcctaactctgccaaggaatcggatggcgggagtgtaagatcgtacggtgatgaagcgccggaggaagcgacgagagtgacacgtagtattatgatcgtaaaaccgcctggttaccagagcggatcggcctccggtttcgccggccggatcgacccctccggtatctcctttttccggaggcagagaatcatatcggtttcggagaaggtccacatcggatgcatacgagaaggctaacgaggttggaccaaggagcccttgtcctcctccttacgacgtgtgagatatgagtcctctcccatatttggcgacaaatcaaatgggttttggtactgtttgcatgcttaggtctttcaaatgtgaaacttatagtgtagtatggggtaatgtatgcaagaatgtagtctggtcgtatatagagcttgtaatagtacggttcggccgttgtttgtcggaataagatttcggtgttggtttctcttttgcttatatggatcttaaaactgtaattttatgttttggtgggtgtgtggagccagggttataatagtggatgatgaatgtgacggtgtttgctaaaggtagaacagataagagcggtggtggtggatgcaatgggggttatggacaaatggtgggggcttatcgatgattaatgtcgtggaatttggtattgtcaaaatctgtctttgtgggatcaatttggttgtatgattgggatatgaaaatggaaatgtccgttactgcttatt

SEQ ID NO: 194849 - DNA, 658 bp, Gossypium hirsutum
  unsure (1)..(658): unsure at all n locations
tctttgacgcgtgggccgcgtccggttatttttttaaacaaagatccccgatctcctgcttagagttagtttctcatatttatggggctacttgaccagttgtgggacgacaccgttgcgggtcctcgacccgataatggtctcggcaagctccgaaagcactccactttcactttccgctctaactcctccaaggaaaccgatggcgggagtgtgagatcgtacaatgatgagacgccggaggaaacaacgaaagtgacacgtacgattatgatcgtaaaatcgccgcgttaccagagcggatcgcctccggtttcgccggccgaatcgactcctccggaggaagcagagagtcgtatcggcttcggagaaggtcaacatcagatgcatacgagaaggggaaggagggtggaggtaggagccttgctcctccttacgacgtgtgagatgtgaacctctcctctcctctctgctgatcccccaattcgccgacaagtcaatattaatttgcatagtttctacgtttatacagctgaactttataatgttaattagagtttgcccactttgttttttttgcatgcatgtatgtatgtatttatgtgtacttgtttttgcaatgtaactacttttatcatcatggnatattatatataat

SEQ ID NO: 194850 - DNA, 547 bp, Gossypium hirsutum
ttttgaggatggaaatgatgatgtgtatgtgaaagcagaaggagataggagaaacgaggcgtggtaatggacgatagaggaggttcatttgttgctgttaggaggatttctcaaggtctcgagcggggcattccctgccattctacttctgctgaggttgtggcaggatcaacagcatggttgggtcgaggtctttcttgcgtatgtgctcagagcagagagagtgatgctcgtccatcatttgatttaactccttcccaggaggaatgcttgcagaggctgcagaatcgtatagatattgcttatgatagttcaatccctgaacatcaggaagctttaagggccttatggaatgctgcatttccagaagaagaactacgtggtttaatatctgagcagtggaaggaaatggggtggcaagggaaggatccatctacggattttaggggtggtggctttatatcattggagaacctgttattctttgctacaaattttccgaaatccttcaaggatcttctttggaagctggaaggtgatcggtctg

SEQ ID NO: 194851 - DNA, 844 bp, Gossypium hirsutum
tgtggacgcgtgggtttgaaccaaagggctgtagcagtggtggtggacccaattcagagtgttaaagggaaagtggtgattgatgcattccgcttgatcaacccacaaaccatgatgcttggccaagaaccacgtcagacaacatctaatctcgggcatcttaataagccatctattcaagctttaatacatgggctaaacagacattactactccattagccattaactaccggaagaatgaactcgaggaaaagatgctgttgaatcttcacaagaagaagtggacagatggactgacacttagacgtttcgatactcattccaaaacttatgagcagactgttcaggaaatgctgaatttagctataaaatacaataaggcagtgcaggaggaaggatgaattacctcccgagaagctggcgatcgcaaatgtcggccggcaagatgccaagaagcacttagaggaacatgtctcgaacttgatgtcgtcaaacatagttcagacattgggaactatgctcgacacggtggtgttctaaaactcttttagcacctgtatactcttttttcatattcaggaactatcatagcttgttggtcaaaaaactgccattgtattgtcaaatttgaaagggactgtcatgttgtctcattaatctctctgttatcccctctgatgtgtaagtgggattgtgaagatgtttaacttttgttacttgccttctgatagttttctgagattcttcaaactaaaaaggccttaatggaatgctgcatttacagaagaagaactacgtggtttaatatctgaacaagagaaaagaaatggggtgacaaaggg

SEQ ID NO: 194852 - DNA, 745 bp, Gossypium hirsutum
gatggtggtgatttagctgaaacagatgctttattaaactttgatggtgatgctatttgtaaatcttgctatgagagtgtgaattcacttttgctaaattctcctaatgatgttcatgaagatgatacatcaaagactaaagaacatgagacattagtttcagatatgtgtcctggtactttagaagctgcaacttattcttcaaagttggatgaagttccagaccaacagtcacattctgggcacactgaacagttgtattctgggcatccggaaatcaatgtgccttcatctgcatcgcggtcaaatcctcattctcccgaacttaatgatgaaggttgctgcatgttgaacagtgaggatcctgaaatcccatgcaacgatgatgttctcttagctaaagcttttgctccacaagagtgtcataaagtgggcagtgaccaggcctcatcctttgcaaatcaaaatgatagtaaagaagaactgagcttgatgcagacagaagataatctttgctctatgttttactgctcccaagatggtaggactggttgttttgtcggaatctagtcaagctgtcaaatctgagttccatgatggtcaatgtcatgtgatttccagacaggctcagaattccgtggttgacccatataggttcaaaaccacccacgcatttcccaattctgctgcaaatggtgcagcaaaggaagagccgtcagatgaatgccatacccaaaatattttt

SEQ ID NO: 194853 - DNA, 431 bp, Gossypium hirsutum
cggacgcgtgggcaaccttctgtttttttctcataaaacctccccactactgatttctctatataatctaatgttctcccgttgttttagccgtctttaacacttttcaatggcttcctcttctgttattgcttggggctcaggtgaagatggtcaattgggtatcggaaacaatgaagaaagagaatgggtttgcgttgttcaagctcttgagcctcacaatgttcgctccgtcgtcgctggcagccgtaattctctcgctatttgtgatgatggcaagttgtttacttggggatggaaccagagaggaaccctagggcaccctcccgagaccaaaactgagaatattccaagtcaggttaaggctcttgctaatgttaaaattgttcaggcggctattgctgggtggcattgcttggctgttgatgatg

SEQ ID NO: 194854 - DNA, 614 bp, Gossypium hirsutum
cccacgcgtccgcccacgcgtccgatttgcttatcagatatccttgaaggctagtgaaagagacgtttatgagttcttctctagggctggcaaggtacgagatgttcgcctcataatggatcgaaactcaagacgttcgaagggggttgcgtacgttgagttctatgatgtggatgtctgtccctatggcaatagcactctctggccagcctcttcttggtcaaccagtgatggtgaaaccatctgaagctgagaagaatcttgctcagtcaactacatctgcatcagctggacagactggtccatatgctgctggcggtagaaagttgtatgttggtaacctacatttcaacattacagaagatcaactgcgtcaggtttttgaaccttttggttctggggagctcggtcagttgcctcttgatgaaactggtcattctaaaggttttggttttgtccagtttgcccgtctggaagatgcaaagaatgcattgaatttgaacggacagctggagattgggggtcgagtaatcaaggtatcgactgttactgatcaaggtgtatcgcaagattttggaacaaatgcttctgctgctgatcttgatgatgatgat

SEQ ID NO: 194855 - DNA, 749 bp, Gossypium hirsutum
acggggtttcaatcatccatggccacccggctagcgagaaagctgccatcatcgctctcggcgttttcctcatctccgattaccaaattgacgtcgggcatctcacctccgtcgatgagccatggcggacccggactcaggtgtgcctcctcttcctcttcctcttcctcatcaacagcaacgactggatcaaattcttcatcttctaagcgtgagaagaagataacagaccgtctatcagccgtcatagacgccgtcaacgaccgtaaagtccctcccgagctccgtggccaacgcaacaacgttagatcggaaaccgacatcatcaacgtagttgagcaaagaatatggcattcaatggaagagggtcagttcgagaatttagcagggaaaggtaaacctcttaaccttaacacaaatcctcatgcagatccagctgaagacaccctttataggatactctcgaagaacggatgtgctccggagtgggtagaacttaacaaggagatcaggaacaaagtatccgaatggcgagtcgctgtgtagaaagcatgggacaagcaaatgcaatggaatgatgaaaaaaatggattggcgttgggaatcttgaagagcaattcgtgccatatcgtaagtttccggatataggatgttccgtcggcgccaagtacgatgaattggacaatatggccccttgaaataccataggtgtttagtttgtggtacctagtttgtcgtttgggtccaaa

SEQ ID NO: 194856 - DNA, 432 bp, Gossypium hirsutum
accaaagggtcaaaacaaatgggatatggctgcatatagcagagcaagggacaggaccacttgttctattgcttcatggcttccctgaaatatggtattcatggcgccaccagatcactttcttggctaaccatggctatcatgtagttgctcctgatttgagaggctatggagactctgactccccacttagcccaacctcctacactgttatgcaccttgttggggacatcattggcctgcttgaccattttggggaacagcacgcttttatagtgggacatgattggggagctggtattggctggcatctagcactgtctacacctgagagagtcaaaggattgatcaacttatctgttccatactttagtagaaacccgaatgccaaatttgctgaattcttaatcaaaacatattgggatggaattt

SEQ ID NO: 194857 - DNA, 464 bp, Gossypium hirsutum
gttatcctttacatcttactttgtggtgtcccacctttctgggcagaaacggaacaaggagttgcgcaagcaatttttcgctctgttatagattttaagagggatccttggcctaaagtttctgataatgcaaaagaccttgtgaggaagatgctcaatcctgatcctaagcaacgacttacagctcaggaagtactagatcatccttggttgcaaaatgcaaagaaggctccaaatgtttccttgggtgagaccgtgaaggcaaggctcaagcagttctctgtaatgaacaagctcaagagaagagctctcaaggcaatagctgggcgtctctctgtggaggaagttgcaggcataaaagagggattccaattgatggatactgccaatagaggcatgattaacattgatgaggttaggggtgggttgcataagcttggtcataccattcctgatgcagatct

SEQ ID NO: 194858 - DNA, 420 bp, Gossypium hirsutum
acgcccacgcgtacggaaaagtagcaccctacaagtacctttaattctgaatttgaatttgatagggtgggggattatgggttatgtttcagttatatgatttatttataatatataaatatgcagcatgctggtgcttgtgatgaaaaaggaaatccaattatcaaggactactatggcagcccgcttgccgcaagtggtaagccttacgacactatgttagtggctaaatctgaatgtgtctatactggttctggtgatcaacgttcctccatgtttgcatttaacatggaacaagggcttcctgtcatgcccgagtggctgttctgcaacagagtgaattctcgggcaagaaaagttgttgaaaattggtcctactcgccttcttttaagggatgcatgggacatggctactgaaat

SEQ ID NO: 194859 - DNA, 1049 bp, Gossypium hirsutum
  unsure (1)..(1049): unsure at all n locations
agacaactgagatggcaaacaaggatctcgacagatactacaacgcacttgacaaagcacttatgcgcttccattctatgaaaatggaggaaataaacaaaattataagagaattgtggcagcaaacatacagaggacaagatatagattatattagcattcattcggattctgaaggtgctggaactcgttcttacagctacaaggttcttatgcaaaccggtgatgctgagcttgaaatgagagggcgatgtagtgcaggtcaaaaagttcttgcttctctaatcatacggttggctttagccgagacattttgcctcaactgtggaatcttagcattagatgaaccaaccacaaatttggacggcccaaatgcagagagtctagctgcagctctccatagaatcatggaggacagaaaaggccaggagaattttcagctgatagtaatcactcatgacgaacgctttgctcaacgcacgccgtcatcggcaacacgcagagaaatattatcgtgttgcaaaagacgaccatcagcatagtataattgaagcccaggagatatttgattgaattctttcaacgggttttcctcgatacttcatccccagagcgccgtttcatcgagattgaatctgtacatgcaacccgatgctgctcctgaaatcaaagtgaggggtttgtttgttatatgtagagtttataaatgtagtaactaaatacattatccattttccttgtcatacaggttgtgttgtgtatttcaagttcttgccatggaaatgcaaaaaaaaaaaaaaaaaaaccactgtaggattatgtttaggcacagtgcatgctttttgaacttagtagcagtggagcataatgtagaaatcagtgaaaaatatagaaaactttcacaaaattgtgaatgtgaaatgttcttcagattggtcgggccgtangccgatttcttctccaaggttttactgaagcccgaatcaaaccgaacttattattccaaaaatattgaaaatactttttatagtaaaattaaaataaaacaa

SEQ ID NO: 194860 - DNA, 431 bp, Gossypium hirsutum
catgtcacctctagcgatggaaggactgtgaccagcttcaacgtggcaccgggaaattggcgggttggacttacatttgagggcgatcagttctagagtttcaggacagttaagggtctttaaatggaagcttgtatatgtaatagccattgtttgagagaggggaaggtttttgttggtgagttagggtaaaggagaggctcagccggccccatatggctgtcaattgctgacgtgatttattggcacccgctaggcctatacatatatctttacttgattgatgatgatcaaggatattttcatctgtttggcttttgtctaattcatcacagccatgccatggaacgaatcataacatttatttaaaagatgtctttacttaaaaggcgacatcaattgtcctttttaaaatatgtttaactttatgg

SEQ ID NO: 194861 - DNA, 569 bp, Gossypium hirsutum
ctgccgggtagtgcggatggttctatgtataacatccctactggaggtagtgattatcctactcccgtgaatgataatggcagtaatgctgacataaaaggtggaaggccaagcccgtatatgcaatctccttctccttggtcaaatcaaaggaccccactaagtgttgatgttaatgttgcttatgtggaagggcgggaggaggtggacaggggaacctctaatcaacccctgacacaggacttctttatgatgtcatctggaaagagaaaacgtgaggattttgcacaataccaaaatggtggatatataccccaacaagatggagctggagatgctacatctgaagttgcaaaggcagagggaagtaggggtggtaatttcctggatagacgtcactcaacaaccactgcaaaaagcaagatcttggcagagttatctaagtcatcatcaaagattcctcaactggatggtccaattcctgatccgtacgaagacatgctttctactcccaatatatacaattatcaaggagttgttaatgaggactacaatgtggtgaacacacc

SEQ ID NO: 194862 - DNA, 418 bp, Gossypium hirsutum
atgtgcaaactatagacggatataatgcctgctggttgctgcaaacagccgcaatccatgaagaaaagatagagcgaagctcagccttagacatttgttttgcactcaatgggatgtatttgttgaaagtaccgaaaatcactttcgtctaatgtgctccgtttccatatgtatttgtaaacaatttattcctccttggctgacctgttttaaagtctcaaaaaaaaaaaaaaaagaaaaaaaaaaaaattaataaaaaaaagacaaaaaaaaaaaaaaaattaagatagaaaaaaaaaaatataaaacctataaaattaaagagaaaaaaagacaaaaaataaaaaaaaaggggggcccttttaaaaggtcccaggtttatatacccgtgcttgcaaggaaaaattttttttatggg

SEQ ID NO: 194863 - DNA, 455 bp, Gossypium hirsutum
atttgtaaaatcaaatctttggttctgttccagtccggacaagaaaaagagcaaagaaaccgtgcaaagattctggcaaagcgaatggctcaaaccatctcctacattaccggctctcaactccttccccttaaacgccttccgaatatcgccatcatagatgttagggatgatgaaaggagttatgatgggcatatagctgggtctttgcactatgccagtggcactttcactgataagatctccaatcttatccaagatgtcaaaggcaaagatactcttgtttttcattgtgctctaagccaggttcgtggcccaacttgtgcacggaggttagcgtatcatctagaggagttgaaggaagatactgggatcaagaacattttggctttggagcgcggcttcaatggctgggaagcttccggacgacctgtttgtcgctgcactgacatccc

SEQ ID NO: 194864 - DNA, 616 bp, Gossypium hirsutum
gccaatcccgtcgcacaaagaacctctgtttctgcccttctctaacaacaaacatggcaaagcgattgattccttcatttaatcgcattttggttgagaaaataatccctccttctaaaaccaactctgggatcttgcttcctgagaagacccccaagttgaactctggaaaagtggtagcagttggaccaggagctcgagacagagatgggaagcatatcccagttaatctgaaggaaggagatacagttcttttgcctgaatatggtggcactgaagtcaagcttggtgaaaaagagtatcacctatacagagatgatgacatcttgggaacccttcatgactgaatttttgcggctgtgggactggagaatgattctcattcaaatatgtctctgttcttgaaggaaacaaatatttaccttggacttgtgactctatcagtaattttacatgttttaagactttttattcgtttgaaggcattttggatgaggaatgttttcaagaattttactagccatggggaaaaaatgttgctaaaaccaaacccccataaaaaaaaaaataaataaataaaaaataaattattccaaaacctttttataaaaattaa

SEQ ID NO: 194865 - DNA, 669 bp, Gossypium hirsutum
cccacgcgtgcgcggacgccttaatttccatttactagcaatttcttcaagttcttttctttgtttttttaatcaatggctgaccactacctccaaaacactcaaccaatgactcaccaaatggtgaaagccgctactgccgcaacagccggtggttccctcctcattctctccggtttaatcctagctggcaccgttattgcgctcaccatagccactccactcttcgttattttcagtccagttcttgtccctgctctcattgcaacagctctcctagcaacgggtttcgttgcctccggcggtttcggtgttgcagctgtcacggtcctgtcctggatttacaggtatgtgacggggaggcacccaccggctgcggatcagttggatagtgcagggatgaaattggctagcaaggcacgggagatgaaagatagggcggcacagctcaccggtgcggcggcttcttaaattagttctctactgcatgcttttgtaatggagctgtgcaaaagttcaggatcaagtggccattaaaccgatccttaatgatgttgttgttatgttgttgatgatgaaaagatgtttttttctaaatttaaaagcagcattagaaacttaactttggggggatgatgtggctgtctgtttatggttaaaactcccgag

SEQ ID NO: 194866 - DNA, 542 bp, Gossypium hirsutum
ctggaactcacgttgatgcccctagccacttctttcaaaagtattatgaggagggctttgatgtttccacacttagcctgcaacacttactggtcctgttctagtagttgatgttccaagaaacaagaacattactgctgaagttatgaagtcggtgaatattccccggggagtccatcgtgtgcttttcaaaacacttaatacagacaggaggttgatgcatagaagagagtttgcttcagacttcacagggtttaagaaggatggggcgcaatggttggttgataacaccgacatcaaactcgttggaatcgattacctatctatttctgcttatgttgatgctgcccctactcatcatatacttctgaaaagtagggaaatcgtataggcgaaggtctaaacctctatagaataaaaccgaagaagtatacgggtcaatgcctacctttaaggatggttggtgcagatggatgcccaacaagatgccttcttactgcttaaaacacaaatgctgacttcaagttggtaagatatatgcc

SEQ ID NO: 194867 - DNA, 525 bp, Gossypium hirsutum
aggggttgctgcttccatggggtattctccttatcctatgtatgaggaccaaaggaccaggttcaagcaccagagccttatgcaagactttgaagacttgcacaaggaaacagaagccatgagaatgaaattgcagatgatgaaagagcaaaaattaacccttttggccgaagttcggtttttgaaacggaggcacaagttcttgatgcaaaaccgatcttccaacaccctagccggccgaaactttgtgcaaccacagagtacggtggttaaaagagccaattcaattgtgaaggaaaagaattcaactggaaaggaccacagtttgcgacatctagctattggggttcgatctgaaccaaaagggaaagccttatagtgaaaaggaaaccactttcgctcatccttctctgatatttgacttaaatcagaagcagcacaaaaatatcaatggcgaggaagttattctgcgaagttcttcaccaattcttgacttaaaccagagggaaaggctttacagtggaa

SEQ ID NO: 194868 - DNA, 592 bp, Gossypium hirsutum
cccgggtccattgttgtagacatcgatggtgacggaagtttcatgatgaacgtccaagaatgagcaacgatccgtgtagagaatcttcccatcaagatactattgttaaataatcaacatttaggcatggttgttcaatgggaggatcgattttacaaggcaaaccgagctcatacgtttttaggcaacccatcggacgagtctgatatattcccaaacatgttgttattcgccgaagcatgcggaatacccgctgctcgtgtgacgaagaaggaagatctccgacaagcgattcagaaaatgttggaaactcctggaccgtacttgttagacgtaatcgtaccgcatcaaggacacgtcttgcctatgatccctgggggaggggcattcaaagatgtgatcacggatggtgatggaagaacaaaatattgattttaatgaactttctgttatatgtatgtatgagcaaccatggaagcttagctgtgggctaataatctagttttcctcttctaagaaactcagggtatacttttatgttgtcttgaagtatatgtgtttgtatatttgggtacgaatataaagatatgat

SEQ ID NO: 194869 - DNA, 432 bp, Gossypium hirsutum
  unsure (1)..(432): unsure at all n locations
gcccggaatttnngggttggaccaagccttcccaaaacacccccctccctcttccatcgtgatctccgctctcttctctctttcatatcgaaccaaaaaaaacccgatcccaatggcttcttcaactggattttcactcaatttctcccctctttcaacttctttgaagcacaaccaggtacctcttcatgggatctctaatgtcaacttacttagtctcccatctcttagaatccgaccgggacctatgcgcctccgggtttcttgtgcggccaaacccgagacggtggacaaagtttgtagcatagtgaggaagcaactagcactacccgaagattcttctgttaccggagaatctaagtttgctgcactcggagctgattctcttgacacggtcgagattgtgatgggactcgaggaggagttccgaat

SEQ ID NO: 194870 - DNA, 807 bp, Gossypium hirsutum
  unsure (1)..(807): unsure at all n locations
ctctttttgttttcattttccttttgtcctttttctctttcctaggttttcggttttctcagccaaaggctttcgtttagcttcatcaatggcacaggaggaggttcagaacggaggaccggagaaagtagcggaggtgagcttcacggcgctgaaaccgcagctcatggtcgaagcacccaaggcagctgatgcggtgcagttctacaagaccgcgtttggcgctgttgaggctggccgtaccgtgtaccctaagcgcaaggctgagcaggagcagcctcacgtcctctccgctcaacttgagcttgctggctctaccattctcgtttctgacatcgctgataactctactccggtgaaaaccgaggggactggatgtgtgctctgcctggagactgaggacgtcgaagctgcaattgccaaggctgtcagcgctggaggcgttgcggagggtgaggtaactgagggcgatggcgcgtgctgtggtggtcgcgtgggcaaggtgaaggatccatatggatacgtttggcttatctgctctcctgcgaagaagtgcggtgacgcggaggcttagatgccgttcgatctttgatctactttctgttaatctctgagctttaatttgtcagtaaaaaaaatggcttctagccggtaggattaggtgatcaacagtgatagactctttggtattgactcttttgatactgttcttcatgaacctacagttgtcagttgcagttaaatgaattttactagcgtttttatctctctnnnnnnnnnnnnnnnnnnnnnnnnnnnnnnnnnnnn

SEQ ID NO: 194871 - DNA, 746 bp, Gossypium hirsutum
  unsure (1)..(746): unsure at all n locations
atttttctctgctgcctagacagctttgtaatcgtatatgtactctgtatactactactatgtgaaaaccaagatgtcaggcttcttccagaccaggttctacttcggatacactttgatgttttgtcttggtttgggaatcctttgcggagctgttggttatcttggatctaatttgtttgtaaggaggatctacagaaacattaagtgtgactagaactttgctaatggatattagaaccagcagcgcttccacaagcattttcagttgtcgaggcaataatcatggataggtagcttcttgtcacgtatgaggaaccaagcaaagcctcaagatgaaactggaagccctgagatttttgtttggccttcgattttactcgcctgtgattggaagccctgatttagaatatagaaggtagctaaaatattaaacaactgtcattgttatacttctgttatacttttgtccttgatcccttcgcatatagatgtgttcaatgtaagaatttatgttaaatttccgttggatctgctttgttctttgtttcggggataacgaactcaaatcaaggaaatcgttcactgggcgtgggtcttgttttttttttttaaaaaaaaaaaattaaataaaaataattatattttttaatataattttatttaaaatatatattttaaaatttatttaatannnnnnnnnnnnnnnnnnnnnnnnnnnnnnnnnnnnnnnnnnnnnnnnnnnn

SEQ ID NO: 194872 - DNA, 636 bp, Gossypium hirsutum
cccacgcgtccggaaggatgggttgcttaacactgcttgcgggactccaaattatgttgctccggaggttttcactcatgaactcagaaaataattagttgtattgatgcaactcttttttttttttttttgccttttcattctggtatctgatatttttattttcaggtgttcaaagataaaggttatgatggtacatcatctgatatttggtattgcggagttattctctttattctcatggctggttatttgccttttgagccaagccttataggcttgtataagaaactttacagatctgggaggcttctttcagctgtccatcatggttttcatctggtgctaggaatttgattaagcgtattcttgatccaagccctcttacgccgtataactattcctgaaattctacaagatgaatggttcaagaaagggtacaagccaccaaaatttgagcaagatgaggatgtaaatcttgatgataatatcttatattttacatggttatgatttaggtccttatttcgttgatatctttatatttaatctaatttttattatttattttcaaaaaaaaaagggatattacaaacttaaacaactaactggatttagaattaaatattaaataag

SEQ ID NO: 194873 - DNA, 428 bp, Gossypium hirsutum
ctttcattacagtaaatggtatagctaatttccttgttttgctcaatcaggggaacgagattcctaacaattttctttattgctggaacaagtcttaaccaagatcaagatcaaagtactgcactaagttatatatgcaatcattgcaatactttggcttcatctaaagcctgaaccagccctctgttgtacattgtttcttcttcttttctaatctttttcctttgattaatgagatgtgatgatgatttggcattattttctcaccaggatgaattatgttttagaaattctaatactttgtgtgtctctgtgtgtgtttttttatgtattaaattacatattgaatcaatgtttacgtattaaatttaaattcattaatttttatatttagttttgaagtttaaattttaatggaaaatttaatt

SEQ ID NO: 194874 - DNA, 496 bp, Gossypium hirsutum
agcttttattcttctatggggtggctggaccacaacacaactgaattctcggtctgatcatgtactttaaacatctatgacaggttggataatggcaattgtgatggccctttagagtggatttgctggagtcgacaccgaggctataattaagaagcgcccatcaaggaatataaatgtgcagaatttttggttggatattttcggaatgaccttcaatgctatagcaatactgatacaagattttggtgctgtcatgaacaagggcttcttccatggatactcgataattaccactctcatgatccttaatcatgcactaagtggaattgctgtatcaatggtaatgaaatatgcagacaatattgtgaaggtctattctacttcagtggcaatgcttctcactgccgttgtttcagtgcttctgttcggcttcaatcttacccttgctttcttcctcggtgctactgttgtatcggtatcagtatacttgcac

SEQ ID NO: 194875 - DNA, 538 bp, Gossypium hirsutum
  unsure (1)..(538): unsure at all n locations
atacctcactgcccctaaaatttaatcgaggagatctcgttgttctttagctccggtttgcagccatggctactctagattccgatgtgccgatggtgcccgccggtgaagcttccggtagctccgccgcgtcttcctctactaagaagcccaagcgcttcgagatcaagaagtggagtgccgttgccctctgggcctgggatattgtggtggataattgtgcaatttgcaggaatcacattatggatctctgtatcgagtgccaagctaaccaagccagcgccaccagtgaggaatgcactgttgcttggggggtctgcaaccatgcatttcacttccattgtatcagccgatggctcaagactcgtcaagtttgcccattggataacagtgagtgggagttccaaaagtatgggcactagagagctgtcaggccaatactggttgaaccctcttacctttctggtatggtgagagaagaatgcatatatttcattagctnttatgctgattcaaacagtagttgctttaatatttc

SEQ ID NO: 194876 - DNA, 763 bp, Gossypium hirsutum
gaaagcacaaatggaatggctgatcatttattgtatgaagtttttaagacctcactaatcagccttaaacttttgagttcataatgaatgaaatgaacccccggatgaagagaaaatctcccctcccttttactaaaccatggggagtcccgagtagtttaccgggcaaatttagttgtcgtgacgatacctttcttagtggaagattggaaaagacttctcttcatcacgagactgatcggatccgccgtagacacccgagaaacccccacaaggcaggctaaaagagtaagaggacaacaagcaaagagttatgctttcatttctttgttgagattgaaataaagttatttaaaaaagggggtaggtataatgcacgcaggccaagtcaagaaaaggacttccttacttttatttcatagtagtcttaatgactagtagtttggagccttaaccggtttttttcggcgctcggttccttcgtcttaaggcaaggtcagtttactttttcgagtgtgaatggaactcttagtcgagctgatggcgagatcgattttttgttcgaggttcaagagaaaagagagggaccaccgcccaatgatgcttttacgaaagtacggtcaccggtggcgaagaccttctcgacactatcgaacctaaaatccactctcaatcgctcttatttttattagaggaattgttgtcgtatcctggacttaaggaagggcaaaagtgccctatctgccttgttgtgatagggggg

SEQ ID NO: 194877 - DNA, 687 bp, Gossypium hirsutum
atgctttcatttctttgttgagattgaaataaagttatttaaaaaagggggtaggtataatgcacgcaggccaagtcaagaaaaggacttccttacttttatttcatagtagtcttaatgactagtagtttgaagccttaaccggtttttttcggcgctcggtttcttcgtcttaagtcaagttcagtttactttttcgattttgaatggaactcttagtcgagctgatggcgagatcgattttttgttcgaggttcaagagaaaagagaggaaccacgcaacaccctctccttcacggtttttcaacctcgccatggctacactagactccgatgtccccatggtacccgtcggcgagtcttccaacagctccgccgcttcctcttccactaagaaacccaagcgtttcgagatcaaaaagtggagcgccgttgccctttgggcttgggatattgttgtggataattgtgcaatttgcaggaatcacatcatggatctctgtatcgaatgccaagcaaaccaagccagcgccaccagtgaggaatgcactgttgcttggggggtctgcaaccatgcatttcactttcactgtatcagtcgatggttgaagactcgtcaagtgtgtccattggataatagtgagggggaagttccaaaagtatggtcactaaatcttttggactgtt

SEQ ID NO: 194878 - DNA, 495 bp, Gossypium hirsutum
gtgggattgagggataagctcttgctatgggctctactaatgtttctgtgctgctatgcttgggagaggttgttaagatgggcattccctggtaaaatcccagcttggaggaagcgccaacgtgtggctgctgctagttctgagaagaagctggtctaagtgaacagagaattctccctctactaatgattttggaaaaggatgacaccggtcagattattatatttagtgaattagctcaagatatgcaactcctttttttttttaatttgatatttgttaaatcatgttttgcttaatcctttaggacgtggaatctgtcaaatggtattttgctcatagaatgagggggttattctttaggaaagcataaactttgattttgttatttttgcaaagccgacttgaaagaatagttgtttcaacacttaaaagaaaaacaaattgtagttgagctcataagccatattttgattagatttattgaattatagc

SEQ ID NO: 194879 - DNA, 519 bp, Gossypium hirsutum
cggacgcgtgggcttctttcctacgccaaaatgccgccaaaatttgatccaagccaagtcgtcgacgtcttcgtccgcgtcaccggcggtgaagtcggagcagctagttcactcgctccgaagatcggtcctctcggtctctctcccaagaagatcggagaagatatcgctaaagagaccgccaaggaatggaagggtctccgcgtaaccgtcaagctcactgtccagaaccgccaggcgaaggtcatggtggtaccgtcggcggcagcgctggtaatcaaggcattgaaggaaccggagagggataggaagaagaccaagaacatcaagcataacgggaacatcggactcgatgacgtcatagagatcgctaaagtaatgaggccgaggtccatggctaaggatttgagagggacggtgaaggagattctgggcacctgtgtttccggtgggtgtaccgtcgatggtaaagaccctaaagatttgcagcaggagattgatgatggggaatgtgatgtt

SEQ ID NO: 194880 - DNA, 396 bp, Gossypium hirsutum
ccacgcgtccgaaccctagccgcccctttctcttaagagcaggcccgacaatgccgcccaagttcgacccgacccaagtcgtcgacgtattcgtccgcgtcaccggcggcgaagtcggcgcggctagttccttagccccgaagatcggtccgctgggtctttcccccaaaaagatcggtgaagacatcgccaaagaaacggccaaggaatggaaaggcctccgcatcaccgtcaagctcacggtgcagaaccgtcaggcgaaggtcacggtggtcccttccgcggcggcgctagtaatcaaggcgttgaaggaaccggagagggataggaagaagaccaagaacatcaagcacaacggtaacattagcctcgacgacgtcatcgagatcgctaagg

SEQ ID NO: 194881 - DNA, 565 bp, Gossypium hirsutum
cccatgcgtccgcccacgcgtccgcaacaaaggggcacaattcgacgctttctagttgtgcaggggaaaaggtagaaaatggtaaatcatgaagaggaagaagaagatattgtgtggttggacgaatctttcttcatcaatgacaattaccagctaacttctttcacctttgggtctcatgttctccagctctattgtcttcactcagcttctactgattttgatttgacaggacaattggtatggcctggtgcaatgcttttgaatgattatctctctaaaaacgctgagatgcttcaaggatgttccgtgatcgaattaggctctggtgtgggtatcactggcatgctctgcagcagattttgtcgtcaaattcttctgactgatcataatgaagaagtgctgaagatccttaggagaaacatagagctcaatgcatcttctgaaaatcctagttgttgtgctgcactagaagctgagaagctggagtggggaaattctgatcagattaacaggattttacacaaatatcctggaggttttgaattgattcttggtgctgaca

SEQ ID NO: 194882 - DNA, 652 bp, Gossypium hirsutum
tgatggcagccaaaacagtcacaagaggaaaagggatactgcttcctatagtgaatgcagtgtggatggaaacattataaagattagattttccttgaaaaagccccgggcatctgatgcatcaatcagcagcgaagaaccagcctgctctagttctggtaggacagattcaattcaagagccaagttgttccgccgcttctgtgcctgaactgaagcggcggcttgatgatggaaggaaggagcaaggctcctcttcttctggaacattgctgaaggctgcattgcagtataaaaccttcattgaggattggatgccacctcttctcgaagctgagctgaataatgatggtgatgaagactggcttctaactaagaagcagctagggaaacccgcggccaaaagacctgatgacaatgaccatacatgtgttgcgagtgcaagtttgcacccgagtgcacattttcttccggcagctgagatttatgcactgccttatacagttccattttgattccgcttagtggaggggctgtctttttgttctcccctgcaaagagcggcttcgtggcgggattgggtttgggtggcgaattctaacttgtacagtcttgagaatttactaatagaaacaagagaaatttttgcaaaa

SEQ ID NO: 194883 - DNA, 835 bp, Gossypium hirsutum
cacggcttctgattactggctcactaagcatgttcagtaataggtttttcagatctggtgtgcagaaagctgggagccttcccaaacatgagaaatcaggcaatgagcaatttttgaccgaacttagcaaatggattttccatgaaagaggtcatcttaaggctgtgtatgtgaaacaccacaaagtcgtcgaaacagatgaacctgctttgtacaggattaatgatgagttggaatactcagttgagatctatgagtggtctggaactagctgggagccatacattactgacgatgtccaagtccagttttacatgatgagcccctatattttgaaaactttgtcgtctgacaaaaagggtctctattccgcgtcatttaaggttccagatgtttatggtgttttccagttcaaggttgagtaccaaaagcttgggtatacaagcttatccctttcaaagcagattccagtcaggccatattgacacaatgaatatgaaagattcataccaactgcttatccctactacggagctgcattttctacgatggcaggattcttcatcttttcttttgttcatctatataacaagtaaagtgtggcatgtctagtatgctttgcctcggacggtgggattacaatttctagccaacaatggtagtcataaatgtatcgtagaaattttagactttgagttctagtatcaatgatgaaaatcaaaccctaacagatctccaaaaaaggattttgatgcaccatgattttgagtggatacagaaggtgcattcgcagttacatctactttattttaaccctggatgtatttgactttac

SEQ ID NO: 194884 - DNA, 854 bp, Gossypium hirsutum
  unsure (1)..(854): unsure at all n locations
aaaatgtctccgggggaggttttggctgtgcagttggtcttacctcttctttcggacgttggcaattttcaaaagggaaacaaaaatgactatcaaagaaaacaaaaggcgggagtgaaaacgaaataattgcttttaactttttcattttaaaggtcattatagcatttttaatggatataactgtggtttcaggttttgagtgctccgtatcttcaaacctcaccgacaaataatatgcaggagcaagagcattatagccttagaagccaaggtttatgtcttgttccactctcgtataccatgggagttgttcatagcaatggtgctgatatttgggctcccatcaagaccgcttcaccaaaatttgacaagcctttctcacaattcaattgacatattttccttcatcggtgaccggtaggctttgaacgtttcattggaaccggttttaaaggtaaccaacttaatcttgaatccgcaaaattttcctaatcagatgcaaaatttatagcacagtgcactgacataggatgttagtatcgagaaactagtaggattgtgtatccagaaatgcagtcctgtgcctacttagttttaagccagtgatctgcatttaatatctgtattgaattatagaaattaattgatctctcctaatcatgtattgtaaaatgtaacttgatgaacatgagttgattaaccacttttaacatgtatggcgctcgaataaaatatacggaataatgtgccagtcactganttnnnnnnnnnnnnnnnnnnnnnnnnnnnnnnnnnnnnnnnnnnnnnnnnnnnnnnnnnnnnnnnnnnnnnnnnnnnnnnnnnnnnnnnnn

SEQ ID NO: 194885 - DNA, 648 bp, Gossypium hirsutum
atcgttcaaattgaagctactggcaatctagagatcaactccaccgaggcgagtcgcgagccccattcctgcttcgaacatttgagaccatttctggtgttttagggtttgatcacagtgagaaagaccgatgggaggtggccatggagggagcacaacttacaaaggtgtaaatttgcaccacccaaagagatggcacgtcgccaccggcaagggcttgtgcgctgtcatgtggttttgggtcctgtacagggctaagcaggatggtcccgtagtgttgggttggcgacacccttgggagggccatgatgaccattctcatggccatggagacaagcattagctgcagcctgaagaagcttatctgcttatgggtgcgtggcacagatgctgttctggaatgtcttctgtttattttcttcggtgtcaataaagtgatggtgaaatgggattgtaagcataatgaaatgaaaactgaaacttcatttatgcattatgtggttttcctgtttttaagcgtggatttttctggccgaatgtgttgtttgtgcacaaaaaactacatacaaaattgcatgttcatatgatgtgaaaccaagaccagaaacctcaaaaatggaaggataattgcgcacagaactcacagag

SEQ ID NO: 194886 - DNA, 522 bp, Gossypium hirsutum
cttcagttggtcaaattcgcatccaactgttcaggatcggtttaaatctaagcgaccggcaagtgattaatccaccttcgaacacttgggaacatttctggtgtttagggtttggttacagggagagatgggaggaggccatggagggagtacaacttacaaaggtctaactttgcatcatccaaagcgatggcatgttgtcaccggcaaaggcttgtgtgccgttatgtggttttgggtcttgtacagggctaagcaagatggtcctgttgtattgggttggcgacacccttgggagggccatgatgatcattctcacggtcatggagataagcattaggcacaggaagattatctgattacaggcttgctgttgcagatgttgttccaaatgtcttttgttaatttcttcggtttcaataaagtgattgtgaaggaagattgtaagcataatgggatgaaatatgaaactccatttcaacattatgaaacttcatttcaacatgaatggttttgcttgtt

SEQ ID NO: 194887 - DNA, 489 bp, Gossypium hirsutum
cttgggaacatttctggtgtttagggtttggttacagggagagatgggaggaggccatggagggagtacaacttacaaaggtctaactttgcatcatccaaagcgatggcatgttgtcaccggcaaaggcttgtgtgccgttatgtggttttgggtcttgtacagggctaagcaagatggtcctgttgtattgggttggcgacacccttgggagggccatgatggtcattctcacggtcatggagataagcattagtgactcccggattgtgtttaggcgcaggaagattatctgattacaggcttgctgttgcagatgttgttccacaaatgtcttttgttaatttcttcggtttcaataaagtgattgtgaagggaagattgtaagcataatgggatgaaatatgaaactccatttcaacattatgaaactccatttcaacatgattgtttttgctgtttttaagcatggatttttctgaatgaatg

SEQ ID NO: 194888 - DNA, 682 bp, Gossypium hirsutum
gccacgcgtccgcccacgcgtacgcgtgactttatatcagcctcattcctggaatagtggagagacgatattctttcctagagaggaaagaacaatggctaaaccagatgaattcaatcctccacaacgtgtccctgattggccgagcctggtgcacggtcaggtcagtactacactaatgccactgttctctcatgcagcatcatcaagattctcattctcagctacccctccttcaaccgccactgccattcttccatccaaacctcaaaacacaacagcagtccacagtctatgttttgctgcctcaaccagtaacaccatcaacacccctcaacatagtcggtcgtaagttcaattgtaccacaacgacggcgattacaataataatttaaatattgattcaatatacattaagacatggtagtttctgacttggtccgtgaactaaaaagagtatattctctctgtctagcattaaggcatgtaggaccacaactttcatatatggtgattcgtatgtggtgcataaaggcatatcatcaggaacttgttcggtgcgtttaaactttttttttttttcatttcatgtagattagaaagcagattccattaaggtaaaatttgattcttttggtacaaaaacctgaaacaggaaaagtccttttttttttttctataa

SEQ ID NO: 194889 - DNA, 982 bp, Gossypium hirsutum
tttgtactcttttcgtcgttgtttcctccttcccttttatcctctcatcccctctaccctttaataagaggcttcttttcttataattctttgctttgttcatattttcccttcaaaattcagaggtattttttgaattttattttgaatttctgtgttgtttttaaagttcgtttgatttttattcgttttgtgtgtttagatcttgcaaatctgattttcaaaaaccaaaaattaaaggcaaatatcaagagatttcgaagaaaaacaagaaaagatggcggaggataatatatgccaagcgccggaaggtcaccgtctttgtgttaataactgtggtttcttaggaagtccggcgacgatgaatctttgttctaaatgttacagagttttccgacttaaagaacaacaacaagcttcttcggctaaatcggctatctctacctctccttcatcttcgtcaacggcagtcgaatctgcttctcaggtacctctcctgactctccctgaagtcaaaggagttccgctggttgtttcggctgtcgcgatctctccggtggcggaacagaaaccacaacagcaacagcaacagcaacagcaacaacaacaacaacaacagcaaccgactcggtgctctgtttgcaagaaacgggtcgggttgaccggaggcaagtgcaagtgcgggattacgttttgcggggcacacacgtacccggaaaatcatggatgcacgttcgatttcaagaagattgggcgagagaagattgcacgtgccaatcccgtggtcaaagcagagaagatcgtgaggatttgagaagaagaagatggaaagccgattgaccctttgacttttaatgagtaaaagaaaaaaagagaaatagaaatgtcaaactcgttaagattgcgacacgtgtttcagtgttggtccccatacctttaaaaattgggcttggataaaaatattttatcttataaaataagt

SEQ ID NO: 194890 - DNA, 691 bp, Gossypium hirsutum
tgaagatccaagtattttctctctctttttctctctcatttttgtttctctagtggtttttgttaaagattatacctttacttcgtttctactcaaaaaatcttttttttttgcttgtttgcagacttgtgtcctcaaagttaacatacactgtgatggatgtaagcacaaagtgaagaaaatcttacaaaagattgaaggggtttttaagaccaccatagattctgagcaaggtaaggtaacagtgttgggaaatgtagatcctaatgttctaataagaaagcttgcaaaatcagggaagcatgcagagccttggggttctgcaaaagctaacatcaatcaagcacatcttgcccaccagtgcaagaacatgcagatgcttgataatggcaacaaaggtggaaacaacaacaacaagaacagcaacagcaacaacaacaacaacaacagcaaccgactcggtgcactgtttgcaagaaacgggtcgggttgaccggattcaagtgcaagtgcgggattacgttttgcgggtcacacaggtacccggaaaatcatggatgcacgttcgatttcaagaagattgggcgagagaagattgcacgtgccaatcccgtggtcaaagcagagaagatcgtgaggatttgagaagaagaagatggaaagccgattgaccctttgacttttaatgagt

SEQ ID NO: 194891 - DNA, 476 bp, Gossypium hirsutum
cccacgcgtccgaatgtcggccatggaaacgaaaccaagctctaaaattcccctctttttcccaattcttttccttctattatcaactctaacccaacccccattatcatcatcaatcgacaccatcatcatcaatggcaaagacccatcaatctctttacggcgccgtattctattagcttctcaaaggaacaacaagatgaaccacatccctaattgtggcgaaagggtgtcgagatctcagtgtttacaaaacccaaagtgtcgatggtgtcgtagtgaagctcttgatgatatgtgctttaaaaaagctgaagcttggcgattgcctcaacaggttctttctttgtaattgatattcgattttaggttatttgggaaatgaatttgatctgaatttatgatatggttttttggaaattttcgtactgtttgattgggtgattctatggtggatgcttttgaattgatttaaa

SEQ ID NO: 194892 - DNA, 636 bp, Gossypium hirsutum
gatccattcaacaacttggatgttttgaacccattctcccattctttccctttccctttcccttcatttctttccacccatttccctggtttctcctctgaaattttcccctccttgggaacccaactcaactgtgtagaaaccccaagggcccatgtctacaaagcctaccttccaggggtcaccagagatgaagttctggttttcatcgatgatgacaggatgcttcagataagcactgaaaatggtaacttcatgagcaggttcaagttgcccgacaatgcaaggactgatgagattgagggttttatggagaatgggatgctcatcgtcactattgggaagcaaactcaagctccggagaggccaaatgttagggtcgttgaaatcacagagtaatttcactttttttttttaatgcaaaatgtcaagtgatgctctactctatggtgtttgttttgttttgaagcttgaaaaaatgtgtttaatgtcaaagagtaagtcggttcttgtactagaacagtagttttagtagtaataaaagcacttttgtgttgtgtactttgcttcaactttggtttaagaagttaggaacagaattcaagccgaaaaaaaataaaaatatatataataaat

SEQ ID NO: 194893 - DNA, 295 bp, Gossypium hirsutum
cccgcgcggccgcggtcgcgtgggattttcttggaaaatggccgggaaagtgagttccaagagactaggagtgtttgcattgatgtttgtgttcgctatagggatagctgagcgtagaaagcttgagaaggagaatttgggtggtggttttggcggtggtgctggaggacggcttggcggtggctcaagaggccaatttgagcaccaagactttattgacatctccaacatcgatggctttaatgttcctatggagtttagcttcaactcctcagtgtgcactatggttatcaat

SEQ ID NO: 194894 - DNA, 525 bp, Gossypium hirsutum
gccgctcttggagggagctctggacactttcagttagtattcagttaatgaagaagacgtcgatgttgtttgggtcccgggtagttttgaaataggtattgttgcagaaagactgggcaagtctcgaaattatcatgcaattttatgcattggagctgtgataagaggagatactactcactatgacgccgtggctagttctgttgcatctggggtgctttcagctggcctaaactctggtgttccttgcatatttggggttttgacttgcgaggacatggaccaggcgttaaatcgagctggtggtaaatctgggaacaaaggtgcagagtgtgctttgacggcgattgagatggcttccttggttgatcaccatcttaagtagccgccgcattatccattacatgatgaacttgtgttgttgctgtgggatcattctatctggggagtttacgcaaaagcaaaacggtaaacatagattgatcccggaactctaatttgcaattttcttggtatacactattc

SEQ ID NO: 194895 - DNA, 813 bp, Gossypium hirsutum
cccacgcgtccgcccacgcgttcgctttgaatgtccagaaataccttcttgatgagtgcagaaagtggaatctagtatgggttggaaggaataaggttgctccacttgaagctgatgaggtggaaatgcttctgggtttccctaaaaaccatacacgaggaggaggaatgagtcggacagataggtataaatcactgggcaattcattccaggtcgacacagtggcttatcatctttcagttttgaaagacatgttccctggtggtatcaatcttctctctcttttctctgggattggtccggccgaggttgccctccaccggcttggaatacccctgaagaaggttgtatcagttgaaatatcggaggtgaatagaaacatagtaaggtggttggtgggagcaaacgaatcagcgggggactttgatcgatatagcagatgtgcaagaactgaatggtgatcgattggagcaattgatgagtagatttggtggatttgaccttgttgtgggtggcagcccatgtaacaaccttgcgggtagcaacagacatcatcgagatggactcgagggtaaagaatcttctctcttcttcgattattgtcgtatattagacttggttagatgcatgcaaaggaaccaatgatttgatgtaaagggggctgatttggggattcttgctccaaactggagttatcttgcatcttcattattgcctgagcataacattgaaataatgactgacattctttgcaacttatgacaacttcaaattcttagggaaatgaaaattgatggaaaagttgttggttta

SEQ ID NO: 194896 - DNA, 653 bp, Gossypium hirsutum
  unsure (1)..(653): unsure at all n locations
tttggactcattctctttgcgcttctgattggaaacatgcagacctatcttcaatctctcaccattcggctagaagaaatgaggattaaaaggcgtgattcagaacaatggatgcatcatcgtatgcttccccaggacttgagggaacgggtgaggcgttatgaccaatacaagtggttggaaacacgtggtgttgatgaagagaacttggtccagagcctcccaaaggatctgaggagagatattaagaggcacctctgtctggctttggttagaaagggttcctctggttgagagtatggatgagagattgcttgatgccatttgtgaacggctgaaaccatgccctgtttactgagagcccctacttaggtccgagaggggggatcctgttgatgagatgctattcattattccggggccgtcttgagaagtgttacaccggatggtggaaggagtggggtttttcaaccggcatttgctgaaagaaggagatttctgtggagaggaactcttaactggctttggatcccaaaacggtgctagcttncacatctactcggacgtgaagctttactgaggtcaagctttgccctatactgagaataaatttggtgcgcaaatcagcgtctacagtnacagtcaccatcatc

SEQ ID NO: 194897 - DNA, 740 bp, Gossypium hirsutum
gtagcatttttgaaggctgttccagaaggtacttatgatgcaattatagtggattcttctgatcctataggtcctgctcaagaactctttgagaagcccttttttgagtctgtggcaaaggctcttcgtcctggaggagtcgtctgcactcaggcagaaagtatctggctacatatgcacatcattgaggatattgtagcaaattgccgtcaaatcttcaaaggctctgttaactatgcttggactacagttcctacatacccaagtggcatgattggtttcatgctttgctcaactgaggggcctcttgttgacttcaagcatccggtgaatcctatagacaaagatgagagctgctgcaaatcaaaacgaccccttaagttttacaactctgagattcattcggctgctttctgtttaccatcctttgcaaagaaggtgattgaatcaaaaccttaagggtggaaattttgaagctttagaacaaaattctagttattggtgagcattagttatcatcctttgctttgatggcccagtgtagcaacgaaccttggatttggaaatttagataatgcactttcttttttgtctcgcttaagaagagaatttgaggtaatggttgtggaaagatatatgtccacaagggataatatggtcatttagctgagacataaatggctgtttcttgcaatcgttttatcagattcacatgttgtgtgtattatatcatttttgca

SEQ ID NO: 194898 - DNA, 425 bp, Gossypium hirsutum
tccacgcgtccggctgctttgaagttccacagcgataagggcattgaaaacttttacagtctacactcatggttgggcatagcttgccttttcttattcggcattcagtgggctgctggattcgcaactttttggtacccaggtggctcaagaaacagcagagctgcattgttgccctggcatgtgttcttcgggatgtatacgtatgcacttgctgttgctactgctactacgggtatcttagaaaagcttacatttctccaaacaaaccgggtaatatcacgctactctacggaggcattgctagtgaactcattgggtattttgattgttgtgctgggtgggtttgtgattctggccacactcactcctgtgaatggcaaaagtgatgtccacaggggactagtggaatgaataggttatag

SEQ ID NO: 194899 - DNA, 443 bp, Gossypium hirsutum
cccacgcgtccgcccacgcgtccgcccacgcgtccggttcttcaaaactgatacctctacttcccttgctttcctcttatgtatttcttcttcatttcctcttcaatctagttcctttctccattcgatctggttttgtttctcagcatattctgggcctttatttctacgtataactcttccttcctttttagcgattctgttgccactgtatcgcgagagcgtttctcgattttggtgtatacttgaatatgacactcctagatctatttagtttctacttaatatcgtgaatatatgttccaatacatgatcgatcttgactctctgacaaacatttctttattattgtgagggaatcaccttctatgatgatctttggccattcttgttctactcctatttggacagcttttcgacatacaattacttcagcagcaaag

SEQ ID NO: 194900 - DNA, 694 bp, Gossypium hirsutum
aaaagtcgactctgctcctcggacccttgcatgaatacccagggcattttctgaatacgtgagagctgctaatctgtcatcccggtgcgaataacaacaggagggcaatgaagcgtactattgagcgtactgtgagcacctcttttacaacctaagggtttgcaagtcgtgggcactgtaattcctcaggagatactgccagattgtaatctgtaaccttttgtgacgaagttgtagggctctagagtttgttgtaaaattttttagattcggtctgtattaaattactactaggatctagtaaagagtcctataatagtttataagcactacgtacggagaattccctagactgttctcccttccaaacttaaaagtttgcatgacctgtttttgcaagggggatctacaatattttttgagcaacctcgtcatgaaagcatagtccaccttgaagaagttccttcaacgctcaaatgctcttccaggttagggaaggttgattccctaacctaacctagcttcaagaaaattagactgtggataatatttttcctttaaaaccttcgctaataatgaggtaggatagattgtcaattgccaaccttggttagctaatatcgtgatattaaattgacttacattttgaaaaaaaaaaacagttgtagcaaaaaaatagcaataaatttggggg

SEQ ID NO: 194901 - DNA, 585 bp, Gossypium hirsutum
  unsure (1)..(585): unsure at all n locations
tctcccttttataaaatattagtttgtatttcgtggacttaaatgaaaatggaaaaaaaggaaaaacagaataaaataatgatgaacaaccaccttttgaaatgtattcgtttggctgatctcttattgttttctcgtgtatattttgtattcaaaactcgtcccttttacaatgaaaaacgaaggctttataaccaaaatacaaacaatttctgcctatttctttgctcaagtcgcaggtgctgtgaaatcgtggaggaagagtgcacgatcgtgcaacgtgcgagctaggaatccgttcgtgggtgttgaagcgtgggagttgcgccgtgggcaaatggaaccctagggtttgctattttttgaaaaaatttgcgtcgttgggcttgtaatcgggccttttaattttagtgatttgggtctgtttcttgggccgagcaaaatttgggccttacatctgcctttaaataaaaaaatttaaacagatttattggnntctgccnttcatgcccataaataaaagttctgtttagcaacagtaagtgtttttatatttggacactgcttaatcttaaatgacatcaa

SEQ ID NO: 194902 - DNA, 668 bp, Gossypium hirsutum
cccacgcgtccggaaaatcaggagtaactgaagaagatgcagatattcgtcaaaaccctaacagggaagactatcactctcgaggttgaaagcagcgataccatcgacaatgtcaaggccaagattcaggataaagaaggcatccctcctgatcagcagaggttgatttttgctggtaagcaactggaagatggccgaaccctagctgattataacatccaaaaggagtccactcttcacctagttttaaggcttaggggaggaaccatgatcaaggtgaagactctcaccgggaaagaaattgaaattgacattgaaccaactgataccattgatcgtatcaaggaacgggttgaagagaaagaaggaattcctccagttcagcaaaggcttatattaccaagtttgttcttctgcattgtactgaatgcatctctgggatttacttgatcattgacatgcttcttcgttattcttgtgatttgaaatccttgtttattttccattggctaatataacttatggggggtgcttattgaccatatttctccaaaggtgtagagactattcacaacttcttttacatacaggattcaaaatttgatgattttacactttcgtgtaacactgaatcttaagtatgttatgtgatcagatgcccttaagta

SEQ ID NO: 194903 - DNA, 794 bp, Gossypium hirsutum
  unsure (1)..(794): unsure at all n locations
cccacgcgtccgcccacgcgtccgagaaaatcaggagtaactgaagaagatgcagatattcgtcaaaaccctaacagggaagactatcactctcgaggttgaaagcagcgataccatcgacaatgtcaaggccaagattcaggataaagaaggcatccctcctgatcagcagaggttgatttttgctggtaagcaactggaagatggccgaaccctcgctgattataacatccaaaaggagtccactcttcacctagttttaaggcttaggggaggaaccatgatcaaggtgaagactctcaccgggaaagaaattgaaattgacattgaaccaactgataccattgatcgtatcaaggaacgggtcgaagagaaagaaggaattcctccagttcagcaaaggcttatatacgccgggaagcaacttgcagatgacaagacagcgcgggactacaatattgagggtggctctgtgctgcatcttgtgcttgcactgcggggtggccgtctctaaatggtgccatgaaaaaaaaacctggacagaaactgttgcaattttaattattgcataaatctaatgactttgcatttgattcgttgagaaatgcatgaattgatgatgatttcctcaagacacagatgttgtgttgtattacttgttttgtataaatcagccttcttcggatggcctcgcaaactcttgaggatatgtcaaaaaggtccaaatgggctttagttaataaggtttnnnnnnnnnnnnnnnnnnnnnnnnnnnnnnnnnnnnnnnnnnnnnn

SEQ ID NO: 194904 - DNA, 463 bp, Gossypium hirsutum
gggttcatcaccactgccaacaagttgatcgccaaatccttaaaaaaaggagacattttcgcgttccctaaaggtttggttcatttccagcagaacaacggcaaagaaccggcatcggtcatctccggcttcaacagccaattgccgggaactcagtcgattgccgttaccttgtttggttcaacaccagcagtgccggaccatgtgttgaccaaggcattccaaattggtaccaaagaagtcaacaagatcaaaagcagactttcccctaagtaagaaaaaaaaaaagaagaagaaggtaatttgagttttgaggtgaaaaatcataaaattgtttctttggagttgaataatgtaatttaaattaccaaaataagttcactttgaggcaatataatcaacatactatcatgtattgaatatttgaagtatttcacacgatatttattttatgaggtttggt

SEQ ID NO: 194905 - DNA, 260 bp, Gossypium hirsutum
ccacgcgtccgtgtaacactgcctggagacattgccattctctatgtaatagagaaaaccaacgcatgacatgtgtattgtatcactcggatccgaggttatcaaggaaaacaagttcatggtagtctgaagttgatatcattttcatctgtaaacttgttctttttaatatatatatatatttgttaaaaaaaatatgaaaaaatctcaagttttctagatagctaaacaaagaaaactaaaaaacccaaaaaaatgac

SEQ ID NO: 194906 - DNA, 730 bp, Gossypium hirsutum
ttttgctcgcgaatttggtgatctgcagaatcagagtgtaaaaaaggaaggaaaaaaaggctaaaagaatgtttttgcgaatgatatcgcggccgttgttggctaaggtgaaggagacaacggggatcgtcggattagacgttgtacctaacgcaagggaagtccttatcggtctctacaacaagactctgaaggagatccaggccgtacctgaagacgagggttaccgtaaggccgttgagagcttcacgcgccaccgtctgaaggtttgccaagaggaagaagattgggaaatgattgagaagcgccttggatgtggccaggtcgaggagctcatcgaggaagcgcgtgacgagctcactcttatcggaaaaatgatcgagtgggatccatggggtgttcctgatgactatgaatgtgaggttatcgaaaatgatgctcctattcccaagcatgttcctcagcaccgacctggtcctcttccggaggagttttacaagacgctagaagctctttctaagaaagacgagcctaaagtcacctccggagatccacagataaaggagtaatgtgacgcagacggttggctgaaatttgcattggtctttcgttcttgtttgtcgatcttgtattgtgcctgtttccgttgatggaattgaagctttaacctatgataaaaagctggacccgaaccctttagtgcataataatattgaatgccagtggttat

SEQ ID NO: 194907 - DNA, 416 bp, Gossypium hirsutum
gaaaaaaaaaggggttccaagagaaaaggagaagaaatggcctcaaagcttcttcgtcaaaccctaaccaaaaccaacagaaccgccgctatacgctgcttcttcaccgcggcttctgtcgcttccccttccgagtatgagtacccaacaggaatcaccatgaaaggtgtgaaaatttcgggtcgtccgctttacctcgacatgcaagcgactacccccgtggatcctagggttttagattcgatgcttcctttttacctctctcgttacgggaaccctcactcccgtactcacctctatggttgggaatctgaaaccgccgtcgaaacagcccgcgcacaagtcgcggcactcatcggggcttccccgaaagaagtcgtcttcacctccggcgccaccgaatcgaacaacatctt

SEQ ID NO: 194908 - DNA, 426 bp, Gossypium hirsutum
cccacgcgtccggcagcaaccaaactctgaaatatactaaccttctttttttacattttgttcgattagtcttcttctcggtatcgctgtcatggctgggttcgagcagcgaataaaggagagagccaaggagctcaaggttttcttcaagaagggtgtgaagatcgtgggagaatcatgcaagaaaggttggtacaaagtcaagcacatcagaggctgattcttttgccttccatcatcttgttttcttttcgttttccatgtagagatctttgtcagtcatcttgatttggaggggttttctttaatttattgaaggattttatcctgttttctgcttattttttgtgcttttttttagcatcttatgaggtgatttgattttgagattatagttaacttgtttcggttggctttttttttttt

SEQ ID NO: 194909 - DNA, 737 bp, Gossypium hirsutum
ctttttaaggcgcagagccaaataacatcatcaaaataatttgaaaaaaaaaaagaaaaaaatggaaggagcttcgtaccagcgattcccaagggtcaaaatccgggaactcaaagacgaatacgctaaattcgagctccacgacaccgatgcttccatggccaacgccctccgccgcgtcatgatcgccgaggttcccaccatagctatcgatctcgtcgaaatcgaagttaactcttccgtcctcaacgacgagttcatcgcccatcgactcggtctcatccctctcactagccaacgcgccatgtcgatgcgattctcgcgtgactgtgacgcctgcgacggtgacggacagtgcgagttctgctccgtcgagttccatcttcgcgccaaatgcataagcgatcaaacactggatgtcaccagtaaggatctttacagttccgaccatacggttgttcccgtcgatttcaccgattccgctggctacgaatcctctgaacaaagggggattatcatcgtgaaattgcggcgagggcaggagttgaggctgagggcaattgcaaggaaagggataggaaaagatcatgcaaaatggtcacctgccgcgactgtgactttcatgtatgaacctgagattcacatcaatgaagatatgatggataccctgacccttgaggagaaagcaaagcttgtcgacagtagtcctactagagtctttgacattgatcctaata

SEQ ID NO: 194910 - DNA, 703 bp, Gossypium hirsutum
cccacgcgtccgaaataccttctagagcatggtgctgatcctgctatacccagcaacttagatgccactgctttacatcatgcagctggaattggggatgttgaattgctgaagtatatactggacaaaggcgtcaaggttgattcacaaagtgatgctggtacccctttagtttgggctgctggtcatggtcaacgtgaagctgtgaaagtattattagattatcatgctaatccaaatgctgaaaacgaggataatatcactccattgttgtcatccgtggcagcaggttcacttgcatgcacggatttgttgattcaggcaggtgctaaagtgaatattacagctggtggaacaactccgttgcatattgcagctgatcatggaagccctgaactaataaacagcttactgaaagctggagctgatcctaatgccactgatgaggatggcctgaagcccgtcctggttgcagctgccagaggtcatcgtggagcagttgagatactatttcctttgacgtcaagaatcgataccattccagagtggactgttgatggaattctcaaatatatgcagtctgaaactgacaaacaattggagcaaatgaaaaaactgacggaagccaagtcaacaagggacactgcattgccggcaaatgatctccctgaggtgacacccgaagcgaagaagaaagctgcag

SEQ ID NO: 194911 - DNA, 848 bp, Gossypium hirsutum
cgtgtctccaaatgggccactgaaggagattctggtagttcctccaccggcgaaaaatggctgaggcaaagaatttgggggtggttggcagtgggcaaatgggttcaggcattgctcagctgggtgccatgcatggtctccatgtttggctcctcgatacggaccctaccgcactttacagagccaacaaatccatctcttcttcccttcaacgttttgtttccaaaggccaaatctcacaggctgcttgtactgaagctttgaagcgtctggaatatacttcaaatatagacgagctccgatctgcagatttcattgttgaagcaattgtagaatcagaagatgtgaagaaaaagttgttcatcgaactcgataagatcactaagagttcagccattttagcatctaatacaagttccatctccattactcgattagcatctgcaactagcagaccatgccaggtcattggaatgcatttcatgaatcctcctccaataatgaagttggttgagattgttcgaggtgcagacacatcggatgaaacatttcatgcgacaaaggcattggcggagaggtttcataagacgataatatgctcccaggactattcgggctttatcgtgaatcgaatccttatgccaatgataaatgaagcatttttcacactatatactggggtggccaccaaggaagatattgatacagcgatgaagttaggaacaaatcatccaatcggtcccttggagcttgctgatttcattggactcgatgtgtgtttatcgataatgaaagttctacatgctggtctaggagacagcaaatatgccccttgccctcttcttgtg

SEQ ID NO: 194912 - DNA, 585 bp, Gossypium hirsutum
gcctgctgtctctaatgatttgactgctgcaaaggtggatgttaaggtaactcctggcatggaagctgcaaaaagatatatatcttctttgagtacctcagcaagcacagctcaactggcaaatcatggtttggttgttataccgtttctcagtgcatttgtcagcttgaaggtgcttaatctatctggaaatgcaatagcaaggattactgctggtgctcttcctcgaggacttcacatgttgaatctgtcaaggaataatatatccaccattgagggtttacgtgagcttactcgacttcgtgtgctgaatctgagctacaatcggatatttagaattggtcatggtttggcttcttgttcctctcttaaagagttatacttggctggaaacaagataagtgagggtgagggtctccatcctctctttaaattgactgttttgcatctgcgtttcaacaaaatctctactgccaaatgtcttggccaacttgcagcaaactataattccttgcaagccattggcttggaaggtaaccctgcacagaagaatgttggagatgaaaatctgaagaagcatttgca

SEQ ID NO: 194913 - DNA, 538 bp, Gossypium hirsutum
  unsure (1)..(538): unsure at all n locations
tcgcccacgcgtccgcccacgcgtccgcccacgcgtccgcccacgcgttcgtgttgagggagatgatgtaccagatgaacagaaagctagaatttgcaagagtttggctgaagcagataagcgtctagttgatggtgctgatgagtatttgcagctgctggatgtggccagcaacacaatgcgagctttgtgtaacatgccacaggaattctcttttgaaacttagtgggaaagcccagtgtgagatggcagatacttttgaagacaaggagagattcttcaaccttttggactgtaaactggtacatattgcaacaaacctgcttttctaactttctgtcatgcctgattgtcatagatgggtccatccttttgaatctcttgtcatttaacatggatttggtgttagttctctatttaactcgtctctagtctattgctataggcgatgagtctttagcactcctttttgcatgccagagtaataagattgttctccattcgaagcttataaaaaaaaaaaaaaatataatanatt

SEQ ID NO: 194914 - DNA, 678 bp, Gossypium hirsutum
cccacgcgtccgcaaagaggaagctccgattgctgtaaaacaatggcggattaccatttcgtttacaaagatgtcgaaggagcttccactcaatgggatgatattcaaagaaagcttgggaatttacccccaaagccaccagctttcaagcctgacccttttgaacctgcacctgacccggattccgtccctaaggacaagtcttggatcgatgaaaagactgaagaagaacttgaagaaatcgaagatgatctcgatgatgatagattccttgaagaatacagaaagaagaggctggctgagatgagggaagctgttaagatttcaaagtatggatcggttatgccaatttccggatccgatttcgtacgggaggtttcgcaagctcctcaggatgtctgggttgttgtcattctctacaaagaaggatttccagagtgtgggctgctcttgcagtgtttggaagaattggcagttaaataccctgcaacaaagtttgtcaagataatatctacagattgcattcctaactacccagatcgtaatcttcccacactcttggtgtataacaacggagcggtgaaagcaaattatgtaggcttgcatagttttggccgcagatgcacgcctgaaggtgtggccttagttctttgtcaatcagatcctgtactgaatgat

SEQ ID NO: 194915 - DNA, 423 bp, Gossypium hirsutum
gacccacgcgtacgttatcgatggaagtcaactgtgggaaacggccttctgttggcatgccaccgacacttcgagctgctggctttactgcagttactgacattgccggagggtacgccgcgtggactcagaatgggcttccaacggaatgatgatgatgatgttggaggcagggaataaagttggtgatacaataataaagcatggaagacagagaactagaaagatctcaagtgtaaagaaaaaaaaatgtcgcatattagtgtagttggcagccacagaatgaccaggaagtatgtgaatgtgaatgtgactgtttcggtcgtgttctgtatggaaaagggaagccaagaaacatacaaataatagatgaatggaaccagtgaattttgtacataaaaatctcttctttgctatcgagac

SEQ ID NO: 194916 - DNA, 521 bp, Gossypium hirsutum
  unsure (1)..(521): unsure at all n locations
cggacgcgtggggtctcttgatgcgcatgcgcagaaagcattagattgcccttgtgtatctgagctgcggaatggcgcttgcgggactcaatttacagaggctttcctttgttttctcaaaagcactgctgaagaaaagggttcggattgcgtgcatccctttgtagccttgcaaacctgcatcaaaggtaaccccgatgcatttcctaaaaacatcattgaagataaagaagtcaagaaagaagaggaaccaatccaagaatataaaatctatcctcctatatggttcaaggaatctcacaaaccaaaaccaaaaccaaagccggagctctaacagtcattcttatacattttcattgcttatgctatttttgattgataaattgtatcatttaagtcttggttatgaaaagacttgtgtcatctgtgaatagagagagttaaagatgaccaaatttggttgctcacttacgatcattgaaaaacgatcnttattgaaataaaaatcaaacttttattgc

SEQ ID NO: 194917 - DNA, 755 bp, Gossypium hirsutum
gtccttttattatatataaaccctacggttctcgttttttctcttagctcaatacagagtatttgggtctgtttggaggattttaatcttactgagtgcatcttgttgcagttaggtgcagggaaaagagcgatggcggcagttcccggacagttgatttgggaggtagtgaagaagaacaattgctttttggtgaggcagtttggaagaggaactgctagccttcagttcagcaaagagcccaacaatctctacaacctccactcctacaaacactctgggttggcaaacaagaaaacagtcaccattcaaagtgggggcaaagaccagtctgtgctgctagcaaccaccaagactaagaagcagaacaagccttcggccttgcttcacaagtcctttatgaaaaaggagttccccaggatggccaaggcggtcaaaaaccaggtgacagacaactactacaggccagatttaacaaaagcagcccttgctaggttgagtgctgtgcacaggagtctaaaggtagccaagtctggtgttaagaagaggaacaggcaagcattgaaggttcgtggctggaagtgagctagacctttcaggttgtatgagctctgctattttcattgccccagacatttttttactccttttttgaatttgtcttatttttcatggtttgaactgagttgttgaaactttatatctagatagattttgaaacaacagagatttggagctatttagccctttaattt

SEQ ID NO: 194918 - DNA, 830 bp, Gossypium hirsutum
ctccaattgttcatcccttcattaaaaaaaaaacccctaaaaatccagcagtgaggtgcagggaaacagaacacaaaatggcgacagttccaggacagttgatttgggaggtagtgaagaagaacaattgttttttggtgaaacaatttggaagaggaactgctggcgttcgattcagcaaagagcccaacaatctctacaatgtcaactcttacaaacactctggtttggcaaacaagaaaactgtcaccattcaacctgcaggcaaagaccagtctgtactcttagccacaaccaagtctaagaaacagaacaagccttcgagcttgctccataagtctgtcatgaaaaaggagttccctaggatggccaaggcagtcaaaaaccaggtgacagacaactactacaggccggatttaacaaaagctgccctagcaaggttgagtgctgtgaaccgaagcctgaaggttgccaaatccggtgtcaagaagaggaacagacaagcatcgaggatccatggcaggaagtgagcttttttacacaacttcacaatcattttgctgcaattttcgttgtttccgatactttttcatccttgtttcgtggttttagcttgttggtgtattttataactagattttgaaacaaaaaaaaagtgagaatcatggtggtttcgagttttgtttttcggactataatatcctaagtttgataaacaaaactcgaaaccaccatgattctcactttttcatccttgtttcgaggatttagcttgttggtgtattttataactagattttgaaacaaaaaaaagtgagaatcatggtggt

SEQ ID NO: 194919 - DNA, 1168 bp, Gossypium hirsutum
  unsure (1)..(1168): unsure at all n locations
gggacacacagctgaaacagataaacatcaagatgggttcccaaaaacacctcgttcttttgttatcagtgcttttgattctcaattcccttctcttttccggtgccgatgaagatcactattacgaatttattttgcaagaaacagagattacgaagctatgcagcacaaaaaccatattgacagtgaacggcagttttccagggcctcagattcgggttcgaagaggcgacactgtttatgtcaatgtccacaatcaaggaagatctgctgtttcctttgattggcaaggggttgaggatccggttgatggttcaaacgagttgatccagcctggtaaaaacttcacttacgagatcgaattagacgatgaaatcggaactttatggtggcatgctaggagtgcttgggctaaagctaccgtgcattgcgcctttgtcattttaacggccggccgatgaagagtatcctttccctacacctacgtcagatcaaatcattatattcggagaatggtttaaacaagagttaacggaagctaatgaaaccattgctgctggccaagcagacggttacacaatcaatggccatcttggagaaacatatggatgcagtaacgatacaacatatctgctagaagtggcttacgagggtctttaccttcttcgtttaataaatgccgttgccaacgaaacaatggtgttcgccatcgcgcagcacagtttcacgaccgtcggacaaaacgcgacatattcccaacgctctttctcaacttctctacgttagcaccgggccagacgctctgagttttgctcggcgcaaacccaaacgtcggccagtattacatcactggctcaaccttctctgcaggcataataccccacgagttatcagtatccacccggcactgtggttatttagttacttgttttggattcatgggatagttgtatgaatagacatcatagggctacanctttatttatataattcatgcccttacaatctgtggggaaaaaatggtttctttaaggtgtctgtgacaatgattgctgaggaaggcatatgtcttaaaaaaaatactgggggcggcatttccttggttataatggcgtttattaattatcttaccgttgatcgtgacttgatattatctaccttcctgtcg

SEQ ID NO: 194920 - DNA, 434 bp, Gossypium hirsutum
taacgatcgagctagtagcagctctagcagctccagtagttcaagcagcgattcttcgtctgcgagtgattcagattctgggagttcatccggaagtgattccgatgcagacgatgcacggtcttgaaggcatgagctattcgattttggggcaaatccagttggaaaattgggtggtggggatgtagatgagaggtagattttgctaacatctgctaacaaactggaaaaaaaattagggatattagtaagtattaaatgctgaagatatgaacattttttttcctcttttttttggttgatgtacagggtggtggtggtgggttgcttaaatgttgtgtgaaattgtaatggttgctcacttgggaggaaagaaatgtatgaaaatggaaaacgggagggcagcttttggaagagagaatggggatttaaag

SEQ ID NO: 194921 - DNA, 475 bp, Gossypium hirsutum
ctgaaatcgatctttacaaatacgatccttgggaccttccagatttggcgttgtacggagagaaagaatggtattttttctccccgagggataggaaatatccgaacggttcacggcctaaccgggcagctggttctgggtactggaaggcaaccggagctgacaaaccgattgggcagccgaagccggtcgggattaagaaggctttggtgttttacgctgggaaggcacctaaaggagagaaaaccaattggattatgcacgagtatcggttagctgacgtggaccgatcggctcgcaagaagaacagtttaaggttggacgattgggtgctttgccggatttataacaagaaaggcgccatcgagaaacagtcaccgcaaggaagcattggcaaaagctctgccgtgacggagatcgaagacaagaagccggatatagcgacacttggcgtggacacgcgccaagttgcccc

SEQ ID NO: 194922 - DNA, 494 bp, Gossypium hirsutum
acccacgcggacgtcgctttggtttagtattaaagtactgaagccatggcagcagggaagtttgttgttctgatggtaatggtcgcattaatggttgagggctcaagggcaatgaccttgtgtgacatgaatgatgagggacttgaggcgtgcaagccatcggtgagacagctgaacccggtcgacccatcgcccgagtgttgcaaggctctgaaaggggctgacttgccctgcttgtgttcttataagaattcagtgtggctacgtagtttggggattgatccaaaacttgcgttggatttgcctcctatgtgctagctccaaatccacatattatgtcattttcagcaaagtgccatttgtgacatatactgaaacctgaaggatttcagctcatctggggcatcaaatttttggcaccaactatatatacaaaataccaattataaccatgcatttctgtcatttatttgtatatctttgacatatatgta

SEQ ID NO: 194923 - DNA, 544 bp, Gossypium hirsutum
  unsure (1)..(544): unsure at all n locations
atcactttggtttagtagtaaagtactgaagccatggcagcagggaagttttttgtgctgatagtaatggtcgtattaatggttgagggctcaagggcaatgaccttgtgtcgcatgaatgatcagggacttgaggcgtgcaagccatcggtgacacagccgaacccggtcgacccatcacccgagtgttgcaaggctctgaaaggggctgacttgacatgcttgtgttcttataagaattcggtgtggctaggtactttgtgggattgatcccaaactttgccttggatttgcctccaaagtgcaagctccaaatgcctagtgtttgctaaggtttccagaagagcatgaagctgctttctcatgtttgttggactttcacaagtttctttgtattggtttgatgtgaaaatctttgcaaatcttgtatctgtttcgtgttaaattattatttggttattgaagtttgtacggacaagtgagtggaattggccgccttctgctctttttaattntcattactctttttatgtntttggtgttc

SEQ ID NO: 194924 - DNA, 834 bp, Gossypium hirsutum
tctcaatcccttccacttcgccatggtagctctcattctctctttttcaatctagtctcttcattcaaacgtcatttctcttacgttagtctacccccgttgctcttaatcccttccacttcgccatggcatcagagaagaagctgtcgaacccaatgagggaagatcaaagtccagaaacttgtcctcaacatctccgtcggtgagagcggcgatcgtctcacacgtgccgccaaggtcttggaacagctcagtggtcaaaccccagtcttctccaaggctagatacactgtgagatcttttggaattcggcgtaatgagaagattgcttgttacgtgactgtgaggggggagaaagctatgcagcttcttgagagtggtttgaaggttaaggaatatgagcttttgaggaggaacttcagtgatactggctgctttggattcggtatccaagagcacattgatcttggtatcaagtatgacccttcaactggtatctacggtatggatttctatgttgttcttgaacgagctgggtaccgtgttggccgtcgtcgcagatgcaagtcacgtgttggtattcagcacagagttacaaaggaggatgccatgaagtggttccaggtcaaatatgaaggtgtcatccttaacaagtcccaaaatattggagcttagaagtagcagtttgagattgtttttagttttgagtacctgattttggctagtttatatttatcagatagtattttcctgaaccaatttattttatgtgtttagggtggaatcctaaagtttttcttttggtggcctagtttataatatatttacaatctg

SEQ ID NO: 194925 - DNA, 915 bp, Gossypium hirsutum
caaaacccatagaccagaagcccaaaactcaaggaagcgactttggcactcattcatgaacaaggaagcgactttcaacactcatacatacaacctgacaaccctagagtgaggaattagatccagctgcctctttgtcacttgtcagtacaacgctcctctcaacccttccgtttccccatcatggcatcggagaaggggctggcgaacccaatgagggagattaaagttcaaaaacttgtcctcaacatctccgtcggtgaaagcggcgatcgtctcacccgtgccgccaaggtcttggaacagctcagtggtcaaacccccgtcttctccaaggctaggtacactgtgagatctttcggaatccggcgtaatgagaagattgcttgctacgtgacggtgaggggagagaaggctatgcagcttctcgagagcgggttgaaggttaaggagtatgaacttttgaggaggaacttcagggataccggctgcttcggattcggtatccaggaacacattgatcttggcatcaagtacgacccttctactggtatctatggtatggacttctatgttgttctcgaacgagctgggtaccgtgtgggtcgtcgtcgcaggtgcaagtcacgtgtcggtattcagcaccgagtcaccaaggaggattccatgaagtggttccaagtcaaatatgaaggtgttatccttaacaagtctcaaaatatcggggcataggaatagccaggtaaacaagatcaatcgagttgtttttaagatttttgctacttgatattggttttaagtttgtgtatcagttgtagtttggctgaagagatttgtgaaatgctaaagtaattttgctgttggattaaatggcttcatttaatatagcacttggaaaacacaatgtcttttctt

SEQ ID NO: 194926 - DNA, 1185 bp, Gossypium hirsutum
tttcccacgcgtccgcttgcagcgttgaaaagatggggaatggttgctaccttctttaggagactctccaaagccaccccagctaccttcaacaatgcatttcgaggtcaacccaagtctggttttgctggatttcgcttcactaccatcgccgccgttgccggtggaatctctacttactactgcttctccgactcaaatttggttcatctagatcaagtcaatgaagagactggtccaaaagttgctctgaaatctgataagtggcttgaatttaagttgcaagatactgcaagagttagtcacaacactcacttgttcaggttttcatttgatccctctgctaagttgggattggatgtcgcttcatgcatccttactagggctccattaggacaagatgctgaaggaaaaaccaaatatgtcatacgaccgtatactcctatatcagatccagatgctaagggatactttgacttattaatcaaggtgtatccagaaggaaaaatgagccagcattttgctagcttgaaaccaggcgatgtagttgaggtgaaagggcccattgaaaagctcagatactcacccaatatgaagaaacacattggcatgattgcaggtgggacaggcataactccaatgcttcaggttattgaggctatactaaagaaccctgatgacaagactcaggtgtcactgctttatgccaatgtctcccctgatgatatattgctcaagcagaagcttgatatacttgctgctagtcatccgaatcttaaggtactctacactgtagacaatccaactaaaacttggaaaggaggtgctggattcatttcaaaggatatggtcacaaaatgcttacctggtcctgctgaagatactcttatccttgtatgcggtccacctggtatgatggaacacatatcaggtggtaaggctaaagactattcacaaggagagctaaccggcatactcaaagaactcggatacactgagcaaatggtttacaaattttgagtatagaggaattcaaggatttgaagagacactctcatagggtttcaacataaattttgtgtaataaagcttcctgaaagaacaatgaattgggcaagatttaaatcccagggtatcgaataatatttgtagtgaaacatacaatgtaaattactacattttcac

SEQ ID NO: 194927 - DNA, 885 bp, Gossypium hirsutum
  unsure (1)..(885): unsure at all n locations
gtgggactgtactcgtgggcacatctcctcttgcctgtacttagtagcaaaaactgtaatcgacaatcgagagatctaattttacaactggtggaatggatcttatccgtctcaaaagctcgttcaattttagtaaataatgctgttagaaaaggggaacgtttggtgcctccatcttcatttgagatactgatgcgagctaccttccctgcatcttcatctagggtgaaggcgactgaaaggtttgaggccatatatcccacagtaaaggaagttgcacttgctggtgctcacggaagcaaagcaatgagacaagtggctcttcagatgttcgcctttgctatcaaagcagcaggagaaagctctcctgagttatccaaagaggcagctggaatagtcatatggtgtttgaaccaaaacgctgagtgctacaagcagtgggacaaggtttatctcgataatctggaagcgagtgtgagtgttcttagaaggctttcacatgaatggaaagaacactccacaaaacttactactcttgaccctttgagggaaaccatcaagaattttaggaacaagaatgagaaagaaatgggcaatgagtcagatgctgctacacaggcactgtttcaggatgcaaacaagtactgtaagcttatanctggaaaactatcgcgaggccctgggtgcctaaaancattggcctttctccttgtcgcatttggtgtgggtgccgctgttgtaccccccacatggaagattgggaatggaaccaactgtatgttatttatcactctcaaatccctgtctaaaaaattccgttaagttacgtctttcccggttaaatgcattttgatctggaatttccaactggtaaagggaaaaaaa

SEQ ID NO: 194928 - DNA, 518 bp, Gossypium hirsutum
  unsure (1)..(518): unsure at all n locations
ggcgtatcgatcgattcctgctcctcagatcgttaagaaatctgaagacccatatgctataacagacaatgattggagttgggaagataaagcaatactcaaacatccttgagaagccccttagcaagggcaaacaagaggttagcttgagtgcctttacatttttgttctctgagcttgttcagtacaatcaaactcgggttgacaacattgctgaattagaaagaaggctggaggatgcagggtatgctgttggggctcgagttcttgaacttttatgccatagggataaggggaatagaagggagacacgattgttgggtattttatcctttgtgcacagcactgtctggaaggtgttatttggaaaggtggctgactctcttgagatgggcgctgaacatgaagacgaatacatgaatcatgagaaagacctccttgtgaacaaatgtatttcaattccaagacacatggggacctttaattgtggggcatttgttgctggactacgtnnnnnc

SEQ ID NO: 194929 - DNA, 439 bp, Gossypium hirsutum
cccacgcgtccgcccacgcgtccgaaaacagtgatgtcgcatttctaaaagagaagcgactgaggtttgccaaagaactcctctgatttttcctccaactataactgtttctgttgtgagtctttctgccatgtggtccgaaatgccactgcaatgacgctgattacttccttttcattcttaaagcatgataatgccccaacttattcctttactagtgtgaccattaaagccaaatatttagattctgtattattagttgcatttcctttctccttgtgaggaaattataataattttctggtttcttttgttgatgggacatgagttcttgggtgtgtgtctaggttagtttaagccaaaaggctttaatagttgcgaacatatgaatctgcattgatttggatgaaatggatccatggctatggccattgtttat

SEQ ID NO: 194930 - DNA, 851 bp, Gossypium hirsutum
  unsure (1)..(851): unsure at all n locations
ttccacgcgtccgcccacgcgtccgcgggagggcctcaactttcttcttaagctcactgtagttactctctaccttccacagccgcatcatggccgattccgccaccgcgtcttcccccctaaaagtcatcgccggagctgattcttttggcgccgagctaaaagacgccatggtatcccacctccgctccctcaacatagaagtcgaagatctcggaatcacctcctactacaacatcggtgctgaagtcggccgtcgagtatcttccgccaccacctcgccctccttggagacccgtggcctccttgcttgcggaacgggcgtcggagtcgggatcttcgccaacaaattccccggcgtgttcgccaccacatgtctcactccggacgaagctcgcaacaatcgctccatcaataactgcaacgtcctggcactctccggcatgtcaacgtccgccgataccgctaaggaaatcgtcgacacttggctcaacactccttttaaagcgctgtgcccggcctctaagtcccagccttggcccgaggaaatctcaaattttttcgatgaatcgatgaatgaaatgcctaaaatcggtgcttctgagaacacccaagctgaaacttgtgctgtttgttgcttggttaagaacagagaactgaatccaatcgatataatccctggtgggtcaatgaagatattgagagaaagtcccacatcggctattattaaatttaaggctgggagtgtanatacagcccatcaccatactttcgggcattgcttgctggtgatgaaagggaaaaaaagtgtctggaatttgagtaaaaacgaaagatatgatttgggtgat

SEQ ID NO: 194931 - DNA, 845 bp, Gossypium hirsutum
gcttattatcctttctttagaggtcatgctcatcatgacacaaaaagacgagagccttggttgtttggtgaacgaaataccgcacttatgagagatgccatacgaattcgatacaccttgcttccatacttctacacattattcagagaagcaaatgttagtggtgttcctgttgtacggccattatggatggagttcccatctgatgaagcagctttcagcaatgatgaagccttcatgggtgggaacagtcttttagtacaagggatctatactgcaagggctaaacatgcatcagtatatttgcctgggaaggaatcgtggtacgaccttagaacaggaactgcatataagggaggaaaggtccataaacttgaagtttcagaagagagcattcctgctttccaaagagctggcacaatagtgccaagaaaagaccggttccgtagaagctccacacaaatggtgcatgatccttatacactggtaatagctctgaacagttcccaagcagctgaaggcgaactctatgttgatgacggaaaaagctacaacttcaaacatggggcatacatccatcgccgctttgtgttctcgaatgggcatctaacatcctctcccgttggcaactctaggttttcgtctgactgcattatcgagcgggttattcttcttggatatacccctggggctaaaaccgctcttgtcgaaccaggaaatcagaatgctgaaatcgaacttggtccacttctgttcggcggacaacatgctgcttttgctgtaaccatcccgaagcctgccgtgagggttgctgaagattgcaagaaaaaaattttgtatgatgt

SEQ ID NO: 194932 - DNA, 1160 bp, Gossypium hirsutum
  unsure (1)..(1160): unsure at all n locations
ccagaatcaacgtaagaattagggttgtgtctagaaatggcggtggcagcgcgcttcagatccactctccctctctttcacaggcttttgagatccgattccctgccttctcacactcccagagctgctcttcaccgaactctactttgccccgagctgtcgaggaaatattctacttctctgaagaaggacgagaatgttaaggtgcctttggctttgtttggtggatctggaaactatgcatctgcactgtaccttgcagccgtaaaaggaaatgctctggacaaggttgagtctgaacttcttgaccttgttcaggcatcaaaaaacagtcaattgttttctcaattcactaaggacttgtcagtacctgcagagacacgggtcaaagccattaatgagatatgtgggcaagctaaattttcagatcttacaaagaactttttagttatactagctgagaatggaaggctaagacatatagaaagcattgcaaagagatttgtggagttgaccatggctcataagggagaagtgaaagctattgtcacaagtgttattccccttccttctcaggaggagaaggaactaaaggagaccttgcaggaaataattggacaggggaagcaggttaagctggaacagaagatcgatcctagtattcttggtgggcttgtcgtaaagtttgagcaaaaggtatttgacatgtccattaagactagggcacgacagatggagaggttcttgcgtgagcctatcaactttggttccctctgaaggatgttataaccgccaagtgaccatttcagtttccttgtgcaccaattgggttattccgagaactgcaaagaataattaatggtctttttgttttgcctctgttttcttctactcttgacattatatgatggaatgcatccattcacaataaaagaaactttctcggcatttattattttttatctgggaaaattactaaaataccgtttgtatggctttttgtgtatggttgctttgacttatatgatggaatgcatccattcacaataaaagaaactttctcggcatttattattttttatcataaatggcccaggtatttnnnnnnnnnnnnnnnnnnnnnnnnnnnnnnnnnnnnnnnnnnnnnnnnnnnnnnnnnn

SEQ ID NO: 194933 - DNA, 1259 bp, Gossypium hirsutum
tcggtcttctccattttccctcctctcaagtacctaatgtacactccatcgtttcactcgctgcatcacacacagttcagaaccaactactcattattcatgccattctacgattatatctatgatacaatggataaatcttcggataccttgtacgaaaattcactcaaaagaaaagaggaaacgcccaacgtggtgcatctaacgcacttaaccgcgccagaatccatctatcatctccgctttggatttgcctccttggcctctaaaccttactcgtcagcttggtacttgtggctgctctggcctgttacattgtggtccatggtgcttaccaggatttatcgtcgaacttttgttgttgaaaggaaccgcttccatcagctcagattacaaacatgggccattcccaagtacggaatacagtaccgcttgaaatggcaaaaggaatccgtcaataacatgattgaggaagctgtattagaggctgaggaaaaaggtgctagtgtgttgagtctaggcctcatgaatcagggtgaagagctaaacaggtacggtgaggtgtatgtgaagaagcatcctcagttgaaagtgaagttagtggatgggagtagcttggcagttgcagttcttctaaatagcataccaaagggaacaacccaagtactccttagaggcaacttgactaaagttgcttttgcagtcgcctttgccctgtgcgaaaagggcattcaggtcactgtattgcgtgaggatgaatatgagaagcttgataagtcacttggcaccaaatctgagggtaaattggttacctctaagagttatagctcttgcaaggtatggttagttggagatgacttgaccgaagaagagcaaagaaaggcaaataaaggaacactatttattcccttttcgcaacttccaccaaaaaaattgcgcaaggactgcttctatcacacaacaccagcgatgcagactccgacggcccttgagaatgtggattcttgcgagaactggttgccaaggagagtgatgagcgtatggcgcatagctgggatactgcatgctctggaaggatgggaagagcacgaatgtggttacaccatgtctaacattgacaaagtttgggaagcatgtctcaagcatggatttcagcctctgaaggtcccaactcaatcaaagtcctagaagatatttggcgatttatctaattaatctacttgatatctatgtttaatgtataagcatttacctaaata

SEQ ID NO: 194934 - DNA, 921 bp, Gossypium hirsutum
  unsure (1)..(921): unsure at all n locations
aagaaactgttaatgcctcgcttgcttgggcagtgctggttttagctatccatagagattggcaagacaaagcaagaagagaggtgatggagatattcggtagccaatatccacacttcgaaggccttgccaaactcaaaatcatgagcatgatcattaatgaaactctacgattgtatactcccttaaacgggttggtaagaagagctgcaagacaagttcaagtgggaaagctagtcttgcctgctgaagtagatgttttgatcccaaacatggcacttcaccatgaccctcagttatggggagacgatgcccatgttttcaaaccggagaggttcgaggaagggatcgcgaaagctaccaggtacaatgcggctgcatttattcctttcggaatgggacctcgagcttgtgtcgggatgacctttgcaatcaatgaaacaaagactgctctttccatgattctacaaagatacaccatttctctctcccctgcgtatgttcactcacccgcacctcgtatcacagttcaaccacaacatgggattcaagttatgctcaattcactgtctaatgatgcttaaactaggcgctggtgatctgtaacgccgtaatcaatgagtaaactctggtgtcggactctagtaatggttgttcagtttgacctgccccgcactttgccaattccccatgttcgcatgtctgtgaatgttaggttgtagaattattagagttctttattttctctaaaatatatgtaaatgcttctattagatccggagatctgatatgagaacatatccaaatatattaggagacttcaagaagtttagtttnnnnnnnnnnnnnnnnnnnnnnnnnnnnnnnnnnnnnnnnnnnnnnnnnnnnnnnnnnnnnnnnnnnnnnnnnnnnnnnnnnnnn

SEQ ID NO: 194935 - DNA, 611 bp, Gossypium hirsutum
cccacgcgtaaagcaacttttcttttccctgtcctgctgcaatggctgagcagatgcctttagggcgcgcaagagaagaaacccagagttcagatgaagaaacaaagtgccataagtcatatgatcacatactctctttgcttgaagctgaagaggatgagccaaaccaagacctgtcttctctcctcacaactttgcaacaggaactttcttctgactctgttttagatgacccccttccttacccaacatcagccgccttagatgctggccaaaaaaaccccaggcctaacaccacagcagaagctaccaataccaacaccatcaccggcagcttagaagacgaggatattcaggatgataaagagaaagtcatacgccatttgcttgaagcttctgatgatgagcttgggattcctaatagggaacatggctttgatgttggagtttttgagtttgaacacggttgtgacaatggtggaaatgggctagctttatgtgataggacgcgggaatttgaagatgacgctgctgattattatactttgttgcagtctgaactttgcctggaattatgagctgagaatgggccttgtgtcaggatgattata

SEQ ID NO: 194936 - DNA, 539 bp, Gossypium hirsutum
gggccggacccacgcgtccgcccacgcgttcgaaataccaactggaaggatttttttataacgatgctggatgtttaccgggagcttatacatgaaggacttcgcatatggatattcagtggtgacacagatgctgtaatcccaattacatccacccgcgacaggatagatgctctcaagcttgcaactgtgaaaccatggcgtgcctggtatgatgatggccaggtaggaggatggacccaagagtatgaaggactgaagtttgtatcagtgaggggagctggacatgaagtccctttgcatagacccaaacaagctctcgccctcttcaaagctttcttatcaggaacctccatgcctgcgcctgcctctgcctctgcccctgcccatgcccatgcttctcagctactcatctccgactcctgaacttttgggttgatttcatttcatgctttctcaatgtaatatctactttgggggattctaatgttcccgctttcccaaaacattcaataaaattttcaattaagaacaatcat

SEQ ID NO: 194937 - DNA, 1175 bp, Gossypium hirsutum
ccaattttacaaatacaatccttccatgcaaggaaaagaccctgttagggtgatcagggaggcactcgcacaagcgttagtgttttattacccgtttgccggtaggctaagggaaggagctcagcgcaagctgatagtggattgcagcggtgaaggtgtaatgtttatcgaagcggatgcggatgttacgctggagcaattcggtgatgcacttcaaccaccatttctatgcttggaggagctcctttatgatgttccgggttctactggggtgttgaattgccccgtaatacttattcaggtaacacggcttagatgcggtggttttatcttcgcccttcgcctgaaccacaccatgagtgatgctgctggcctagctcaattcatgtctgctgtaggagaaatggctcgtggtaggcttaccccatccattccacccgtatgggaaaggcatctgttgggggctagagatccaccgagagtcacatgtaagcattgtgagtacgaagaagtagagggaaccattgtcccctacgacgacatggtccatcggtcctttttctttggcctcacggaagtctcagcacttcgcaaacttgtgccaaaacaccttcgtaagtgttcaacatttgagctattggctgcgtgtttatggcgttgtcgaaccatcgcaattcaagctaatcccgaggaagaggtacgtattatatgcatcgtaaacgcacgttccaggtttaatcctccattaccttcggggtactatgggaatgcattcgcgttcccagtggcagtagcacaagcagggaaactttgtcaaaacccattagggtattcattagagctagtgaaacaagcaaagaatgatgtaacagaagaatacatgaaatcattagcagatttaatggtgattaagggtcgaccacatttcacggttattcgatcttacctggtgtcggatgtgacacgtgccgggtttgatgatgcggatttcgggtggggcaaagcagtttatggcggaccagctaaaggtggagtaggggcaatacctggagtagcaaggtttttaataccattcaagaacaagaaaggagaggctggaattgtgctaccaattacgttgacaggcgaagctatggaaatatttgtgaaagaattagatgggatgttaaagggaa

SEQ ID NO: 194938 - DNA, 986 bp, Gossypium hirsutum
ccgttctaagatggagatatccgacttaaatgacttcgggtccgaaatcattcctgctgctgtcatggagcatgatgtccaggcatatattttcaaagactactgggaagatatcggaacgatcagatcattttacgaagccaatttggccctcactgaagagtttccgagatttgagttttatgatccaaagacacctttctatacatctccccgttacttaccaccaaccaaaatcgacaaatgcaggattaaagatgcaataatctcccatggatgcttcttacgagaatgcagtgtccaacactcgatagttggtgaacgctcgcgtttggactatggtgttgagcttcaggacacggtaatgttgggagcagactattaccggactgaacccgaaattgcttctctattggcagagggtaaggtcccgattggaattggacgcaatagtaaaatcaggaactgcattattgacaagaatgctaagattggaaaagatgtggtcattgtgaacaaagatggtgttgaagaagcagatagaccagaagaaggattttacataacgtcaggtttaaccatcataatggagaaggcaaccatagcagacggcacagttatataaaaatgggggaccttaaaaatgacatccatgggggcagctttgaagatcggaattcgagttgcgaaaaaagcaaccgatgaagattgaattcgagtctgaatgttggatatggcggcatgctgtacatgcagcatttgcctttgaagaaaaggaaatgaaagctgcaacttattatgtaaattacaagttcttttatgtagtgtaaaatatggttctcatagaaataagttcaagacaataagatggctagcgctttagcagcccttgttccctttttattagtagagtaataatatatcttttgagagactaaaatggctgatgctcgtttcttttatctacttttatccattctgatgtt

SEQ ID NO: 194939 - DNA, 714 bp, Gossypium hirsutum
ggaaaagatttccggttttattttgattttgagcatcttaaggaggtagcatctgttgtggaggagagtgagttcttgagaggttggaagaaatggaataggggccgtaaaagaaaagtgccagtcaagaaggttacaacctataaagtcacacctatgcaacttaagaaggataagagcacgataatttggaggcagtttgatgcaccagagccggaaaactattggtacagggtatgtgaggggcaagcagctaagtacattcagaggccatggcatgctttatggaaatcaaagagattgatgaatatagtgactgagatcagtggacaaatggactgggattttgatgctgttcatgtggttcgaggggaaaaggcacaaaatatagaactctggccgcgcttggatgccgatacctctcctgatgctcttctcacaaagctcaaagaaatgattcagccttggaggaatctttacatagcaacaaacgagccattctataattactttgataaattgaggtctcaatataaggtccatctgcttgatgactacatggaattatggagtaacaagagcgagtggtacaatgagacaacattgctgaatgatgggaaaccacctgagtttgatggatacatgagaagtgctgtggacactgatgtactttactcggcgaagacgcgtgtttaaaccttttacaatttaact

SEQ ID NO: 194940 - DNA, 669 bp, Gossypium hirsutum
  unsure (1)..(669): unsure at all n locations
cccacgcgtccgcccacgcgtccgcaaaactctatcaaagaccaaaagtccagattttccttggaaatggacttttctcatcaaaaccctaactctaaccctaattacactttcttccctgaaaacgtcaatcccatgcccgattttgaggtctccgattatctcgatcttgacggcagtatcttcgacgacgatacatcgtcggagaaaggcatggctgcagctactgaacttagtggtgcaacatcaaaaaatagtaacagaaaatgcaaaaatggagtggggaaaaacaaatcggaactgggggtacgagttgcgtttagaatgaaatcagagatggaggtgaccgatgatggatacaaatggaggaaatatgggaaaaaatccatcaagaacagccccaatccaggaactatataaatgtcaagtgtaggatgcaatgtgaagaagaggatagaagnggacgtaaaggaacaaagttatgtggtaactacatatgaaaggagttcacaatcatgagaccccatccatggtttactacaaccaaatgtccattatggctnctaatgcttggacctttcaaagctctctnctcttcttctttacatgnaaagaaaactatntncatacaacatacatattatatataatcctagaatatatatctgt

SEQ ID NO: 194941 - DNA, 388 bp, Gossypium hirsutum
gaggttttaggcttcatcagggttttggggaagccaaagaaaacatggctggctacttgtggaagaagaaccctagggttctcctgctcctcggccaagaccattttcacccatttaccatcctcaacacctgctaacaataagctacccggccttttctctcctaacaaaatttctgcttctcgattctctctccgcaatctcactttttccaggctcccattggaattgggtggtgcagtaactttgatgcctttgcatagtgttacggcttctgctttgttcacttccttgctgtctttgcataatcaaagctgggggtgtttgtcagaaggatttgcaactcctctatagcattgcctatgggctcctgttgtcgatgctgctt

SEQ ID NO: 194942 - DNA, 434 bp, Gossypium hirsutum
cccacgcgtccgacaacatactggaactttttaaccataagaaatgcaacatgagaaggagctttttacgttacgcttcaatagaatgaattcagtaagggtagagccccatggttgatcgagcggcctatgccacttaaactcaaatctatcttaccttcaatccatctttgttcagccagctcataacaaaatgttagaccgggctgacacaaccaaattgcttgaagaaaaggaaaccccagcgaccaagcactcccacccccaaaagtggagaccgaacaccgccaggttgtcgaggacacgtctgaagaggaggcgggcgcactctaagttgaccaccctacccactaatggactatgaggggggcaggcgaaccggaaccgaccgagaacccgaaccgcttgactggctgaccccttcatacttcgtt

SEQ ID NO: 194943 - DNA, 739 bp, Gossypium hirsutum
cccacgcgtccgcccacgcgtccgtgttattcttggctcaagatttagggatgctttccaagatcctggtgcctttcttgcgatagaacctctctttgagaaagaaagatatatagtgacttacaatccttcaaagggaaaagtatatgcactgctcaaggatcaagcgaagtcagatgacattctaaaagcagcattccatgcacatgtgctcttgcatttcattcattctgccgataatagtctatcatctagaagccagcatgaacatctcatgccagcagctactgattttgagcttcatattgctgaatcatgtaagatggtttcaacatcatatagacatttcaagaacaatgctgcagaacagggttggaggatgtcagactcgcttcttaatccgggtcgggctcgactgcattgatgggctaaatgggatgaacaagtttgaactctactgtttacccaaaattggttgttgagatccaatttctgaccatacattgcacttatatacagcagcggaacgcgcatatacatgacacaaggggttctgaagtcagttagccctataccaatggaaggatgcgtctttgtgcaagccctcgattttctacactcgggcctttatttgtggaaaatgcattttcatagaatttatatatggtgtaattccatggtgtttaatattgtcagatttaaaataaattaatttctaatgcattgcatattatttaca

SEQ ID NO: 194944 - DNA, 713 bp, Gossypium hirsutum
ttgctttccatcttcagcatgcccttctcatgggtactgcatctggcattgccttcatccttggtgcctggcgaccactgcaactactattgtcttccaaaatgggattcttaccacttatgttgctactaactgtaggagctgcatttgtccatgtttcaagctcttctatgttgttgcttgtttgtaacaaaagaagttcttccaataaccttccgacagtgacaagatttccggtgagtgggctcactctccagtcatttttagcgtgtggagctgtggcttttcatgctctggctgaagggcttgcactaggagtggctgcgccaaaagcttatggacttggccggcacatggtccttcctgtatcccttcacgggcttccacgtggtgcagctgtggccagctgcatctttggagctactggcagttggtatggctctcttgcagcagctgctctaatcggcgtcatatggcccgatatctgcaattggagcaatattggcaggaattgactacagtggtcttgaccatgtgatggttttggcctgtggaggattgatcccatgccttgttagaatagttcaaagagcagtaaggttagatatccgaaaaagcagctgcggtcttgctgttggagtcggttttgctactctttgtttagcatgcaccaagttggtttgcttgcatacaccttattgcaattctgctcc

SEQ ID NO: 194945 - DNA, 976 bp, Gossypium hirsutum
acgggatatgctacgggtgaagatgggcaacaccggggggttggcaggacattactgttcatccacaaaaggatcttagtcaacgaacctttgttgaccaaacagccaattctgcggaccacaatgcgcaactttaaccatgtgccccccatagctaagggggagcctccgtcgtatgccgcctacaagaaattcctccgccatcctatttatcaaattccaaaacccgcgatattcggatttcaaaggctcgcgccaatgagctttcatggcgtccaaatcgtctaagaagaagcctaacagcaagcggtcaagctccaagcccgccttctccccgatggcatctccgaagcattttcatctcaaaagattcttcattttaatttcgattatgttgcctgtttgtgtaattgttgttttgggagtgtcgtcaaacacgtcgtttaagatatcgtcggatcattactccgttaagatttacggatttgaattagtcaatgaattcccccacgatccccgtgctttcactcagggccttgtttatgctggaaatgaatccttatacgagtcaactggactttacaagcagtcaactgttcgcagagtagctattcagacgggaaaggttgaggttcttcacaagatgcctgatgcattttttggagagggtttaacccttctcggtgaaaggctgttccaagtaacttggttgacgaaaattggcttcatatatgacacaaaaaatttgcagaaattagagcgatttacacatgagatggaagatgggtggggactggcaactgatggcaaaatcttatatggaagtgatgggacttcaacactgtatcaaatcgatcctcaaacattaaaagtcacaacaaaaaatgtcatcaagtttaatggtcaaaatgtacgctacctgaatgaattggaatatataaatggtgaaatatgggctaatgtttgacagactgac

SEQ ID NO: 194946 - DNA, 565 bp, Gossypium hirsutum
tccacgcgtccgctcattatgggggtttaaatgctgcattcctggaggaaaagaaatcagtgtgggtgatgaatgtggtgcctgttacggcacgcagtacgcttcctctcattcttgaccggggttttcccggtgctttgcacgactggtgtgaacccttcccaacatatcctcgaacgtatgatctgcttcatgcaaatgggctcctctcacatctcacttcagagaggtgtggcttgatggagttatttatagagatggatcgaattcttcgtccggagggctgggttgtgctctctgataaattaggagttatagagttggcacgtgcacatgctacacaaatacgatgggatgcaagggtgatcgaccttcacaatggcagtgacgagcccctacttgtttgtcagaaaccttttgtgaagaaatgattgctttagcgccaaaaggtctcaagaccacagatctgtaaacttttcttgatctgaggatgaactatcggtggcatcacaatgttagatatgctccagagtttcgacaggttcgatattaatgacttgagaag

SEQ ID NO: 194947 - DNA, 514 bp, Gossypium hirsutum
cttgtaataaaaagcttcaaaatttggacttgggaaataatttaatctctcaatgggcggaagtgaaggcactggattcattagtccatctgaagaatctcaacctacaaggaaatcccatagccgaaaaagataaattggctaagaaggttaaaaggttactgcctaacttacacatattcaatgcatgaccaattgataaaagcataaaaaacaaagagggtgagatcgtcaacattgcttcgcatagttcagatattcacatggaggagaaaacaggtcggaaaagaaaaaggaatcccgaatttctggtgtcggttgagaaacaagacgttaatcatgatagtaatgccactgcttttgataccgagaaagaatcgaagaggaaaaagaagaaaggaaacgacaagctgtcgacagaagttcccattgctgaagacgacgtcgtcgttgagaaggaagaaaaaccgaaggtcgaacaaaaaggaaaggaaacaaatgataagttcttaac

SEQ ID NO: 194948 - DNA, 620 bp, Gossypium hirsutum
cccacgcgtccgccagagttcaccgtgccacaatgttattatgctaagcaaccacctgctttgcatcaaggctatttttcgaagtttacagttgatgcgttgttctatatattttacagcatgccaaaagacgaagcccaattatatgctgcaaatgaactttataatagaggctggttttaccacaaggagttccgattctggttcatgagggtccccaatgtggagccactagttaagacaaacacatacgagagaggttcataccactattttgatcccaactcatttgaaataatccgcaaggataattttgtcgtccattacgagttgttggaaaagagaccgtcgctacctcaacattaatattcttccccctcatttacactgtaaagcacaagcatgtaattcattccttataacatcagtttgcagcgtttgtgtttttgcaaattttagcgattttaagcatttctgtttatctttttcccaatgagtagccattgtagcttctttacaaatctaatgcataccaacatttccatcaaaaaaaaaatttaaaatattatttaaattttattatttttattaatattttatatatttttatcattattata

SEQ ID NO: 194949 - DNA, 600 bp, Gossypium hirsutum
caactttagtgatgctcatggatgtggcaataggtgtgtagtgccaggatgcacaaagagtgcacgcggtcgccccgactgctgtgtcaggcatggtggtggaaaacggtgcaagttcgagaattgcggcaagagtgcccaaggaagcacggatttatgcaaggcccatggtgggggcaaaagatgctcctggggagaaggcaaatgcgagaaatttgcaaggggcaggagtggtctatgtgcagctcacagtagcatgttgcaagagaggcaggcaagcaaggggagggctcattgcacctggagttttccatggtcttgtatcggcaacaccaaccacgggaagcagctccaacaacaatcactcatcttctggcaatagggccatttctgattgcatcgattcaccagacaagccagtgaaaaggcaacaactcatacctgcacaggtattgggtccaccatctatgaagtcatcagcctcatactcaagcttcttgagttccgagcagtaagatgaaggaataaacaggcatggcaatcacattgccgggggtgttggtaacacaagcttcgacttcttgatcccaaatgggaggg

SEQ ID NO: 194950 - DNA, 469 bp, Gossypium hirsutum
cgtcaatatccaactttttcctcttctacatttctcagatcttttttagggcttgactctcctcgctgcggttctttatgctttcgtgatggtgaaagcatatgcgcaagagcacatttacaaacattcgtgggagcgagtaacttctgcatcttggcgtaagttcgctgaccctgaaaacaagcgtaccttgtctcatattctagaagttgacacattgaatcgcaaactcgatcctctctccggtgagcgttacactactcgggctcttaccatccatgctccagggccatggtttgttcgcaaaatcattggccaggacatctgccactgtgttgaatcaacagtggttgatgcccaatcaaagtcaatgcaacttgcaacccgtaatgtcagtcttcagaagtttatagaggtagaggagaagataaggtatgatcctcacccagataatccaacaggatggacc

SEQ ID NO: 194951 - DNA, 1299 bp, Gossypium hirsutum
ggttgatccggtaatcggaaaaatcaagggtccttgttacgcctagtatgaaagagcaggccaaagaaatcgcggagacatggaaaaagagccttgaagagagaggagggattgacaatgtgaaaacccctgatgttcatacttttttgcagcatttggttacgtttgggattgttaacaaagaggatctggagctttataggaaacttgtcgttgcttctgcttggagaaaacaaatgcccaaactcgccgtttcgcttggcctcggcgatcagatgcctgacatgattgaagaattgatcagcaagggacagcagcttgatgcagttcattttacttatgaagttggccttgtggacaagttcccccctgtgcccctgctgaaatctttcttgagggatgcaaagaaggctgcatcttctattttagatgatcccaataatactggccgggctgcgcaacttgctgcacgcaaagagcaatcagcacttcgggctgtcatcaagtgcattgaagagtacaaactcgaggctgagtttccgcctgaaaacctcaagaaacgccttgagcagctagagaagaccaagactgaaaagagaaaaccagttgtagtccctgctaacaagcgaacgcgtgtaaataatggtggtccgatgcctcctgctaaagctggccgtttgacgaatgcatatgtctcatctttcccggcacctcctccatttgtaaggtctccctcccacacccagtaccctgctccagtcccaggatacccatccccacctcccatgtatggaagcaggagcccacccaccaacccctatgcttactcaccagaagcagcccctcctccccttgctggttcataccctggagctcccatgaactatcctgcatacgggggctatggtaatggtttggcaccagcatatcagcaggcttactaccgataggcaatgatgacactactctggcgatggtaaccactgatacgctgactaccgacccatctaagtttttatttctaaatggtttgtttgtaatcactaaccgtttaatggtagcgatatctgtgtgtttaattaataactgccgtgcttcttgcttttgcccaaagtaagaagctgtatctctaatgttgatcagaactctagtactaggtgattgtgaagtagtaatcatgatggtaagcataacaatgtctaaactcgagactacccccatgtggggtttagttgtagaaaaatgttgtactgtttatctgcgaactaatatatgtattactgattatctcattttcag

SEQ ID NO: 194952 - DNA, 714 bp, Gossypium hirsutum
ctctcacgcgtccgcccacgcgtccgcggacgcgtgggggctcacctcttcagagaaagaatcttcttcttcttcttcttcttcttcttcttcttcttcttcactttacatccatcaaggctgaagaaaaaaattaggttattctgagtgatgggtgtgagctgccgttgttcccacacctcccatatcactgaaatcatcataaccagcttctttcgtcataagtcttaaaacaagtgaacaactttgtgttctttaaaatccaaaagccagagtagtctttctttctcttctttttcttttgcttttttatgttaaatttttatatcatttgatgatatggtgaagatgatttcttgaacaagatcgatcatttagcttgaaactctcatggcgggtgggagggtcttctcttggaataatactaatagtgttggtggttctaataatctctctggttcacttcaaagctcaaggggttccttcttttttgagcccttgggacccttttttttcccaaaacaggctttccccctaatttttttttgttcgaggccaaaccatggaccctttgaaaccccttggaaaacaatctttttataatttgagaaaaaaagtgttaaaattctgagatttctatcccctgaaaaaacaccttttttgccacccattttaaaaattttgtgggaaccatttccctgagagaactcttct

SEQ ID NO: 194953 - DNA, 541 bp, Gossypium hirsutum
cttgaacaagatcgatcatttagcttgaaactctcatggcgggtgggagggtcggctcttgtaataatactaatagtgttggtggttctagtaatctctctgttttacttcaaaatcaaagggttccttcttcttctgagcctatggatcctcttttcattccaagaccaggctccttcccctttttctttctttgtttcaggtacgaggtcggtggtaagctttgaagacgtccatggaggaaacagatcattctttagaagttttgatgaagaagagaatggagatgaagatcttgatgagtattttcatcaacctgagaagaaaagacgactcactgttgaccaagtccagtttctagagaaaagtttcgaggttgaaaacaaacttgaacctgaaaggaaaactcaactagctaaagaacttgggttacaaccccgtcaagttgccatttggtttcaaaaccgccgtgctcgatggaagactaagcagcttgaaaaagactatgacactttacaagctagctttaataccctcaaag

SEQ ID NO: 194954 - DNA, 896 bp, Gossypium hirsutum
ttttgttttctttagggagtttgccagaactttcagatttcataaattaatataaaataaaaattggacaaaggacagaaatggaaattaaaagactgccttaagttgacaagtgtgtgtaaaatttcctaatttttcgtattggccacatcaacagagatatcaatcaatcaaagaaagatcaaaccaaattaccattttttgttgttttgtttctctgatagttttggaaagaatatgttagcagtttttgagaaatcgattgccaagagccccgatgctcttaaagtttctggtgattctgaagcagcttcagccctcaacaagggcttcttggctacccattttgccactctccatcctggttcagtcactgtcaatcttggttcttctggtttcatggcttactctcttgataaacaaaacccacttctgcccaggctctttgcagttgtggatgacattttctgcttgtttcaaggccacattgagaatgttgctgttcttaagcaacaatatgggttgaacaaaactgcaaatgagggtatcattgttattgaagcttacaggacgcttcgagacagaggtccataccctcctgaccaggttgtaagagatatccaagggaagtttgctttcattatctacgatagctcttcaaaagctacgtttatagctgcggatgctgatggaagtgtacctttcttttggggtactgatgctgaaggccaccttgtccttgcagatgacagggagactgtcaagaaaggctgcgggaagtcttttgctccattcccgaaagggtgcttcttcacatcctcgggagggttaaggagctatgaacatccccttaacgagttgaaaccggtgccaaaagtggacagttcgggaaatgt

SEQ ID NO: 194955 - DNA, 704 bp, Gossypium hirsutum
gtgccacatcgccagttcccatggtaggatatctatcaatcaaagaaacattggtttttgtttgtgttttaagtttcggatctttgcaaaagaaaggagaaagaagaaatgctagcagttttcgacaaatcggttgccaagagcccagatgctcttaatgctccagataaccctcaggctgtttctgctctcaaaaatggcttcttacctaatcactttgcctctgtttatcccggttctgtctccatcagtctcggctcttctggggttatggcttattctcttgaaaaacagaacccacttctccccagactgtttgcggttgtggatgacatattctgcttgtttcaaggccacattgagaatattgctgttcttaagcaacaatatggcttgaacaaaacagcaaatgaggggatcattgttattgaagcttaccgaaccctcagagacagaggtccttaccctccggatcaggttgttagagatatccacgggaaatttgctttcattatctttgatagctcttccaaagccacatttatagcttctgatgctgatggaagttgtacctttcttccgggggactgatgctgaaaaccaccttgttcttgccgattatgtggagaatggtcagaagggctgttggaattcttttggttccatccccaaaggggtgctcttcttctccactggaaggttta

SEQ ID NO: 194956 - DNA, 510 bp, Gossypium hirsutum
atttagtgaagaatcctgtaatagtttataggcgctccgaatggtgaattccccagattggtcccccttccaaacttgacggtcagcatagttcatttcagcaagagggatctgtaatattcactgaacaacctcattctgaaagttcccactctccagcatagctctctatggagaagtcccttcgaagcccagatgctcttctaggtgagaaaaggtaacagatctacatgtgactctaaactctcgacacacagtaggatgatgcagtaccaggagcgccgaacagatctagacagaaaacaataaaaccagaataaaacctaaagacgcataccagaggcggcagacagaaacgtgctagggtagcagactttaccattagtctacaactatatttaaaaacaggcttaatgcacattttagttattgaagtatactacttttttcactttagtccttacaatttcttttagtccactttaatatttaacgttatctgatttttcc

SEQ ID NO: 194957 - DNA, 509 bp, Gossypium hirsutum
  unsure (1)..(509): unsure at all n locations
cccacgcgtncgcccacgcgtncgcccacgcgttcggccaaagcagtggaatgaggaccatatcatttggcgttttccattcttccgctcttttgagattgagttcacaagatctcagatcatagctgcaatccctggaacctttttctgtgcatggtatgcctcgcagaagcattggctggctaataatattctgggtcttgctttctgcattcagggaattgaaatgctttctcttggatcttttaagactggtgccattctcttggctgggctttttgtatatgatattttctgggtctttttcactcctgtgatggtcagtgtcgcgaagtctttcgatgctcctataaagcttttgttccctacagctgactctgcccgaccattttccatgcttggacttggtgacattgtaattcctggtatttttgtagcactagcattaagatatgacgtatctagggggaaagagaggcagtattttaagagcgcattttttgggtaca

SEQ ID NO: 194958 - DNA, 788 bp, Gossypium hirsutum
cccacgcgtccgcccacgcgtccggaccaaacccttcctttcaatcagtttaatggaaggcaagttaaggcaagtaactggcaagcacaggttcaacatcagctccagcaacagcaccagcaccagcgccagcgccagattcagactagattaaggaacaatgttgttggtgggagaccactggggctaccacaatcttcatggcctccacttcaagctcagccccaacagcagaaacattcacaaaatgggatgagagctatgtttcttggtggatctagtggggtcaagagggaatcaactggcactggtgtgtttatacctcgcagatatggcaacaccaccaacaccaccactcatgagcctagaaagaaatcaggctgttcaacagtgttactaccagcaaaggttgttcaagctctaaatctcaacttcgatgataccaaaaaccatgttcaacctcaattcaatcccacttttgcatcaaactatgatgctttggtagcaagaagaaatgcactgttgacacaagcaagaagaaattatagaccagatggaagcttaaacttgcctcaagaatggacttactgaaaatttagtccaaattttgtccaaattttctctcaaaatagtgtttattttgatggaaaaagatagtagggtagtagcttttatgatagggtatatggtattttgggttatatatatatatatatatatataaagaagaattccagaatgtgagtgtagtttagaaattaattaaattaaattgtgtttttaaggtt

SEQ ID NO: 194959 - DNA, 1365 bp, Gossypium hirsutum
tccacgcgtccgcccacgcgtccgcccacgcgtccgaccacgcgtccgcccacgcgttcgtcactgttttccttcaaaaccctaatagctgtcctcgcctcctgaacgtgttcgaaaatggccggttctgagggattgactctacgtggcaccatgcgtgcccacaccgacatggtgacagccattgctactcccatcgataactccgacatgatcgtcacttcctcccgcgacaaatccatcatcctttggcacttaaccaaggacgaaaagacctacggtgtccctcgtcgtcgtctcaccggtcactctcacttcgtccaagacgttgtcctctcttccgattctcagttcgctctctctggttcctgggatggtgagcttcgtctctgggacttatctgccggtatctcagctcgccgttttgtcggccacaccaaagatgttctctccgttgccttttcaattgacaaccgtcaaattgtttctgcttctcgagatcgaactatcaagctatggaatacccttggagaatgtaaatacacaatccaagaaggtgacgctcataccgactgggttagctgcgttcgtttcagcccaaatactcttcaacccaccattgtttcagcttcatgggacaagactgttaaagtttggaacctgaccaactgtaagattcgtaacaccttgtccggacactccggttatgtgaatacggtggcggtttcacctgatgggtctttgtgtgccagtggaggaaaagatggagtgattctgttgtgggatttggctgaaggaaagaagctttatagtcttgatgcaggttccgtcattcactcgctttgctttagtcctaataggtactggctttgcgcagccaccgagcagggtatcaagatctgggatctggagagtaagagcatagtggaggacttgaaggttgatcttaaggctgaggctgagaagtctgacgtcactgacatcggaaataagaagaaggtcatatactgcactagcttgaactggagtgccgatggaagcaccttgtttagtgggtacactgatggtgtaatcagagtttgggggattggtcgttactagatatgcttgtcttgagttaagattttgtttcaaatgtcggaaggttttttggtttattttcttaatatggttggatattgaggccttgccctcttctattctaatttggtttgggttatttaattaccggcttaggtttgaattgaatggagtataattttctcagttttgcttccttccttttttatatcatgattcaataataataataataatagtattatgtgaaaaaagaaaaaaaaaaaaaaaaagtcgacgcggccg

SEQ ID NO: 194960 - DNA, 977 bp, Gossypium hirsutum
cccacgcgttctatcattttatcattcaaaaccctaaaggccgctcccgccgcaagcgccgacgaaaatggcagtctccgagggattggttctccgcggcaccatgcgagcccacaccgatatggtcactgccatcgccactcccattgataactccgacatgatcgtcacttcctcacgtgacaaatccatcatcctttggcacttaaccaaagacgaaaaaacctacggcgtcgcgcgtcgtcgtctcaccggccactctcatttcgtccaagatgttgtcctctcctcagattcccagtttgctctctccggttcctgggatggtgagcttcgtctatgggacttaagcgcaggaacttccgctcgtcgtttcgttggccacaccaaagatgtgctttccgttgccttttcaattgacaaccgtcagatcgtctcagcttctcgtgatcgaactatcaagctttggattaccctgggagaatgcaaatacactatccaagaaggcgatgctcatacagattgggtaagctgtgttcgtttcagcccaaatactcttcaacccaccatcgtttcggcttcctgggataagaccgtgaaagtttggaacttgactaactgcaagattcgtaacacattggccggacacactggttatgtgaacacggtggcggtttcgcctgatggttctttatgtgctagtggaggcaaagatggggtgattctgttgtgggatttagctgaaggaaagaagctttacagcctcgaagctggtgccgtaattcactcgctttgctttagtcctaataggtactggctttgtgctgcaacggagcagagtataaagaatctggatttggaaagcaagagcgtagtcgaagacttgaaggttgacctcaaaggccgaggcttaaaacatttgccagccaccgccaacgcaaacaaaaagaaagtgatatattgcacatgcttgaact

SEQ ID NO: 194961 - DNA, 465 bp, Gossypium hirsutum
tcgcccacgcgttcgcccacgcgttcggaagcggtggaagcatggcatgtttggtaaacataaggcgaagttctttggcaggaagtggaagtaaatagtcccgtctcccatgtcccatacgaatcttatcatactagtatgctcttttaacagttactgacatggttgccctctaataaacatggatttgtttcgcttgttatttgtgactggcatgctaatattatcacagtgcgtatatatgtgctgttggttttatatatattggaaatggagttgctatgtgtgtgtcatatattgtatatatgattatgttcattttttgttactcatgtgtgaagagtaaccggtgatcacattaacccaatgtattaaccagtccagttgattgcctgattgatgagaaattgaaaatagccaggccatttgatgggtgcagctggacattagtagctaatatgaacc

SEQ ID NO: 194962 - DNA, 305 bp, Gossypium hirsutum
cgaatgaccgcacgcgtccgcacgtccggaaagccataacgatatccaagctaggacaattaacttcctcaaatggctatgggagaggaaagaacagtagatagcactggggagccatggtatatgttcgcaaaaagcgatgagcgaacttgttaagaataacacttcttaccgcttgccacttcgaggacatccgattaaattagaacgaaaaaatgggtaccctttaatgctagatgagtatgctttaattgttcaaactaactatgtgaataatggctacaccacgggagatggacttggtg

SEQ ID NO: 194963 - DNA, 666 bp, Gossypium hirsutum
gctgatttcgtccgtggatatccattcagtctccgtgagggtgtcccaactgctggggcgcatggcctgtggctaaacatcccagattatgatgcaccaacccaacttgtgaagcctcttgagaggaacactaggtttgttgatgcggttctcaccatcccaaagggcaccttgttccccatgtgtggtatgaatctggctttcgaccgtgacttgatcggccctgccatgtactttggactcatgggagatggccagccaattggtcgctacgatgatatgtgggctggctggtgcatcaaggtgatatgtgaccatttgggattgggggtgaaaacgggtctaccatacatctatcacagcaaagccagcaacccctttgtgaatctaaggaaagaataccagggtatatcctggcacgatgagatcatgcctttcttccaacaagctgtgcttgcaaaagactgcaccactgttcaaaagtgctatgttgaacaggcttagcacgtgaaagaaaagcttatcaaagctagatcctcctatttggggcatgctcatgcacaaactgctcgcatgtttgcctgtcctggctcgaccctaactctgctgtagccgctgctcgtgatctagagtgtttaacggtattcaacaacctctcatgaacgc

SEQ ID NO: 194964 - DNA, 433 bp, Gossypium hirsutum
aatggtagttcgcgtacgtgtggtttcagatgatgtgggaaagatcaaggaagctctgcggagatggagtgatattgataagctggatcttatccttacacttggtggcaccggattcactccaagagatgtgacccctgtagcaactaaagaggtgagtgtaaaaagaaacacctggtcttttgtatgtcacgatgcaagagagcttaaaggtaacaccacttgctatgctttcacgctcagcagctggcatatgagggtcaacattgatcatcatcatgcccgggtatccaaatgcagtcgcagaatgcatggaggcattgttgcctgcccttaagcatgcactaaagcacggtaagggtgacaaaaagagagaaacatccccgggcacattcctcatgaacatgctacaccagtggatacttgggagcgc

SEQ ID NO: 194965 - DNA, 431 bp, Gossypium hirsutum
cccacgcgttcgcgaagccaacgctcatcacgccctcccactcaataactattgccatcaggttcagtgtcaggtaaccgcaacaaaccaaaccacgcttgaaccagccaggaactcacccaagaagcattacaggggagtcaggcgtcgcccatggggtaaatacgccgccgtgatccgtgactccactcgacaaggggcacggatgtggcttggcacattcgaaacagctgaagctgctgctttggcttatgacaaggcagcttataggatgcgtggttcaaaggctttactgaatttccctgctgaagttacggtggaaccatgatcggttcatagattacggccgaatgtaagctcaaaaagattggaagaaacaacctgtggttcaggtagtagctccaccgtgatttcatttggggcatccatat

SEQ ID NO: 194966 - DNA, 702 bp, Gossypium hirsutum
cccacgcgtccgcagacctcgtccgtggtctccgagagcacaccgatgccggtggcataatcttacttctccaagacgaccaagtccctggcctcgaattcctcaaggacggtcaatggtttagaatcccaccgtcgaaaaacaacaccatattcatcaacaccggcgaccaaatcgaagtgattagcaatgggaagtacaagagtgtgttgcatcgtgtaatggctgagaaacaagggaataggctttccattgctacgttttataaccctggtagtgatgctgtgatttcgccggcaccggaattgttgtacccgggaaattaccagtttggggattatttgaaactatattcgactactaagtttttggagaaaggaccaaggtttgaatcgatgaagacgacgatggttaatggtcaccatggttgaaaaaagcagtgatttgcatggcctcaaagtgggttttttttttaaatacagttttatatatgttcttatgagttatgttgctttggttcctatctaaaaatatttgtatttgtattctcttttttttttaatgaaaacagcttttttttgaaaaaaatagatagaaacattaaaaacaaatgaatgatgatgattttgctattgacaaggtaaattataatagatgcgtggtttaaatgctttaacatgaaatttactgatgaagtggggg

SEQ ID NO: 194967 - DNA, 872 bp, Gossypium hirsutum
gcttttcatatacatataaaagaagttcctagaaatgagctaaagtagctgagaaaaaaatggagttttggggagttttaatttctggggttttagtttcttggtgggttttgagtgtaaatggtgctaatttaccaccatgtcaattccctgctatttacaactttggtgactcaaactcagacactggtgggatttcagctgcttttgaacccattagagctccatatggtgtgccctattttcacaaaccatctggtagagactctgatggtcgcctcatcattgacttcatagctgagagacttaagttgccatatcttcatgcatatttgaattccttgggagcaaatttcaggcatggagcgaattttgctaatggtggatcaaccataagaagaccgaatgaaaccatttatgaatatgggataagtccatttggtttagatatgcagattatacaattcgaacagttcaaggcaagggctactgaaatgtataatcaagctaaagatccttctgaaaaagataaacttccaagacctgaggacttttcaaaggcgctttacacctttgacattggccaaaatgatctttctgttgggtttaggaaattgagctttgatcaactgcgtgcttccatcccagatatcataaaccagttagcatcagctgtccatcatctgtatgagcaacgagggaggagtttctggatacacaacacgtggtccgatcggttgcttgccggttaactatttctacattcttaatcccgaacctggttatgttgatcagtactgttgtgtcaagaaacaaaatgaaatggccatggaattcaatagacagcttaaggacagagttatcaagtttag

SEQ ID NO: 194968 - DNA, 1079 bp, Gossypium hirsutum
  unsure (1)..(1079): unsure at all n locations
tttcactcgtccgcaagaacagtgaagggtatcctggagcttgatactacggaggaaacgaatacattgacatggctgagtccttgtgtcaaacgcgtgctctagaggcttttgggttggatcctgcaaagtggggagtcaatgtgcagtcactttccggatctcctgctaactttcaggtttatactgcattgttgaaacctctccggcgaattatggcactagatttaccccatggtggacatctttcacatggttatcagactgacactaagaagatatctgctgtgtcaatattctttgagacaatgccatatagattgaacgagagtacaggttatattgattatgatcagctagaaaaaagtgcagtgcttttcagaccaaaacttatagttgctggtgccagtgcttatgctcgcctttatgactatgctcgtatacgcaaggtctgtgataagcagaaagcaattatgttggctgacatggcacatattagcgggttggttgctgcaggtgttattccatctccttttgaatacgctgatgttgtgacaaccacaacacacaagtcacttcgtggtccacgtggtgctatgattttcttcaggaagggactcaaagagattaacaaacaagggaaagaggtaatgtatgacttggaagacaaaattaatcaagctgtctttcctggtcttcaaggtggaccacataatcacaccatagctggtttagcagttgcattgaagcaggtcagaacacccgagtacaaggcttaccaagagcaagttcttagtaattgctcgaaattttctcagaggttgctggagaacggctatgaactagtatctggtgggaccgagaaccatttagtcttggtcaatttgcgaaacaagggtattgatggctcaagagttgagaaggtattggaatcagttcatattgcagccaataaaaacactgttccaggggatgtgtctgctatggttcctggtggtatccgcatgggaaccccagctctcacatctaggggtgtcattgangaagatttcnagaaggtagctgacttctntgacgct

SEQ ID NO: 194969 - DNA, 433 bp, Gossypium hirsutum
aagtaagaaaccctctcctcatctccaccgtttcgaactttaccgatttattcttaaaaccgctgcccagacttcgaccacggcgaagcgtgcacagatctaacggtgtgcttcaagaaggtaaaacccccctctcttttctcttttatttttcgccaagtaaagagaaaaaggaaaaaaaactaaaagaaaacgaaaaaagatccagagaaaatcgagaaatcgcctttccttattcagttgttctgtatttcgtaacgatttctccctttttattcaacaataaataaatttcataacacagaagctgaaacaatgaacaatccaaaggagaaaatcaaatctctgatccttttgaaactttttcttgcttttgtttgtattcaatatctgagtctgcgtaaaaaaaaggaaccaaaaacccttttacaaa

SEQ ID NO: 194970 - DNA, 880 bp, Gossypium hirsutum
  unsure (1)..(880): unsure at all n locations
catagactctcttccacggttaaacccttttcaaacaatagtcaaatggcttccaatgatcaccatggccatcaccatgaccatggccatgaccatcaccaccaccaccaccatcatgaccatgataaatcaacaaaatcatcatgggggggagctgatgggaaggtttaccatagccatgatggccttagcgcctcactcacatgaacccatttactcacctggatacttcagcagaagagccccaccgcttgttaacagggatttcaatgagagggctttcactgttggaattggtggccctgttggtactgggaaaacagctttaatgctggcactgtgcacgttcctgcgggataagtacagtcttgccgctgtgacaaatgacatattcacgaaagaggatggtgagttcttggtgaaacaccaggcacttcctgcggaaaggatacgtgctgtagaaacgggaggctgcccacacgccgctattcgtgaagacatcagtatcaatctcggccctctcgaggagctttctaacttgtacaaaacagatatacttctttgcgaatccggggagataatttagctgccaacttcagcagagaactcgctgattatatcatctatataatagatgatctgggtggtgatnnagatccctagaaaaggtggccctggcataacccagctgactnctggtgataaacagacggaccttgcactgcgntggagctgctgngagtcatgaacgcgatcgcttcgatgcgtgatggaggcgcttcgatttgtcagtgagcacgggaagcgtgaggaattataacttgtttacagctgggagccgcactggagagcgaatgactctattgagacctggattctc

SEQ ID NO: 194971 - DNA, 624 bp, Gossypium hirsutum
  unsure (1)..(624): unsure at all n locations
cccacgcgtccgcgaaaatttaaccccttcatgaaccagtttatttctatgtaaccaaagactccacatggatctcgcaatgattcgcttttgttggtcatctgctgcagaaaatgttctaacaaagcgaatcttgtgacacatcgactcttcaaaggatggaatctttacttgcagcgaagcccacacccactacagaataccacaagaccataacaggtgatcagaatcctccagctctgccttacacagtggacaagatacttccatacacaaagtcctacgcgccaaattaccaaagtgaggcaccaaattattcaccggtctccaaatatgtattttaatttttcctggaatgttcaacgaccataaggctttgtaaaaatctttgtaatcctcattaatagaggacatgtatatagtgtcctggtaagtattctctatttaggactcgatacccactcttaactgtggtagtccccaaaactttatgtttccaaccaacctatcctncggaccacttcagatatgggaatgagagattcgatcagttgactctatcactaagtatgaaccgctcctatccaggtaacaggattcgtcgatgttatggatacccttcca

SEQ ID NO: 194972 - DNA, 536 bp, Gossypium hirsutum
ggggccgaccgacgcgaaaaaggaaaaagaaaaaagaaaaatcaatagctggttcggacccccgaaaacccgatttcgaaaccctaatcggatctcccaaatagctccgtagcagaagaaagaagatgacgggagtaaccaatcaggaggaagacaagaaacccgctgatcaaacggctcacatcaatctcaaagttaaaggccaggatgggaatgaagtgttctttaggattaaaagaagtactcaactaaagaaacttatgaatgcttattgtgatcggcaatcggtggagttcaactctattgccttccttttcgacggtcgccgtctgcggggcgagcagactccggatgagttggaaatggaggatggggatgagatagatgcaatgctgcatcaaactggtggtaccatggcctaactagctagcttataggtttacttacctagtaggattcaaatggtagtatttgtgagattaggacctatatgtattaaacctcttgaaactgtgaggtctgctagtgcaatgtcc

SEQ ID NO: 194973 - DNA, 976 bp, Gossypium hirsutum
gcatggtgctgctacaagctctgagttgggtgtttatgcctatgctgctgctcaagttaagaaagctatggaggtgacacattatctcgggggagaaaattatgtcttttggggtggtcgtgagggataccaaacactcttgaacacagacatggaaagagagctcgatcatatggcaaaatttcttgaagctgctgctgcctacaagaagaagattggattcaatggaactctactgattgaacctaagcctcaagaacctaccaaacatcagtatgactgggatgctgcaacaacacttaacttcttgcgtaaatatgggctgcttggagaattcaaacttaacattgagtgtaaccatgccacactctctggtcacagctgccatcatgatcttgagactgcaagaatcaatggaatgttaggaaatattgatgcaaacactggggatcctcaagttggttgggacacagatcagttcttgactgatgtcggggaggcaaccatgattatgctaagtgtgataagaaatggaggattagcaccaggaggcttcaacttcgatgcaaaattacggagagagagtacagatgttgaggacttgttcattgctcatattagtggaatggacaccttggctcgtggactccgaaatgctgctaagctgattgaggatggttctttggctgagcttgttagtaaacgatattctagctttgacacagaacttggtgcccagattgaggctggttaagctgattttgaaatgcttgagaagaaagccatgggaatggggagagcccaatgttgcttcatacaagcaggaacttgcatagatgattttccaatctgcactgtaagataccttgattgaccgattatggtcaatagtttcggtttttccttttagatatgaataagtcatgatgactatacaaataattagatttttgtagtttataacaatgcattagtg

SEQ ID NO: 194974 - DNA, 624 bp, Gossypium hirsutum
  unsure (1)..(624): unsure at all n locations
cttggatcctcctcattttctacgctgcccgaattccctctgagtgaagatgactactttgagccttacttccccttgcattgttaaagttgcaattcccgaacgattttcaagtgctattgtcaaagccccaacatctcttggatctgttaaaagcatctccaagtcttttggcttgaaatgttcctccaatttcagaacctcaatggcaacttacaagattaagcttgtaggaccaaaaggtgaggtgaacgagtttgagtcccctgatgataagtacattctagatgcagctgaggaagcaggggttgagctaccatattcttgcagagctggagcttgctgcacatgtgccgggaagatgatttcaggttctgtggatcaatctgatggttctttccttgacgataaacaaatggaggaaggttatctgtgctttggtttgcgtacccaactcanactnggaaattacaccccaagaaccgatcttctaatagnnngtggctgaatgttagtcttagttgtttctatgactctctaacttgtacattgagaataagctttaattggctgatgctggatgcatggtgagacactgacaccttgactgcatatattgtatga

SEQ ID NO: 194975 - DNA, 491 bp, Gossypium hirsutum
cccacgcgtccgcggacgcttgggcccacgcgtccgctcttggatctgttaaaagcatcggggagtcttttggctcgaaatgttcctccaatttcagaacctcaatggcaacttacaagattaagcttgtaggaccaaaaggtgaggtgaacgagtttgaggcccccgatgataagtacattctagatgcagctgaggaagcaggggtcgagctcccatattcttgcagagctggagcttgctgcacatgtgccgggaagatgatttcaggttctgtggatcaatctgatggttctttcctggacgattaacaaatggaggaaggttatctgctgacttgtgttgcgtacccaacttcagactgggaaattcacacccacaaggaaaccgatcttttttaagtagtttgtggtctgaaatgattacggctttagttgttggctatggacttatttaaacttgcttccaattgagatataaagctttttatt

SEQ ID NO: 194976 - DNA, 843 bp, Gossypium hirsutum
  unsure (1)..(843): unsure at all n locations
ttctcacgcgtccgcccacgcgtccggaaactggtcccaattctctcattttctaaattcagggtttttgaagttttggattttttttcaatggaaaaagaattagatgggttagggtatttacctctccgcataattctatcaaaattatctccttcagatattattaaagtttcttgtgctaataaaaggcttagaggttcagcttctgacgattccctttgggctcaaatttgttatcaagaacttcagctttcaacccctcaagatgatcatggaaaccctctaccttgttttatgttagcttatcagttgtggcgagaggctttctcgatgtatccatggccgctcgttaaacgagttaaaagatgttgggataagcttaagaaatggtttaacaaacaatttcccggaggctgaggcgacacttataaggggtgcatcggaatctgatattgaacaattacaaacacttttaaaagtcaaattgccgcttcccactcggcttctctatcgctttcatgacggtcaagaactgccggacataatgaacccgaagacagcttctagtagctggttgggaattataggtggttactctttctatcaaaattcagttaatgtttacttgttaccattacatcaggttattgccaagacatgatatgtcattcgttacctaggtttttcgagccgatccaagtgcatcatcgtggcttcttctttcgcttctagtaggaaactgtttttcttgaactgtaccaatggccaactttttgtcagtacaaggaagcctcttacagataatgaaatgattccatgtgtcncgaatacacttattcc

SEQ ID NO: 194977 - DNA, 901 bp, Gossypium hirsutum
taaataaaattgaagatcttctttggaaaccactgggtgcaagcaactcacaaactgcacgagtttgggttgcacatttaaaaattccatcttcagatcttcattctacagttgaagttagtgttggacattctaagggaatcatttcaacaagagggtttgtatatagccatccttcaatgttctcatttaaagtacgtgtacagcctatggaaagagattcctctcaagtttctgttgcagaaagtatttcattgagagaagaaagttttaaggtctatggaacacaatcgggggaatcaattattgactcttttgatcaattaattatcaagaatggtcatgaaacaactgcatctaactggcgttttgaggctttagctaaagagattgaatgcttccgtgaactgttatcgttggtggactgtaaaattggaaagcttacacttgctagattactgaaggcttatgatgcaatgtcatatccgttcgctaacaaactggtgcattcagaagaagttcttgagctgtatagtgatttgatgaaattggatccaacacattaccagttctacaaggatgaacatagcatggtcttgctacagaaggtgacttctagtaaagagtctttacttcaacattgctttcagtataaggactcagtttcatcagccatatgtggtcctatctgtctccggctgaacaacttatcgctatcacggatgggagcttttgagaaattattgtgggttcaaatgttagatctcagccacaatgaactacaatcaattgaaggattggaagctatgcagctcctctcttgtttgagtttgagaaacaataaactgagaagtttaactgctctggagcctttgagaaagctcaagttattaagagtact

SEQ ID NO: 194978 - DNA, 1275 bp, Gossypium hirsutum
cccacgcgtccggtctcttacagctaagcttcaagcaaaatatggggtttgcagtagcaactaaagctgccttgctcctgcacctttcccttttcgtactgagtagcttcacggtgtcttctcagatcttgcctgaggctttgcctcctcattaccatggaatttcgcctgtagtgccacctgctcacccaccaagccaccaccaccaccatcaccatccccatccgcatccgcatccgcatccgcatccgcatccccaccagccaaccccttcccctactaagcccccaactcacccacctgtttaccccccacccaaagcacccaagattgctccagtttatccaccacccaagtcaccaagcaagccgccaacttacgctcctcctcccaagtcacccagcaagccggcaacttacgctcctccacccaagtcaccaccaccatcaccatccccatccgcatccgcatccgcatccgcatccgcatccccaccagccaaccccttcccctactaagcccccaacttacgcccctccacccaagccaccagtttatcctccaactaagccgccaactgcgcccccgactaagccaccagtgcatccaccgacatatcctccaccatcgccttctccacctaagccgcctacttatcctaaaccacaaaggagcctagtggctgttcagggcgttgttttttgcaagtcatgcaaatacgctggatccgacaccctgttgggagcgacgcctattttgggtcagtttgaaacctatcattatacttaaaaaaagagattaaaatttacatcttttcactacacaaaaactttaggtgcaatgcttggttatattcatttgcatcgagaattattagccctagtacgtctatctttttaatggcctaataatttggattaagcatgcatgtgatttccatggttggttgaaaaggggaacttgctttttaaatttgggtcccagaaagagagatatagagagatataaagagaaaagggttcttggatttacctaaaagtgccttggaagtgaccctaaacattggggttttaagtttaacgcggaaacttcactttttacaagtaaggctaatcctgggggtccaacaatagagagtggttgcttctttttaggggaccctcgtaaacttaaacaagggaaacctaatgctttttctttcccttggagattattattaaactatcggagaatcggataaggccctgtggttttttgggccctgaaactactaat

SEQ ID NO: 194979 - DNA, 1370 bp, Gossypium hirsutum
tcatctttcccttttcgtactgagtagcttcacggtgtcttctcagatcttgcctgaggctttgcctcctcattaccatggaatttcgcctgtagtgccacctgctcacccaccaagccaccaccaccaccatcaccatccccatccgcatccgcatccgcatccgcatccgcatccccaccagccaaccccttcccctactaagcccccaactcacccacctgtttaccccccacccaaagcacccaagattgctccagtttatccaccacccaagtcaccaagcaagccgccaacttacgctcctcctcccaagtcacccagcaagccgccaacttacgctcctccacccaagtcacccagcaagccgccaacttacgctcctccgcccaagccaccgaccaagccaccaacttacgcccctccacccaagccaccagtttatcctccaactaagccgccaactgcgcccccgactaagccaccagtgcatccaccgacatatcctccaccatcgccttctccagctaagccgcctacttatcctaaaccacaaaggagcctagtggctgttcagggcgttgttttttgcaagtcatgcaaatacgctggatccaacaccctgttgggagcaaaacctattttgggcgccactgtaaagctgacatgcaagaacaccaaatacaagcaagaggccactgcgaaaactgacaagaatggctatttcttcctgcaagcaccaaagaccgtcaccagctttggagcccacaaatgcacagtgtctctagtatcatcgccaatggctaaatgcagcaaaccatctaatctccatggtggattgaagggggctaccttgaggcccgagaagccatttactgcgaacaagcttccgtttattctctacaccgttgggccatttgctttcgaacccaaatgctactagaaacttagattccactcttttcctttgttgttgctcttaatgtgttaccagtacttacgagttccctagcttattgtaatcgcattttgttcagtgtattgctttgtgtgaaaatagattacagacgaataatcaatcgatttctactttgactaaaaaaaaaaaaaaaaaaaaaaaaaaaaaaaaataaaaaaaaaaataaaagtaaaatataataaatataataaaaaaaaaaataaaatattactatattaaaattattattattttaatatctattaattaattttatattggggtggtcttttatgagtatccaatattttctactttgttttaataaaacatataattttttttttttggcgtctctcaaaatttattttcagcggtcccctttttttcaacactttttttaatgggaaaa

SEQ ID NO: 194980 - DNA, 1061 bp, Gossypium hirsutum
ggtggattggtttcctagggattgaaaagaaattgaaagaaatacataggagaagagatgaatatcttcagaatttagtagatgggataagattaaatataagtaagaagaatttttcgctgattgaaaggcttctgtctcttcaacaagacgaccctggcttctgtcccgatcaagtcatcaagaccatggttttgatgatgttcattgcaggaactgaatctacggctattacaatggagtggacaatggcactcctgctgagtcatccagaggctttgcagaaggcaagagacgagatcattcgccatgttggacatgagcgcctgctaaatgaatcagatcttcccaaacttccataccttcgttgtgttgtaaacgagacactaaggttatatcccgcagcaccgcttttattgcctcattgcccatctgaagattgtgtggtggatggatatgagatacctaaaggcacaatactcttggtccatgcttgggccatccaaagggatcctagcatatgggaggagccaaccaagttcaagcctgaaagattttatgagggaactttggaagacaaggaaggattcaaatatcttccaaaatatcttccatttggacttggaaggagagcttgtcctggcagaaacatgggcttacggtccgttttgttggcaattggtgtttttatacaatgctttgaatgggaaaacgtagggtcagacaaggtggatatgacaccaaatactattggattgtctatcctcaaggctaggcctttggaggctttgtgtcgcccacggcctgatgtgattaaacttctctcccaactttagagcgttcatcgtttagtatctacccaattccagattagccatttgatcttttaaatggcatatattatgcacttgagcatttaaactgttttgttttgatatttagattgatgcttgttagaacattttcaaatatttatagtattttaataactataaatgaatgggtgtaattaatcaaaagataaatcttttgatcattggtcaaaagttataaaaaaaaaa

SEQ ID NO: 194981 - DNA, 368 bp, Gossypium hirsutum
  unsure (1)..(368): unsure at all n locations
gagatggtgtctaagcttacaagtgagtgctgggacaagcgtatcacaagtagtccttggaataaattcagctcgagtgaatctgcttgtctttctaattgtgctcaacgatacatggacttgacactcatcattatgaaacgcgttcagtcaatgcagtaacctggaggagactatgcctgcagtcgtggttacaagttgtgagcttttcttgcaaaatctgctgtattttttaaaccaatactcgtattctgttaaaattcctacagaaggacatcctttgcaatgggttacaaattaattatctcaagattctatgcgggcttaaaagagtttgctttggcatcaaannanaataaaaaattatt

SEQ ID NO: 194982 - DNA, 805 bp, Gossypium hirsutum
  unsure (1)..(805): unsure at all n locations
accagtagctggagcagtggctatttgctccccatgggaccttttgattggtgataggtttatatgccgcaggctacttcagaagttatatgatagagcccttacaattggccttcaaggttatgcaaaattgcatgagcctcgctattctcggttggctaattgggaaggaataaaaaagtcacgttcaattcgagattttgacaacttcgctacttgccttgttggaaaatttgagactgtggatacatacctataggcgttctaccagcactccttatgtgttaaatgtgtcagtgccattgctctgtatcagtgctctagatgatccggtctgtacgagagaagctattccttgggatgaatgcagggcaaataaaaatattgtgttggccaccataaaacatggaggacatctcgcatttttggagggattacctggatctaaactatggtgggtgagggccactgacgaatttcttggtggtcctacactctagttcacatatgcacaaaagagactgagattacgagcagaagcgtcaattgaatatcaatgatcagggccttatgtaacgtcagagaagatggatggtggtgcagtcggtacgccatgcggaaataatcattgacactttacggggttggatatcaaaataactgtttatcacggacaacacagnacatacgaaacaagtcaatttgcaggcaggntggaattctgaaatgttaactgctcggtcaatgtttggatctgttcaaatagtggttattttccaaaacggaaatgtggtgaataattccn

SEQ ID NO: 194983 - DNA, 474 bp, Gossypium hirsutum
ctgctcttctctgtacccatttttctttacttccaaaacatcccatggccccaaagaaggacaaagcccctcctccttcatccaagcctgccaagtctggaggtggcaagcagaagaagaagaagtggagcaagggaaagcaaaaggagaaggtgaacaacatggtgctgtttgaccaggctacctatgacaagcttctctctgaagctcctaaatacaagctcatcactccctctatcctctctgatcgtatgaggattaatggatcacttgcaaggaaggcgattcgggagctgatggcaagagggtcgattaggttggtctctgcccattcaagccagcagatttacactagggctacaaacacctagatcgttcgttgtatttttgcttaattagttccatgcagtagtgctgttggttgttgagttgacttctaagtgaaattatttacttgctggcgctttttttttt

SEQ ID NO: 194984 - DNA, 544 bp, Gossypium hirsutum
caaaaactgcgcctcctccttaaccagcagataccatggccccaaagaaagacaaagctcgtcctccgtcctctaagcccgcaaaatctggaggtggcaaacaaaagaagaagaagtggagcaagggaaagcaaaaggagaaggtgaacaacatggtgctatttgatcaagctacctatgacaagcttctctctgaagctcctaaatacaagctcatcaccccctctattctttctgatcgtatgaggatcaatggatcacttgcaaggaaggctataagggaattgatggcaagggggtcgattagattggtgtctgctcattctagccagcagatttacactagggctaccaacacttaggatcatttttccccttaatttagttattatttagaattatatttgctgagtttatcatcattgaatgctttcttttgttatttatttaagacttccctgtagtcactttttttccctctacaatgtttaagcaacaggttcttgatattgttatggtttaaaggatgtacttttcagatttt

SEQ ID NO: 194985 - DNA, 629 bp, Gossypium hirsutum
ctaagtctttcacgtctggaggtggaaagcacaacaggggggtctttttattatatcttatgctatatatataatggggtcgatctcttgcttttcaaaagttaaatatgaagtggggggtttttgttttgtattaacagaagtggagtaagggaaagcaaaaggagaaggtgaacaacatggtactatttgaccaagctacctatgacaagcttctctcttgagctcctaaatacaagcttatcactccttcaatcctctctgatcgtatgaggattaacgggtcacttgcaaggaaggcgatacgggacttgatggcaagagggttgattaggttggtctctgcgcattcaagccagcagatttacactagggcaacaaacaactagatctttagttatatttttgcttaattagttctatgaagtattgccatggttgagttttgacttggataaatgatttttcccccttcaaatttggttgaaaacttctctttggctactttttctagaatgatttagtggttgaatttcagcttctttggcactcagctttcctagatgaaattgataaggttcttaacatgtgctatatgaggaaattgacgccaagcaacacctctttct

SEQ ID NO: 194986 - DNA, 520 bp, Gossypium hirsutum
  unsure (1)..(520): unsure at all n locations
ccgggccgacccacgcgtgcggnaatgcataaaaatattaaagattttttttttatcaacaccaatagagaatggggaagtgatacttttttaaataattttgaaagaatatagaaatagagtgttttatgacattacatttgtgatggacctcgtaatgattgcacataccaatggtaaggagagaacatatgcagaatgtcggaaaatcttgggaggaggaggcttttctcactataaaatcattaacatccctgcactggtgtccatcatcgaggcgtatcctgatgctcagtagctttttagcataatgccagtggtggggatttaatttcctattttatgaatcgtccttttttcgtgtaggcgtcaataaatgtatgtgattgtattattcaatcttttcttattctctgttgaaatggggcaattttatttgcctaaaaaaaaataatataaataaacaaaatattaagtccaaaaaaatattgggtagacttttcggccgatcaagagcatt

SEQ ID NO: 194987 - DNA, 760 bp, Gossypium hirsutum
caatagcaaaaagttcaaaaggaaaaccctaacaaataataagcttcccaaatgcaccgtcacatctacctatctcgtatagcatctccctagcgtcgtcgtttttcgtctctcccgccgatcagatcaggcctctcaccggcgagagattgtcacagtcttttctctactgtttattatcacgattcccaggaatgaaccaccatgctctgcaggcacagagaagggagatgaagcacaaaggaagaaatgtagtctggtcaattgcaatggacaagtgtctaattgaagctctggcagttcaggctaaaaatgggaataaaattgacaaatgctttaatgaaaatgcatatactgctgcttgtattgctgtgaattctcgttttaatttgaacttgaacaatcaaaaagtcattaatcgccttaagacaattaagaaaaggtacaaggtaatgagggatatgctaagtcaagatggatttaggtggaatccaaatacaaagatgatcgaatatgacagtgaacatctatggaaaagatatatagtggcacatcccgatgcaaaagggtttcgtggaaagcagattgagatgtatgatgagctaaagattgtgtgcggaaattatcaagccccgagtcgttgggctaagatgaaagacggaagtcatccaatgggataccagaattttgaaaaggattctgcttcttttgtatcgccaagctcagatgatttaagtgatacagatgggactgagtcctt

SEQ ID NO: 194988 - DNA, 1380 bp, Gossypium hirsutum
tctgaaagtacataatcctcagttttactggaggatcatgaaagaagctgatataggccttgcagatgcatatatccatggagatttttcttttcttgatgaaactgaaggccttcttaatcttttccggattcttgttgccaataaagagaactcagctgcctcagggtcgaataaaagaaggacttggtggtcacctgctctgttaacagctagtatatcatctgcaaagtattttgtgaagcatctcttgagacaaaatactattacacaagctcgtaggaacatttctcgtcattatgatctgagtaatgaacttttcactctatacttgggcaaaatgatgcaatactcttctggagtctttaggacgggagaagaacatttggacgttgcacagcgtagaaaaatcagttctctaattgagaaagcaaggatagagaaatggcacgaagttctcgacattgggtgcggttggggaagcttagctattgaaactgtgaaaagaacaggatgcaaatatactggcatcactctatcagaacagcaactgaaatatgctcaagaaaaagtgaaggaagctggactccaggataacatcaaaatacttctctgtgactatcgccagttacctaaggaacaccaatttgacagaatcatatctgtagagatggtagaacatgttggtgaagaatatattgaggagttttacagatgctgtgaccaattactgaaagaagatgggctttttgttcttcagttcatatctatcccagaagagctttccaaagaaatccagcaaacagcaggttttctaaaggaatatatattccctggaggaaccctgctttctttggataggaatttatcagccatggctgctgcaacaagattcagtgtggagcatgtggaaaacataggaatgagttattaccacacactgagatggtggagaaaacttttcctggaaaacacaagcaaagttctagctctggggttcgacgagaagttcatgaggacatgggaatactatttcgattactgcgctgccggttttaagacaggaactcttatagattaccaggttgtattttcaagggccggaaatttcggtacactcggagatccatacaaaggtttcccttctgcatattccttcatcgatgattgaacaaagtgtggttcaacattgatccaaagaagcaaacaaaattatcaccacagtgccagtgttaagaacaacctatctccctagtccctacttttgtttattatggctatgtttgcaatgcaagaataagcaaacattgtaatgttaataaagtttgcacttttgtagactggatggatgttatcaatgaagtacctagtttatacgtt

SEQ ID NO: 194989 - DNA, 483 bp, Gossypium hirsutum
cccacgcgtccggtttgaaaaaaaaacagagaatactcccccacccctttttctcttggagttagggtttcaacacccatcattgtcggcggttcaccgtgtcaaacggagaggggagctctgacgacgcggccacggtgtagatccggtaagactctcttcccctcctctttcctttgtctattttcgtataaaaataaaaataaaaaaacaaataatacaaaaaataaatgaaatcagaacatagaacaagactagaaataaaatcaaccttcctgtttttttgctattgtgattttgtttgctaaagttcgtgtcccccaaaaaaaaaaactacaaatggatgtttccacttttataaccgaattacatagattcggttttttggttttttcttcttggctgctatttttttctttcttcgattttcttgggttttcgcggtgccttagtttcgtcttgcaggtgtcagacgcgtggaag

SEQ ID NO: 194990 - DNA, 733 bp, Gossypium hirsutum
cggacgcgtgggcaaattctcgactcttcagctgctccgtattatatagtcaactactatggcaaccagaatgtctgttagatacgtttctcgtaggttctcgagtgggagtgggaagatactcagtgaggaagaaaaggctgctgaaaatatttacatccagaaaactgagcgagagaaattggagaaacttgcacgcaagggacccaagccagaggagaaaccggatgctggttcagggggtgctgcgaccgatggtagcactacctctacatcgggaacatctgctgagaaagtatcaaccgataagtaccgaaactacggggttctcgctggtgttgcaacccttggtgctgctgtgggatggtatctcaactctaaagacaagaagcaagaggcctgaaatgggggttaatgcgattggattctctaggtggaacatggcatgaatggtttaccccaatgccctgttcgtgtgcaaagtaactgaaaaataaaacaaactttgtaaagcagcttatcatgttttctgataacgtctgtgtttgaatcagtagtgttcttatgtacctcgatgccaatcatggttttctgcattgtcttttaaagaatctttgatgccaacttatatttttttcttttctaaataaaagtgtttgtgacttcctaccctataaaaaaataatatattggttatctctttctggtgttttttcctcctttttttttttta

SEQ ID NO: 194991 - DNA, 827 bp, Gossypium hirsutum
  unsure (1)..(827): unsure at all n locations
gaaacttccatagctgattcagagttaacagatctaagagaagaagttgctaaactaagttgtatggttagccaaatgaaaatgtcaaaggcacaactcgttccancagataggtcacaagctgacttggtccagacttctgtttccattgggagtaatattcatgcatctggcacagatgcatctgaatctgagtgttctcagggaaatacttcaatgatagagaaaccttcaggtgtgtgctgctcctgttccaaaaagtctttgtgtaagaccctcaaatgcggatgtcgagcagcagggagcagctgcggggcatcttgtggctgcgcattggccaagtgcacgaataataaaaaagttcctttcaaattggacgacatgccacaaccaaagacgccagaagatactgttgaagaactgaaaggcacgattcatgatacgatcctgattcaaaataaaactgttaaaaacattcccgatacaaatgaagattgcggacctagaaagcagccattacgagagattgggaacacaatggtcaaaccagctgctgtaaaacttgaccctagaaagaaaggccaaaaaacagtcattcaacctgatactaaggatcagccattacctgtgatggaacaatacaagaggaacaagaagaacaaacaaaatttcaggttagcccgtatagtatatatttccaagtaccctggaaaattttctgaaagtgtacgagttacttgctcgaaagcattgtagtcaggcgaactatagcattggctactagagttattcctttactaagtttcacatgggatttgagtgttttt

SEQ ID NO: 194992 - DNA, 534 bp, Gossypium hirsutum
ttctctccgcagcagttctcctccgccgttccaggcccctcccatgtccgaccagatgacgacgaaatgaggacgctctccgacgaatctcgcaacggtacaagcgtgtggcgtgcgcggagtgttgaacgtgggacggtgtggagactgccgaacgtggggcatgtggcgctgctaattgttgctagggtttttgctgttttaggccaattgggccctgtaattgggtttagcttggcccaagttttattgggtttgggcccaggtatatttgggcttgtacagttgtccctctttgctcgttgtcgtgtaactggaacagagtaaagactaaaagtccaattgtgctcggtcttactaagccttgacttcttcggtgcttttcttctttaaatagtctcattccttcctattgcatcttcagaggtataggaactggtgcttctatgtactctactgcaatgtcggggtgataggatttctacgttgtagctcctcaaaaaaaaataaaatttgctatctttaatttgctcc

SEQ ID NO: 194993 - DNA, 470 bp, Gossypium hirsutum
cccacgcgtccgaaaccccacttgatcttgctgtcactgaagaaattcggtcattactgagagaacgtgaacaggcccctgaggaagtttatacgggtggtaaaaggaaggttgaacagcctgatgcttcaaggccaccgttggataaaccggaaaactccaatgatgaagctactgcggctgagcatgaccggcaagagggggagagtgttaaaaggaaaggtgatgacaataaaccagaaggcgtatcagaacctaagaaaccaagagttgttcttaagcatctcagtgaagatgacactcaggaagatgaccataccccgtgaggacaacgcttgagtggaatccatgagcattgcttgaaccaaaatttgttacaagatggtgaatcagttaatgcaacgctaacaataggagtagtgccttacgattagattgtttacgctaagttttggtttttgtgtgtttga

SEQ ID NO: 194994 - DNA, 433 bp, Gossypium hirsutum
gcttgtggcctcttctcaaagagaaaggtggtcttttgatagtgaacactttggttctggtgatggcaagataagtggatgtagcagcaggttctcgtattctccatccataggtatgcgaacttgtggggcttgctcaaagcttttggctgagagatcttcgtgtagctgcaatgaaatttcagtggtagctgtacttgtatgtggacatgtttatcatactgaatgcttggaaactatgacgccagaggctgacagatatgacccagcctgcccaatatgtatgggtggagaaaagcaggtctcaaagatatccagaaaagctttgaaagctgaactggagttgatggctaaacatcttaagttattcaagaatagagttaaagatagttttgcggaaagtgattgtaatgattttaaccaatcacaaaat

SEQ ID NO: 194995 - DNA, 760 bp, Gossypium hirsutum
  unsure (1)..(760): unsure at all n locations
ctttatttcaactaattcccttacccactccaaaaatcctatataaaatccccaatcaaataataatagaaaaagtagctactcttaactttcctcttctgttcctggaagcatagcccttcaagaaacaccatcaaagcttgcaagtttcaataatggatgaatctggggagtacccaaaggagtactacaccagcaacggcaaccccaggagactgacttcaacatcctcatcttcttcgtcaacgacgagcgttcacgttaccgccttggatggcctcgtcaacgtcaactccctcttcaccatcgccgtctttgtgggcctttctttggccactccgggccaacacagtctcgagaaccgagccccctgcgacgccggcattgacgtagctaaaaagctcttggtcttcgagggcgtctccttcagcttcttccttttctcctccctggtggctcagggtctaaagctcgccatcaatttgttgaacagcaaagatgtggatgaagctttcagggcacacattaaccttaaagtattgaggtttgggatgatgggctccgccgtcgggtccgtcatggggtgcttgtttctgatgctttcgatggtgaacgtgatcgacatccggctggggttgttgtcttgcggcagccagtcctccattcatgccacggcggctttagtcattctggtttcttctgctctcttgattacatttccactgctgtttatgctttcttgcattgaatcatntaaaac

SEQ ID NO: 194996 - DNA, 472 bp, Gossypium hirsutum
gcgcccacgcgtcctaaaagagatgcctatttattgatgcacatgagaaggcatgggggtgagggcaaaacaccagcagcgctagctaaacccaataaagaatccacttctgaaccagctcttattaagagatattcatgcccttttgctggttgcaagaggaacaaggatcacaaaaagttccagcctctgaaaaccatcttatgtgtcaaaaaccattacaagacatcccactgtgacaagagctacatctgcagcaggtgccacaccaagaaattctcagtgattgctgatctcaaaactcatgagaagcattgtggtaaagataaatggctatgttcgtgcggcaccacgttttccaggaaagataagctgtttggtcacatagctcttttccagggtcacactccagcaattcccctggatgaaactaaaggacccattgccccatctgaccctggagatggcagtg

SEQ ID NO: 194997 - DNA, 557 bp, Gossypium hirsutum
gttttgttggttgacctgaaatgatgatcatggatagcttttttgccatgggatgtgttggttcaccaatgctttgaacgcatggggaggctggtagtagtggtatgtgctgtaaaaacaaggcccctcctgagcccccagggattcagtgcatgcccgttaggtgaaactgggtcccatttcccaccctgttcctcttttattattacctttgaaaacacgtcatgtttgatattttaatctttgttacaagcatgaagacaaaagtttctagggtggggatgtacatgtacatgcatgcagtgaactgaagagagattatttagtttcttcttttcttttcttcttttcaatgttccaccttccatcaaatcctgtagtaaaaaaaagttcggtctttttctttttctggttcatgtacaagttatatgtgtgtttccttctttatggctcatgcagggtctttgtttgtattcataattggagcatgactctgttgagtttaaagctccaaactatggcttgtttgtttgttgtactctcgttttcagttttaa

SEQ ID NO: 194998 - DNA, 569 bp, Gossypium hirsutum
  unsure (1)..(569): unsure at all n locations
cccactcgtccggttgtacctgacattgtcacaatggcaaaggggatcggaaatggcatccctctaggcgctgtgataaccactcccgagatcgcggaggtcttgacccgacgaaattacttcaacacctttggtgggaaccctgtatgtacggctgcagggttagccgttttgaacgtaatcgaaaaagaaaagcttcaagacaatgccttcgtcgtaggatcttatttgaaagagagactaattgcactaaaagataaacatgaccttatcggggatgtgagaggacgaggattaatgcttggagtcgaacttgtcaccgatcacgagctcaagactccggcattgcttgaaacacttcatttaggggaccaagtgaaaggttaggtttcttcacattaagcctgccatggaatgtactttgtttaagctactgatgtactggtaatcttatagtagagatcggtgtattggttgggaaaggtggattttatggcaatgtatttagaattacacctcnnnnnnnnnnnnnnnnnnnnnnnnnnnnnnnnnnnnnnnnnnnnnnnnnn

SEQ ID NO: 194999 - DNA, 452 bp, Gossypium hirsutum
cggtttggcggcccgccgcgcgcggtgataaccactcccgagatcgcggaggtcttgacccgacgaaattacttcaacacctttggtgggaaccctgtatgtacggctgcaggattagccgttttgaacgtaatcgaaaaagaaaagcttcaagacaatgccttcgtcgtaggatcttacttgaaagagagactaattgcactaaaagataaacatgaccttatcggggatgtgagaggacgtggattgatgctcggagtcgaacttgtcactgatcacgagctcaagacaccggcaaagcttgaaacacttcatgtattggaccaaatgaaagagatcggtgtattggttgggaaaggtggattttatggcaatgtatttagaattacacctccactttgctttactacggaagatgcagatttttttgtagatgctatggattacaccat

SEQ ID NO: 195000 - DNA, 510 bp, Gossypium hirsutum
gaccacgcgtccgggctgttaagcctgtgttaagcaaggagcatgatgagcctgggatcaacttgggcctaatgctcgggatcattggaggcgttgttgccattgcaagacctattgctttgttgatgtttgtgattattcgaagatcacgaacaactgaagacgcaaattatgatgaaaggtccattgtagacaaaatgtctgttcgtagctctcccaaaccacccattgattcaaggcgtgttccacagacaatgagatcagctgcaattgggcttccacgatatcgcgttttcagcttggaagaaattgaagatgcaaccaacaactttaacccatcaaattttatgggggagggatctcaagggcagctctataaaggttgccttgtagatgggccaggggtggtggtaaaatgtttgaaactacagcagaagcatgcacctcaaaatctgatgcaacacatggaagttttgttcaagctaaagcatcgtcatttgggtagcgttc

SEQ ID NO: 195001 - DNA, 487 bp, Gossypium hirsutum
cgagaaactcaaaaggactgttaattatcctttaaaggctcctcctcttgccaatggtgtgggtagctttaaaaatggtatcattcttaatcttttgggaatgggtgctctattcttgtcatgcaagcaacagtcggcttactactctcgaaggcacttacctcctccacaactccttattaccaaggaattgctcccggctctagtccagttcttgccttggatgtattcttggtgcaggcatcggcaaacactatcctttcgcactttctggggctggtgttctcgctggaactgttacgctcggtgacattgcctaatacacagagcattccaattcccaagcttgcataaattctgcctttcatggtaaatgtagaatagttgaacgtgattttactgctgataactggtttacaagccacccttagcatttttttaataaatacatgtattggtgcaaaattgatcatattaacacggattt

SEQ ID NO: 195002 - DNA, 306 bp, Gossypium hirsutum
cggggtttccagttcgtggagatgtacacgactacatgtcttaaatgggtgcagaattcttgcttgattgttttggtgaccaggtctctgagattgtaatcatgtttgaatggttttttttttattgtaaaataattatacatccctttagtttcagtttcaattcagcccttcagtttgtaatatgttgccatatagtccatttggtgacacccatccattgaaattctttcacccttctgtacatgttgaacttctagtgtttctttttttctcaatacaataataaggcccagtatttctctt

SEQ ID NO: 195003 - DNA, 564 bp, Gossypium hirsutum
cccacgcgtccgtggagaaaatgttagtggttatggaggaaagaaggaagagaggagcctgtaagatatttgaagcaatcgaaggtgtattgattaataaactaaaagccaaagaagaagagattgaaaagattgggaaattaaattgggcactcgaagaaagggtgaaatcactatgcgtatagaaccaaatatggcgagatttggctcaaaccaacgaggcaactgccaacgcgttacggaccaacttagaacaagtactcgccgccgctgccaacacccgtgaggaggcggaagcggcggcggcagacgaggtgcacgatgcacaatcttgttgcgggagcaactgggaagcaactgcggagaaaaccgtctccggcggtggaggacaggagtgtacgaattgcaggaaagagatagcgtgtgtgttgctgttgccgtgtaagcatttgtgcttgtgtacgatttgtgggtccacacttcacgtttgccccgtttgtaaatccactaaaaatgctagtggtcatgttaacttgtgaataacccccaaaccaaaagaaaata

SEQ ID NO: 195004 - DNA, 769 bp, Gossypium hirsutum
  unsure (1)..(769): unsure at all n locations
atggaattttctcaggctatccttgatgatcgcaccaagaaagcagaggcatggcatcgtgatgctgcagctcgtgcacggtatactcaacctgcagcacctattacttgtgctacatttgctcaaaatgttattgaaggaagggcaaatgtatcgcaagcacatgaccacaaacaccagccaatgatctttggaccacaaagccttataggtgggagcctaacaagtgaaagggaaaggatggcagcacaggttttccaacctgcttatcggatgccaactataagcatcgaggaagctggtctgagggagatggaaatgatgaataagtggcaggagaggaatgcaaaaatgtttgaagaagctaactcagcatggtacaaggacaaaccaaagatgggaccaagtgaaaatgatgaagacgatgatgccgcccaagagaaggcacgagcatgggatgactggaaagatgacaatcctcgaggtgcaggcaataaaaagcttactccctgcgggtgaaagtgacaagtanttcccataattctcttgcaacgtattctttcaggcctactaaatgtggttttaggaatgtttcttaaatattttattttgcttataagttttgttcttaaaaaaattttgtttgtttgctttggactatacataaaatgcatacatcaacttgattgtatgtaggtaatcacctanttgtcaacttaatatattgtattcggctttaaaaaaatgtttagtgccaaactttgggaac

SEQ ID NO: 195005 - DNA, 220 bp, Gossypium hirsutum
cccacgcgtccggtcgagaagttggctaagaagcatggatgtagccctgcacagttagcacttgcctgggttcttcatcaaggggacgatgtagcaccgattcccggaacaaccaagataaagaatctcgatactaacagtgattcactaaaagtaaagctcacagaagaagatttgaaagaaatatctaatgcggtcccgataaatgaagtagctggtg

SEQ ID NO: 195006 - DNA, 749 bp, Gossypium hirsutum
gtcgttcattattttcactcttattcgattaaattccagaactcgaagcgaagagacaaagatcgccatggcacctcctgcaaaagcaataactagtcccgtgcctgatgcgtggtatccaaccctagccgtcttcatgctcgccattggtcttgtcctcactgcttccttcttcatctacgaagcaacttcttccaaacgaaatcgcagtcttgcaaaggagctcacaactgggggagtggcatctgtcttcctgggattcgggtcactgtttttgctactatcagccggcgtttatgtctgattttcatatattttttcaaccattttaaaaatttgctgagcagaatggtgttgaatggaggatcatggcttcgaccttgttacctatagactttttcttttttgttattaatcagataaagagtgcttctatgagaatattttgatatctcttgggttttcttggtgcatgcccaaatttataggagtcgtagttgcatcacattgtttaagttgcacactggttcaacttgcaggttaaaaaaaaaaaaaaaaaaaaaaaataaaataaattaataaataaaataatattaaaaaatttaattaaattataataaaaaaatattttaaaaattttttataaataatttaaattttataattatttatttttttttggggggggcccttttaaaggatccatatttttttcccgggtttcgaaaccttataattttttttttgtg

SEQ ID NO: 195007 - DNA, 544 bp, Gossypium hirsutum
ctggaatgtccatcctgtttatagcagcaatgttgtcgttcaaggattaacgatcctcgcaccagtaacttctccaaacaccgatgggatcaacccagattcttgcacgaatacccggatcgaggactgctacattgtttctggagacgattgtgtagctgttaagagtggctgggatgagtacggtatcaagtgggggaggccaacgaagcagctagtgatcagacggctcacgtgcatttctccattcagtgcagtgattgcactaggcagtgagatgtctggcggaattgaggatgttagggccgaagacataacaggcattaattccgagtcggctgttaggatcaaaaccgctgtaggaagaggaaactatgtcaaggacatatatgtaagaaggatgactatgaaaaccatgaaaatggtgttttggatggcagggaactacggttcgcaccctgacaacgattatgatcctaatgcaatccctgttatacaaaatatcaattttcgtgacgtcgttgccgagaatgtaaccatggca

SEQ ID NO: 195008 - DNA, 535 bp, Gossypium hirsutum
gtctatttgcaagtgtgcgtggcgcgtggaggtgcacggcgtacagaggtgctggaggcttgaacggcgctggaggttttcttagcattctaaagtctataaataacaataaaaagaagacctaatggagcatgtagagaagattgaagaaattactcgaagtacactatcagagccaactcagaagcagatctctttcaaaattgaatatctcattttaacttttttcgaagtttatttgaatttctttatgtcttatagtttttctgactttgagatgttttttttttcaaattatgaactaaattccctagatacctagggaaaatgaaacctatgatgaattttattatttgatttctgaattacatgataaatacttgattcttgttctcaaaaaaaaaaaaaaaaaaaaaaaaaaaaaaaaaaaaaaaaaaaaaagggcggacgatttaaaggatccaagcttgggggcccgtgcatgcgacgccatacctcttctatagggttaccaaaatttaattctctggtcggg

SEQ ID NO: 195009 - DNA, 618 bp, Gossypium hirsutum
cccacgcgtccggcaggttcaggcccaacatcgactgagggaagggctgaaactaatgccggtgccaggggtcatggttcaaatagacaagaatcacatcaagctaggaagcagagcactttagaaactcgagctatagcttgggatgaagctgaacgtgccaaatatatggcaaggtataagcgtgaagaagtgaagatacaggcctgggaaaatcacgaaaagaggaaagctgaagtggaaatgaagaaaatagaggtgaaggctgagagattgaaagctcgggcaaaagaaaggtgtgcatacaaagtcgcagccgcaaggagaatagctgatgagaaacgtgcaaatgctgaatcaaagcttaacgagaaagctataaggacatcctcaaagggcggattatataaggagaactggtcattttccttcttccttctttttcaagttgccttccctttgctggtagtaagcaactctgcagccaaatctggcttcttcttatccaatagagatataacgtacgtatgtatgtatgatgttactttgggattaatttttatatgcattgtgatttactgctgaaaagtatcagtttatggtgattatttctcattt

SEQ ID NO: 195010 - DNA, 707 bp, Gossypium hirsutum
cacgcatgaggaaaaatcctctgaacgagagcctggggtgagttctcggagtgccatcgtgcctccgtccaatgggctgcacgcgcttacgcgccactgtcaatgccgtcacatatggcggccggaagccaaaaaacctcatcgtttaccccgcatcaaaaggtattccattttttatctatttttaatatttttatatgtataaaatgcaaatattttgaaaaagaaaaataaaaaacaaatcacctttgctttctttgtgaaatctttctgatgtcttattgcaaaaaaatatttggtgtacaatcatccttttctgtgtgtgtgtatctctttatagatcaaagaaaaaggctttataacctcagtctattacatattttggaaagaaatccttgatttctttccatatttgtttaatctgtatattgtgttctttctttccatatttgttctttgtctgtcgcgatttctttcctttgtttgaaggtgagcgcgaggatctcggtggcgagacaagactgaggcgtggtgtgctgatgatggtgacgatctcggcgttgtttgcgcgccggtggtggcgcgacatccagtagctgaggtcaaggagaaagtcgtggcgctggtagagccttgacatgaggccaacagacgctccccgaaagttctggagtttcgtgaaacgaaagggcgcttattggacatga

SEQ ID NO: 195011 - DNA, 417 bp, Gossypium hirsutum
tgagaaacttaaacaacccaaaaacaaacagaaaaaaaaaaatggtgctgctgaagggacagcctttggtcgcaagactggctgctttttccaaatacgtagtccttcctggatccatggttgctgctattatttactcccctcccaattatgattctcccaagaagggcaaatcccctaattaatttttctctcctggtatctttttccattaatggggttttctgcaagatgtcacctgcatactgtttctaggtttgtagagagttgaacgtatggtatttgcctttagaagaactgttctgttatgaatcttcccttcttctcagactttgtcaaaagaataagatattatgtaatgaatacaagaatgccccattcgtaaccctgccgaataatttggattattatgttgtt

SEQ ID NO: 195012 - DNA, 420 bp, Gossypium hirsutum
gcgtattgtcaatggttgatccatcgagagatcctaccaaatctggtgcttctctagtccttccaactcggaaggataacgttgtcgcagaatctgtcgcttcaaaagaaattaggagttcaaatggagatttgaccaggaatcagaaaaagaagatttgcaacagggctaagaaggcggctcaaggttgtgtaggaagggaagcttctgaggagaatgagatagattccaagactggtggcacggaagacactaatgctgatgcaaaatcaaatgaagtttgtggtgatgaacaggcaaatagttctgaggttaaagacgatgcaaagagagatggaattaacaatggtaaccaaggaaaggagcgccatagaagggggagccgtgctacaaggaaaaagctattggcagaagttgatc

SEQ ID NO: 195013 - DNA, 640 bp, Gossypium hirsutum
  unsure (1)..(640): unsure at all n locations
tcggaacccaggtgtaccttgcttcctttttggtcactctaccggtggagctgtggttgtgaaggcagcttcccatcctcgtattgaaagaatgctggagggagttgtgctgacctctccagctttgcatgttaaaccagcacatccaattgttggggctattgctcctcttttttctctggttgctcctaagctccagtttaaaggtgcgaacaagaagggcatcccagtttcaagggacccggccgcactcttggccaagtactctgatcccttggtctacactggtccaataagggcccgaactgggcatgagatattgcgcatttcctcttatttgatgcggaactttaagtccgtgacagtcccattctttgttctgcatgggactgcagacaaagtcactgatccactcgcctcccaggatttctacaacgaggcatcctccaccttcaaagacataaagctctatgaaggcttcttgcatgatcttctctttgaacccgagcgtgaagagatagggcaggatataatcaactggatggagaagcgattaggcaccatagccgaaaatattgatcatatctggtgaatgatcttgcaggacgccatctcaagtgttntttttttcctttctcaa

SEQ ID NO: 195014 - DNA, 776 bp, Gossypium hirsutum
atttgatgcagtatatgcttagcagcctaaaagcagcggctgaagcggcgggtgggccagaatggggtagcactggcccaactgatgctggtcactacaacaattggccagaggatgcgccttttttcaagaaagacggcggtggctggcatacgccatatggtgaattcttccttacctggtactctcagatgctgttagaacacggggcgagaattctatcgtccgcaacatcgatttttgacggtgcaggtgtgaagatctctgtgaaagttgcgggaatccactggcattatggaacccgatcccatgctcctgaactcacagctgggtactataacacaaggtaccgagatggttacctcccgatcgctcaaatgctagcacgtcatggtgccgttttcaacttcacttgcatagagatgcgggatcatgagcagccccaagatgccttgtgtgcaccggagaagctagtgaagcaagttgctttagcaacaggagcagcacaagttccacttgccggggagaatgcacttccccgttatgatgaatacgcccacgagcagatcttacgagcttcatcgttgaatgtcgatggctcagcagttgatagagagatgtgtgcatttacgtacttgaggatgaacccatcgctctttcatccgggcaattggagacggtttgttgcattcgtgaagaagatgaatgagggaaaaggagctcgtcggtgttgggaagaggtggagcgggaagccgaacaattcgtgcatgtcacg

SEQ ID NO: 195015 - DNA, 431 bp, Gossypium hirsutum
acgcacgcgtccgcacaaccctagcattccccctttaatcctttcagccgaaccctaacattcctctaagagcggatctaccaccatgaatggccatcagcccatccgagcctcagagttattttcagccttaagaccccttatatactccgatttcgacgaagaagaagaagtttcatggtgtactttcaaggttaagtcttatttccttcttcctttcgattttttaaatgctaaacatatgaccaacataaaaattattggcagaaaagaaacttgagttaagaatcacctttaaggattttaataactttctctgcattctatgtgtgtgcgtatgcgttcggcccttgcaggtacattcgacggcttttttatttccagatttacagagtaaataaaaactaaaattacattttcttgctatcatc

SEQ ID NO: 195016 - DNA, 609 bp, Gossypium hirsutum
cccacgcgtccgcccacgcgtccgaagaaagctttctttattatcatggaaaccaacttttgcgcttcttattttttaataggaacccttttttcggtctgcctttttgttgctttcaaaactggataaattctcgttgctaagcgtatctcgcttgatattttagagggcgaactggcgaaacataagtcttacgccgaatatctgcttcaacagctatttcgtgcgaagaatatacatttaagggagggggaaacttttaagggagtagtagaaaatcatttggtttttgaagagcccttaaaagagcaaattgatgggctctatcaaatctgttgtgatctcattctaaatggggccaacagtagctactttctaaaaattgtggaattttatggatccacgcttggtatgtagccaagcccaagaaaaaaggaacgaggggaagaatcgacaaggaatccataacaaaaaaaaaattgtgaatgaaaaaaaaagcgtgacgagaataattttctcaacccaagataaaaggaacgaggggaagaatcgacaaggaatccataacataaaataaaattgtgaatgaaaaaaaaaaaaaaagggcgg

SEQ ID NO: 195017 - DNA, 693 bp, Gossypium hirsutum
  unsure (1)..(693): unsure at all n locations
gatttctcgatttttttcgattccatttttgcaatctctatctctaggttttacttcatagagaaaaaaggggacgattagctgaaagaaagaaaaaaagcaaaaacaatggcgtcgtcaagaggaggaggaagccaacaagtgatcagaacgggggatatggagaagatgagcttagatcagctcaaagcagtcaaagaacaagcagatattgaagtcaatctcttacaagacagtcttaataacattcgcgccgccaccggccgcctcgagaacgcctccgccgctctccacgacctttccctccgccctcaagggaagaaaatgttggttcctctcactgcttccctctatgttcccggcacactcgacgatgccgataaggttctcgttgatattggcactggatacttcgttgagaaaacaatggctgaaggcaaagattattgcgagcgtaagatcaacttactgaaatccaatttcgatcaacttatcgaggttgcatctaagaagaaaacattagccgatgaagctggacttattttacaagcaaaattgaagcagtcatctccttcgagttaggaattgcgtgacctcataatcatctcattatcattaagttcttaagggttgcttagaancttattgcacgtgatgtcaaactttatcttcttaaagctttcgtttttgatg

SEQ ID NO: 195018 - DNA, 604 bp, Gossypium hirsutum
  unsure (1)..(604): unsure at all n locations
cccacgcgtccgcatttgtacaccagcttagaccaaagtgaaatcagaacagaatgagctaagtttctcggagcaatgcaccaactgcgagaaggaggcagtgaatgtatcactggggaacctattgacgtatccatttgtgagagaagcagtggtgaagaaaacagtggccctgaaaggtgcacattacgatttcgtgaatgggaagtttgatctgtggaatctggatttcaagatttcacccactttagcaatatgaggatgcatgcagcatttttttcgactgatcaaagctcttctgtttgcttctagtcaaactaggggcctgccttcagcttttatgtttcttcatccgcattgctaatcacagagaataaaagtagtgctggtgttcctatcttggttcattttaataattttatgtgtgaaaaaagaattaagtatttaaaaggaagtgttgtttaatttgtactctagaaagaaaatcttgagcttgnnnnnnnnnnnnnnnnnnnnnnnnnnnnnnnnnnnnnnnnnnnnnnnnnnnnnnnnnnnnnnnnnnnnnnnnnnnnnnnnnnnnnnnnnnnnnnnnnnnnnnnnnnnn

SEQ ID NO: 195019 - DNA, 843 bp, Gossypium hirsutum
cccacgcgtccgcccacgcgtccgattttgcactttttgattattgtttttgagtcccccattaccgtgactgagttcaaacccatactgatgcctaagttggttgcttctaaacatgctaatgcttctgctacatatggagaggaaacgttggagtgaatagtagacttggaggctgcgattttcccattctgacccctgactaccattcctgatgcggatctggagttgttgatatcgaaagctgcatcaaactgtatggactcccatagctcctcctctctgtgttcagatctaacagccgtggttgtaagttttctttctcgtacaccttaaagctctattaaaaaattctgcactttaaaagctagatcccttcctgatgaaatcttcttctcatggagcatctgatttctcgagttccagataacccataatgcgcaacaaaaaatgcggatctgctcctttgttcctctactgaatacccagggcattgcctgaacacatgaaggctgtcctcttctgcagaacaaccacgtggacaccttgcagtagtggtcactctcttttgtctgaggttagcaagtgaagggatgtagttccaagatattcgccatacgagaattaggatttttgttggtaactgtaaactccataatttcctgtagaaatctttggtatcggcctgtaataaataattactaggatccaagctagcttcttgtaatagtttgtaggcacttctgactgtatattctccggagagttcccctttccatacttcttgcaatagtatatgaattttaataaacaaacaaaacacacttggaaaaagattgtaaa

SEQ ID NO: 195020 - DNA, 376 bp, Gossypium hirsutum
gcttccaagccaatgcgtatgctttaaaagttagacttggaacaacaataacccgtatctgtactttattaatgggttaggaattcgtagtggggcgttcttttcatagatcctttgagcgagaaaggtgctgcaccttaccggggcctttgaccctcaaggtcatccggagccactttaaagcagtttattggccgtagcaacgcaatgttcagtggtggggcaaagcactagcgagaagcttcccttgggatttttttcccaggcaagaaagaagtgaacggaaggaaaggaaggccgtcgtgagagctgttagtggtttagtaaggaaggtcattaggctcagtccgttgcttgtttcctcactgcacacaaa

SEQ ID NO: 195021 - DNA, 885 bp, Gossypium hirsutum
  unsure (1)..(885): unsure at all n locations
cccacgcgtccgtgccttatttttagcaattacttcccttgttttaggctcaacaatagccagtgatgaatttgatcctgtgcttgacatctcaggtcaagagctccgaacaggcattgactactacattttgccggtaatccgcggtagaggtggtggcctcactctagccagcactggcaacgagacctgcccacttgatgttgttcaagagcagcaggaggtgtcaaacggtctcccattaacattttcacctgtgaatgtcactcaaggcgttgtacgtgtatccactgatctaaacatcaagttctctgctgcttcaatttgtgtccagaccactctctggacactgcacttcgatgaatcggtacaaaagtatatagtaacaaccggtggagttgaaggtaacccagggcgtgaaactctgagcaactggtttaaaatccaaaaatttgaagacgactacaggcttgtttactgcccgacggtgtgcaatttctgcagacctgtgtgtggggcattgggtgtttttatggatggtggaactaggcgcctggctattagtgaagagccattaaaggtcatgtttaagagggcttgaagctgttgcgcccatctaccttattttccttgatttaccccacacacattctcacttttatatactatgtaatacatatcgcaataatgtaaatcttgggaaacattataggaaatatatatatatatatatatataacananannaaaanaaaaaaaaaaaactcgaggggggccccgtacccatttcgcctatatgagtcgtatacattcactgccggcgtttacacgtcggactgggaaacttgncgtaccaactaatggcttgcagaatccccttcgcag

SEQ ID NO: 195022 - DNA, 382 bp, Gossypium hirsutum
tgaagttacatataatgtttccataatcaattaggcgacactaaaccctctctgccggcctgctcccttactccattgtggtaagtaaattggcgacggttccaggacagctgatttgcgagatcgtgatgagaaacaactgtttcttggtgatggagttcggtcgaggcaccgccggcattcagttcagtaaggagagcatcaatctctacaatcttaactcttacaagcactctggtcttgctaacaagaagactgtaactgttcagcctggtgggaaggatcaatcagtgttacttgccaccacaaagactaagaagcagaacaaacctgcaagtgtgcttcataaatcttgtatgagaaaagagtttcctaggatggc

SEQ ID NO: 195023 - DNA, 777 bp, Gossypium hirsutum
gaaaagaaaaatggaattcccaaaacctcctccattcccctcaaaccctctcttatccctctccaccttcatccaccgtctcggcgctgagctcgccacccgcctccaccataccaaccgtcttgcctccaactttgccgccggtttctccccctctgcgacttcccaccatcgtccgctctttgcctcagtttctcagccgaaggctgcggtagcggcggctgccacgttgaatcccgagcaagttgcgaaaactctagccggcaccgctgtctatacagtgagcaactccaacaatgagttcgtgcttatctctgatcccaatggagccaagtctattggcttactttgctttcgccaagaagacgccgaggcttttcttgctcaggttcgattacggagaagggagctgagaagtaatgctaaagtcgtgccgattacacttgatcaggtatactcactgaaggttgaaggaattgcatttcgttttctaccggatccaattcaaataaagaatgcactagagctgaaatctggtgacatcaaaagtgggttcgatggagttccagttttccagtctgacctccttgttgtgaggaagaaaaacaagcgttactgcccaatatatttcaataaggaagatattgaaaaagaactttccaaggtttccagggcatcgagaggacctggtgtttctcagcaaatcatgtattcatttcatccaatatgttggagcaggttggaagcttggaagacgttcttgagaaaatggagatg

SEQ ID NO: 195024 - DNA, 588 bp, Gossypium hirsutum
cactaacataccacacaacagccttttgattagcctctttctatttgtcaaaaatggcaacatcagccggtttctgcaacttctcttctgcttttcatcttcggtttttgcttgcgaggcgcctttggtgattatgggggaggatggcaaggtggccatgctacattctatgggggcggcgatgcatctggcacaatgggaggcgcttgtggatatggtaacttatatagcccaggctatgggaccaacactgcagcacttatcactgctttgttcaactatggaccttaactgtggttacttgttatgatatgaggtgtgttagcgaccttccaatgttacctgtttggttatattatttaatataggactctacttatgataccataataatattacttgtctaatatatatgatgcctagctctatattccttatacatattttttacgtttctatttatcctttctgttgattactatatatttgcatgtattatatactatcatactaaaatactctttttaacatagagtattttcttattattaattaatttttattatattggattattctaagtatcag

SEQ ID NO: 195025 - DNA, 637 bp, Gossypium hirsutum
aacataccacacaacagccttttgattagcctctttctatttgtcaaaaatggcaacatcagcagtttctgctacttctcttctgctcttcatcctcggcttttgcctgcgagccgcctttggtgactatgggggaggatggcaaggtggccacgccaccttctacggcggcggtgatgcatccggcacaatgggaggcgcttgtggatatggtaacttatatagccaagggtttgggaccaacacagcagcacttagcactgcattgttcaacaatgggttgagctgtggttcttgttatgaaatgaggtgtgatggtgacccaaaatggtgcttgcctgctaccattatggtcactgccaccaatttttgtccccctaattttgctttgtccaatgataatggtgggtggtgcaaccctccattgcaacactttgatttggccgagcctgctttcttgcaaatagctcaataccgtgctgggattgtacccgtttcattcaggagagtcccatgtataaagaaaggaggagtccgattcacaatcaacggtcactcatacttcaactcggtcctaatcactaacgttggcggcgccggagatgtccactcggtgtcgatcaagggctcgaaaact

SEQ ID NO: 195026 - DNA, 733 bp, Gossypium hirsutum
gtctgggtgcaggataatgtgagttggggatggggttttggaattccagccattgctatggcgatagctgttgtatttttcttttcaggtactcgtttgtaccgcaaccaaaagcctggaggcagccctctcacacgcctctgtcaggttgtggtagcctccttcaggaaatgccgagtggccatccctgctgataagtctctcctgtatgagaccacggatgctgaatctaatatcaagggaagccggaaggtcgagcacacagaagagcttagtttcttcgacaaagcggctgtggaaaccgaatcagacgacataaagggtacagtaaactcatggagactttgcacagttactcaagtagaggagctaaaagctgtaattcgcttgcttcccatatgggccaccgggatcatctttgctgcagtctacagtcagatgagcaatttatttgtgttgcaaggcgaaagaatgaatacgcacgttggcaattctacgttcaagatcccaccagcatcgctttcgatattcgacaccctcagtgtgatcttttgggtgccaatctatgacagaatcattgtcccagtgacgagaaaattcaccggtcacaagaacggcctaactcaacttcaacggatgggcattggcctcttcatatcaatatttgccatggtagttgcagcgattctggaactcgaacgactccgggaagtgaggaggcacaattactatg

SEQ ID NO: 195027 - DNA, 311 bp, Gossypium hirsutum
gtcaatctcgaacaatattcgtcaaaggacttgatgcatcactcgacgaggatacgggcaggaattccttgcaagaacactttggttcctgtggagagatgcctacggtggcatctaccaacagatcgggattccggtgctgtgaaaggttttgcgtacttggattgcaaagatgagggtagtttgaacaaagctctagaacttgatggatcaacacttaataatcaatccttgctcgtggatgaggcaaaacctaaaggcgattttggcagtggaagacgtggtggtaagagttttggatggagtggagg

SEQ ID NO: 195028 - DNA, 599 bp, Gossypium hirsutum
gttagctgcttcaaacttttttttaaaccctcaaagcttcacaaggtctttctttctttcttttcttttcttttttagggataaataatgggagggttcaagcatcttgttgttgtgaagttcaaggaagatgtggtggtggaggagattttgaaaggtatggaaaagctggtttctgaggttgatgctgtcaagtcctttgaatggggacaggacatagaaagccaagagatgcttagacaaggatacactcatgccttcttgatgacgttcgaaaagaaagaagattacactgcatttaccagccatcccagtcacattgaattctccgccacttttgttactgccattgacaagttcgtggtgcttgatttcccttcggttcttgcaaaatctccggcttgatctgcaagaaagaaaaaagctacccaggaatttaagtgttttgagtatttgttatgtttaatctctctgttgtttgcatctctatgttttctgcttatgtgttatggctttctgccattgctatcaattccccaataatcacaatttgtattattgatatgcaaaaattcacatgcattttgcttctttttctc

SEQ ID NO: 195029 - DNA, 352 bp, Gossypium hirsutum
cactgataggcttatacggtacaacccggatgatatcgaggcaaggattaacgagttgttggaagggaacaatggatcatcttggtgtcaggaagtaattgcacatttcaggtattctttttggtgttggaatatgaatgggtaagatgtaaaatgatttgcagtatggtacgaccctaggtgataatgttatatgcatgttgcacaatccttttcctgctttctatttgtgaattgaaaaaaaaaaagccatggttagctcgcctgctttctaatcatattatggcgttattattcttggtattattttgtatatatagcaccttctaatcatatacatgagatttagatt

SEQ ID NO: 195030 - DNA, 971 bp, Gossypium hirsutum
ccagttgcagagctagcgccttctttgcaggctgatccgacaaggagtactgatatgtcaataactggcacaatggatcctgaagatgacacaatttttctcaaagtacagattacagacaaggaaggtcaagctcggaatatctattttccttttgacatagtgaatgacactgcaattgatgttgccttggagatggtaaaagaattggatatcaatgactgggagccattggagattgctgatatgatagaagaggaaatatcttctcttgtcccaacttggaaagactggggctcctctcaagtctaccatcagcacagctttaagtacgaagatgaggacgaagatgatgcccaaaatgaaatctgccaccctttctatgccaccttctcccattcttcctacgaagcacaattttctcacgggaaaagtgtgacttccaagtgcaattggccacaggatttattcagcaatgatgatgcaagttccagttgctctatgaactccttccagtactctacaatgaattatgaagactttgattcgagtctacatcaaggggagcacccctgcattccaaagggtcttaaatctacacgattttgtccatcagagagcgtgactggtcacagctacgaacagtgtgatgcacaacttgattcatggaggtcttctcacttaaatggccatcggaagctaacaaaggttcgttcactcgtggacatacccagcaaattgctgcaccaaatggtcatggcagagataaacaagaggcgcttattcaagaccgttggagcagtggagaacattggatatcaagagctgggagaagtttcaggcaagatatcttgaatatgtaggaaacggaaggatttgaagatcatgacgaagatttcacgggagatttaggtggtaaaggtcccatcaatctctgtgttaatatgcttttagactttcagttgtgatgg

SEQ ID NO: 195031 - DNA, 628 bp, Gossypium hirsutum
  unsure (1)..(628): unsure at all n locations
gtgataatcaagaaccgaaaggacctttaatcttttgaaccaaacaccccccctaatcagaaccctaactttttttttcttctaatctttgattgtagaaaccaaaagcaaacgcgtaaagaaatcatgggttctgaacagaatgaaggaactagcttccctccatcggcgccaaaactttgtgccaacggctgtgggtttttcggcacggcggcgaatatgaacctctgttccaagtgttaccgtgacctccgtgccggggaggagcaagctgccaaggcgaaagctgccatggagaaatccctcagcgttaatacgaagcaggaagatgtcgttgacgagactgtgaagcctgttcttgagcttcctcatgtgggttcctcatcgacggtggtcgagatacaaccggctgctattgtctccgatgataaaccggcggaatccaaggcggcgaacaggtgctttatctgcagaaagaaggttggattgaccgggttcaagtgcaagtgcggaagtacattctgcggcgagcatcgttacccggaaaaacatgagtgctcctttgatttcaagggtactggacgtgatgcgattgccanagcaaatcccgtcgttaaagctgacaagg

SEQ ID NO: 195032 - DNA, 786 bp, Gossypium hirsutum
aaaacctttggtttggtttttagttttgttaattatttttcgagtttcggtttcgttttggttttcccatttgttgtattctattttcttctcctgttgttctccaccaagaaaggaatcagggttcctctgctgtttctataaatcatttctcaattccctttcttttttttagtcagattctggatttggaaaaaaaataaaaatcttctgtcttcggatttcctcacgttttcttaaatcatcgatcgacgccgacctagaacaagaataaaacgaggaacaaacaacctctgattgtcgaattaacgagaaaccaaaagcaaacgcgtaaagaaatcatgggttctgaacagaatgaaggaactagcttccctccatcggcgccaaaactttgtgccaacggctgtgggtttttcggcacggcggcgaatatgaacctctgttccaagtgttaccgtgacctccgtgccggggaggagcaagctgccaaggcgaaagctgccatggagaaatccctcagcgttaatacgaagcaggaagatgtcgttgacgagactgtgaagcctgttcttgagcttcctcatgtgggttcctcatcgacggtggtcgagatacaaccggctgctattgtctccgatgataaaccggcggaatccaaggcggcgaacaggtgctttatctgcacaaaaaaggttggattgaccgggttcaagtgcaagtgcggaagtacattctgcggcgagcatcgttacccggaaaaacatgagtgctcccttgatttct

SEQ ID NO: 195033 - DNA, 803 bp, Gossypium hirsutum
ggtggtgtgaatttgcagaacctgttaatggggaatctacacagtttcttcaggagatttgcacgcaagtataacatggtcattataagctcaattcttgagagggatataaatcatggagagactctctggaatactgctgttataattggaaatcatggcaacataataggcaagcaccgtaagaaccatattcctagagttggggacttcaatgagagcacgtattatatggaaggaaatacccggcatcctgtatttgagactgcttatgggaagattgctgttaatatatgttacggaaggcaccatcctttgaattggctagcttttggtttgaatggtgctgagatcgttttcaacccatcagccacggtcggtgaacttagtgaaccgatgtggcccattgaggcacgtaacgctgcaatagcaaacagttactttgttgggtcaatcaatcgtgtagggactgagattttccccaacccattcacctctggggatggaaagccaccacatccagattttggccatttctatggatctagtcatttttcagcacctgatgcttcctgcacaccatcactctcccgttttaaggatggactgatgatctcagatatggatcttaacctctgtaggcaaccgcaacagtggcgacatcttatccgaacaagtccagattttcgcttcccactacactccagtggacagccaactcattcccaccggcaaattcgccaccgtcaaaggaaccccttacgatttcctcaaacctcacacggtgggaagccgaatcaaca

SEQ ID NO: 195034 - DNA, 863 bp, Gossypium hirsutum
taagaaattcaatgaaatcatgagtcggcctgagataaatgagaagcttgaagcattgaaggctgaggttcaaaattcaggttcatccagctttgctgatttagatcaagggcttaaggacaaagttctgaatacgaggaaagaagtagaactggaaatgattagcgctctcaagtccattggtttggttgttgagggtgtaaaatctaatgaaaaagtcctaagtgagaaagattcaccctcagtcttcaaaaataaggtggatcatttgaatgaagaaattaacaagaaaattgaaaacgttgtcagttcatcggaattgaaaaatatgattgagttgttgaagctggagatagcaagggcaggaaacaaacctgatactgagtcaaaaagtaagattgaggctatacaaaagcagataaagcaaagactttctgaagctatcatctcttcagaattaatagagaagtatgaagacttgaaggaaaaaaattctgaagtcgaacggtcttctgctggggctgatgaaagtttgcaaaaggaaaccaagtatgaggaacctagactagagatcaatttgggtgcaaacagcagcttcgctcagtgatcttgatttctgtcggaatgttactgaggtagatgttatagaaagagatggtgtttgaagtctgattgaagaactaaaattgcatcagatgaattattcaaaaactcaagcccttgcagagccaccaagtccacactcttctgcaggccagaggacacaaggttttgcatctattaaaacactgattggttatgacgaacaattactgtccagtctctttttctttttcttttctaagctgaatttctacgttctg

SEQ ID NO: 195035 - DNA, 483 bp, Gossypium hirsutum
cccacgcgtccggttgatatactggatgatgggtatcgttggcgcaaatatgggcaaaaagtagtgagaggaaatcctaatcctcggagttattataagtgcacaaatgccggttgtcctgttagaaaacacgttgagagggcatctcatgatccgaaagccgttataaccacatacgagggaaaacacaatcacgatgtgccaactgcaaaaactggtagtcatgatacagcaggaccagtagcaatgtgtgggccatcaagggttagatcagaagaaaatgatgccattagccttgatcttggtgttggtattagttccgttcccgaacatgcttcaaatgagcaacaacaattggattctgaactggtccaaagccgcccacaggctggtggttcaagtttcaaatttgttcaaccaactatgatggcatattacggtgctctaaatggcagcatgaatcagtatgtttctagagaaaat

SEQ ID NO: 195036 - DNA, 821 bp, Gossypium hirsutum
tttagatagacgcatctgttattttctctctcccaaacagagccccctcctctttttgaaagccggaaaatcaaacaaaacccttttaaaactttccggcaaaaatttcgaagccagcggagaatggtgccccctgaaaaccccagttactggtctcacttcgactactcaaccttgatcgacgatatccctgttcccgacggaccttacaccggtttttcttggtccacgcagccaaccaacgctccttctactgctgtcaatgtggaagttgacaactcgttgggggatctggatggccttacggaatctggttcaaagaagagggggtagatctgaatcatgcaacccttctagctccaatgcatgtagggagaagttgcgtagggataggctaaatgacaagtttatggagctgggtgctattttggaacctggaaggcctcccaaaacagacaagtctgctattttggtggatgctgttcgaatggtgacccagctacgagatgaagcccaaaaaatgaaggattcaaattcaagtctccaggaaaggattaaagagttaaaggcggagaagaatgagcttcgtgaggaaaagcagaggctgaaagccgagaaggaaaagctggagcagcaactcaaaaccatgaatgcacaacctagcttcatgcctcctgcgccagcaatccctgctgcatttgctgctgctgcccaaggtcaagctcctgggaacaagttggttcctttctttggttatccaggagtggcaatgtggcaattcatgccacctgcagcagtggatacctcacaggatcatgtac

SEQ ID NO: 195037 - DNA, 385 bp, Gossypium hirsutum
cctccgcggacgcgtggggtcggatctgagatttcaggtgggcagctgccaggcactgatgtcaggcatggtggtcgccaaagatcaagaactagtagacggaactgttgcacaggagtctggaaaatccatgccgtcatctcaacaggaggaggcagttgtaaagaaaaaatacggagggattatgcccaagaagcctccacttatctctaaggaccatgaacgtgcctactctgactctgcagactgggcacttggaaagccaggcgttgagaagcccaaaggtccacttcaagccctccggcccaaattgcagcctacacaacaacaaacacgatataggaagtctccatatgctccatcagatgtcgaagatggagggagt

SEQ ID NO: 195038 - DNA, 497 bp, Gossypium hirsutum
  unsure (1)..(497): unsure at all n locations
cccacgcgtccgaaaagagaaagaaaaaagaaaaaaaaaaggttcagatttcttcgccggtaaaaaacccggaggcgtttctccggcgaggcgttagggtgtagcttccaagtagcatgaaaagtcatcgtcgtcatcgaaaagttgcgacggtgaagaatgattataagcaactagatcgatttgagtcaggtgaaggagataagatgaagaagcaaagatttaagaggaaattgttgaggtacgaagagttaccggattatttgaaagataacgagttcatcttgaattattaccgatgcgaatggccattgaaggacattttattaagcgttttctcattgcacaacgaaacgataaatatctggacgcatttggcagggcttttaatattcgttggattaacggtgttcagttccatggaggattttggagatggaagtttgatcaccagtttttccaaagctcaagtatcangacccgtgatgatgatgatg

SEQ ID NO: 195039 - DNA, 453 bp, Gossypium hirsutum
  unsure (1)..(453): unsure at all n locations
cccatgcttccgcccacgcgtccgaaacaagaacggggggttttttgattcctgtttggacaacaaatggggttacagttctcgtgtgattgatttgatcgttcacatggcatccaccaaagcatgttgaagttttttttgaaggccagtgaagaagttgtgtttctggtttaaagaatatgaggtgtttgagagaagcttcttgttatatggaataaaaaacccaatgattttaccccttcttgaatgtttacatttctgcggttttgaaggtgtagtgaacaagtttaccagtttgatgttatgaagtaaaatggtgtttatacatcaatcaaattagtgctgtcgtttttttccccttttaattggtgctatttgctttcaagtttacctaattgaatgagaaggaatatcggttttcgaatgatttggggcnnnnnaaaannannanaa

SEQ ID NO: 195040 - DNA, 952 bp, Gossypium hirsutum
gtgaatttgatctggagaatattgttacagctgcaaaagttcctggcaggaaggttaatgtgttgcttcggatcaacccggatgtggatccacaggtccatccatatgtcgctactgggaacaagaactctaaattttgtattaggaatgagaagctgcagtggtttctggatgccgtaaaggcacaccctaatgagctaaagcttgttggggcccattgtcatcttggttcaaccattaccaaggtggatatattcagggacgctgctgttctcatggtcaactacattgatgaaatccgtgcccaaggtttcgaggtagattatttaaacattggaggtggtttggggatagattactaccatagtggtgccgtccttcccacaccgagagatctcattgacactgtcagagaattggtcctctcaagaaaccttaaccttgtcattgaaccagggagatcactcattgcaaacacttgctgcttagtgaatcgtgtcactggagtcaaaactaatggaacaaaaaatttcattgtcattgatggcagtatggctgaacttatccgtcctagtctttatgacgcttaccaacacatagaactggtttctcctacacctcctgatgcagacgtctctacctttgatgttgtcggacctgtctgtgaatctgcagatttcttgggaaaagagagagaacttccaaccccagctaaggggaccggcctggtggtgcatgatgcacgtgcttactgcatgagcatggcatcaacatacaatctcaagatgcgccctcctgagtactgcgtcgaagaagatggatcggtgaccaaaatccggcatggggagacatttgaagaccacattcgttttttcgagggtctgtgatttgaacaaaacaagtgtccattttgaggcttgaaattggatattgtttttgcaaaattcatgga

SEQ ID NO: 195041 - DNA, 413 bp, Gossypium hirsutum
tgctatcagccccgttttcttaggtttcgcataacacattgctaccgccgtcaagccctcaagccatgaagtcgattgagcctcgaacttctttctctaactccgatttcaacgaagcaaaggaagattcatggcaactttacaaagtaagattccttctttcactcttctttatattttgaaatataatactgaaatattgaaaaagaaaatgcaatgattctaaaaaaagaaattaaaagcgagtaaaaaaactggaaatcacctttctattcttactttcgaaatattcaatgtgctaatgtaagtgtatattctgtggatgggtctgtgtaatccttttgcaggtacagaatgaggcttttatagcctggatttacagagaaaataagtaaaaagaaaaaatatttttc

SEQ ID NO: 195042 - DNA, 448 bp, Gossypium hirsutum
ggaacaacttcaaggttcgagtgcgatggtattaccgtcctgaggaatcacttggaggaaggaggcaattccatggagcaaaggagctgtttttgtctgtccgctatgatgtgcagagtgctcacaccattgaagggaagtgcatcgttcattctttcaagaactacactaagcttgaggatgttggggctgaggattactattgtaggttcgagtataaagctgctaccggtgcctttactcctgaccgagttgctgtgtattgcaaatgtgagatgccttacaaccctgatgatctcatggtgcaatgtgagggctgcaaggactggtatcatcccgcttgtgtggacatgacaattgaggaagcaaaaatgttggatcactttgtttgttccgaatgttctgaggatgatccgaaaatgatcacaaaacggatttcattcatcac

SEQ ID NO: 195043 - DNA, 679 bp, Gossypium hirsutum
gcagttgctggaagtgagtttgacccacaacggtctcgtacaaccgaagctagccctgggcacaaacatttaaatcaacagcgaggtcctgttgaatcttcttctgaccctaagcacactggaagaaacaccaagaactacgaagttgccctcaaggggattgagggccttcaatttgagagcgatgagagaaatcagtattaaaattgtgagctatatgaattgttgtaaagcatgaaatgatttgtgtttgtccttgttggtgggttgagttgaaggaatttgtaaaaagttggagctctggagttgggactctcgtgttgtgcacccaaagcataaatttctgcactgatggaagagcttgtgaagtgaaaattgactgacactgctatcgaaaaaggtggttgcctgtgaagggctacaactgtggtgtggctattttcccaacactttttaacttgctgtttttacggtgcccctttcatcttaagatcattgctttactcgtctgggacttgttgaggtgtgaaacttacggcactgtaaatttgccgcattcatgttactcctgtttctcacgttttcatttagatattagtttatttttgtttcgttttgtatcagtgttccaaaggcaattctatatattcttttctccctctagagttatgataataag

SEQ ID NO: 195044 - DNA, 415 bp, Gossypium hirsutum
taccaacccatttgccggaactggaaaaaacaatggggctttcacccttcttccctctgctaggaccagtgaacgcgcccatcatcgccggaccaccaccagatctagtggccgacatcgcgcaataggggtttcaaccccgttttaaaacacgcgtgccaagcggagatcgtggggaggtggtgtggcgcacgactcggagttgcgcgacgtgcggagcccggcttgcggcgctggcttccctgatgctgggtttctcatttccttttttgttttattggtatttgggcttgtgttttgctttgtatatcgggctgagagatgtgggctaagctttgggtaatctgttgggctttgggtttggtttaaatttggtcctacaactatattcattaaaaatacatgactatcacat

SEQ ID NO: 195045 - DNA, 703 bp, Gossypium hirsutum
ggaaattacaatggcaagaagggtttcgagaggcaggggagtcggcgtattgttcgatgaagaaggcgttttcctcgatggtgtttataatccgggagctccatagctatactctgcaaatgcgagagcttttgttttatgaagatttacaagggattctcgttagagttcaaaaagagatgcacgcttcattcgtttggttgttccaacaggtcttttctcatacacccactttgatggtctacgtgatgatcctattagcgaattattcggttcattcaatgggaagcaacgccgctctggcagcaaccgccgctgcgaatccgacgccggggtcttatgttgctgtggttgacgttcaagatcagaaggattccaacttcgattcttcgtcgataaagtcattttcagtgtcgtcatcgagcgggaaaaccgcttccatcggggggaacaacggcggcggtggaaaagtccggtctgtagccaacggaacagacggtgacggttggtttaacaaagcaggccagttcagaaccatctttcccgatggtgcttcccagttatcatcccccggaacaacagcagaaacacaaagcgaatcaaccagagaagaagagcttactctttggaactcaatcgtcgatgaagcttcgaaaatgctcgcttcatacagagacgaaatgctcgaccatgaaacaattca

SEQ ID NO: 195046 - DNA, 765 bp, Gossypium hirsutum
cccacgcgtccgggattatctggaagatacccaggtttgatgtcattgaggagcgttgatctttggccagctagttggatggcagttgcctggtacccaatatatcacattcccatgggaaggaccataaaggacttgtccacatgcttcctcacttaccacactctatcttcttctttccaagatatggacccggaggatgacattgagggtcccgaaaggaagcgaaaggaaggggaaggcatctctcttccaccattcggcttggccacttacaagatgcaaggaaacgtgtgggtctcgggtaattctgggtgggaccaagagaggctggtgtcgcttttaagcgtggcagattcgtggctaaagcaacttagagtccagcaccatgacttcaattacttcacggggattcgacgtggctaaatacataattgcttgctgtagttttctcttgagaaccccatggaagtgactgatcactaattatcaaaaaaaaaaaaaaacttaaaaaaaaagaagcctctttttgggttttaagaatttttggttttgtgcttgggagtaatactgaggattgtgattggcacttgttatcaaaacccttttgacggttcactctgaggccagccttgacaggaactttcagcagaggctatgtgagttgagtttaccctctttatgtttgtgggcttttattgtaaagaaatgggtgagggtctaaaagagtacaaaagtggggctctgaaacgttagaaactcttt

SEQ ID NO: 195047 - DNA, 749 bp, Gossypium hirsutum
cccacgcgtccgcttctcactacttgtcctacacaggaattcagcaaagcgtttccaaaattttcgagtgtcgagcaagaacatctccaccagctttttattcaggtcattacctctttacatgggaatatagaggacgaatttgagtctttatgcaatgaaacacaggtaggagatgcccttgataccgtggagcaacttgtggaagaacaatctcttgaccatttgtcttcagataggactactgtaatggatgcagtgcacaatttttcagcagcaaagaaagctgagatccattacttaagaggcctgctggaaagggctgaagaacataatcggctcattcaagctcgggtggacctacttaggaataagacacaagaagtcccggacataaaagattttattgggaagttgagaggtggaattttaagttacaagggaacacaaaatgtggagctttaaatggtctgcaactggtggggctggcaaagtgtatctcagactgcagtgactgagaagctgcatggagcggttaatagttaatacgtatttgtagtgagatggtgttaaaccttaagcgtggttgtaataagtaaatacattgcgagttctaaacctacttctacttgtttgggtaaagcaaaatgatgagtgtcgggatttgggtgagtcgaaaggtgtatagttggatttagacggtaaggccagcaagaatgaatcaagaaattgcaatgttggattgatat

SEQ ID NO: 195048 - DNA, 914 bp, Gossypium hirsutum
gatctctctctctctctctctttttttctctctctctctctctctctctctttataaaaaaacctccggctattggggtttttggtttcgtagattcgtttcgcttcatttttgtctcgttttcaaacagtaatttccttcttttttttcattcttttttttcttggaattttttgaagtgtttaatccaaaaaaatggcgttagtttcattcgtcgggagggttcttttcgcttcagtgttcatcctctctgcttggcaagagttcaatgaatttggtgttgatggagggcctgcagctaaggcactcaaaccaaaattcaatgtcttctcaaagactgtgacagctcatacaggggtggaagtaccagaatttgatattaaggttctagttgctgctgctgtagccttcaagggtgttgggggtatcctttttatctttggcagcactatcggtgcttatcttctggctctgcaacaggtaattgttactaccatattgtacgacttctacaactatgacacggaaaagaaagaatttgggctactcttttcaaagttctcacagaacttggcattgctgggggcattactcttcttcatcggcatgaagaactcaatccccagcagacaactcaagaaaaaggctcctaaaaccaaaacagtttgaaggaggaacatctggtaaaccaagggtctattgctcaatctctacgttttccttagtcaacccagatttattttttgtatgctttgtatcaaggctttgttcttcaatattaggtggggaaaagggcatactactttcattatgatactgttaactaagttgatgctgatttaattgagtttgagaattttatctcctaataaataaatatactcattaatattataatataaaatttaaaaatt

SEQ ID NO: 195049 - DNA, 421 bp, Gossypium hirsutum
cccacgcgtccgatgatatcttcagctttagaagatctcaacctctttatggttcatttagaggaggcattggtcatgtgaagctgtagcataaaggctcatctcttgttggaaaatcggaggaacatttatttttccggtaagttttcatataaaacttctacattgaagaaaaacagagaatccctctcgtccgttaatttattgttgtatctcacttagttatgaaaaataattcccttggttcagaaacagaattcatgtcgcccgaatattgaacaaatttaagctctggttcgaatccactgatataattgaacgtgcaattctatgttgcttcagagtcacaaaatgtgtctcatagggacatgcgtctgatgcaaggtttattcgaattattcttataaaaattgaagttcat

SEQ ID NO: 195050 - DNA, 1009 bp, Gossypium hirsutum
gacccacgcgtccgcccacgcgtccgcccacgcgtccgttggaaaaaaaaatcccgagcttcaacactccagtcgctcactgattaatttcaataaaaagaagaaaaagacagttgctcactgatattggtgtagtggcagagcagtgaagagaatcagttgagatatgtctaagcaaggagaagtggtctgcgtaaccggtgccagcggcagcattgggtcttgggttgtcaaactcctccttgctcgcggctacaccgtccacgggaccgtcagaaatctcaaggacgagaaagaaacgaagcatctagaagctctagaaggagcagactcacgtctccgcctcttccagatcgatctcctcgattatgattcactcgccgccgcaatcaatggctgtgctggtgttttccaccttgcttctccatgcagcgtcgatcgagttcacgatcctcagaaggagcttttggatcctgcgattaaaggaacgcttaatgtactgacagctgccaaagagcttggtgttaaacgtgtggtggttacgtcttcaatctcctccatgtggccctgcccaaactggccagctgataaaatcagaacagaggattgctggactgatattgagtattgcaagcaaaatgaattatggtatccaatttccaaaacactagctgagaaggctgcatgggaattttccaaggagaaaggtctggatgtggtggttgtgaatccgggcaccgtgatgggtcctaatattcctccaaaccttaatgctagcatggtaatgttgttacgccttctgcaaggctgcacagagacatatcaggactttttcattggatccgtccatttcaaagatgttgcgttagcacacattttggtatatgagaacacatcagcaaccggaaggcacatgtgcgttgaagctctatctcactatggtgacttcgtggccaaggttgctgaactttaccctgaatataatattcccagtttgccaaaggatact

SEQ ID NO: 195051 - DNA, 663 bp, Gossypium hirsutum
tcacaaccaattttgcccttgggtgtttggaactgttgctgctgctggctgtagtggctccagtgctgatgttgttgcactctgtggatggcagttgacattggatgccttggatgccctgcggtcacaggggcatatgcctgtacagacagtacagtctgagtcagcagcatcgctgtataaggatgatcaccaaactcctggtaaaaagctccatcgacggcgtcctatgagcaaaaatcacgggcaataatgatggccagacacgacgtgtgaagacatcttcaatggctagatggaataagcattctcaacggttgaagcaaattggaaaagctttttcagtcattgccactggaactgctgccactagccctggggaagttctgtcatttcttaatgtcccttcttgttaaactcttatttcatggtaaagtactttgtgtcaattcttactgcatagaggatctattttgctttatttaagcaggttcttctcagtattatgaacgttattattcttgatcagtgatgtgacagtgaacattgctgttaagaacaaagctcttgtttttcaattcttctgggttttggtttgtaatagatagtgagaatattgtaaacttagttagctcaaccttaataagattttgatctttacgt

SEQ ID NO: 195052 - DNA, 461 bp, Gossypium hirsutum
gccgcaagcgtcacacaccaagcgcatgtctgtagttgcaaggctgagggagctgaatacactggggggtcatgttgaatcagttgtgaagctgaagggacttgatatcgatactattcagcagcattacacagcttaaagctaaagccaccgcagatgatgacgatatgcattttaatttgagacaaacaaaggatcattcatgatcttccctcccttgctacaaagaaaatgttgatgatgaacaaggcctatggagtacggcctatgttatgagaaaaaaaataatgaaacaggaatttgtattatggtaagtattctaagatggtataggttatgtatgttatgatctctttcggaacacgggataagctagtatagggaagggaaagaagtgttttaccttttttataactgcaaaataacaacaggctttcaattcatagcctggccttgtttgc

SEQ ID NO: 195053 - DNA, 454 bp, Gossypium hirsutum
gactagttctagcttgtacaaggtggtcatggtcatttggtgatgatgaagaaaaaggatggtgatgatgatgatgatgatgatgatggacctcgagaggcagatttggagggaagagttgagaaatacattggtgtgaaagtgaaggtttcctttaccgggcaaggtgagacacaatcaatgaagcaattatcaggaggacagaaaactgttgtagcccttacattaattttcgcgattcaacgatgtgatccggctccattttatctttttgatgagatagatgcagctctggatcctcagtaccggactgcagttggaaatatgattcgtcgactggcagacatggcaaatacacaattcataactaccacattttggccagagctcgtcaaagtttgctgatcatatatatggggtgacacataaaaacaaggtgagcccgtgtaatgtt

SEQ ID NO: 195054 - DNA, 725 bp, Gossypium hirsutum
  unsure (1)..(725): unsure at all n locations
nnnnnnnnnnnnnnnnnnnnnnnnnnnnnnnnnnnnnnnnnnnnnnnnaaggacaaaaataagaaatatattacattgattatccatgataggagaaattacagggaaaatctggataggaaattacgtgattcataatggaaaaagaaaatgaaaaagaagcaaaccgctacccctttttcggcagagccctaataaatccttcttgtctatacaaaagtcgtagttcctttttttttccttttgccatgaacaatatcgaagaaaagaggcagtagcaccacaaaatagagacttctctgatctctctttccttctcgtctatttacaatgccaaatatccaaaccagaatatcagatacaaaattcttcagctgtcaaatattttgatcgttgccacaatttatctgtttttttaattctctgcatctttctatgctataactcagtcctttataagcactcaaatgagctgaagattacattactcagagactaaaccattgtgatgtggcaacccagagatctataaaaaacaagaaatagccttaaatgaactaactttcatacttgaagtggcacttccagttttgagtttgaggtctgagccgtgggcacccgttgattattcgtggagccgccccatcacagaatcgtttcgcaagatcaacagcctcgttaatgacgattgggtgccgggttccgagaaccggacgcgtgggcga

SEQ ID NO: 195055 - DNA, 435 bp, Gossypium hirsutum
gagagagagagaaaatcacagcttggtagtatccgtctttgctgctgcaatgttggcagagagacgagagagggcagcagctggtttaatccaaaaatactctctctgtctctcctcactgctcatagattggcagccgaattaagccacattcgcatcaattaccactcttaattatttgattctccccctaagtctctattggaagacgagcaatgagctttgggtccttttggtttgggttattatgttaggaattagttattagttattctgggtttcttggtctgctttctttgtctcgttcgttatcaataatcatcgatcgtccggtcaatcacctatggccccgaatagcgatcctactaaatgcaagaggctttatcaagtttggaaggtgagcaatagattcttttgtcgtgggagattgatctt

SEQ ID NO: 195056 - DNA, 468 bp, Gossypium hirsutum
cccacgcgtccgtctacgcgtgcggtccaattcaaatctgaacttcagtaagctgcattggccaaatttcgacagatgcgatatgatcgatgcttccggaaggaggtccgttatcaatgcacgatatggttatcgcggccgcgccctcgggtccgagggcaattcgtacgacaaactgtgaacaccaatgaccccttatctgaagccaattcatccgacaaatagcaaagaggaaaacacttgaagagtccagctgataaggtaacaagatttcatccactcctctgataagatacctcgtctgtaatattatttgggaatgttaaaaagatttgatgaactccatttttattggtatatttagtgttataagctttaaagaacgtgccttaaaggggaactgaaagaaggtagaaaaacttctataataattatccattttgtgtcctaaaaaaacataatgaaaaa

SEQ ID NO: 195057 - DNA, 586 bp, Gossypium hirsutum
tcgcccacgcgttcgcccacgcgtgcggcttcgagttcttttaggtgattttctgttagggctggttggtaggtgatggctccaagtcaacctaaaactggcctttctgtgggcttaaacaaaggacatgttgttaccaagaaggaattggctccccacccttctaatagaaaggggaaaactagcaagagagtccactttgtgaggagcctaattcgggaggttgctggtttcgctccgtatgagaagaggataactgaacttctcaaagttgggaaagataagcgtgctttgaaggtggcgaagagaaagctaggcactcacaagcgggccaagaagaagcgtgaggagatgtctagcgttctccgcaagatgaggtcagctggaggtggggagaaaaagaagtgagttgccctgcggttgtgcttcaaagcaagtattgagtttttagatttgttaaattttctcttcagttttgttttgagagtttggagtactgattcggatagcattcttttacttgtgttggatatttaaaaaaaacatgaaatttgcatcacttaattgcaatctagattcgattatg

SEQ ID NO: 195058 - DNA, 1393 bp, Gossypium hirsutum
  unsure (1)..(1393): unsure at all n locations
gtggatcttagctttaagcaaaaacaactttaaataaataaataaaaataaaaacagtgggatatagaataaaactactgcgtatccaattcaatccaaagtccctttcaaactcagtataccgttcgaagaaaaaaaccagcaaaaacaagtgttttttttccttcacagatctgagatccaaaagcctctcattcttcctctaagtgtaaagaattatttcaaagatatttattataagagagtaaaagcaagcaaacatgtcaagaaggcaagtaagttccacgcgccgctttgttgacagcggaaacttcccgttctctggtgctttacattctaaatcccgctcttctcctattttatctatcgctcttgtcgctgtgggagctatccttctcattggctatgcctatagtggttcaggtaaattccgaggtgaagcggttagtcggatcgaaggtgactatacatgcagtctagaagttcagagggcaataccatttttgaagaaggcatatggggaccgcatgcacaaggttttgcatgtaggccctgatacctgttcagttgtctccaaacttttgaaagaagaggatactgaagcctggggtgtggaaccatatgatatagaggatgttgaagaaagttgcaagagtcttgtgggcaaagggattgtacgtgtggcagatatcaagtaccctcttccctataggccaaagtctttttctcttgttattgtgtcggatgcccttgattacttgtcttcaaaatacctgaacaagactctgcctgagttggccagggttgcctcggatggtctcattatttttgcaggtacccctggtcatcagaaggctaaagtggcagaactgtcgaaattcggccgtccagctaaaatgcggagttcctcttggtggattcgttttttcgaccaaagtagtttaaaagaaaacgaaactgccgtgaagaagtttgagcaggctacgtcaaagagttcatacctgccagcatgtcaagtattccacctaaatccataccactgatacaaagagaaaagtcatcaagatcaaatttccattatttttattgtcatatgcattgacggtgaagtaaaaatatcttcagctctcatacaacatgtaactctgttggggaactaaatttggtaaaagagatgttggtatcaatgggttaatgcccttaacattacaggtttgatatttattaattcaatcgatggggaaaattacacctatttgttgtggacatggatttatttagttatattgttttctgaatgtggaagtaaatctagcttcctattatgagattacccatnnnnnnnnnnnnnnnnnnnnnnnnnnnnnnnnnnnnnnnnnnnnnnnnnnnnnnn

SEQ ID NO: 195059 - DNA, 656 bp, Gossypium hirsutum
aaatgaacaagcagctaggtttgccaatggaggtgcatatcccccagacttaagccttatgagccaaggctcgtcattatggccagaactatgtgtttggtcttctaaccggttatcgtgatcctcctgctggtatctcgattcgagaaggtctgcattataacccttactttcctggcggtgcaatagctatgccgaaaatgcttaacgatggtgctattgaatatgaagatggtactccagctacagaggcccaaatggggaaagatgtggtgacatttttatcatgggcggctgaaccggaaatggaagagagaaaacggatggggtttaagtggatatttgtgctatcacttgcacttctccaagcagcttattaccggcgtttgaaatggtcagttttgaaatcccgaaaactggtgcttgatgttgtcaattgattcccttctgtttatttgagaagagatagattggtaataattaattcattaaactgctaatacagttggacagattgatctccttttcgttgtactatttgtttacttagctaaagaataagctgcattgaattgtattaggatcagaaaccgaagttactcggatttgggtgtgaatattcgatttgagtatgtatgggtaatttatctaaaata

SEQ ID NO: 195060 - DNA, 335 bp, Gossypium hirsutum
cccacgcgtccgcggacgcgtgggctagactcaggtgctcgttataaaggctaccaacctggcaacgggctatagcttcctcggaatcgattctgatcgaggtagtgtatggggatgcatctaaatccgcgtatggaacacacaatctctgccgctagctttgcactcggaggatctgaaaacggctcccttcattacttgggtgaaccgagggaagtgcggaagctagagctaaagcaaggtacgaagctacagctagcaagctgctttggtagtactcgactgaaaggagagggctttgcagctgctgtccaacaagttgaagagtttgctac

SEQ ID NO: 195061 - DNA, 361 bp, Gossypium hirsutum
gccacgcgttcgcatttgtggagtccctgattacgtgataaatggtaagcagcagatgtggggctgccaaccacccgaagtcgtcttgaaagcttttcaagtggcaacaaatttagataccctctgcttatattatcaagcatttgtaacctatacaaatcaataaatcgtctatgataataaacatcaattcttaccaacggggcgtgggattgtcttaattgattgaataacctggcgttttatgcttgctcgtatgctatagagtgtatacgaacaaattgattggctcaaacttctatgtgcatggcatgacatgacacattgattgaatatatcaaacagtttgttttgtcaaaaa

SEQ ID NO: 195062 - DNA, 482 bp, Gossypium hirsutum
caacatcccggcggcctctttcggcatctctactatgatcggcgttacggtatggatacggatttacgaccgtttaatagttccatggctccaaaagtccaccaaaaaggaaggaggaatcacattactgcaaaagatgagtataggcatggttctcgccataatcaccatggttatatccgccattgttgaagatagaagaagagccttagctttgagtaaccccatcggcatagattcaaagaaacgatccttttcttcactgtcaacaatgggggtaaatccctcagcttacattaataggactctccgaagcattcacattaattggtttaatcgaattttactacaaacagttccctgaaaacatgagaagcattgctggatcattcacttttattggccttgcattgtcgagttacctcagcagtttcttgatatcagttgttcataagatctcggaaagatcccaaacaggtgac

SEQ ID NO: 195063 - DNA, 589 bp, Gossypium hirsutum
ggcttttggttttcacctcggttgcctcgaaggaagcagaggaagggattgcttaccaggggaagtacatattagaaaatgaagctggagatccaggggtaaagccaggctcatgcccgaatagaaaagaatcacggccactcaattcaaaaagcgcttctcttttcctcatgaattatttcccaagttacccggttgaaaccgaagcttgcaaagagcattcagcacgactagctgacatgatcggcacctgcttcaaagcagcagggagtatgatgccaaactttttagcagtcaacttctacatgaggagtgatggaggcggtgttttctatgatttggatagcatgaatggccaaagattatgtggatgtaatacaattgctgcttgccaggctggagcaccatttggatcttgcaagaacattacaatgccttcttcaagtccaatgaccaatactgccggaagcttttctggatctgttcaattctcgaaatccgcttcaacaatctattatcctaatcaattcgctatcgggttcttttctattccatggatgttgtttttattgtgactagaaatatagat

SEQ ID NO: 195064 - DNA, 596 bp, Gossypium hirsutum
ccgtatcctgaaaatgctggacaaagcccaagaaggcccactaagagagagcattcgccaatcatggttcgctggtattggccttggcacatcaacaagcctaacaacttgtacttgggccttagactcttggtatggtggaaaacttatgtcacatggctacatcactgcaaaggctttgcttgaaaccttcatgatcttagtaagcacaggtcgagtaatagccgacgcaggaagcatgacttctgacctcgcgaagggctcagatgcagttggatcagtctttgctatattggatcgatacactagaattgaacccgaagaccctgacggttacaaacccgaaaagatgacaggccatgtagaacttcgcgacatagacttcgcgtaccccgcccgaccagatattattatctttaaaggcttctcactcaaaattgaagcaggtaaatcaacagcattggttggacaaagcggctcgggtaagtcaaccatcatcggattaattgagagattctatgatcctcttgagggagcaggaaagattgatggtagagatataaggtcataccaccttatgtcgctaaggaaacaca

SEQ ID NO: 195065 - DNA, 454 bp, Gossypium hirsutum
aaaacactacaccatggatgaagtgaagctctttgggttttggccaagtccttttagtagaagggtcatttgggcattaaagctaaaaggcgtggaatatgaatacattgaagaagatctgccttataataagagtgatctgttgttgcagtacaacccagttcataaaaagatcccagtgctcgttcatggaggaaagccaattgcagagtcattggttattctggaatatatagatgaagtgtggccacataatcctttgttgccaaaagatgcttacgagagatccgtagctagattttgggccaaattcattgaggaaaagactcaaccaatgtgggaattctttgctaaattcggcgaagaacagcaaaaggcaatcgagaacaactatgaaattctgaggacgattgaggaacatggtcttggaaataaaaagttctttggcggcgac

SEQ ID NO: 195066 - DNA, 429 bp, Gossypium hirsutum
cccacgcgtccgccaaaattcacagccctaaaaatcaatttgtttgggcatatttcagcagccaccgagtacaccacttcatcaggtggtcgatggcactccagcgacgatcgatgatgcctttgggcccttccaacttcgacttccagcgaagaggataaaaatccatggctgatttgcaaggttcgattgtacggaagagaacgctcgtggatgaggctcggagactgcggaattgctcatgcgagcccgatcccctggcgttgttctggcacgttccagaagcttctggcttgtgtaagcttggtaacttaaggtttcatgaatatttttctgttttgggtcaggatttgggctaggggtttattttattgtgggctaaataattggacttgtaacagggacattggacctaattatttttgtttt

SEQ ID NO: 195067 - DNA, 413 bp, Gossypium hirsutum
attttctaaacacagcccccacttcaccaaacttctcagccctaaaaatcaaattgtttgggcatattccagcagccactgagtacaccacttcatcaggtgatcgatggcactccagcgacaatcgatgatgcctttggacccctccaacttcgattttcagcgaagagggcagagatccatggctgatttgtaaggttccattgtggctatggtcgcacggaaggaggggccgttcgtgggcgtggaggaggctcgaatgcttcggtactggcttcatgcgagactgctgcgcacttgagcttggtggctagggttccaaaaatctggctggggtttgagttttgggccattaggtgttgggctatttggggttaattgggttagatctgttatcgggcttaagggattta

SEQ ID NO: 195068 - DNA, 367 bp, Gossypium hirsutum
gccagttccgagaagaacagaaatgggtttgcaaaatttttcactcggagtaagaacgggatacaactagaaatttaagaacaagttgtaaaacaaagatatagtttgtcatattaaagacggtgattaaatgttgtttgatcacctgttattattattgttacttcactcttaggttgtctcatgtaatgctattattatacatgaatggttgtgttcaaattgaaatatcaacattcaagttgttacttcactcttaggttgtctcatgtaatgctattattatacatgaatggttgagttcaaattgcaatcttcagccccaacaactgatccccatcacgaaagggagtcaaaggaaaagaaa

SEQ ID NO: 195069 - DNA, 984 bp, Gossypium hirsutum
ttctctttgaaaacctctctcatctctttcatcgtgactcttcggttctcaacctggctgccttagtcttcgattctccctccaacgatgagcatggtccggatcctccccctgcagttaatatcctattcctctcttcaaggcttctttggcaaggaaataggcacaatcattttctgatctagggataaaatgaaactcgatattctgaaaataaacctttttgctttgaatgtctctgatgaacgctcctatagtcaatttgtccggatcttttgattggcatttttttatcactgttttccggtcccccactatttgtaaactgttaaaacccattgaaatggcgaactgaatcgcttgtaacccggcatctgttttcgctgctagcggtgtcggtatatcggagtggataaccgttttggataccaagatcacacccctttcatcacggacagccagacccgaagcagatctggaggatcccttgtcaaaagccgcatcaaataagacagttaccgtcgtgcttcttgccgtgtattcatgacctttatcaacatttaagcatgtccagattgaccatagtacgtaacagaagagtcgacattgctcaatatttcctcgtctaaaaacccaggacagtgccggaagatatggttgctatcttcctcagggttatgacatttgggacagatagctgctacgaccacttttttattcttgagatttgatagagtaggaatatagttccatgaaattctccagtttgtaattttaattttcggagggagatgtaaattccataatttcctgtagaaatctctagtctcagtttgtaaataattattactaggacccgaattagcctcttgtaatagtttataggcacttctaactgagaattcgcctgatgattccccccggcacacacttgaaagtcttcataagttgtctctgccagagggatctacaatattttctttt

SEQ ID NO: 195070 - DNA, 406 bp, Gossypium hirsutum
attgagtgtgattccattgcgttggaagacgatagggtagaattcactcactcatcactgatgccagctactgatacaacttcaagaacatattaccattggatcttcacatgaagataatgacacatcctccagaccagtttgtaccggatataggtttggaaggtggggcatatcagcaccctgaacaaacttccaggagagaggagaggaatcttcctaatatatctgtgcccctgccagttaagagagaggagcatataccaagcaaggtagtggaggatctttcgatggaagtagaacaacagtttccaaccaaggcagaggagcagcctcaacatggcttggcagtttcagagggagaatcttcgcagatatcaaatgccattgcttaacatgggttggc

SEQ ID NO: 195071 - DNA, 575 bp, Gossypium hirsutum
agggggtgccccagtgtatagataaacttgcacaagctggtctgaagatctgggttttgacgggggacaagatggaaactgctataaatataggatttgcttgcagtctgctaagacaaggcatgaagcagatatgcattacaacaattagttcagataccaaaactctaatcaaggaaaacatattgatgcaaattaccaatgcttcacaaatgatcaaactagaaaaagatccacatgctgcatttgcattgatcattgatggaaagactcttgcctatgccttggaggatgatatgaaacagcaattcttaggcttagcagttttatgtgcatctgttatttgctgtcgtgtatctcccaagcagaaggcgctagtgacaagattagtaaaagaagggaccgggaaaaccaccttagcaattggtgatggtgcaaacgatgtcggaatgattcaagaagctgacattggagttggcatcagtggtgtggaaggcatgcaggctgtaatggccagtgacttctctgttgcccaattttgtttcttggaaaggcttctcgttgtccatggacac

SEQ ID NO: 195072 - DNA, 838 bp, Gossypium hirsutum
  unsure (1)..(838): unsure at all n locations
tctttttgcgtccgcccacgcgtccgcagagacgaagcagggaagtaaaagttttgaccttttgagaaaaatcctgtgagaatccactctctccatagtttcttcaagcaaaccctacgatggcggacgacgactataatgatatggacatgggatatgaggatgagccaccagagcctgagattgaagaaggagctgaggaggatttggaaaacaataacaacgatgatgttcctctagaacctatcgaaaccgaagacaatgtagaccaagatgctaaagacaaaactactcgtaaaacatcaaagtatatgaccaaatacgagcgtgctagaatcttgggtacccgagccttgcaaatcagtatgaatgcacctgttatggttgagttggaaggtgagaccgacccacttgagattgccatgaaggagcttcgagagcggaaaataccctttaccataagacgctacttgcctgatggaagttatgaagactggggagtcgatgagttgattgtggaagactcatggaagagacaagtcggaggagattgattacgtgttcttacttctcgaatttggtgtgtggtatgtaagagtcgtgatgcttagattcagtcagtaaatgtaaaaaagacaatctagaaggatgtctttggaaccgtggtagtagactcgttttgaaccctgttgtgcttttcgacattaacgtaggttataatgggagttttgaccctctgaaacttgttnngaaaaaaaaaaaannnntaatataaaaaaaaatataaaaaaaaaaaaaaaaaaaattttttttttttttaattaatataatttaaaaa

SEQ ID NO: 195073 - DNA, 589 bp, Gossypium hirsutum
  unsure (1)..(589): unsure at all n locations
aaaaaattgaaacaagaccttcctggccacgcagatgaggtttttgctgttgattggagtccagacggtgagaaagttgcctcaggcggtaaggatagggtgttgaagttgtggatgggctaaaagcctacagataaatggagcctaaagagcatatcccatcaagttgaaatataaacatgtggcgtttgcatcaatggcaacaccatatatttatctgataggatcagtgatacgtgcatactgcaatgaaccaggattgattggtaggaaccttgatgtgtgacattgcagttatgcagccatttatcacggctttcaggatttctgagtgtataacaatatatactagctggacgaaacattgcaaactgatgtaatatcttttttgaagtgtaaaatagccgattgctaaggttggcgattggcnnnnnnnnnnnnnnnnnnnnnnnnnnnnnnnnnnnnnnnnnnnnnnnnnnnnnnnnnnnnnnnnnnnnnnnnnnnnnnnnnnnnnnnnnnnnnnnnnnnnnnnnnnnnnnnnnnnnnnnnnnnnnnnnnnnnnnnnnnnnnnnnnnnnnnnnnnnnnnnn

SEQ ID NO: 195074 - DNA, 704 bp, Gossypium hirsutum
cccacgcgtccgcccacgcgtccgcccacgcgtccgcaatatcctctaattttaaagctaagagttttaagttaacgaagcatttgggtcgtttcgaagtaatggaaacttcaggaaaagtaaagaagggagccggaggaaggaaaggtggtggcccgaagaagaagcccgtttcaaggtctgtcaaagccggtctccagttccccgttggtaggatcggccgttacttgaagaaaggaaggtattcacagcgggtcggaaccggagccccggtttacttggctgcagttcttgagtacttggccgctgaggttctggaattggctgggaacgctgcacgtgacaacaagaaaaacaggatcatcccaaggcacgttctacttgccgtgaggaacgacgaagaattagggaagcttctcgccggcgtaaccatcgctcacggtggtgtgttgccgaacattaacccagttcttttgccgaagaagactgaaaaggccgccggcaaagaacccaaatctccatcaaaggccaccaagtctcctaagaaagcttaatttgatttaacaaaactagatccacagggctttatttttcttagttgtatgtccttttggggggattgttttcatagtgtaggggaagaatgctgtaagcaaattggaggaattggtagaatgttatcatgatgtatgttactttaatgg

SEQ ID NO: 195075 - DNA, 1156 bp, Gossypium hirsutum
tgcgacccactcgtccgatttggttgtcgagaacagaaaaaaagaatatggaaaccgtaactttgacaggattacttcacaaggctgcggccgagttccctaccaggcgagctttatcagtttccggcaagttcgatttgacgcatgctcaattacaacacatcatcgatcatgctgcttctctcctcatcgcctccggcatccatcccggcgatgtcgtcgctcttactttcccaaacaccgtggagcttgttattatgttcttggctgtaattcgttgccgtgcaaccgccgcgccgttaaactcagcttatactgccgaggagtttgagttttacctttctgattcagaatccaagctgttattaatcccagccgaaggcatcaagccggctgaagccgccgcttccaagttgaacatccctctcgtatccgccgctctccaggatgaaaattccaaaataactctctcctccaaccccgagtcaaatattgattcagtcaaacaactcgttaacgaccctgccgacgtctctcttttccttcacacttccggtaccaccagtcgtcccaagggtgttcctttgactcagctcaatttggggacttcagttttgaacattaaatcggtttacgaactcactgagtcagactcgacggtcattgtgctcccgttatttcacgtgcatggcttgttagctggcttactgagttcactcgtttccggagctgccgtcactctcccggccgccggcagattttctgcatcgacattttggacggacatgattaaatacaaagccacatggtacactgctgtccccacgatacaccagatcatattggaccgccatgagagcaatcccgaacgtccacggtaccccaagctaaggttcattagaagctgcagtgcatcattggcaccgagtatattagaacggctagaggcggcatttgacgcaccagtgctcgaggcttacgccatgacagaggcgtctcaccttatgacatcgaacccgttactaaacaatggcccacataaagctgggtcggttgggaaaccggttggtcaagaaatggcgattttgaatgaacaaagggagattcagccaccttattctaatggggagggttgtattatgggattgaatgtaac

SEQ ID NO: 195076 - DNA, 742 bp, Gossypium hirsutum
aaaaaaggagagaaaaccctagatttaggggagatagggtcattatcgtcatttcacgctatgaatcggcgataacgggagcggttcatatcaacggcaaaataagagaagaaaagagatgtacagaggataagtcatcgcagtcccttcaaatggggaagcatccacctgatcattaccgtgactcttgttctgcttctctacctaaaccgaacgcctccggtgatgaatctgaaactgacagtgaagagtcggatgttagtggttccgacggggatgacacatcttggatctcatggttttgcaatctacgtggaaatgaattcttttgcgaagttgatgatgactacatacaagacgattttaacctttgtgggctaagtagccaagttccttactatgattatgctcttgatttgattttggatgttgaatcttctcacggagatatgtttacggaggagcaaaacgaattagttgaatctgcggcagagatgctttatggtctgattcattctcgatacatattgacaggcaaagggattgccgctatgcttgacaagtacaagaactacgattttggaagatgccctagagtttactgctgcggacaaccatgtcttccagtcggtcaatcggatattcctcgatcaagcaccgtaaaaatatactgccctcgatgcgaagatatcttctacccacgctccaagtaccaaggcaacaccgacggtgcctatttttt

SEQ ID NO: 195077 - DNA, 783 bp, Gossypium hirsutum
aacgatgttaaccgaccgactaggaaatgaaaattcatgaagtttgggtagtgaaaagaatcatctggtaccaaattttatatcaaggctattgcacattttcttccctgccaagtttcaactctgtccaagtcaatttcatccccaacccaaaaatggcatctccaatctgcttctaccttcttttcctctccctcctctctcaaacccaactctccttttccactacctacacaccaatcgatcacggccgtccgttggtcacctcaatcgctgatgtgcacgatctgctgccaaagtacggccttcctaagggtatcgttcccaacaacgtcaagtcttacaccctttcatccaccggagacttcaccatcgagttggaaagcacctgctatgttcagtttgatgaccttgtttactatgacaaaaccatcagtggaaagctaagttacggggctgtgcacgatgtgtttgggattcaagctaagaagctcttcttatggttgcctgttactgggattgaagttaatggcaaatcaggtatggttcagttcttcgttggagctttttctatggagtttccagctgtacagtttgaagatattccagtttgaaagaagaaggctgttctgagggctgacctgtttgcttctatgtgaattcaggactggttccttggtccattgctggtggcggcaaccttacttgcctgttttatttcatgcccccaattaagacttcttgttagctcaataatttctttgaaagagccttactatattt

SEQ ID NO: 195078 - DNA, 981 bp, Gossypium hirsutum
  unsure (1)..(981): unsure at all n locations
ccctttcccaaaagccaaacatcgctccggatttggactcgccctgaccaaaaaagaatcaccacaacctgcaacggcgagtccaaatgaacgattccgatgcccccaagttcgacaacgatgaacgacaagaagacatcaggatgcgattgaggccgtcggatagcaacgtgactgaagatcaggagccctttatgggagttaaagtccgacggaaagcctcccgccggcatgaatataaaggagactacatggatatcccctcccgtccttacttaatgaagattttgcaaaaacaaggcgacaagcaagttttctttgctgataaagttctgaagttcacttcaacgggaaagctgaaacggcggattcttatggtgactgattttgcggtttacttggttgaccctgacactggtacgcttaagcgccggatagctttagccgctgtagataagatatgtttgagtgaactaagcgataatttctttgcaattatcgttccgacggagtatgatttgctaatggctagtactcgcaaaactgaaattgttaccgtcttggtcgatgctaccaagaatgcttctgaatatgaactcgaggtggatttttcaaataggtttgaatataatgcttcagctgacctcgttaaggaagttcagtttgaggaagccgaagggagtgttaggacaagaattgtgaagaaataagtagaaattgcactcgtcaaaatctaaaggtgaaatggactcatcgcactttgtggcaggttctgctcagcttggaggccacccccaaaagtatgtaccatattcttgtccactttaatgtattgttttgtaattcttatgtgagaaaaatggttgtataaactctttgcatgtgtgatatctccatactaggtagaaattgtcacaatagaagatggtctcctttgcgtaacattaatgaagtaatactattattctgttgtgttgcana

SEQ ID NO: 195079 - DNA, 677 bp, Gossypium hirsutum
cccacgcgtccgggcagtcagaagcccaaagtctcgatttttcgaagcgatttcaaaggtaaattcgctttttatttattttaatggtacttgcatgtatttagagaagaaaaaaaaatgaaaaggtaaaggtaaaggtatatcacctttaagaaactgtatgtatttggcttttgtattccttgttaaaaatctcccccttcgtttacaggttacaaaggaggcttttatagccactgtttctattacattttgggaagaaatcttttatttctttccatatttgttttgcttgtttgctactgtgtctttctttcttttgcaggtaatcaaggaaagtagaccaccggtgttgattcggccgtagaccacggcatggttcgaagcccgggaatcacggcactgattcaggtcgctgcgagacgaacggacacgagtcgaaggggtgtgactcttggtctgattgcggcgcaaggtcttctgtcgcttggtatggcttgcgagttgcggtgcaaaccctagctaggttttcccgaaactgaaaataaattgggccaattgggcctactaagtcttgggttactggcctacttcaggggtattgggtatttgattgtaaatgggctactgtgttaagcgggatatgggcttattgtaactggactctaataaataac

SEQ ID NO: 195080 - DNA, 407 bp, Gossypium hirsutum
cccacgcgtccggccacgcgtacgggaaaatgaaacgccaaacgaacatcagcagtggctcttcctcaacccaaatcagccaaagtgcttcccactatatctgcatcgatacccacagaaaggaaacactggagctatgaacagattcttggagattcaaccgaaccttctccaaagtttaaagctaactcatcaacaaccttgagacttccgcccccacgcaatccagtcctttctcaccgcctgttgaatcagattggggacatcaggatcccagatccgataagcctctctccttcgtccttcgatggctagagcatgcgccgcttcatttccttcccgaggcacaaatgtgcatcccccccctccaaaactcctatcaagctgttggatgtgataaacgatcg

SEQ ID NO: 195081 - DNA, 553 bp, Gossypium hirsutum
acggtgcagggcagcaatggagcatcctctaatgatgatacattgtagctgtgtgttttttttcttcctttttatgtgaaactgagtgggatacttagtattgcaggtgataatggaagcaggaatgtgctggatgtttttttcttaaggaaggctgtagccgaagcattgaatgagaggcccgcgtcctctatcggggaatttttgagtgttgttggaaggttgcaggctgagcaacaaaagcaagtgcaggatttccaggaagaggtattggaaagagcaaaaagagccaaagagcaagcggcacgcgaggcattggaggcacaaaggctgattccaaagtctactttcctaagtacatctatgggcagtggtgccactgcaaacaatggggctgcagctaaagcttcgccctcaactgccaataacggagtttctacaaccccatcctcctataatcccgtcaacgctgctgctgctaatacagaccctgggcctgacgctaaaaaggaatagtgccaagtatctctatttgtatttcacactttttatc

SEQ ID NO: 195082 - DNA, 688 bp, Gossypium hirsutum
  unsure (1)..(688): unsure at all n locations
ttcttgtggtgcctagtacagggacagccagcatacttgtcaatgcgccttttgggatgaagcggctctgaaggcttggccacccattctgtccaagaatcggaacaatgggcttgggagactttcaattcactccctatgctcatggatgcatactcagaccaagaaagatcacagctggcactaatccaaaggttccttgctggggtgttcagtcttagtgagcatcatccatatcaatcaccaccccgctgtacggattcatatgtggatgccatgaaggaccttcgtcagctttcttggctcgagagatttgtctctgtaataagtgacaactactacgaagactatatccaatgaagctgtgtagatgattccaatgttaggtaataagttgcttatcagtccaacaaggtttacaatagagcccaagagtttctcactctattggctccattttcatttacacaaattcctatgtggttcttgttgcataagagctgaagcaagattctgtgcatgttagttgctttcttcttgaaagaaaaagaaagataatagggtaaacacttgttgatgtcaccagattgaaaaaaagttaatgaaacaaatcatcttttcaatctaaaaaaaaaaaaaaaaaaatataattatttaataataatataaaatagtattttnttttaat

SEQ ID NO: 195083 - DNA, 698 bp, Gossypium hirsutum
  unsure (1)..(698): unsure at all n locations
cccacgcgtccgcgataaacaaggcaaaggacccttcctcgaagcttccaaagaacaaatcgaggccatgagtagccatgaggaaggcagcaaaggcggtggtttgtggccatttggaagtgagtcaaaatcagagagtgcattcaacctcttcagaaagcgtcagccttcacattgtaacagatatggtcagctctttgaagttgaagaagaagaattcaagggccttaaagacttcgatctcagggtctcctatgtcaacatcaccaagggatgtatgtcagccccattctacaactcaagggcaataaagatagccattgttgtgaaaggtgaaggatactttgaaatggtatcacctcctgtttcccccaagtccagtcaggaggattcagcaggaagaaagagtgggtctcgttatcaaaagataagctcacgtttgagatccgacacggtgttcgttgttccagcagggcatcctttcgttacagttgcttcaagaaacaataatctagagattctatgctttgaggtcaacatagaaaacaacgttaggtaccttcttgcaggggaggggaattatgttcagcaattcgagaaggaagcanaggaactggcattcaagagcaaggaagaagaggtggataggatctttggtaaccaagatgaggagttctttttccttggaccaaagcaac

SEQ ID NO: 195084 - DNA, 476 bp, Gossypium hirsutum
aaagcataatcgaatcgtgaaattactttgagaggaaaatggggaaacagccggtgaagatgagggcggtggtatacgctttgtcgccgtttcaacagaagattatgggtgggctgtggaaggatctgccgggcaagatctctcacaaggtttccgagaattggatcagcgctactcttctccttactcctctcgttggaacctacgcatatgtccagaacttcaaagaaaaggagaaattggaacacaggtattaaaaacctcaggaagcatccctttttatcggagtaactctgagcttttacgttttagatgcaaatttattgtggtccggtccaatgatgaaccatgttttttgtttgggatctgattagtatctgactgtttgagttggtgttttgttattcatatggaataaatgaatttggaacagtgtctgcattttcggtaaaataaatttgttgattcgccctttc

SEQ ID NO: 195085 - DNA, 506 bp, Gossypium hirsutum
cccacgcgtccgacaaaggaaagcgtaatgtcagatgagaaaaaggggaagttcgttgaatgagaagattccgaatttgaaaaggttatagacttccatatatgttctcagagtgatgtatttgtaccagccatatccggcttgttctatgccaatgtagctggaaaaagaatagcttcagggaagcctcaaatccttgttccagctgatatacctgctacgtctgcccccatcaccaactacctctctccttacgttgccaagaggaaccacttggcttattcctgtttctgctagtcgcgtcggttcgatgcacgtgtgccttcctaaaagggtgtcgggtcttcccgtttacctcagttggagtctctttgagtaagcagagggaaagaccaactttggtgttcatacttgggtgttaactggccctgataaaagttatatgttaagatgatttttggtttttctttaatgcgtttctcaatggggggggggggtcagaaatg

SEQ ID NO: 195086 - DNA, 511 bp, Gossypium hirsutum
  unsure (1)..(511): unsure at all n locations
atggaaggcgatcaagagatttggtcagcttcactttctggttataaaattgccgtggtcctactcaacaggggtcctgttcgttattctacaacagctcgttgggatgacattggtctagaccccaagactgtggttcaagccagagacctttgggagcacaaaacactgaagacaacatttgtgggcaatttgacagcaacattgagaccgcattcatgcaaactgtatgtattgaagccaattgcttaaaaccatcatgtttttaggctttttgccactattcccttgaagttgcagtcatcatttataccctgtaattctagatgtgccatggaattattatttatttctttttaagatcagtacatgaatttagtcattaataagatggaggaagctaagctttcctctttaattagatccnnnnnnnnnnnnnnnnnnnnnnnnnnnnnnnnnnnnnnnnnnnnnnnnnnnnnnnnnnnnnnnnnnnnnnnnnnnnnnnnnnnnn

SEQ ID NO: 195087 - DNA, 674 bp, Gossypium hirsutum
aactgctggtgctgctcttgctactcatattccaagtggccagcttggtttcactggatcaactgaaacgggaaaaattgtccttgagttggctgcaaaaagcaaccttaagcccgtaacattggagctcggaggaaaatcgccttttattgtttgcaaggatgctgatgtcgacaaggcggttgagcttgcccactttgctttgttcttcaatcaaggacaatgttgctgtgctggctctcgtacatacgtacatgagagtgtgtatgatgaatttttagagaaggcaaaggcacgtgcattgaaacgtagtgttggcgatccatttgtagcaggcattgaacaaggtcctcagattgattcagaacagtttgaaaagatcatgaggtacataagatcaggtgttgaaagtggagcaactctagaaaccggaggggagaggataggggacaagggcttctatattcaacccacagttttctccaacgtgaaggaggacatgttgattgcaaaggatgagatatttggtccagttcagtctatcctgaaattcaaggacatcaacgaggttattcggagggcaaatacgacgtcatatggactggcagcgggtgtgtttacgcaggacatagacacagcaaacaccttgacacgagcactgaaagtgggggaaa

SEQ ID NO: 195088 - DNA, 1124 bp, Gossypium hirsutum
  unsure (1)..(1124): unsure at all n locations
aatggaattagcaatagctcagttttggtcaagtggcatgggaagtcacgagacgacaattgtagattttgagatcgtctttcatggaattggagtcaacagaactgaagtagtccttgatggaagtgaagcacccatcagaattgaggctgaagcactattggcctctgaaagacttgcccctactgctactttaaacaagataagagttccatatcgacctactgaggcaaaactttgtactcttccaactaatcgtgacaaattaccatcagggaaacagatactggcattgacactaacttaccactttaaattggaagatggagcagaagtgaaaccgcatattccattgctcaataatcgtatatatgacacaaaatttgagtcccaattttacatgatttctgacacatacaagcgtgtatatgcaatgggtgattgttatccagcctcttcacaacttccaaagggtgaatactcactgcgactgtacttaaggcatgacaatgtccagtacttagaaaaaatgaagcaattagttctgtttctggaaaggaatttggaggaaaaggacattattccattgaactttttctctgaaccagatggccccgtgatggggaatggtacctttaaatattctattttggttccagggataaaggaatcattttatttaagtccaccaaacaaagataagcttccaaagtgttcctcacaaggatctgtattgctgggagcaatatcacacgggaacctatcatatgctggagagggaaaaaatccacagaagaatcctgtatcatatcagatatttatgtggtgccacccagcaagattgatgaagacaaaggaaaggttcttcttcagctagcactaaacctatggcgnaacgtttacaagaagaggttcgagaggcaaaaatnaaggtttttggaagcctngagcagatagtgatgaagatcgctcagaatgganaaaatagctcatctctaagttgagtacctnagtacactcatgcttgaaaacttgaaagttgttcacgagcatattgggcaaatcactatatgaagnattagtgcgcnnatagtgntgtggttcatccatgactggaactcttn

SEQ ID NO: 195089 - DNA, 775 bp, Gossypium hirsutum
gtcaatgtaagtcatatgattcatgatttatcattcgggccaaaatatcctggactccacaacccacttgatggtacagtgcggattttgcatgaaacaagtggaacattcaagtattacataaagattgtccctactgagtacagatatatctggaaagaagttttgcctacaaatcagttttctgtctctgaatacttttcccctatgaaggagtatgataggagttggccagctgtttactttttgtatgatttgtcaccaatcactgtgacaataaaagaagagcgccgaagctttctccattttatcactcgactttgtgctgtcttgggagggacattcgctttaacaggaatgctacatcgttggatgtataggcttattgaagaagtgactaaagcaagcggtgggcgtgcatatcggtagaagagtttgggttcagttcggagtgcaagaacaacagcaactcacatctaatgtgtctcgatgtctcaaaaaaatcaattacaatgcagagtggggataggcagaagaatatacatatatatatatataccccgctggtactctatggttgttgctgtggctttccttaattattcaatgcagtgttgggtcggatattatgggaattaagatttcttttaagttgtatcatttttgtaatcctaaaatcaaaaggaacaagaaagaaagaaaaaaggggtttgggactagctattaacatgcacacctcttatgtttgatttttatgaccaaaatttgtcaattg

SEQ ID NO: 195090 - DNA, 944 bp, Gossypium hirsutum
ggaaagctcgagaaatgctacagaagcgtgaagcagctgttgtagctaaagaacaatcctcattggtgaggttacaagaaaagagagatgctgctgttttttccattactaatgctttagagaagcacaggaaattatcatctgggcagcctgctgataatggagataatggtgaactctcagttgaggagaaacaacctgaggatatcaaaagttcttttgagaatggaaatctcgaggtgaaatcttatcctcaattggtaaaactatgtgaagaaatggactctgaaggactacagaagtttatttcagataatcgtaagaaccttgctgctctgaaagaggaaattccttgggcgttgaaagctgcagcaagtccagctcgcttggtcctggaatcgttggaaggattttacccttcagaagttgatggaaagaaagatgcaaacctattggggcttaggcgaacttgtattatgttgatggaatgtcttagtgtcttgctttctaatctggatatggtttctgttttggctttgatctctgaagatattaaggaacaagcaaagctaattgctgaggaatggaaaccaaagctggatgctcttgacatggatgctagtaacggtaactcattggaagctcatgcttttctgcaacttatcgatacatttggtattgcttctggtttcaacgaagaagaactttcaaggctgataccaatggtctctcgtcggcgacaagcagctgatctctgccggtcccttggtttgtctgagaaaatgccaggtgtaattgaagttctggcgaataatggaaggcagattgatgcggttaacctggctcttgcattcgagcttacagtgcagttctcgcctgtgccattactgaaatcctacttgaaggaggctagaaaagcttcttcacctgtaaagcctggaaat

SEQ ID NO: 195091 - DNA, 443 bp, Gossypium hirsutum
ccctcgcggccgtttaccttttagaagcaccatatgtggatcgaaagaaagattcaaatctactgggtcttaggcgaacctgtattatgttgatggaatgtcttagctttttgttaaggaatatggatatggtttctgtttctgctttaatctcagaagatgttagggggcaggcaaagttaattgctgaggaatggaaaccaaagttggatgctcttgacatggatgctagtaatggtaattcattggaagctcatgcattcctgcaacttcttgccacttttggtattgcttctgacttcaatgaggaagaactctcaaggcttgatcccaagggtctctcgtcgtcgtcaaacagctgatctcttgccggtcccttggtttgtctgaaaaaatgccaggtgtaattgaggttctggtgaataatggaaggcagattgatg

SEQ ID NO: 195092 - DNA, 1904 bp, Gossypium hirsutum
ggtaattaggagttcttcacaggcaaagatctctaaaacagaattaggatgcagggatttaaggttttgttttgggaaaagtaatgataaaaacaaaatattttctcggaaaccaaacagtgtttgctttgatagtcaaatttcgaggtttagaaacgctgggctcacatttacgttgaaagctgtccagtctgatcccattcttgaatccaagtctcctgcaacttccaaatctcttgataggctaagattatttcgttggtctgcctctagatgcggtttccgatggcaattcggtaaaccatgcccgggcaattggggcgggactgaaagctttgaaacttttgggtgtggaaggtgtctgaattgcctgtctggtggggagtggtcgaaaatgagagggggaagtatgactggtcaggctatcttgctgttgctgagatggttcagaaagcacgtctgaagcttcacgtatcgctctgcttccacgcttcgagtcaaccgagaattccgcttcccaagtgggtaacgaagattggcgaatcccaatcaagtatcttctttgcggatcgttcaggacagcattatcagcaatgtctatcactggctgttgatgatcttgcagttcttgatggaaagactccggttcaagtctaccagggcttttgcgagagctttaagtccacattctcacctttcatgggttctaccatcacgggcatctcaatgggtcttggaccagatggtgaactccggtatccctcacaccacaagcctgccaagagtggcacgattactggagtcggggagttccaatgttatgacacaaacatgcttaaccttcttaagcaatatgctgaagcaaatggaaacccattatggggtctaggtggtccacatgatgcccctacttatgatcaggcaccgaactcaaatagtttcttcaaggatcacggtgggtcgtgggaaagtccttatggtgacttcttcctttcctggtactcaagcgagcttgtatctcacggcaatcgtctcctctctcttgcctcatccatttttggtgatactgaagtcaatgtttatgggaaagtcccgttgatgcacttgtggtacaaaacccgggcacacccttctgaactgactgccggcttctataacacggcctcaagaaatggctatgaagcagttgcagagatgtttgcaaggaattcatgcaaaatcaacttgcctggaatggacctgtcagatgagcaccagccacacgatgctctttctagccctgaatcattacttgcacaaatccgaacaacgtgcaacaagcacagggttgaggttgccgggcagaacctggcctctggagctcctggtggtttagagcagattaagaaaaatatgttgggtgagaatccaatagacttgttcacttatcagaggatgggagctcatttcttctcgccggagcattttccttcattcactgagtttgtccgaagcctgagtcaacctgaattacatccagacgatttaccctcggatgaggcagaagctactgaatctgtacaaacgagttcggatccaaacatccacttgcagacagcttagcaagaggtaagagaacatagttacgtgtatattgtattcttgtaagtactaaattattgaatggggagaagattgtactattggactttctgtatacatctaagcaaatatttcctttttgctaaaggaccttagaatagtttggtgttcatgggtttttgaccccaataattaggggtctctttctagggatttgctcatgtttttctgggcccttttctcgcatatattgcctgtaagaggtacttagaacttggaagttttccaggattaatacaaattagttaaataaaaaaaaaaaa

SEQ ID NO: 195093 - DNA, 411 bp, Gossypium hirsutum
cccacgcgtccgttaatgccaaaaaaaaaaaagtcatagtttcttcatttctagcttagccatggaaatcgaaatatggcacaggcaatgctcaagcagattggaaaccatcaaattaggccggagctacacgcaacgtggccacgatgaacattccaagcccaagtggagaacgttttggaagatattcacaagagaaaggaagaaaatcttcgcttctccagttggattccaggcttcttatgatccagatgaatattcacagaattttgatcaaggaaccggttgggctgaaccggataatctttctcggtctttctcagctcggtttgctgatccatctaggatctcaagaaggaacccgttgcgttcatgtgattggcaaatgaatgacaactaagaatgttcttc

SEQ ID NO: 195094 - DNA, 263 bp, Gossypium hirsutum
cccacgcgtccgcgcaacctgaactcacctccattgcatgggctcttatcgcattaccactttctcgagtgacgataatgggtgggtttggtttgtttttggagcctgctggcctccctcgaggccgcctaacattgtcaccatcagctgcaatgattggggtcactgcctctggcattttgggagccattagcatcgcatgaaattccttgtcctgttctttgttatgatccataagcactctcaaatctgtggcttctccc

SEQ ID NO: 195095 - DNA, 677 bp, Gossypium hirsutum
  unsure (1)..(677): unsure at all n locations
tagtcagaaaggtaccaattcctcacctcaggtatgggaaatacagaatcaggatatgatgattcgcttcaaactgacttttggcatcaaccttcttatgaaccttcttccctagcaggaagttcaatggatcgaaactatcaacccaggcagcaagccccgcttatacctgacaattttagttctttggatcaggttatttcagcattgagagaggcaggacttgaatcatccaatttaatacttggtgttgacttcactaagagcaatgagtggacagggcggtattcattcaacagaagaagccttcatgctattgggagctcacctaatccttatgagcaagcaatatctataattggtcgtactttatctacttttgatgaagataagttaataccttgatttggttttggtgatgcattaacgcatgataaatacggttatcagcttttatcctgatcaccgaacttgtcatggtttagatgaaactttagcacgatattaagagattggtccgcactaatagtggcaggttgtgatcataattcttctatttgtcaattaataaagcatttctaggcatacaccattgggttacatactatcctgtcttctaattctttgcagagaaatgtcttagttctganttcattcctttatttctgaatattaan

SEQ ID NO: 195096 - DNA, 816 bp, Gossypium hirsutum
aaaactttcctgggtttggctcttgatccaacccataagtctctaggtttcaaagatatggctggaaaggagttcactgttaatctgaacaaaccccttgtcttccaggttggtcaccttggagaaagcttaccaggaatgggttcatacgcctattgtgacagatgaaagtcctcgctttttcaagagtgatttcatggagatcctgactcggacagtgtggtgggtagtaccattgatatgggtgccggttgcaatgtggttcatctcactctcttacacaatgggtcatacacttccccaagttgttttaatgtctgttgttggaagtttcatttggacattcttggaatactgtttccaccgcttccttttccacattgaaacagagagttactgggcaaacacttttcactatctaatccatggctgccaccataagcaccctatggatgggcttgggcttgtgattccacctgcagaagctgctatactagctataatgttttggaacttgtatgggattttattcactgtctccacaagacctgcattatttggaggtggactgattggatatgtgatatatgatatgatacattactatgtgcaccatggccagcctaccaaacaatctatcaaaaaacttaagaaatatcacttgaaccatcactttaggattcaaaacaagggctttggcataactacaacattgtgggacagagtttttggaaccctttctaagaccaaagcagacaagagtggatagatgatgatgatgagtctgacaagcatcacatgattgcaccctgtgat

SEQ ID NO: 195097 - DNA, 417 bp, Gossypium hirsutum
caagtaatcccttctcttggtagccagggcaaatcagaggatggtaaacctccatgggaaggggttagaacgaggtgcaaaaaagaatggtcgatgtttcagaaccgactcgcaaatgcagacaaggcgtaccttgctcagcttggaaaggaataattatttactgtctatttttattttattgatttcttttaccccaatccctccctgattttcaaccccgtttgtacatgtataatatctcacctgacgtttgttagggttcagtttgggtgacattttattttatttttgctgaacgagggtggactcatttacctgagccacatttttttgtacattaagatttccacagctatagaaaagggggagtaattttttttataaaaaaaaaacatctaataaaaaataaagggc

SEQ ID NO: 195098 - DNA, 662 bp, Gossypium hirsutum
ggggtacatatgtgagaggcattgcggcagattacccacaaaacaaaaggagaatcaaacgaagacaaagtgaagagaaggaaatctgagcaaaaattccaagaaataacgaaagtaatagttgtactgcataaggctcttaaatgggggataacaaggaattgacgccgtcaaagtatgacatgaacgcaaaatgggacgcctgcatcgatctcactctccgccgcttcgtttattcatccttggctggcgcttttggtggcctccttttcttcaagagtccagtgactcgatgggcatctgtagcttttggtgctgggattgggattggatctgcgtacactgattgttctagtctttttggtggatattctccgaagttggctcctcctaagcttgatgatgctcctgcacccaaggagcaagtggagtgagttgatgttgttgaagttcctctaagattatatgttggtgggtaaacaattaacttgttgcaccaaaagtttgttatggatcacattatcttttattatgtaatctatcaaatgagtaaacacaatttgaagcggaaaaataaaaacaaatacttccgttgcagtcctgcattttgcgtgattattgttgagagttggacttgatttaaaaaaaaatgatattatata

SEQ ID NO: 195099 - DNA, 771 bp, Gossypium hirsutum
cgatttccttcaagaatccctaattgtctagccgccatgcctccaacagagagaaaatacaaatggagtcttcaggaccttcaaggaggacttgtttcatccaagaagatgatggattggcttccattgtagatatggaggctggatattcaggaagccattaccaaaaggttaaccaaaatgggtttctttcaagacctctttgttactctagaaggagtagtttgaggaatctatcgtctttttcttcgtcatcttcttctggttcagtttcttctccgaggcctgctcgcttttatgatgccagatttgaagacgttcatcaaccctatttcttggatgtttgctttctttgcaagaagcctcttgggtgtaaccgtgacatcttcatgtacagaggggacacacctttctgcagtgaagactgcagacaagaacaaatcgagatagatgaagctaaagaaaaggacatgaacctttcttcctcagtgaaagctatgagaaagaagagccaaagggagtctacatctccgaatgaagctcaaggttactctattcgaactagcacagttgcagctgcttaaatcacaccacaaaggaaataaacaaaaacatatctaccatatatatatatgaatatttcaaaaaaaaaaaaaagaagagaagggaaaggtggtggagatcatcaatgaagaaaagggccaaggagagaggagaggatgaagaaatctatatcttgagtggtttggtatcccctttataaaacatact

SEQ ID NO: 195100 - DNA, 443 bp, Gossypium hirsutum
ccgatcttgacatcagatacatgattaaaatctgcaagatgcttggtttggcagctcttgtagaggtgcgtgatgagagggaaatggaccgcgttcttggtatagaggggattgaacttattggtatcaataatcgtaaccttgaaacatttgaggtagatatcagtaacacaaagaagcttcttgaaggagagcgtggccagatgattcgcaagaaagatataattgttgttggagaatcggggctttttactcctgatgatgttgcttatgtccaagaagccggtgttaaagcagttttggttggggagtcgatagtgaagcaaagcgaccctggaaaaagaataagtggactttttggtaaagacatttcgttatgagttcacacagggaaaagtggactctggatgtgtgcttccgagacttcatttacaattactaca

SEQ ID NO: 195101 - DNA, 430 bp, Gossypium hirsutum
gtacaaagtggggcaccagaaccagaacaaatttgcgatgatgacaataacaaccagctagctgaggagaacattgaaggagacattacaaaacttaccggtagacagaaaaaattattcgagttgagactaaagatgaacgaagcaagaaaagctaatcaaacggctatggtggctgaaaagaaacgaatggaagctccacctgaatctagaggaatttctaagcaaaaatggctcgaggaaaggaagaaaaagattgggaaacttttggatgcaaatgggttggatttgcaaaaagcgtatatgctcgatactcaagaggcagccgaggcaaaatataagaaatgggaaaaagatcctgccccgttcggttgggacgtattcaatcagaaaacattgtacaatgcatacaaaaaacggacaaagaaca

SEQ ID NO: 195102 - DNA, 665 bp, Gossypium hirsutum
ctgcacttcttgattattgttaatgaatccccttcatgataatgtttccccatttcatgtccatgccgagttgagttgcacttctacacgcgattgcctcagcagcaaaggctgaggcgactggattgtggatttccgagcatgccaagagaacctttccttcgctgttcctggccacaattccgagtgccgcatgagaagatctcacatcatatgcagcatcaaagttgatcttcacaaactgatcagattgcccataaagtgcagcagaaaatcctacactggactggattactctgctcaaagacccagactagccactctgggaactccaaattatattcagacagaaaaatctggcatgctaattctccccatactgatactgaaaccgggcattctataaataagtgattcatcatctctgtcccactcccacaccttgggcaaattgtaatgtttgtcaatctcctttgttgcatgtctgcccgtaaaggaagatagttccatgttactttccatactgttatttttatttttgaaggtaggttaagtatccatagttttttatagaagctcttgtagtcggtttgtaactcataagctctaggatctttatccaaactttgtaatagtttataggcactacgaactggatactaacc

SEQ ID NO: 195103 - DNA, 494 bp, Gossypium hirsutum
gtcgacaatgttggtgaatcaagagccacgtccagggtttggtcaaggcatcgacaccctgggggagctgtatctgagcggaggtgtcctttggggcgagaatctcttgggtttgcaagatgacgacgatgaagatgatgtgcgtgtaataagtgatgtaggtgaagacgcatccccaagcccaaggagacgcagacgcctgacgcggtcaaggtcagatgaagatcagtcatgaaataaatcagatatttttgcaggtaagtcccacttgcttgacattatttcgaatgggatttatttcgaactgcttttccctgatccggtcggtagtattcatcccaagtagtatgcataagcttttgctggtctcagaatccaccatcttgtgggtttctagtatgtgtcatctggaattatgtattcagacttttatgtattctggctttagacaaatgtatttagatgtactgaagctcaaaccagtatttctcttc

SEQ ID NO: 195104 - DNA, 742 bp, Gossypium hirsutum
attcgcctcttttggcggagcatcttattgtttcgaggggttgttcttcagtttcaaggtttcttgctttttttgtttttacaagtttcagtctgcagccatgggaaaagcaaaaaaggcccccaaatttgctggcatgaagaaaataatcactcaaaaagctattaaacattacaaggaccaagttttgaaccctaacaagaaggacctcagcaaggaaaaactccccagaaacgtgccgaacgtgtcttcagctcttttctttacacacaacacctccttgggaccgccttatcgtgttttagttgataccaatttcatcaatttctccatccagaacaaattggatctggagaagggaatgatggactgcttgtatgcaaaatgcactccttgcatcacagattgtgtgatggctgagcttgaaaaattgggccaaaagtaccgtgtagctttgaggattgctaaggatcctcgttttgaaagattgccatgtgtccatcaaggaacctatgctgatgactgtattgttgagagagttacacagcacaaatgcttcattgttgctacatgtgatcgggacttgaagagaaggattcgtaaggttccgggtgtgccaattatgtatatcactcagcacaagtactcaattgaacgacttcctgaagcaaccattggtggagctccaagattttgacatgcaagtattgatatttcagtagcagtgatctctgggttcaat

SEQ ID NO: 195105 - DNA, 617 bp, Gossypium hirsutum
ctgtggaagacggtactacatttgcagcagatgctgttatcgttgctgttcctctaggtgtactaaaagccaagacaatcaagttcgaaccaaggcttcctgaatggaaggaagcagcaattgatgaacttggagtgggaattgagaataaaattatattgcactttgacaaggtgttttggcctaatgtggagtttttgggagttgttgctgacacatcttatcattgcagctactttctaaaccttcataaggcgacaggtcattctgtcctcgtttatatgcctgctgggcagctggccagagacattgagaaaatgtctgatgaagctgctgtggagtttgcttttatgcaactcaagaagatccttccagaggcatgtgccccgattcagtatcttgtttctcgatggggcacagatgtgaacacactaggctcctatagctatgatgcagtaggcatgtcccatgatctgtatgagaggctaagagtgccagtggataacatattctttgcgggggaggcaaccagtatgagctatccagggtccattcatggtgcattttcaactgggcagatggctgctgaggactgtagatgcgtgtactggagcgat

SEQ ID NO: 195106 - DNA, 497 bp, Gossypium hirsutum
gccacgcgtccgaccacgcgtacgccttcaccccctccgccatactactatcactcaccttgcccaccagtgaaatcacctccacctacaggctatatttacgcttctcctgcaccacctactgactattgagtctagaaagatcaaccacaagaccgcaacgtccatgttctagttgctcaaaaagaatcagagaaggcacccaggacagaaaacttggccatgaaagattttcaagtccattgaataagagtttggacattgcatgtgggagctacacatttcgatagtccaagccatactgcttccaattctgtggtggccatcttacacattctcttaatttgttcaagtggcttgggaagaaagcttgagagtcaacttccctagtggctgtttaattatcggtcaataacatctttaattatattggttttcacctaattcaattgtgcacagaaatgtgtaagcgtttctatatattgtgggcatgcatt

SEQ ID NO: 195107 - DNA, 849 bp, Gossypium hirsutum
caacctttaaggtaacattaccatcaggatcatccccgccacttccacttaaagaaaagcttccctttttcagtctgaaggatgataaaggaaagatagcaaggggaatatgcatcacaaagacttctttgaagcctgatatatcgaactttttggttgtatatcctccaagatcattgtttcctgaacaggttacttcaatcagacttctccaaatagctagcaatttggctgtttgtctgccaggcatgtctgtgttatatatctcagcatcatgtaatgctgatgatcaaggaaagaagttaattcatgctgtcgtgaacacgcttcttacagttcctctagattctgaaagtaatgctgcagttcaaagtgagactgcagaaattggtagtgcagttcaagatgagacttcagaaagtagttctggaggtccaagtgattctggagaagaaaaacctactctactttggagtgcgttgtatagtcaggagctaactttgggtcaagttgattttatctgttcaactcccatgccagatggtaaactgaactacaatgatctcatagatacgacttttaagatatttcaggagatttaccctgaggaagaattctttccggagacatccttagagaatcctgagggtgatggtgatgcttctccggagacataaagatttactgaatggaatataatctctacctaatggtgcatctaacaatccagctccttttccaatactgtggtcaagtgattggaggatgccgttatcaaatgatgtatttgaagtggtgaagaaaaaaggaaagggatttgagaggacattgtggtttacggattttgac

SEQ ID NO: 195108 - DNA, 890 bp, Gossypium hirsutum
tccacgcgtccgggacctattttagagccaacatggcctaatttttaatttatttatatattgcttttctgccctttctcgacagtgttccagaatcggttggttaaggcaatggctaccatcagaatagctcttcgtaacgtccaccgcatcgttaatacctccgccgttgccggccgtacaacgaccgttttcaggccacagtatggttgggtttcaacatatttttcaactaatattagtaacactcagccattaaacatcgatctttctaacgaagaaagcaaaaggcgtctttataacagattgttgtataggagcaaacaaagagggtttctggagctggatttggttttgggaaaatgggttgaagaacatatccattccatggatgaaaatggaattaaagctcttgttaatgtcctcgatttggaaaaccccgacctttggaaatggctaaccggtcaagaacaaccacccgaagcagtgaccgttaatcctgtcttctctgcagtgcaacagaaggttttgaagaacctcaacaaccattcctctcccgagacccgagcaacccctggccggccatgggtgagagggtgggatgatatcaaaaaaggtcgcgacagcccaatcaccggaaatcagtagcttttcttttgcctttgaggtaacaggttctgaaggcttgtttatttcgaaacaaattaaggtttgtaatatgtaatttcttcgatattgtatgctagagtatgaaataaggatggctgcattgctgcagtgaagctggagatgtaagaaaaccctgaatgtatttggtataggccttatttaaagtgatctatagcataaaaattgtggcttgaattgacatttcttctctatgctttagc

SEQ ID NO: 195109 - DNA, 593 bp, Gossypium hirsutum
ccttaatatcccaagaatcatctttttcaaaacattttactccaacgttttgatttccatggagcaaaccttcattttcctcacaaaaacctcagtctggttctcagacccattcgtcctctagtgttttgactgcataccttggtaccgctccttccagtgttccagaatcggttcgttaagacaatggctaccctctgtatagctcttcgtaacgtccaccgcatcgttaatacctccgccgtttccggccgtacaacgaccgttttcaggtacccattaatttttttgttagttttacattataaaagaattgtcctttatcatgccacagtatggttgggttttaacatatttttcaactaatattggatacacttaattattaaacattgttctttttaacttattaagttataaggcttctttataacatgttaatctattaatatttatgtggttcttatttttttctgtctttttgatatattatttattttagtcggattttttaaatttatttttatgtatttggatcatttgtttcatgtgttatttttatttgatagttttttatttgaattattattttt

SEQ ID NO: 195110 - DNA, 458 bp, Gossypium hirsutum
ggaaaagatagctcagttggtcttcaaatccttaagggccaaacgtgggtgcctgttaagcctattccaaatgcactcgtcatcaacatcggtgacactctagaagtacttacaaatggaaaatacaagagtgtggagcatagagcagtaactcacaaagagagagaccgcctttcaatcgtcactttctatgctccaagctatgaaatagaacttggtccaatggcagaactggtggatgagaagaatccatgcagatacagaagttacaatcatggagagtacagtaaacattacgtaaccaacaagttgcaaggcaaaagaaccctggatttcgcaaagatccaatccaagacctcgaattaacaaggattccactttggtcttcccccccccccactagatcactattcttgtactatttaactgtaagaaatgagcttctgtcatggtggact

SEQ ID NO: 195111 - DNA, 628 bp, Gossypium hirsutum
  unsure (1)..(628): unsure at all n locations
tgcccgcttccatctctcttatttcttcccaagctggtcaggtaggaatttatggttacacagcatactctgccantaaatttgggctccggggattancaaaagcattgcagcaggaggttattgcggataatatccatgtctctgttgtataccctcctgataccgacactcctggttttgagaaagaaaatgaagttagaccagagctcacaaaattgctagcgggctcctctggttcaatgaaagctgatgaagctgccaagaaagctttagatggcatcaaatctggaagtttcacagccccttgcaactttgaggggcacatgctggctatagctacagctggtttatcccctgaaagatctttcttaatggcattcattgaggtggcttccgtcggtgtcttacgtcttgtaggtttatttttccaatggaactggtatcagaccatacaaaattggcatgcaaagaaaaataggacatagccctctggtgctcgagatggatcatcattacttcttctggcttctgttgcttacttctacgatatcatggatgcggatatttgactaacaaatttcatcagtcgatattcangaactagagctctcccgaactttttgtc

SEQ ID NO: 195112 - DNA, 986 bp, Gossypium hirsutum
  unsure (1)..(986): unsure at all n locations
ggaagctggagtgatctccaagccatctctcttcagtcttttaagctccgcttttgctaaaatcaaatcagtttctcccctaaatttactgaaattttatagcaagactccttatttctccgatgtcgatcttcgaatacaacgggagtgccctaatagccatggtaggcaagaactgcttcgccattgccagcgatcggagactcggagttcaactccaaactatcgccaccgatttccagaggatttataaagtccacgatcgcctcttcctcggtctctccggcctcgccaccgatgctcaaaccttgtatcaaaggcttgtctttcggcacaaactgtatcagctaagagaagaaagagacatgaaacctgagacttttgctaaccttgtttctgcgattctttacgagaaaaggtttggtccatacttctgccaacctgtaattgctggattaggagatgaagacaagcccttcatttgcaccatggattccatcggagccaaggagcttgcgaaagattttgttgtagctggcactgcctcggagtctctctatggtgcctgtgaatcaatgttcaaggagggcatggaacctgaggaattgtttgagacggtttcccaagctctcctttcatcagtagatcgcgactgtctgagtggttggggaggacatgtctatgttgtgacgcctacggaagtaaaggaaaggatcttgaagggaaggatggattgaatgccggcaactggttcattcgtaaactccttttaaactatttcagtcaatttgtgtctctagagtgttgctggatttgatgtactctttataaatttgatagaccaagttcgacattattgagagcaatgatggatttgtagtgcatttcgcgagttaaatttgtttttttgtattgtttctttaaagataagatgcatgggatttttagaaaagcaagttgcaactannnnnnnnnnnnnnnnnnnn

SEQ ID NO: 195113 - DNA, 557 bp, Gossypium hirsutum
tgcaattgttaaaaatctaacctatattgaggaggaggatttggttaacaatggatctcaatccttcgcagtatttggaggtaaccaaagctggctgcaaagagaagagaattttaatttgaagccaagtatgaaggtgcactgtggatttctgaaaaatggaggtgctgacatgaatcccgtggatatcgaatatgtcaagagatgtacgtttttggttgcatctgggatttttgatggatatgatgtacctcatcagccatcgaatataaatattcgttctaagaagctcttctggtttctgatgggtggtgaggaagtatctctcaaatttattaaagaaaatgtgaccgtcaggaaggataaagataaggggatgtgggtaggcttatggcgtcttatcccattgaagcatcaaccttatgatgagcccagaaggaatgggaaggtttccaagattttaacccacaggttattcccccaagcacagtacagcatttggattgatggtaaaatggagctgatagttgatccattgcttatttcttgaaagatac

SEQ ID NO: 195114 - DNA, 632 bp, Gossypium hirsutum
cccacgcgtccggcactctgttccagaacttcactcatgattacaattcggaggatgcttctggcttctttgtttcgttactttttggcctcggacctttgctgggtggcctcattcttgttgcatttgctgttgctttctgccttaaacatgcccttctcatgggtgctgcttctggcctttgccttcatccttggtgcctggcgaccattgcaactgcttgtattttctaaaatgggatttttcccacttgtgtcgctacttgccataggtgctgcatttgtccatgtttcaagctccagtattttgaagattatgtgcaacaaaagagcttcttcaaataacctaccatcagttacgggatttcctgtgagtgttctgacgcttcagtcagttttagcatgtggaacagtggctttctatgcactggctgagggccttgcgctgggagtggcggcaccaaaagcttacggacttggccggcacatggtcgtccctgtctcccttcatggaattcctcgtggtgcagcagtgtccagctgcatctttggagctactgaaagttggcatggatctctagcagcagctgctctcattgcgtttgttggtccaatatctgcaatcggagcaat

SEQ ID NO: 195115 - DNA, 759 bp, Gossypium hirsutum
  unsure (1)..(759): unsure at all n locations
ctcttatcatcacataaaaaaaaagggcttatggctgaagttgatcaaagctttgttgaacatgaggaggaacaggtacaagaacctcagaacttggagcagaatccgaacctggaacataacttgaacttagggaactacgtggacttggaacccaatgtgaacttggaacacaatataagcttggtccacaacgttaacttggagcagaacttgcatgaggaggaagatcaggaagaggacctggaggagcaaaatttgcagcaggaatcaaaacatcaaccaaaagtagaacatgaagacgaggcagtagttggagtggtgaaaagaagtggcctggatggcctggagagagtgtgtttcgaatgttggttcccgcgcaaaaggtcggtggtataatcggacgaaaaggggaattcataaaaaaaatagttgaggagacgagagcacgtatcaagatacttgatggtcctccagggacgacagaaagagctgtaatggtatctgccaaggctgggaatgaggtacgagatggagaggaacgacggtgccgatgagttgttgggtgaaatctttgatgatgaagagcctgcgttggaggagattaaggaagcgtttgatgttttcgacgataacaaagatgggtttatcgatgcgacggagctgcaaagggtgctcatttgcctangcgtgaaaaggaagatggtgaccgtggatgagtgtaagaagatgataacgatggctgatacggatggagat

SEQ ID NO: 195116 - DNA, 630 bp, Gossypium hirsutum
cagaacatcaaccaaaagtagaacatgaagacgaggcagtagttggaggtggtgaaaagaagtggcctggatggcctggagagagtgtgtttcgaatgttggttcccgcgcaaaaggtcggtagtataatcggacgaaaaggggaattcataaaaaaaatagttgaggagacgagagcacgtattaagatacttgatggtcctccagggacgacagaaagagctgtaatggtatctgccaaggaggagcctgattcttctcttccgcccgccatggatggacttttgagggtccataaacgcattgttgatggtttggagggtgatccatcgcatacacctacggctgtgggaaccaaggtttcaactaggctgctagtccctgcctcacaagccggaagtttgattggaaaacagggagcaactgtcaaatccattcaggaatcttctaattgtattgtcagagttctgggagcagattctgcagaagaccttcccgtctttgctcttcaagatgatagggttgttgaagttgttgcaaaagcagctggtgtgcacaaagcaatggagcttattgcaactcatctcaagaaattcttattggaccgcagtataatttccgttattttga

SEQ ID NO: 195117 - DNA, 419 bp, Gossypium hirsutum
acgattttgataaaatttcaacagccactatacgctgtgaagactaaaatagtgcatttatattataatattgtgttaatgtcaattttgtaggtaggtttgtgtaaaacagtcatgtctaacaatattaagttctgcctaaagcctgaaactgggaaactgtttttaagttgtattattagttgcaaagagatcaatagcagtgatagacccagcgctagaagtggcaaaatctacaaggagaaatatatcggcattcgattagtaataatcggcttgggtttaatctatagatcaagtcgagtgtggccaatctgcccttaaggtacctttggatttcatctcacagtttccagaactgggctggacagggatccggcttgggtattgtcttgagtatgtggttggatcagttcgat

SEQ ID NO: 195118 - DNA, 461 bp, Gossypium hirsutum
cccacgcgtccggtcgctcttagccttttactcttttactttactccttggagtactcgatctcgacaatataacccccccccccccaaccctttttttttcctttaattcaaagccacaaagccaactcaaaacccacaaaagccaaagcctaggtacacagaaactacaaaaagaaatagagaaagaaggtatggaagtaggggtgaagatggggatgaaaggaggaggagatgaagtgggaggtaaggagaaggagaaaatggggtatgaagagacagagctgaggctagggttgcctggtgatggtgaggttgtaaggaagagagacttctcccacactgttgatttgaagcttaaccttatttccacctctccaactgatgacaaggacaaaaatattgtcccttctcaccttgatcctgctaagcctgcacctgccaaggctcaagttgtgggat

SEQ ID NO: 195119 - DNA, 380 bp, Gossypium hirsutum
tgggatgtgaatgtgctgttatgatgctctactctgtattgcatcttagagttccagcaattttgttgtcaaaatagtgatatgtataacacatatatattagtaacttttgaacgttacgttcatatggaagacgccatttttgtagatactcttgaaaagatatagatcatggttaaggtgtttcagtggtccaaaatacgatctggcaatggctcatctctttctttggtgtggaatgagccctttgctgccttattatcagccatggatttctcttggaatattatatgaataagatggttgaaagaaagtctaaattagttatttaaaatgatactaattttaatttcattaaataaattttcagtctttgattt

SEQ ID NO: 195120 - DNA, 435 bp, Gossypium hirsutum
aggtcttaaagagcctccctgatgcagagaaggatccggcagataaacaaagtgaaaccatttcatctcaatgattttcatagtaagtttgatatcgagcttgctgttagtcggttttaagtcaaggcagtttgtttaggccaagaaacaaagaggtaaagtattttacctagttgggaattgcatgtgtttgtttttggccactttcgaattccttgtttagatgcaattgttgtatatgatttaatgttgcagcaaagatgatctgcatctctatttatgaacaaatattgtattttgttaattcaacatcatctaatttgtacttgtcatgcgacttcgaaccttatttcaattcgtttttgtctatcttaaacccaaaagaaaaagtattataataaatataaaaattgaaaaagagatattaaaaaataa

SEQ ID NO: 195121 - DNA, 558 bp, Gossypium hirsutum
cccaattttagtggcaacagatgtggccgctcgtggtcttgatataccccatgtagctcacgtggtcaactttgatctccctaatgacattgatgattacgtccatcggattggaaggacagggcgtgccggtaaaacaggattggcaactgctttctttaacgaaggcaatttgtcaatggcaaggccgctagctgagctaatgcaagaagcaaatcaagaggtacctgcatggctcacccgatatgcatcccgggctccttacggtggtaataaaaaccgacgatatggaggaggaggagggcgttttggtgggcgtgatttcagaagggagggttcagtcggtaggaacctagatcactacggcggaggtaatagtggcactgcatacggagttcccgggaattatggtggaggatatgctccggggatgacaagtgcttgggattagatcccactttatactggattatatattttgtatttcgctgagtatatatatttgtcgtcagattttcaaggatcattctctgtttttcagtatttagcatttgcatc

SEQ ID NO: 195122 - DNA, 576 bp, Gossypium hirsutum
cccacgcgtccggtcctacgggtattattgctcaaatcaatcatgctattggagcatctggggttgtaagtcaagaatgcaaggctgtactttctgaatacggagagaagatacttgatatgctattagcgaaggatgaaccgaagaaaatctgctcacaaattggtctatgcttatttgatggaactcaaggtgtaagtatggggattgaaagcattgtgaatgagaatgctggaaaagcctctggcagtttacgcgatgctatgtgttctacatgtgagatggcagttatatggatgcaaaaccagcttaagcagaaccagacagaggaccatataattgactatgtcaatgagctctgtgatcgattgcctagtccaatgggagaatcaagtattgactgtaaaagtctatcttctatgcccagcgtctctttcacaattgctggaaagttatttgagctccgtcctgagcagtatgtcatgaaagtgggcgagggagatggggctcagggcattagtggattcactgctcttgatgttccacctcctctcggacctctctggattctggttg

SEQ ID NO: 195123 - DNA, 653 bp, Gossypium hirsutum
cgaggatctgcggtgggattcaaattggatagcctccttaaattatctgatacgcgtgcaggaaacaacaaaatgactttaatgcattatctatgcaagcttctatcggagaaaatgccagagttgctggattttgataaagatcttgttcatttagaagctgcttctaagattcaattgaaaaatcttgctgaagaaatgcaagctgtgagtaagggccttgaaaaggttgagcaagaactctccgcttcagataatgatggtgatatctctttgggctttcagaagctgaagctgaagtgaggtcacttatctccttgtattctgaagtgggtagaagtgcggattcattatcccaatacttcggagaggatcctggacgatgtccttttgaacaagtgactcacatattggttgttttcgttaagatgtttaaaaagtcgcgagaggagaacgagaagctggctgatgctgagaaaaagaaattggagaaggaagccatcaaagaacgagcagcagcaaatgtaactgttaagaaggatgggaccgatacaaatgagccgaatcttacttctcatatcctgaattctcaccttctgaaacacgctccctaatagtaatgaagcttttgcaatcaagcaacaatggaagct

SEQ ID NO: 195124 - DNA, 990 bp, Gossypium hirsutum
aacttcacacacattaagaaagaataacgacagcaattgtaagaacgtcttctccttcaccattttaaaaattttcagcttttcatatttgcttttccaaaaagaaatcatgagccagcctccgaccgatcatgaaaaggtctcggaaaccaaacagccaacgtcgtccacggagtcaacccaaccggcgactctctcttctgattacgctccctacccgaaattagaccccaaggacgtcgctcctccaccggaaaattggaccaccgtttccatggcttcgcaatcggatcccagtccggaccccgtcccgatctccagcagcgctgctaccaccatgcctgctgagtccaacccgtacgtttctccggcgccagttcaatcttcttccgtcaagaataagatggaatcagcgaaagacgtgttggggaaatggggaaagaaagcggcggacgacactaataaggcgaaagagatagctgagaacatgtggcaacacttgaaaactgggccgagttttgctgacgctgctgtaggaagaattgctcagacaaccaaagttattgctgatggcggtgatgacaagatctttcggacaacatttgagactgttcctgaggatctgcttctgaagacatatgcttgctacttgtccacctccgctggtcctgttattggagttttatatatgtcaacccataagcttggtttttgcagagacagtcctctggcttatcaagttggtgatcagactcaatatagctattataaggtggttatcccattacaccagctgagggcagtgaatccatcagctagcaaagccaacccagctgagaaatacatccagattatatcggttgacaaccatgaattctggttcatggggttcgtacactacgacagcgcagttaaaaatctccaaggagcattgcagtcccgtgggacatggttgtagagttttgataacatcacatcatgagccacttc

SEQ ID NO: 195125 - DNA, 404 bp, Gossypium hirsutum
gagaatcgccctccatttccacttccttcaacccaaggtgaagtccgagttatagtgcttggagaccctccaccgcttctgctgcaaaggcagatgcggcgtcaaagtttattttgagcctcgttccctctggagcaacacatcttacagaatagatccgcttttcagtagggcactctcggaacaagtgttccctcgtttccgcctcatgttggcaccagtgacaagtagcagaaccaattaatcttctgtagttaagattactgaaagtacgcaaaaatttttgccaaaagcgtcatattgtaatcttacttttagagggaagatctagattccacaactttttgtaaaaatgtttataattctcctgcacatgaatctggtcatcatgtacaagaagttta

SEQ ID NO: 195126 - DNA, 783 bp, Gossypium hirsutum
  unsure (1)..(783): unsure at all n locations
atatatctgcaacggtattggttggtttttgttattgcttcgaagaatatgacccaaggacagtctttgcngagaaatttgtcaagaaggcgctcgtttaggtgtgggattgatagggatgatagaggttggacaatgctccacatcggagcccgtaaaggtgacctcattcaggtcaagcaactgctcaacgaaggtgtggatgtaaatgtggctgcatggggccccaaatcccaaggtgtcaccccactccatcttgctgctgagggtggccaccttgaagttatggatgaactgcttgaacgtggtgctaatattgatgcaagaactaaaggtgcttgtgggtggacgccacttcacacagcagctaaagaacgaaagagggaagcagtgaagttcctgatagagaatggggcatttttgccagatgacatcaatgattgtagatttaatccaccgctccattactgccctggccttgaatgggcatatgaggagatgaagcgtcttcaaagagatggctcttcttcagcaggggagacatcttatagctctgaaaattgatattcaatcatatcaaaccgctcttgtttgttcctcctcccgtgtttggtgcttcaatttaatctctttaataaacactagtgggcttgtgacgtgcgttgctatatattttattttgaagaatgttgtttgcatatgaatatgatggcccgacgcctangaataaattantactctcatctcatcacatcacatcacatcacatgcatgtgatatgac

SEQ ID NO: 195127 - DNA, 698 bp, Gossypium hirsutum
tgtgccaccgtcagcgtactatcattcgggtggttggaggctaaatcctaatttatacgaggaaggcaaggtgtgccttagccttctaaacacatggacaggcaagggaaacgaagtttgggatccatcgtcttcaagcatccttcaagtcctagtttcactgcaagggttagtgctaaatgctaagccatatttcaacgaagctgggtatgataagcacgttgggacagccgaaggagagaaaaattcgttggcgtacaacgagaatactttcttactcaactgcaagtcaatgatgtatctaatgcggaagcccccgaaggactttgaacaactcatcaaagagcatttcagacaacgcgggtattacatacttaaagcctgtgatgcatacatgaaaggctacttaatcggttctctaactaaagacgcctctattagtgacacgaacaatgcagactccaattcagttggtttcaagttgatgttaggcaagattgtgccgaagctgttatcagcacttaatgaaatcggagctgattgtcaagaattcaagcatctccagcagtcgtaatgtcgggtttctaaagacattaaaaaaactcaatatcccccatcaaagcaaaacaaaggtcagtgctggaattttcaaatgtaaatatacaacttcggtgaaacattcttctttcctgtttttt

SEQ ID NO: 195128 - DNA, 491 bp, Gossypium hirsutum
caatttctcgccttttcttcccaagcaaagcacatattttccaacaggtaaacaaaattaattattcaataaataaaaaccctaagtaattttggtggaaatgtcgggtaaaggagcgaaagggttgattacggctggcaaatccgccaaagacaaagataaggacaagaagaaacccatctctcgctcatctcgtgctggtctccagttcccggtgggtcgtgtccaccgtctgttgaagacaagagttaatgcacatggaagggttggagcaacagctgctgtatatactgctgccatactggagtacctgactgcagaggtgctagaactggcaggtaacgcaagcaaggatctgaaggttaagcgtataacgcctaggcatttgcagcttgcaattcggggtgacgaagaacttgataccttgatcaagggaaccatagcagggggtggcgttatcccgcacattcacaagtcgcttatcaacaaat

SEQ ID NO: 195129 - DNA, 690 bp, Gossypium hirsutum
ctcatttgattcaatccaagttctgggtttagtttctttaacttcaaaatccattacccatattggatttattagggtcttttgttttgtttttataaaacaaatcaaatatcttgatgctcaacctttttgtgttaatgtttgagattcatgtttccaattctcagtgaaatcttcttttctgggtttatgataaattccgcattcatacgcaggacccatcttgttcaatctttctctgttgttttcctctactggttatattacgtttcataaagaaataatcatctttttttaacttatttatctttactactaaggttttttttttttttaattttatttgggtcctgctattatatattataaacaaaactcctataatggctacatcctcgggttcatcagcaacacaaatcaactcaggctcagaagaagcattaatggacgaaaggaaaaggaaacgaatgatatcgaacagggaatcagcaaggagatcaaggatgaggaaacaaaagcatttagatgatctaatgactcagttgactcagttgcagaaacaaaaccatgagatcatcacatacataaacttcaccacacaacacctcttgaatgttgagtcagagaactcggtgcttagagctcaactcaatgaactcactcataggttacagtccttgaatgaaatca

SEQ ID NO: 195130 - DNA, 470 bp, Gossypium hirsutum
cccacgcgtccgtgctgcgatgacatgcagagctgttgtataggtctctttttcccctgctatttgtttggaaagaatgcagaatttttgggttcgggtactctagtcggatcctgcatcacccatttcattctttgggcccttgtcaacactctctgctgcgtcttaactcaaggcttctatttggctttacctggatttggatgctttatctcttgttatccttgtggctatcggagggcacttcgctccagatacaatttgcaggaagcaccttgtggggactttgctactcactttttcttgccatctttgtgccatttgtcaagagtacagggagattcgtgaaagggcagaggaccctaaaccccctgatcttaatctggctgtcgtaactgcaccagacgtccagacaatggaatcatcacatctctagtaatgaggtgctattactttggaattttgtttct

SEQ ID NO: 195131 - DNA, 657 bp, Gossypium hirsutum
  unsure (1)..(657): unsure at all n locations
gatggaattcacctacagaactccaatgatgtgctaattcatagcagtgatctcgcctgtggagatgactgtgtttccatacaaacaggatgctcaaatgtatacatacacaatgtgaactgtggaccagggcatggaataagcattggaagcttaggaagggataatactaaagcctgtgtctcaaacatcactgtcagggatatcgttatgcataacacaatgaatggtgtcagaattaagacatggcagggtggatcgggatctgttcagggggttctgttctctaacattcaagtttccgaggtccaacttccaattgtgatcgatcagttctactgcgacaaaaggaaatgttcgaacgaaacagctgcagtcgctctatcaggaatcacctatgaaaaaataagaggaacatacacagtaaaacctgtccacttcgcctgcagcgatagccttccatgtataggtgtaaccttatctgccattgaactaaaaccagtgcaggaacattactacctctacgatccattctgttggcanactttcggagagttgaccacccctcctgttcccccaatcagttgtttacaaattgggaagccaacaaataacagagtccaatctgatcatgatgtgtgctgagcattagtgtag

SEQ ID NO: 195132 - DNA, 486 bp, Gossypium hirsutum
cggacgcgtgggcggacgcgtgggcggacgcgtgggcggacgcgtggggaaaaaaaaaaaaaaagggaaagcaagtttttatggctccccaagacaaaaatgcgagcaaaaccttgaagaaagctaacggtactggaagtacgagcagccaagaggtgcatttcaggggagtaaggaagaggccatggggtaggtacgctgccgaaatcagagatcccggcaagaaaagccgtgtttggcttggtactttcgatacggctgaggaagctgccagagcctacgacgcggcggcgcgtgagtttcgtggacctaaggctaagaccaacttccctttaccggatgaaaccaactgttacaagggccagaaccagcagagccctagccaaagcagcacggtggaggaatctggaagcccaacggtggagcgtggagtcaacactgtgaccggggcagtagggagattccctttcgcgtgccaccagcagc

SEQ ID NO: 195133 - DNA, 1363 bp, Gossypium hirsutum
gttttatttgcaggaaattggagattgaactgccaggagggagaacacacttcggggaatcatgtggtttgcctttaagcacttattttagtgcagtgaagctgctatggttgatggagaacaaggaagaggttagagctgctattaaaaaaggggatgccttgtttggaactatagacacatggttaatctggaacttaactggcggtgtaaatggtgggatacatgtcactgatgtctctaatgcatcacggacgatgctcatgaatctccaaactctcgattgggataaagcgacgttgaaaactcttggaataccagctgaaattctgccaaaaattgtaagtaatgctgaggtcattggtaaaatcgccaaagggtggcctctttttggtgtcccgattgcaggatgtcttggtgatcaacatgctgcaatggttggtcaagcttgccgtaggggtgaggccaaatgcacttatggaactggtgcctttatcctgctcaacacgggtactgcacccattaagtcaacccacggcctcctaaccacgcttgcattcaagcttggtccaaaagcacagacaaactatgctttagagggctctattgctattgctggagctgcagttcagtggctaagagacagtcttgggataatttcctctgcaagtgagatagaaagcctggcatcaaaggttgattgcacaggtggggtttactttgttcctgcctttaatggtttgttcgctccatggtggcgagatgatgctcgtggaatttgcattggaatcacaaggtttacaagcaagtctcacattgctcgtgcggttcttgaaagcatgtgttttcaagttaaagatgtattggattcaatgcacaaagatgcaggcgagaaaggtgaggtcaagaatgaaaagggagagtttttgcttagggtggatgggggtgccactgtcaacaacctcctaatgcaaattcaggcggacttgctgggaagttctgtggtcagaccagctgacatagaaacaaccgctctcggagctgcatatgctgctggaatggctgtaggagtgtggaaagaagaggagctttttgctttgggacaaaatatcaaaactgcatccatattctccccaaaatcaagtgtagaatggaggaagaagaaggtggattcttggtgcaaagctgttgaaagaacgtttggcttggctgatcttgaaatgtgatacaacagttattttcggtttcgacttcctggtgaccattgtctcggcttttgtagatgttttattttatttttgaatttacagacaaaacccatgcttatattcaactgaataaaatgctgactgtattactctgg

SEQ ID NO: 195134 - DNA, 440 bp, Gossypium hirsutum
cccacgcgtccgcaccaagggaacgttgtctgtcccattcctggaactaccaagatcgaaggcttcaatcagaacattggagctttgtccgtgaaattaacacccgaagagatggcagagctagaatccattgcttcagcaggttcagtgaagggagaccgatatggtggcactgtcgcaacctactatgaatcggatactcctcccttgtcttcatggaaaccttaaatcagagcatacttgttcaaatcaatacaatcttcaaggtgagttatggacctaatgtaaggcccctactttgtttttagaataaattttctgtgagatttaataataaaacggcttttggtgataggttgtgcaagcttggttgtagctatatctacgtttgtaatatgttgagaatgtcgattccaggttaataaagcaaaagtttctat

SEQ ID NO: 195135 - DNA, 408 bp, Gossypium hirsutum
gttggttcaaaagtctactggggaggagattccagagtaaaaattcttgatgccattgaagatctaaagcttgattctttggttatgggaagccgcgggcttggaactgttcgaaggattatattggggagtgtgagcaactatgttgtgacgcatgctacttgccctgttaccatcgtcaaggaacaatcaagctccagcaagcactgagtagtttacataatattttctagtttgatttcccaaacaataatttgatggacgagtgtatgttgcttgatcatgttttaccaagtagcttacgcagttttacgtttgtttactgaatcttaaagatatatggtactttgtgagttaatgcactgttatggggacgattataataatgataataatgttgctttgtcg

SEQ ID NO: 195136 - DNA, 661 bp, Gossypium hirsutum
gagaggacacctgctgaaatctccttggcagccaattatgaaggtgatatccaagactccgataacccccaggataatatgtttggtgctaccaatgccattggccgagacagccatggaactcatacaagtaccactcgcagtgctatcagcaagcaccttgatgtagaagagttagaaatgctcttggaagcatactttgttcaaattgacggtacactgaacaagctatccacgctgagggaatatgttgatgacacagaggactacattaatataatgctcgatgacaaacagaaccatctccttcaaatgggagtcatgctaacaacggcaacccttgtcatcagtgcttttatcgtagttgcaggtatctttggcatgaacatccatatcgagctattcgatgaagataaagcagggatgccagagtttctgtggacaattggaggtggtgctgccggctcgatattcctttatgtgatagctatcgcgtggtgtaagtacaagcggttattagagtaagtcttccgagaccgtactgtatatcgcatgaaaccgtatgaacaaaataacatgacattgaaacatctattgtataaacttttccggaatgttggacacgataagcttatattttactgcctctatagtcgactga

SEQ ID NO: 195137 - DNA, 437 bp, Gossypium hirsutum
cgcccccaaacccttttgcaccccccccacctcctccagacccttttgcaccaccaccaccaccgcacttatatggtgcacccccaccacctccgccttactatgctgcacctcctcctcccgcaccccctcatcaccaccatccaccgggtccaccgccaccgcctcacgctttttcaccacctcctggacctcctccaccaccttattttgatccatataggccaccaccgccttggaatcgccctcctccaccatactagctagctatgaataattgccttgggagttttatatttcagcagtgtacgagctttatctccccatgacgcaattagaggtcatgtaggctttctttacccttcttcctttcccccgctccggtctggaattttccttggttttaatagccttaagaaacttatttctaattatat

SEQ ID NO: 195138 - DNA, 397 bp, Gossypium hirsutum
aaagaaagaaaactaaattctcttagagctctggcctgtggccgtcctagctcatcccagagcacgcaccgccttcggccccacatgcctcacgcgccaccgtctgggtcttgaaacccggcggttagggctttcaaaaccctatcctcttcgcgatgaatcgaagggtatcccgacgatctcggcgataacggaggtatgaggcctgagattacggtgcaccgacagtggagactctcggagtaccccgacgtttctggacaactcattgattaaggccagctgatgtgacgtgggggacaggggcattgatggctcttgctttacgagttggaacgggcctgcatagcttacggcgctaaaagatgcagaaaccctaaggtttctgacctggggt

SEQ ID NO: 195139 - DNA, 563 bp, Gossypium hirsutum
cccacgcgtccggtgttctgggaccttggttctaaaacgaaaagaatacaagatctgtccaatcaatgggttcaatgtatgctgctgttcttttccttggtatccaaaacgcttcttctgtgcaacctgttgtggcggtcgaaaggacagtcttttatagagaaagagctgctggaatgtactctgcaatgccatatgccattgcacaggtgttaatagagataccttatatttttgttcaagcttctgtgtatggccttatagtctatgctatgatcggattcgaatggacggttgctaagttcttctggtatctcttcttcatgttcttcaccttactttacttcaccttctacggcatgatggctgttgctgtcacaccaaaccattacattgcagccatagtttccgcggcattctacggagtatggaatctcttttcaggattcatcatcccacgacctagtatgccaatatggtggaggtggtactactggatttgtcctgtttcttggaccttgtatggaatgtgtgttcacagtttggagatataacacacatgc

SEQ ID NO: 195140 - DNA, 681 bp, Gossypium hirsutum
catgcctacagaaactcaaggaacgagaagtcgatctggtgggatgagtgtatctttggcaagtgctgatggccgtgttgtaggaggaggagttgctgggcttctttatagctgcctgccctgtacaagttgttgtcggcagctttttacctggcaaccagcatgatcaaaaacccaaaaagcagaagatcgagtccataccagctactgttgcaccaaacccgagtattgccgctgcaccagcttcaaatgctgagaaagaggatggcatagatgttgtttcgccgcaacaaaattcgaatgccctgaaaccaagcctcaccggtgctacctttcggagagaaaattgggcggccaccatgcaggagccaaggaattcagcaacggatatcaacatttcgttgccagcaggttaatcttataaaatcagactcggaggctgactagactaaaatccctgatgtttttcgttcatcaaagagtacggagtgttatgtgttgttgaatattaatgtaggatgatgaggtaggattaatatccagctaggttttaatgtctcaggcaaagacaatcttttcttctttttttagcctgattgatgagagttgccctagattttaaaagatctcccaattatgtagaagtgacatttgtatcatttctattcatatgggttcatt

SEQ ID NO: 195141 - DNA, 398 bp, Gossypium hirsutum
cgatgcaatacaaacggatggttcggagtcgagttggtcggagcacgtgccgtcaccggaaatcacgtgggagaaagaagtgaaaagtgaagggagatggaatgagcttgatttcgggttggatttcatagatgaagacccgtttgccagtcaagttgattaccaaatggagcagctgtcaccgttgcaagacatgttcatgtatctacccaagacattttaagccaacgtagaccaaaaatcctacaattgtggggtccaatccaaattaaaaacatttttaatttagatccatgcacacacacattgccaaacgaacaatgggtcaaattcaaattcaatatgagggggtgggtgacaaacaattggatcgctcgtgggtgtaatataatatgagc

SEQ ID NO: 195142 - DNA, 622 bp, Gossypium hirsutum
gggaagccttagtaactagtactaggagagaaacaaagagaaaaaaaccagatgtccaccacctttggaaccatgaatgaaactctgtgtacctcttcttcttctgagtggaagcaactgtatgaacaaaccattgatgcttgtttcggattctccgatgctactgccgtcaccgtcaccacgaacaacttaacctccaacacttcatatgcagccgccgttgaccactacttggcccccaaggcctgtatatcaaagtctattcggagacgatctagagcttctaagaggacacccgtcaccctcctcaatgccgacgccaaaaacttccgatccttggggcaacaattcacgggctgtcgccgtcgtagcacctccatttcatttgccaaaaacccaagaggtcccggcaatataaattttgcccatgttaatccaaagaacgacgaccaccaccaccataattacactagtcattcagatcatgcttcaacattaccgcagcctggcactaatgattgttggaagtctcaactgctgcaaccgcaagaaaagcatgaacatcatcatcatcatcaacaacatgatgatgagtaccaacagcgagtgtcaaatgaagaac

SEQ ID NO: 195143 - DNA, 551 bp, Gossypium hirsutum
gagatattgagagagaaagaggggttacagttaaacccaaaaagaagcaaaaggaagaatggttggtgatggaaagttgttcactttggctcaagtctctgagcacaacacccccaaagattgttggctcatcatcaacggcaaggtttacgatgtggcaaaatttttggaagaccatcctggtggcgacgaagtgttattatcagcaacagggaaggatgccacagatgattttgaggatgttggacacagtgatagtgcacgagacatgatggatcaatactatgtcggagagatcgacatctcaactatccccaagaagacgacatataaacccccgaaccagccacactataatcaagacaagacatccgagttcatcatcaagctccttcagttcttagttccccttgccatcttgtgtttagcccgtggtattcatcactacaccaaatcgtcttaaaattaatcgagattgtgttacaatgacggaaaaaccttgcgtttcatttatgctttattttctatgaaaaggctcaaataatcttaag

SEQ ID NO: 195144 - DNA, 554 bp, Gossypium hirsutum
cccacgcgttctataatactatcaagtgaaacagatcggatttgaagagacgcccaaatattctaaaggatatcgcaggtccatagaagatgatccgtgtcttccggtcctttcttgcaaagagggcatagaacatcaacctttaaggtcctttgtagctaattactgtaatggagcagaaaattattaaccaatctccatagatgtattttggttttttctggaatatgtaaagtccataaggacttgtagaaatccttatgagcctcaaaattaggcgtggtgtaattattgtcctgtaaatactttgtaacaagggcccgataaccactcccaacagagtaatctgcagaaccctcatatttccagaccaatatatcctccggactagctagaaagtgggatgggaagaatgcggcttacctactcctcatcaacaagtattaaaaatcaaatccctgttccagccaaggttcattccaaatattgacactataactattaccaatttgccacaaaactccgttttcaataaaatctcgagccccttccca

SEQ ID NO: 195145 - DNA, 421 bp, Gossypium hirsutum
catcgctcatcactctttgaggaaccaaacaagctatttattgaaagtacgctggcgtccgcccaaacatgagccgacatcccatagtgaaatgggctcagagattggatgacgtcttcataactattgagcttcctgatgctcaggacgtgaagcttaaactagatcccgaaggaaaattcttcttctctgccaaaagtggagcggacaaaatcccctatgaagttgatttggatctgcatgacaaagttgacgttgatggaagcaaggctagtgttggaaatagaaatatctgttaccttgtgaaaaaggccgagagcaagtggtggagcagattactgaagcaggaagggagacctcctgtgttcttgaaagttgattgggatcgatgggttgatgaagatgaggacgatgtggacac

SEQ ID NO: 195146 - DNA, 647 bp, Gossypium hirsutum
gcaggtaataggaggactgccatgagcattaccagaaaagtgaaaggagttggctgggatgtttcggctattggaaacgctgtctggggtggtgccaaattggctgatattcttgaacttattggggttccgaagttgacaagttgcactcagagtggaggaaaacacattgaatttgtgagcgtgataagtgtgaggaggaaaacggaggtccatacaaggcatcgattccacttagtcaggccacaaaccctgaagcagatgttttacttgcttatgagatgaatggagaagtaagcaacttctctcttatgatcatattctttcccacactcgggaaaaccagaactcaaactgaactcaacaagtatgctaaaatggttgcatcttttataaaaatataaaaaatgaactattatcttgctatctttgccaaagcctctcaacagggatcatggttacccgttgagagtaattgtaccaggtgttataggtgctcgttccgtcaagtgggctggattctatcaatataaatagcagaagaatgccagggatttttcatgcaaaaggactacaagatgcttccaccatcggtggattggggtatcatcaattggaataccatgaagccacaaatggattttcca

SEQ ID NO: 195147 - DNA, 735 bp, Gossypium hirsutum
ttcctctcgtccgcccacgcgtccgggcggcttctgcttctatttactattttctcactctcctactcctttgtgccatcccttttaccttctccgagctcgttaaagagcagcctctggtgttgaagtaccacaatgggccactcttgaaggggaagatcaccgttaatctcatctggtacgggaagttctccccaacccagcgctccataatcgtcgatttcatcaactctttgagctctgccgtcaaacccaagattccgtcggcgtcgttttggtggaaaacgacggagaaatacaagtccggttcctccactttggtcgtgggcaaacaaatcctcctcgaaaattacccgctcggtaaaatccttaagaacccacacttgccagcgttggccgggaaattcaacggcgtaggtacggttagcgttatcctcacggccaaagacgtcgccgtcgatgggttctgcatgaggtgcgggactcacgggtcgaaccgggttggtctcgggttcgaggtacttttatctgggttggaaactcggagactcaatgtcctggtcaatgcgcctggccatttcaccagctatttatggtccccaaactccaccgttggtggctcccaatggagacgttgggattgacggaatgatcatcaccttggccaccctctttggcttacactgttaccaacccgtttaacaacggtgatttcaggggcccgttgacgcgcct

SEQ ID NO: 195148 - DNA, 541 bp, Gossypium hirsutum
ccggaccggaagggccggctcgagccacgcgtacgccacgcgtccggcttttgatattctttaattattctttccttctttctttctcttttccgcccattctctgcattcattctgcttctttcctgactttatttctgcatttttgttgggttgccatgtccaggtgactcatctccatccccgatctatttccgcttccgtaatatccagggagcaaggagtccccctcaataatcacctgctttaagcccagttcgtgacccacttggactgcctgaaggcatgcgatggcttcagccgcaaaactagaacaaatgttgcatcgaaatttattttgtaaaaaccctctttcagaggccaccatctctcagattcaaggctcaagccgtccatatagcccataaagcgcagatgaaagttctacttgcttccgttgtgctgttcagtagggtccagtcacgaaaaacatgctcccgggtcttcagcccttgcttgtacctctgacaggaagcctcaggtattaaacgcttagcttctt

SEQ ID NO: 195149 - DNA, 437 bp, Gossypium hirsutum
gatctaagatcgcggagcggacggcgcgtaatctgctaggttttctttaaagccctagctaccaccacggcgccgccgtcaaaactccgccgccgactccgattcaagtggaatcggcgcaactactaatcgtgggtgaagcgacgtgggtgatgggcggttgctgcaacgggaggacaacgtgcggcgccaatctgctgttacccactgcttaggggtaggctgggatttgggttagtgacttgggcttggaatgggtttgggctttaggcttagttgggcccgggctaaatttaggtcttacacataaaattatgaaaatgtgaaaaatctatgtacgtaaaaatatatgtaaatatgtatgtgtacatttatgtatatgtataaagctatgaaatatataaaatatataggtaggtatatgtatatgtgtttat

SEQ ID NO: 195150 - DNA, 430 bp, Gossypium hirsutum
ctgacgcgtgggttggtagagcacctcgtttacgacgtgcgccaatgtttttcagggaagtctatcatgcaatcaaaagaattgatctttttgagaaatcgatgtcttactccattactttgaaggaacacaacaagagaacaattgcctgtcaaatgggtcggtccgattcgggtgccgtttaggcaagatccgaatcgaacccatcattgatttgagatattgattgggtgaataccccggctattcaatgctaggcataatgagtataaggacctcaaaaatgctcttttcgtcctatgaatcttaagggggttgaagttcatgtgtggtttttttattaggagggggagactccctttaacttaggttggtctaagccagaagcagacctacgttaagatatcctctcccttttttaaacacttgg

SEQ ID NO: 195151 - DNA, 776 bp, Gossypium hirsutum
tcgtacttgtggagcttcttgtgtgcattgggtgaagcgcaatatttgaatcggactttggttatggatctgaaactttgtttatcttcaatttatacttcctcaaatcaggatgaggaagggaaggatttcaggttttactttgattttgagcatctgaaggaggccgcatcagttttggatcacgagcagttttggcaagactggaataaatggcaaaagaaagatggcttgagtcttcatcttgttgaggattttagggtgacgccaatgaagctttctgaggtaaaggattctttgattatgagaaagtttggattggtggagcctgataattactggtacagggtttgtgaaggagagactgagtctgttgttcaaaggccatggcatctggtatggaaatcaaggaggttgatggatatagtgtcggcaattgcgtcaaagttgaactgggattatgactctgttcacattgtgagaggggagaaggcgaggaacagggacctgtggcctaatcttgcccaagatacctcacctgatgcccttatctcaaccttgcagaataagattgaagatgggaggaatgtttatattgcaacaaatgaacctgatacatccttctttgatcctcttaaagacaaatattcaactcactttcttgatgaatataaggatctttgggatgagaacagtgagtggtattcagaaacaaaaaaccttaacaacggagtaccagttgaatttgacggttacatgaaggtctctgtcgatac

SEQ ID NO: 195152 - DNA, 371 bp, Gossypium hirsutum
gcttctgccgcgaacggagatgcaacgttgtcatgaaggatcgattttgttgctatggttctgcctccctcgtctttaacaactaagcctgacgctgatcggaagtttagtgagtcaaaagccgcgtcgaaatatatagccacgttcgccctttgtacttgctgtttgggtctcgcatttgcttccaagataagtgccttgttcttgataccgtccagttctgaaatgtaactattaacttgtttggagatatcgtgactggtgcttgacttgccttcatatattagcttgttcctatttgcccagatgagccaaagtccacaacaaaaaagtctgcattgctcattcgtcccttgattgaaaacccaaaa

SEQ ID NO: 195153 - DNA, 574 bp, Gossypium hirsutum
cttcatcagaagttgccgccaaggactcccttacgggagaacatgttcaaaatgatcaggctcaagagctcctaggaactgaaaagacacaggctgaccaggctgaggcttcgattattgaaccaaactcctcagaagctcagacatctgtaccgcaatctggcattactgacgatgaagagcagcttgctcagaggcctgaggttgaccttgttgaggcctgcaatgaggaatctaatcctgcagaaggaccatcctcggcacaagccatctctgatgaatctaccaggcctgagaatgatccagggcttacacgtgcatcctcactgcaatctgaaaagcctgaggttcatcaggttgagacctgcaatatggaatcgaatcccacaggaccatcctcatcacaagtcatctctaatgaatctaccaatccagagcttacacaaaacgagctgcaatctgaagatcccgccgaggcttctcagtcacccaagactgaaactgttgatgtctttgatatggacatacaccttaaagaaacacaagatccttcacctgaactggaagatgatgc

SEQ ID NO: 195154 - DNA, 718 bp, Gossypium hirsutum
  unsure (1)..(718): unsure at all n locations
ataccttctggccgatccgtattctttacctcgacttttctgcatctccttgatccccgaccagcagtcccgcttgaaaatggcagcaaaatatattattggttctgttgtggcatcatttgctgttgcttatgtaattgataaactctgttgctgatgagaagatttttggagggactacaccccacactgtttccaacaaggaatggtgggaagaaactgacaagaaatttcaggcatggccacgcactgccggtccacctgtggtgatgaatcccatcagccgccagaatttcattgttaagtcgggttctgaatgacgtaatatttgcttgtattttagtcgaagtgtcagtttgattttacattcgctgtgaagaaattgttgtattagacttgggttaatccggctttgcatttaagagtagctcttgggtcctaaatatgtctgtactctttctaaaggtcaaaattcggtcagatcgaccagatgatgtcaatcgtactagatctcaataaacatctgcaaagcagtaccaaacttttgttttggcattccatgtttcattgacaaaacaaattttaatggtgtaaattgctctctaacagaaggctgattacttccatttatattgcaaggcaaataaataatgaccttcggcctcgtataatcaaanaaaaaaataaaaaatatcttttattttttattttttaaaat

SEQ ID NO: 195155 - DNA, 715 bp, Gossypium hirsutum
gcttaatcgagatacttggggaaatgaggcagtttctcattctgttagcaccaactttattttctggcagggatatgatgacacaagcgaggggaggaaagtttgcacctattacaaactagattcaattcccgtagtgctggttattgacccaatcacaggacagaaaatgcgctcctggtttggaatggttcaacctgagagtttgctggaggacctggttcaattcatggatggtggcccaagggattatcatgcaactctgtctcataaacgtcctagaggaagctcagttactccgcaacaaaaaattaaagtgtcaacagatgaaaccaatgaagataaggaaatgttgagagcgatagcagcttctatggagaatgcaaaagaatctattaaaacaactgaagatgataaagtatcatccacaactgaggaagaaccatgcttgactaagaagcctgcatatcctcctctacctgaagaacctaagggtgacaggaacctcttatgtagggttggagtccgacttcctgatgggcgcagggtacagagaaattttctccgaactgatccaatacagctactgtggtcattctgctattctcaacttggtgaagctgaatcaaagccattccgcctgactcaaccgattccgaggagctccgaaatctctggattatgatagcatattatcattttaggagtcgggact

SEQ ID NO: 195156 - DNA, 1224 bp, Gossypium hirsutum
  unsure (1)..(1224): unsure at all n locations
ttatatttatattcatagagacatcaagcctgacaacctgctacttgataaaaatggtcatatgaaattatcagattttggattatgtaagccattagattgcagtaatctccaggaaaaggatttttccttggcaaagaatctcagtggggctcttcaaagtgatggacgacctgctccaccaaaacgcacacaacaagagcagttgcagcattggcagaggaacagaaggatgcttgcttattctacggttggtacacctgactatatcgctccagaggttttgctgaagaaaggatacggaatggaatgcgattggtggtctcttggtgctatcatgtatgaaatgcttgttggatatccacccttttattctgatgagccaatgtcgacctgtcggaagatagtgaattggagaacgcacttaaaatttcccgaagaagcaaaactatcccccgaagcgaaagaccttatcagtaaacttctatgtaatgttgagcagaggcttggcacaaagggcgcccatgaaattaaggctcacccatggtttaaaggtattgaatgggacaagttgtaccaaatgaaagctgcgtttattcccgaagtcaatgacgagttggacacgcaaaatttcgagaagtttgaggaggctgacaaccaaattccatctgccacaaaatcaggtccttggagaaagatgctttcatccaaggatgtaaactttgtcggttacacatacaagaactttgaaattgtagatgacaatcaattacctggcattgcggagttgaagaagaagagctcaaagcccaagagaccctccatcaaatccctttttgaggacgagtccgccgcagctgccagtcaacctgttcaagggagtttcataaacctcttgccgccgcaacatgaagccccagagaatcattatagaaaatgacctgactcactttagtggtatccatgggataatagctatcgccctggaaatccaaagataacaaagctttaatattatctggtaagtagcttttgttttttgccacagcttacctttcaagtttccattgaaaaagtttttaaacaaagtggtttgagatttatgagattggctcttgaatcagctaggagattgttcgtctgtaaaattatatatatatatatggaagtaaatattctttcnnnnnnnnnnnnnnnnnnnnnnnnnnnnnnnnnnnnnnnnnn

SEQ ID NO: 195157 - DNA, 646 bp, Gossypium hirsutum
  unsure (1)..(646): unsure at all n locations
gcatttgttgcaggaaacgatgctggccgtgcatacaatacttttccaaagatgggagatgtgtgggttcctgataatatatttgagttgaaaccaacaatccgaaacttctttgagaatacatccatggtgcagcttgaccatcgtatccttgcaactaccactttaatctccatttgcggtttatggtggtcaaccaaaaagctcgacatccatccagctattcgaactttggttggagccacgtttggcatggctgctcttcaggtaaccctaggtgtatcaacacttttatcatatgtgcctgtttcacttggcactgcacatcaggcaggggccttgacccttttaacactgatgctacttctcaatcacactgtgaggaggccatcaatgtcacttttgaaaacactgcctcaggtgacaaagacagcttggtagccattgtcttttaagtatattattaggtagattaatcaaacacttcaatttgttatttggttcacatatcgttccattttttaaggtcattttgattgtaaagacctcaacaaggagaatgcatactgatttgtaatttcgaaacttgtttgctagcactgaaataaagtcttatcggcnnnnnnnnnnnnnnnnnnnnnnnnnn

SEQ ID NO: 195158 - DNA, 497 bp, Gossypium hirsutum
tgactggatagattacccttgcaacaacgtagctttcaagctctatgagattgtgaactaccaacaatgcgtggacgacaatgtgtctgatttccacaggacaggacgactgattcaagggtgccaatttgtaaccgtgcgcacctgcttcgagttcgaacgggacgcgattaaattgcttatcaagctttaccagaaacctgtggttccggtaggcctgttgcctccgttgttatcactgccatcaaacgaggataacaaatgggaagctataaaaagctggcttgacagccaaggagagaaatcggctctctatattgctcttggcagtgaagtgaatctaagtgaagggtccatccaccaattggcatttgggatagagaaatccaacttgcccttcatttgggtggtaaggaaaccgtccagtgggtgaagggcagatgaatgacataattcctccagggttcgaaaaacgagtgtctaacaagggcttagtg

SEQ ID NO: 195159 - DNA, 772 bp, Gossypium hirsutum
atctccagttccaacagtgacattttctttgaataccaagtataaatccttcactttttctattgatggctgaggttaaagggaaatgggtcaagcttaaccagaatggaactggtcctggagccagaagctcacacgccataaccattgtgggacaaaaggcgtatgtctttggaggtgagttcaccccaagagtcccggttgacaacaagctctacgtatttgatctcaataacttaacatggtctgttgccgatgtaactggcgatgtgccgcctccacgtgttggtgtcacaatggccactgttagtgaaaccatctatgtatttggtggtagggattctgcacacaaggagcttgatgagttatattcttttgatacttgtacaaacaagtgggtcttactttctatcggtgacagtggcccggctcatcggagcgaccactccatgacagctgatgaccgacatgtttatgtctttggagggtgcggtgtttctggccggcttaacgatctatgggcttacgatgttgcttgccaaaaatggatcaaatatccaacccccggagacggttgcaagggaagaggtggccccggactggctgtcgtccaagggaaaatatgggtggtttatggcttctctggagtggaaatggatgatgtgcattgctttgatccagtacaaggacaatggtcccaagtcgagacaagtggggagaaaccaacggcccgaagtgtattttctatagttgggattggcaaatgcataat

SEQ ID NO: 195160 - DNA, 851 bp, Gossypium hirsutum
  unsure (1)..(851): unsure at all n locations
atgagattgaagaaggcttgtctcatcgtggatttcaggttttgaggctaaatacttacacaactgtacctgttgatcatgttgaccatattgtcttggagaaggcccaatctgcgccggttgttgctgttgcttcaccttctgcggttcgatcttgggtcaatctcatttcagagcctgattcttggagcaatgcagtggcctgtattggagagacaactgcctccgctgcaaaaagattaggattgagaaatgtgtatttcccgatgcagcctggacttgatggatgggttggtagcatccttgaagcctgtaagggctcatgacaaattttaggattgaaagatatcaaggtccctctggaaacttaagcacggagtgaagtagaaccacaagcatttctaattctttgtgaaccacaggccattaagtgaagaaagtttttccaagttaaagggttggaatttgtagaaatttaacgttttgaaggtacatatccatttggaggctgcagcactgtattttgaggtcagtcgagagcctattcaattcatgttatcagaacttgtacatgcattttctcaccattgcccattcatttgactcaatgtcagttgtgttgaaattgaatggggagcatttccactccatgaaatctgataagcagttaggagtgtttatcaattgaaattgtaatcatatttactctgccttctaagttgtatggcattttttgtgctttcttttattataataataaaaatctcttcaacttanaaaaaaaaaaacaacacaaanaacaaaccaacttattctcttttgatatttttcaaaaaaaaaaaaattaattt

SEQ ID NO: 195161 - DNA, 776 bp, Gossypium hirsutum
ctcttatcaaaaaagaacacagtaatggctatttctttgaaatctacagcagcgggattggtccagttaaagaaccacaatacccattctccgtctcgctttccttcattcaaacccttagtttcaactaagagattcactccaatggctgctcttgctacttctcaaactcttggcatttctgaaaccttctctaaactgaaaaatcaaggcaaagttgcattcatcccctacatcacagctggtgatcccgacctttcaacaacagcagaggctcttaaggggcttgattcatgtggctcggacataattgaactcggtgtaccatattctgatcctctggctgacggtcccgtaatccaggctgcggctacgcgttctttggcaagaggaaccaacttgaatgcaattctttcgatgttgaaggaggtggctccacagttatcttgcccgattgctttatttgcatattacaacccaattctaaagcgtggggttgagaaatttatgtccgctataagggacgtaggcatacaaggactggtggttccagatgtccctctagaagagaccgaacttttgagaagagaagctctcaaaaataagattgaactggtaatgcttacaacaccaactacgccgacagaccgaatgaaagcgattgtggaagcagcggaaggatttgtgtacctcgtgagctcagtcggagttaccggtgcccgtgcatctgttagcgatcgggttcagactcttttaactgaaattaaagaggtaac

SEQ ID NO: 195162 - DNA, 570 bp, Gossypium hirsutum
aagggatgccattgacacaaagaaccaagctgattccgttgtctaccacactgagaagcagctgaaagagcttggagacaaggttcctggtccagtcaaagagaaagttgaggcaaagttacaagaactcaatgatgcacttgcaggggactcaacacaagggatgaaggatgccatggctgcactcaaccaagaagttatgcggctaggccagtcactttacagccaacctggtgccggaggcagcagtgcaggacctgcagctggtggtgaaaccgggccttcagattcatcacacaagggtcctgaaggggatgtaattgatgcagatttcactgacagcaagtgaaaaagctcggttttgaatcattctgggtattggtgtgaaaggtgggggattgcattacctgtcatttttgatccatggtggtgaaagaaaacaaatggatttaggatttaatagagtatgaagcagcatatatatatatagaatgtccaaatagtaattaatatagggtgttaagcccttcacttgaacattgttttgaattgttcaatatgcatgccatt

SEQ ID NO: 195163 - DNA, 477 bp, Gossypium hirsutum
ctcatcctcagtttcatcggatacgagacaaccatctctagccaggcttccgtttgtggatgcattcttggcaaaggcgaagaacaataaaagtcttttatcaaacaggaagatttattcgcgtagatctaccattttgcccgaattcgttgatcaaactgtacggatttacaatgggaaaaattttgttcgctgcaagatcactgaaggcaaggttggtcataagtttggcgagtttgccttaactcgtaaaagaaaacatttgaggagcaaggctgagcctgcaaaaaagaagggcaaaaaataagcatttgcaaccaaagatcacatctcatttcgagagagtggtgattcaggagaaatatgggctgaaaggaaagcaatgaaacacggaagaaaatggttttgaagcctcatttctttggttaaatgattgtaggattttgtttggtcagcttttggcctgcacaattgtta

SEQ ID NO: 195164 - DNA, 461 bp, Gossypium hirsutum
ttctatcgcgtccgaacaaattttgagagagaggtagatccgatggggaggtcgagaaggaaatacaaacaatctcgtgccaaggtcaaagtgggtctccccaggaaaaaccctcacgtctttaagccatgcttcactcttcctcccaagctccgttcactcgccaacgtcgacgatgccctctccaagtgggacgacaaagccagcgtcatccaaaactacaagtcctttgggatcgtttctaaccctaactacctcggcgttcgttctcgtacttcccacatcgtggagagcgattcactccaagtccctcattctccgccttctgatgaaccggctgatgaattcgagcccattgattcgggcagcgatctcgaagaggatgacttaaaaacagcactggggaagaagcgaagagatggaaaaagcagacatttacagccactgaccaccatgcaacg

SEQ ID NO: 195165 - DNA, 1154 bp, Gossypium hirsutum
  unsure (1)..(1154): unsure at all n locations
gtttaccttatgtccaattattcagtcatgcattggtcatcattgtcatgtcatctctctgagatccttaatttctctgggcacgtggcacctactgagaaacatccgggaagtttgttagaaggttttacacaaactcaaataagtacgctagcagtcaaagacaattttatggttgcaggaggcttccaaggagagcttacttttaagcacttggacagaaaaggcgtaaccttttgtacccggacaacctatgacgataatgcaattacaaatgctattgagatatatgacagcttgaggggtggaatcaattttatggctgccaataatgactgtagcatgagagaatatgatacggagagatttcagcttctaaaccatctccgtttcccttggccagtaaatcatacatcagtcagccctgaccgaaggcttattactgttgttggagatagcttggatgggttgcttgtggatttgcaaaacggaaagactgtagccacggtggtaggtcatctagattactcctttgcatctgcatggcacccagacgggcgcatatttgccactggaaatcaggataagacttgccgtgtgtgggacgttcgaaacctttcaaggccagttgcgactctcaaaggaaacttgggtgccatacgatcaatccgcttttcatccgatggtcaattcatggtggctgctgaacctgcagatttcgttcacgtgtatagtacgcgtgctgattacgagaaaagacaagagattgacttctttggggagatttcgggagtatctctgagtccagacgatgaatctttgtatataggaatatgggacagaacgtatgcaagtttgctgcaatacaacaaaagacacacatatgcatacttggattcgtacttgtgataatgtcaactgcgtgctgttgtagttatggcgctctcttttgtgctctgttttgtttgtgtagggtgatatgaatgaagattaaatattatatgacagtataataagtgtatgttgtgttagaacttttctagaaaggtgcatgtacagtacaatatcatcctctaaatcatatgctatttgtatgattgattttctgttcttaaatgtaagttaataatagagtaaaattaacttgcttggnt

SEQ ID NO: 195166 - DNA, 696 bp, Gossypium hirsutum
cccacgcgtccgctagtcttctaatgtagcttcggactcattaactagtttgaatcaagatagggcctctgctttaactcttcctactgcagctccaagtagtagcttgccactggtacctccatcaagtactgctttagataaaactgctgtcgtgttgcccttttctgaaaaaactaagacagttcctgatcctgtaatgccattcaaaggcatggctgattctgcttcctccaccattgggacaacaagttcagttttaaatgatgggatgcttccttcattagtaaccccaggccagcttttacaaccaggactggtcccagcatctttgcctatgtcttcacaaacagctcagaaggatgtggaagttgttcatgtgtcatctccagaactgacaacatcagcccctgcactagcacctgggcctgcaaaagcatcacaacctgtgttagcacaagcaccgcaatcattgtcggcgcaagcagcgccaccattattagcacaagcaccaccacaaccatcaaaaacagaaggacaggaacctatattgccttcgccttcaccctctgatcataagctacatggagctccaatgcatgctcatcagtatcataattatagaggaggccgtgaaagaggacgaggaagaggaagaggaagaggaaatgagatttcacgttcggcaaccaaatt

SEQ ID NO: 195167 - DNA, 529 bp, Gossypium hirsutum
  unsure (1)..(529): unsure at all n locations
cccacgcgtccgatttgctgaggactctgatttgagtgtgacaaccaggcttgcttgtggggctgctgctggaactgctgggcaaactgttgcttaccctctcgatgtcatccgcagaagaatgcaaatggtcggatggaaagatgctgcatcagttgtcactggtgatgggaggaataaggctcctcttcagtatactggcatgatcgatgcattcaggaaaactgttaggcacgagggctttggagcattttacaagggtctggtccctaattctgtgaaggttgtaccttcaatagctattgcgttcgtgacatatgaggtggtgaaagacattctaggagttgaaatcagaatatcagactaaaccggtaccatttctactcaatgtttttagggatgtgtgctatttttgtaggtaaaggggatatagagtaagataaactagggaacaaccttttaacctttttcttttcgtctcatcacgcanaaatgagtttagaaacttatacgagcctgccataatttg

SEQ ID NO: 195168 - DNA, 530 bp, Gossypium hirsutum
attccggtcgcccacgcgtcgggcaaccaaaaaccatgtatcaccctcaagttccaggcgagcccacccaaaccaccacttccctcgtcgagaccgccaccggcgccatccaaagcttccgccctatcaaacaaatccatcaacacctctgcgcatttcatttctatggctacgacatgacccgtcaagtcgaagcgcaccatttctgcgcacatcaaaacgaagaaatgcgacaatgtctcatatatgacacccccgaagccgatgcaaagctcatcggattggagtacatcatatcggagaatttgtttttgacgttgccggacgaagagaagccgctttggcattcacatttgtacgaagtgaagagtggggtgttgtttatgccgcgagttccggggccgatcgagaggcaagatctggacaaagtttgcaagacttatgggaagaccatccatttttggcaagtcgataaaggtgataatctccctcttgggttacctcaattgatgatggctctcactagagat

SEQ ID NO: 195169 - DNA, 598 bp, Gossypium hirsutum
cccacgcgtccgaatatttatttgttcaagccaagatgtgaaaaagctgaagacaggaagcaaacttcccttggcttctatcgaaggtgaagggacggtaataagttcagactcatctgaaaactaaaaaaataggaacccatttgtctttcattacctgctgtttatttttcactgaagttgatgaaaccctaatcagtagctcatatttttttggagctgtgagacttaaaacgacatcatctgggttttgaagaaccaagaatttgttaatgaattagttcggaataagaggctaagactaggaaaaatgtgaatacttataatctttgttgtgggttggggtgctttaattgtggtattttctgcgcttgtaaatataaaatgtggtctggcagtgtattccttgtttgcagcgagtgaaagtgtcgctgcttacagcttttatactgctgccattaatttaattagcttcactgtcattatagggggtttaatctgtacatactcattaggttgattatcatgtcaattattcaaggatgcttaagtcataatcttattttatcgccctttattagaagggtgacatttattg

SEQ ID NO: 195170 - DNA, 270 bp, Gossypium hirsutum
  unsure (1)..(270): unsure at all n locations
tatgtnntttctggctgnntaggtaagaagagaacctaggtagtttacaattcatattttgtccatattcttgtagtggttcttcaattgtacatgtgaaaaaaggggggcttggatggtcaagcattctagtttagagaataaaacaggtaaaaattaaaacggcatcgttatatctcatatcttgatgcatttgttttggtgttgtaatctttaatgtttttttctttattgtaaaatatattaggtgtatgatttgaaagtttgctt

SEQ ID NO: 195171 - DNA, 412 bp, Gossypium hirsutum
accatctcaactacgaccccctagggtttatctagggtttcctattggctaccgttcctctctttgtattccgccaatggcgaagccgacgagaggccgccgttctccttctgtctccggctccggttcctcttcccgttctcgttcacggtctaagtctcgctcccgctcttattccggttcagactccaagtccagttctcgctctcgctcagtgtcccgctccagatctgcttccccgtctagcttctcgttctcgctccagatctttatcctcttctccttctcgtaacggtagctttcgaaatcgcagtcctccttaacgtcgaaaggcgactggtgcatttaagggaaggcggtccccttcttcggaatctaaaaaattattttcaacttcgaaggaaactttccc

SEQ ID NO: 195172 - DNA, 589 bp, Gossypium hirsutum
ttcttccactcttccagtttcttcttctttcagttcttccaccactgtaaatgcaggatccccgccacctttctgggttttctcaatgattcacagctcaaaaatcagagtacaagtaaaagcaatgaataacattgaacttgggtttcttatatttcttctccttttcaaccttcttttgcccttttcctatggagaagccggtggtctttgtgtatctcacggcggtcgctttccgcccttctcttctgaggggaaacctcctaaaagggtggggaagggacacaaggatttgacactctgtagggtgtttcggaaaaagacttgctgtgatgctgcccagacacatcctgctttgctttctattaggaggctggctttaacacgcgaagccagcgaagagtgtttgcatttgtgggaattgctggaatgttccatatgccatccacgcaggcggagttcagcctggacccccacttatatgcacattcttctgtgatagagtatttcaggcctgctctaatgctttacttctcaatggatgcaaagacacaaggttctagcaccatgtggagcaaatgactttgtt

SEQ ID NO: 195173 - DNA, 734 bp, Gossypium hirsutum
ttcctttcgtccgcccacgcgtccgcttgttctctggtttcgtttcagatttcagatctgatcaaagaacaaccaaacaaacaggttgcttagaagtcccaagttagagaacatgggtcgtggagtcagcagtggtgggggacagagttctttgggttaccttttcgggagcggagaagctccacctccaaaaccaaccaacgtcacgagtactggcaccaccagtaatgaagttcctcagaagcagattgaggttgtgaaggaaactgtgcaaaaaccgaccactgcttcaccatcatcgggtgatgccaaggagatccctgcaggtgttccagggagcaaaacgaacaactatttccgagctgatggccagaattgtggcaactttcttacggagcgcaggacaactaaggttcacgcagcgcctggcggtgggtcttccttggattacctgtttggtggcagcgagaagtgatatgtgagatattaaatgttggaaccactgcttatggttgtcctaaaaggtttgggacagaaaatatttaagtataaacaatatgttggtttcccttccatcctggactttctggaaccttcaaattaagctttttcctatctaagcaactgcttaccattagctaaccatgcttatccaatcctttcatcaagtgttataagtatcttttatcatatattaaagtaatatattcaagaaaaaatggaaacttgcttaa

SEQ ID NO: 195174 - DNA, 546 bp, Gossypium hirsutum
gaccgctttaacttgtataggatcgaacaagaacttgggactgaaattaagcaaatccctccacatatcgaccaggctatttactgccggtgatttttgtgggatgtttccttagcctactatggtaacaacggttaatgatgctggtctttcaaggtctcggtccctagtcatgggtgtgcattctaaaaactcaggtgttgttataagacttttagtttgtgctgtttatgcattaacgttagccaggattgtaggaaagaagtttagataagtcctgctttcctttcttttatatttcttttattaacaaatggtttcctgtcgcctacttcgatgctattccaatcatccgaacatcgtggaatggttttaaagttgtaccttgtgcaagaaatttgaaatttatctttttttctaaaaaaaaaaaaataaaaaaaaataaaaaaaaaaaaaaaagataaaaaaaataaaaaattaacaaaaaatgtataaataaaaaatgggcggccgaattctatgttcaacccttacatccgcttaaat

SEQ ID NO: 195175 - DNA, 355 bp, Gossypium hirsutum
tttgggggaatgttccttaacctactatgttacaacggcttatgatgctggtctttcaaggtcttgggcccgagtcatgggtatgcattctaaaaactcacgtgttgttataagacctttagtttgtgctgtttatgcattaacgttagccaggtttgtcggaaagaagtttagttaacccctgctttcctttcttttattagcaattgggtttctgtcgcctacttccatgctattccaatcatccgaacatcctgggatagtctctaaagttgtaccttgtgcaagacatttgaatttatcttttttttcttttttcgtttctggtcggtgcgaaatgctcatccttggcatt

SEQ ID NO: 195176 - DNA, 548 bp, Gossypium hirsutum
tcggatatatccccaattgcccttttatcatacaatatcctcggaggcatgcagcaggatagcactggaaatgtggcagttgaagcactgcaggaactttttgccggtgatggacaatcaaaaaaaggtcgaagaacacaaaacgaggtgccacttcctcctagtgtttaccaaagactcacttcaagttctacgctaatgaacctggcacaggccctagctgaccacaaaatgtgctacgaggagatgccgcttcaagagttgcaggcaacacaggagcagcaaaccatccaaaacctatgcgacacactaagaaccattctccggttatagatagatagtcgtatgctacatttcttttttcggttgttgtatgttattgtcattgtcatccgtgctttaggatactgcagggtatgttgtattatataagggtatacatgatggcaaaatgaaatgcaatctaaatcaagctttgaagcgtataatgtcgaaaccgttttttgaaaaaaaaaattaacttttatgctttttttctcctctttctt

SEQ ID NO: 195177 - DNA, 488 bp, Gossypium hirsutum
  unsure (1)..(488): unsure at all n locations
gccaccattgctcctgcaccacagctggtggaaaaaacaaaccaacaagtggaacaaacttatcccaagtttgtttttggggattatatgtctgtttatgttcagcagaagttccttcccaaggaaccaaggttccaagctgtaaaggcagtgtaatatcaagaagaagctcaaaaccatgaatgatgtttttgattgaaagagtggggccctttctttcctggaaaataaaattgcagggaaggatatgaagagctcaagtcagtatacaatgttactagggtgtttgtttgtttgtttgtttgttgtgtttttttttttttttggtcttttccttttttggttgggagtttgtggtgatgaacatgatgagatgctcgatcaaattgctaaagttgggtgtgtaaatttgaatcacatatatattttattaaaaaaaaaacangnnacatagaaaaaaataactaaaaataactaaacaatttttg

SEQ ID NO: 195178 - DNA, 934 bp, Gossypium hirsutum
  unsure (1)..(934): unsure at all n locations
gatactaaaatcccatcagtcaagaaataaaccatggcaacgaatgaagtaaaagttttgggttcctggccgagtccatatgcgatgaggccaaggattgcccttaacctcaaatccctcacttacgaatacattgaagagaagttatgggaaggcaaaagcgagcttcttctccaatcaaaccctgtttacaagaaaatcccagtcctcattcacggcgataacaagccaatctgcgaatctctcatcatcgtacaatacatcgacgaggcttggtcttccggtccttctattcttccttctgacccctgtgaacgtgctgtcgctcggttttgggctgcatatcttgacgacaagtggttcccagcggtgaaaagtataggagtcgctaaaggagaggaagcaaagaaagcagcaatagcgcaagtggaagaagggttggctttgatggaagaagcatacgacaagtgcagcaaagggaagggttactttggtggggatgaagttgggtaccttgatatagcttttgggagcttcttgggatggcttagagtgacggagaagttcaatgcgatgaagctgctggacgaggggaagacgcctggtctggtaaaatgggcggacaggttctgttcccatgccgctgtgaaggacgttatgcctgataccgacaagcttgcggagtttggtaagtttgttattgccaaaataagggccgctggcgctgctgctgaaatgcattagaacaaaaattagcacatcttggatggaactaatgaatatattatctctgtttcttcactttgtgatgatgaacaaagatatatatatattcccctgttgtagtcccttaataaacccttttctttggcttnnanaaactagaaaaagaggaggaagaagagaggttgtttttggagaaagcaagatagct

SEQ ID NO: 195179 - DNA, 329 bp, Gossypium hirsutum
gcctaattaagagccgctggcgctgctgctgaaatgcattattacaaaaattagcacatcttggatggaactaatgaatatattatctctgtttcttcactttgtgatgatgaacaaagatatatatatatattccagtaataaacccttttctttggctattggattaattggcatttgaagttgattttcagtaagtttggaattaatactctattctcttaaaaaaaaaaaaaaaaaaaaaaaaaaaaaaaaaaaaaaaaaaaaaaaaaaagggctgacactataaaaaaaccaaaaaaaaatggggcggccgttttaaaggatcc

SEQ ID NO: 195180 - DNA, 459 bp, Gossypium hirsutum
cccacgcgtccggaagggacttgtaagaattttatttgtattgttgatgaatccaaatgggtgaagcatttgggagggagtggcttagccatgcctgttgaagttgtccccttttgctggaaattcacagctaataaactccaaaaccgggcccgagatatcggcttgcgtggccaagctcaggaatgattctaaagggaaaccctttgctaacagataatgggaattatactgtggatttgcatttgaagaaagacattggggatttgcaggtggcaagcgatgctcttctgaggattgctggcgtcgctgaacatggcatgtttcttgatatggctacgactgttattgctgcaggtgagcttgggatcaccatcaagaacaagtacaaactgccacaaagattactcttttctctttagatcttttttacttatactatttagagattaatattta

SEQ ID NO: 195181 - DNA, 579 bp, Gossypium hirsutum
cgacaaatagctgaattaaattttcgaatatgtatgtgtttggaaatcggctcagagcccggagaagcaattccgtactgtcagaaggccatctccgtttgcaagtctcggctgcagcgactcacaaatgaagtaaagacttcctcagacctggcatcatcttcagctacatctgaattggatgatggtgttcaacagtcctcctctggctctcaaactgtcatatctgtcaaagatttagattgcagagatcgaaacacttgctggacgtgctgaagaccttgaaaagaagctcgaagatctacaacagctggtagccaacccaaagtccattattgccgaaatcctgggaatggcatctgccaaggcaaaggctgatgagaagagtgcatctcctgctgtggggagttcatcgcggatgggtactggtaacaggaatggaggttttgattcttcaactgttttcactggttatacaaatggggctgcagcagtcacgcatcttggtgtcttaagacgaggtgtgaaacctgttttgatgagtccagtagaatctggaccagcaaaaaaaccagtcac

SEQ ID NO: 195182 - DNA, 802 bp, Gossypium hirsutum
ttcacgcgtccggttcttggatactgttcagtacaaagctaatagcatacttcgttatgagcgtacctttggtgaaggatttgtgagcactggaggaatagaaacaacgaaagaatttgtggcgaagttggatctaaagcctggccaaaaggttcgagatggtggctgtggcataggtggaggtgacttttatatggcaaaagaatttggagtctatgttgtgggcatcgatctgtccataaatatgatatcttttgctcttgaaagagccaatggactcgattgctctgtggaatttgaagttgctgattgcactacaaagacttatccagataacagctttgatgttatctacagccgtgacacgattctacacattcaagacaagcctgcactatttagatatttctacaaatggttgaagccagggggcatagttcttataagtgattactgcaaaagcgcaggagcttcatcgcccgaatgggcagagtacatcaagcagagaggctatgatctccatgatgtaaaagcttatggccagatgcttaaggatgctggttttgatcaggtcattgcagaggatcgaaccgatcagttcatacaagttctgcagcgtgaattagacaaagttgagaaggacaaggataccttcatcaccgacttttctcaggaagactacgacgatatcgttgggggatggaaggcaaagctgattaggaccagatttggggagcagagatggggtcttttcattgccaacaaaaactaagtcctgcttcttctctaatggtactttctc

SEQ ID NO: 195183 - DNA, 613 bp, Gossypium hirsutum
cggccgcgtcgaccaaagacattcattttcacctcagcttcttcttttttctctttgtttcatcatggcttctttggctacatttaattttgttatgtttcttattgtcttggcctcttcgctacatttcaccgccgatgcaaggaggctcgttgagtcagaccaacctgaccagcctttgctcttccaataccacaatggtcctcttctgtctgggaaaatctctgttaatcttatttggtacggcaagttcaagccttctcaacgtgcggttgtgtacgatttcgtcacttccgttgcgtcttccaagcctacaatagctcagccctcggtcgccacatggtggaaagccacagagaagtactatcagctcagcaagaaaccttattctcttgccatcacattgggttcacaaatccttgacgagaactactctttgggaaagtcgctaacaaatcaacagatcatggaattagcatcaaagggtggtcagaaaaacgccattaacgttgttttgacatcagctgacgtggctgtcgaagggttctgctcaagcaggtgtggaacccatggttcaggtttgggcggatcaagcaagggtcacaacagtaac

SEQ ID NO: 195184 - DNA, 533 bp, Gossypium hirsutum
tcggctttcaaatcgcctctctttcatccaacttcatcgttcagtcgttctcaaggggcattccctttcttcagcttccaaacacaataccttaccctcaacaaaccacctaccatcttacgctgctctaactcttccaccatttcttccaccactaatggtaataacaacaatatggcagggcttccggtgaagaagaagaggaaacggtataggaaacagtaccctggagagaatgagggcattactgaagagatgagattcgttgccatgggacttcgtaatattaaaggtaaaaaggtcagttccgattctgtttctgactctgaaaccgacactgaaaataccccaagcgatcaagagaaagaagatgattctgaaactgtgaaaagcgatgaaaatggtggtgatggagaagcagagacttggagtcccactatggaaggatttcttaagtacttggttgatagcaaattcgtcttcaacactattgagcgcatcattgatgaatccgatgatgttgcttatgccta

SEQ ID NO: 195185 - DNA, 848 bp, Gossypium hirsutum
atataatcgctgatcttcctaacaatttttgatcctgacatactctttctttcataaacgagctggtttctactgaaccatatgaaccagaggctacaacagaagagtcgaagttgttcatcagttcctctagcaaagacccatgcatttttggaagatatggtagctattctcttcatcacatccgcatctaggacactgggaattcctaacaacccttttgattttgaggttgctaaaagttgggataaagttccaagagatcctccatactgtcatttgaatttttgagggaatatgtaatttccataatttagtatagaaattttttcctcggtatgtaacattaatccattaggatcaaggttagtctgctgtaatagtttataagcactccttacggagaactcccctgtcggttctcctctccatacttgaaagtcctcttgtactgtctccgccagtgggatctggaaaattttctccgcaatgaccggttggaagtccagatggaaatttgatcacctctccccaccctccatccacgtcctctttcaaggagtcctctcgcagcccaaatgctcttccagataaatgaaggtttaggaaggagcagcttggatggaagcaatggaggatccaacagctttggagtaagaagacaacagcagcagctgacccagcaagagatggagcaatactatcaacttaagattcaggagatccagttgaaggaaaccatcagaaagaagaaagaggagctcatcctcatggagcaggagttgacaagctgtcagcaactggatcaagaagatgaatactggacttgacccagtagaagaagcaaa

SEQ ID NO: 195186 - DNA, 476 bp, Gossypium hirsutum
ctacgcgtccgaccacgcgtccgggcgctgatgggatcattacatcagagttttgtcaaaatggcaccgaaagatgtaatgaagctcttgaaaagctagagaagaagtatgacattgttgtgaatattcagggagatgagcctcgtattgaacctgagataatagatggaattgttaaagctctgcaggcagcaccagatgcagtgtttagcactgctgtgacttctttgaaaccagaagatgattttgatccaaatagagtgaaatgtgtggttgataatcgtggttatgctatttatttttctagaggactaataccatttaacaaatctgcgaaagtcaatccacagttcccttacatgcttcatcttggaattcagagctatgattcaaagtttctgcaaatatatccgaagcttcagcctacaccactgcaactagaagaggatctggaacaacttaaggtccttgagaat

SEQ ID NO: 195187 - DNA, 1048 bp, Gossypium hirsutum
acagaatcacagaaagacagcttcaacaatgaacagtagtttccaaaaagacttgactttggttttgcttccaaccaatctgtcatttatgttagaaacccacaatcaggctgccttatgtctgtcactctaatctcctaaggaccctctcacaaatatcttctttgctttgctctagttcgtgttgttctcttttctgcaattctctgtttttttctacatttcttttccattgaagaggaagctgtcttgtaagaatgaagccaacaaggggcagagaagctgcaacaatgaaggacaagaaggaagcaaaaaagcctgctgagaacaaggtcgtcggtaagcgaaaagcggcgagccgggccgataagagtgaccgaaagcgcgcaaagaacatagcatcatcgaccaacaaggacccgaataaaccgaagagacccgccactgctttctttgtgtttatggaagagtttaggacaagttacaaacaagaacatcctaaagtgaaggctatctcagctgtgggcaaagcgggcggagagaaatggaagtcgatgtcgaatgcagaaaaggctccgtacaaagtgaaagcaacggaaaggaaatcagaatacgagaagctcatggcagcctacaacaagaaacaagaaagttcagatgatgaggaagaagccgagtccgaatcatcaaaggatgatgaagaaagtgaggacgatgattgaatccaggatggttttggattaggttctgtaaatgaaaccatgtttaaaaatactgtctttagcagcatggtatgatggtatgtttgcttgatgtgtcgtgtgcttggtttttcgatgtgaaagaaaacgcagctcctatatttctatattcgcagatatatgtttgtgttaccatgttgaaggcactgccactgcaaaagagagtactgaggatatggcggacggccattaatggcagcgactcgacagccacattccaacagctctttgcttgtatcatccgtgtgaactatcacttcaatgaaacataagcagtctttcatggc

SEQ ID NO: 195188 - DNA, 660 bp, Gossypium hirsutum
tcgcctttgcgtccgaaccagcaaaagaaagaaagaagaagcatccctttataccccactttaagttactcaaaatttccgtacttttattttttgcatggcagtaagtctattgtcacatgagttgtctgacctgtgtcttgggaagccagcactaaggtcactttccatcacatccaccattgctgaagctcttgaggtcttgaaaacctctgatgacaactttgttagtatctggaattgtgatgatgttgagtgttgtagtagatgtgtaggcaaagtttgcattgtggatgtgatttgttatctttgcaaagatgaaaatttggtatcaccttcaattgctttgaaacaaccagtttctgtacttttacctaagatccctggtcttattatccatgtggaaccatcttgcagcttgttagaagcaattgatcttatacttgaaggagcacaaaaccttgtggtaccaatcaaaaccaaggtgttcaacaacaagagatcaaaacagcaacagaagccattttgttggttaacacaagaagatattatcagattcttattaagctccattggtcttttttccccaatctcttctttctccattgacacacttaacataatcagccccaataccctcaccattgagtatcactcacc

SEQ ID NO: 195189 - DNA, 797 bp, Gossypium hirsutum
tttgttttgtcatctctgcaaagatgaaaactgggggtctttttttgttgctttgtaggaacctgtcacagcgcttttgcctaagattcctggccttgttttgcatgtggaaccgtcttgcagcttgttagaagcaatagatcttatacttgaaggagctcaaaaccttgtggtgccaatcaaaaccaagctcagcaacaagagaaaacagcaccagaagccatcaccgacggtcactgtccacaaaggccgtgaattctgctggttaactcaagaagatgtgattagattcctactcagctcaattggcctcttttcacctgtccctgctttctccatcgacactcttggcatcatcagctctgaaatcctcaccattgagtaccactcccctgcttctgcagccataggagccatttctcgaacccttgtggaccaaacttcagtggctgtggttgacagtgaaggctgtttgattggagaaatttctcccttcaccttggcctgctgcgacgagacggtggcagcggccgtcaagaccttgtcctccgggcatctaatggcctacatcgactgcggaggtccactgaaagaccttgttcgggtcgtttcatcaaggttgaaggaaaaaaacttgaatggaatgcttgaccatttcattttgtcaatgtcatgtggggaattctaataataataatctaataaaaattcaatggcaccctaacaattgccaaggcccgaaaaaattataagtcaattaattattcaacccagattgtgaaaacaacttaagcaat

SEQ ID NO: 195190 - DNA, 1072 bp, Gossypium hirsutum
acgcaccaattctatgcatgtgtcatggatattcaaatgccagaaatggatggatttgaggcggcgaggagaattcgggatgtggaacagaatatcaataatcatattaaatttggagaaatttcagtggatgattacaacaatgtttcaaactggcatgtacccattttggccatgacagcagatgttattcaagctacacacgaggaatgcctacggtgtggaatggatggatatgtgtcaaaaccattcgaagctgagcagttataccgggaagtttcacgatttttccattaggcattattagatcagaaactgttggaagaacatctgctcatgacttggcatgggcactaatgggactgcctgtactttggcattctttgcgatgcctcaataaattcagattattcccaacaggaaacatttgtttttgttgcagagtgtacatagaatcatgcttgaatatagggattgagttttcttgtagttttacaattaagatggcaaagcctgttgatccttttgttttgatttgtaaagttggtcattccaattccaagtccttttcagcagggttggtaaattgagatgtctgtgcagtaagaactaattgactttggggttaaaaagcagtttgctaatggaatggagggaagaaaccctattccaagtcctggagtgtgttcatagaaaattgcagcaatcctcgttgtgttagtaatgaaaactcctgcaaaattaaagctgtttttttctgaacattatttattgtatcatagtgaccaaattgaattgaaagaattgaagattgattgcttctcagctattgaaggggaagattgcacccttgtacattaaccttgtattcgtaatgattgattactcctttacctttttgttaagcttatcttcatacaatgtttagtagttaattatatttttaacgcagctcaaaaatttgcttgaattatattatttttttttttataatttatttctatatttattaggtcgtccgctctagatgttcttactttattactcttcattctgcgttttattttttttt

SEQ ID NO: 195191 - DNA, 648 bp, Gossypium hirsutum
  unsure (1)..(648): unsure at all n locations
gacagatccatcacaaatgtcatcaaggtccataaggaggcagcttggccataatttactttcttctttgaaatatacctttaaatttgataggagaaattcaacaatgcgtccaactcggggttatgcttttgtttctacgactcaaatcggtggcctcacacctgatagccggagcttacggtttctgcggcaggagtttgatcttcgctacgttgttcctcttggattttatcatgctgcccttaattttggggtttctggcggtgttgtctttccatgggggaatgggttctcaagtaggccgtcatctttgccagaaagattcttcttaggtggcaacatatctccggtttgtgctttaggagggccaacagccttgtggggatttaagacaaggggattgggaccgacagtaccaaaaagacaggttaacaatgaaaatgccgatccttctggtgtggattttcttggaggagaacctcgctgtactgctttggcagacctttctttgatcttcatttangtggttagagaaaagggatccatgctatgtgttgatgtgctggtatgtgctaattacagagatgagatcgcatatcttgtcaaagtcgagagcactccgagtcatagtgttgacttgcgtcn

SEQ ID NO: 195192 - DNA, 698 bp, Gossypium hirsutum
cacttcagccgcttgccatgtggatgatgaaaaaggccttttaaccttcaaatcgggtatcacccaggatccgtcaggcatgctcagttcatggaaatcgggtacggattgttgtaattgggcgggtataaattgccgtgaaaacaatcgggtcaccactatttctctttacgggcaagttgataaacccgacagctacttgacgggtactatctcttcttccccggtaaatgtccaaaatctagacggtatttactgggttgacctaaggaatatttccggtccttttccggatcttcttttccggttacccaaactcttatatgcttacattgagaacagtaagctttcgggatccttacctgtgaatattgggtaagctaaaacaactcggaggccttgagtcttgaagggaattcggttcactgggatccataccgagttctatctctgagttgactcagttaactctgttggttcttgggaaaaatgaattctccgggcatttcccggcggggattaaacagattaggaaccttagttcttggtttaaccaaacatctgaaggtaccttcggattttctaatcttaaagacttaattttaacttcccaaggaattttggaatccctactataggtttgtcctaaaggatctgaattgcattatttgttgcgtataattacatggagtcaaaat

SEQ ID NO: 195193 - DNA, 425 bp, Gossypium hirsutum
acaagttcctgcttgggatccaaattttcaggctaggctgccatatggatcagttcctggtcaaacatatcaatcgttgacagcccctacatacgttaatgcggcaagacctgcaggttcatcacccctttcacaacctggtgcatcttccatgcccatgcagcagcagcagcagccgccatgggctaatgttagacaaggaggcgcagcggtgctgggtcggcctccttattacagtcgatgacctgtgtctattctataatgaaattaaatgatccctcgtctatcttatattcctcatataaggattcgccaattggatctctttaagttatgactgaaatgaaattttttttttttattggattggaagtgttgttttttttagttgttttggaaaccatctccaccattgatgccaaaaa

SEQ ID NO: 195194 - DNA, 1105 bp, Gossypium hirsutum
ggacgctaggcaagatatggtggtagtttaggtgccaaagctaggcaaagaagcgggcgcggattgccattaaggagtgagaacaacaaatgtgctcgtgtacttgttgtgggcccggagattactgctgctacctttcgtggacctagtgacactcacctagacagtcttgtggtgccaagcattgtttggtgatggtgccgcagctgttataatcggggcagaccccgtgcccgaaatcgagaagcccatgtttgaactagtctcagcagcccaaacgatcttgccagatagtgatggtgcgattgatggtcaccttcgtgaagttggtcttacatttcaccttcttaaggatgttccggggcttatttcgaagaatatagaaaagagcctggtagaagcatttcaaccattgggcatatccgattggaactcccttttttggattgctcatcctggtggtccagcaatattagatcaagtagaagccaaattagcactgaagccagagaagctacgagccacaaggcacgttctttcagagtatggtaacatgtcaagtgcttgtgttctatttattttggatgagatgaggaagaaatcaagggaagatgggcttcagaccacaggagaaggattggagtggggagtgctctttgggtttggacctggcctcactgttgagactgttgtgctccatagtgttgctgcttaaagttaaacaaacatgccttttaagtaattggtcgtgctccacttggcttgcagttttatcttcttcttttttccttttttagattatttaaatcctatgaatttgtgtgtttattgttaaagactagaagactttgatggtgtgggcgggaagcttaacgcctattcaattcatgtatcaacttatattaaatttatggcaataataagttcctttgcaaaaaaaaaaagcaaaaaaaaaaaaaaaaaaattatatttagctaacaataaagaaaacaataaataagggatggaagttcgacctttgaaattttaaaaattaaaaacctttttttgttcctccaaaaatttttaataaagagaaatttttggggggtcctttttgaaggg

SEQ ID NO: 195195 - DNA, 919 bp, Gossypium hirsutum
ttttactcgtgggcggacccgtgggctttttaccattcatagcatagcagcttagtccaactccacacccaccaccattggctgtttgtgatcatccgaaaaagaatggtgaccgtggaagaagttcgtaaggctcaacgtgcccaaggccctgccaccgtgttggccatcggcacatcaaccccgcctaattgtgttgatcagagcacataccctgactactatttccgtatcacaaatagtgagcacaagaccgagttgaaagagaagttcaagcgcatgtgtgaaaaatcgatgatcaagaagcgatacatgtaccttacagaagagattttgaaagagaatcccaatgtatgtgaatacatggctccttcactggacgctaggcaagatatggtggtagttgaggtgccaaagctaggcaaagaagcagccaccaaggccattaaggagtggggccagcccaagtccaagatcacccaccttgtcttttgcaccactagcggtgtggacatgcctggggctgactaccagctcaccaagcttttaggcctccgcccctccgttaagcgcctcatgatgtaccaacaaggttgcttcgcaggggggacggtgctccgagtggctaaggacttagctgagaacaacaaaggtgctcgtgtacttgttgtgtgctcggagattactgctgttacctttcgtggacctagtgacactcacctagacagtcttgtgggccaagcattgtttggtgatggtgccgcagctgttataatcggggcagaccccgtgcccgaaatcgagaagcccatgtttgaactagtctcagcagccacaaacgatcttgccagatagtgatagtgctattgatgggcaccgttcgtgaagttctcttacattacaccttcttaaggatgtt

SEQ ID NO: 195196 - DNA, 567 bp, Gossypium hirsutum
attcaacgagtctatagccttggccgtcaggcccgggtaatctttgaaatttcatcgtgatggggagtgctctttgggtttggacctggcctcactgttgagactgttgtgctccatagtgttgctgcttaaagttaaacaaacatgccttttaagtaattggtcgtgctccacttggcttgcagttttatcttcttcttttttccttttttagattatttaaatcctatgaatttgtgtgtttatgggtaaagactagaaccctgtgatggtgtgggcgggaagcttaacgcctattcagttcatgtaccaacttatattaaatttatggcaataataagttcctttgcaaactattctaccaaaaaaaaaaaaaaaaaaaaaaaaaaaaaaaaaaaaaaaaaaataaaaaaaaaaaaaaaaaaaaaaaagggttataaataataataaaaataaatatgggtgtgggtttttaaaagtatttaattttatttatgtggggtaccaaaatttaatattttttttattaaaaaaaaaggggtattgcctgtgaaaaacccttttttt

SEQ ID NO: 195197 - DNA, 454 bp, Gossypium hirsutum
cccacgcgttcggttttatgtcctatatgttttcatcctgactggaagaatgatcagagggcgggttatattgatttaaaacatggataaactcattggtagctttgagacaatccacgttcaagatgctgcttggcatgagcttgcacctcgtcttggtaatttgttcacaattggaaaaggaactaagccatgtgtattccttcccaagggcaatggtcttaagtcgtccatcattgtcgatgctaagaagaggcttgcggcccaaaatgctgcttgaacattaacacaagatatctagatatgccttgctgctgtagcctattctggagttactagatttcttgcatttggttatgaagaaaattttgagaactattttcttcttgcaatcttaaattgttcggttgggtaatgttagtgaactttcaaggctatattttaaatgaatgct

SEQ ID NO: 195198 - DNA, 445 bp, Gossypium hirsutum
aaagcggccacggctgctgctgcagtggcaaatgttaattctgctcaagattagatgagcggtaagactgatgagctgaattatggttataatgtttctgaaagaagaaaattgactagttgtgcatttggcatccagtgttattctgcatcaagctttgctgtagttggtctatagataagagaccaaagattgcagtgtcattttcttaaaagaactttttttcctttattccttcttcagttgctgcttggtggcttttttactgcttatatggtgtttatgtacagttagagtaagcggaaacctttattatattaaactggggagggatggtaaacggtaaattgtagatgaagaaaattttatgtagggaaacatgttaatttctccctaatatttgatgcagtttattattaatccaaagcagtggattgttttctct

SEQ ID NO: 195199 - DNA, 399 bp, Gossypium hirsutum
gtttttgctcttttcccgttttccatttcctatcttcacagcggcatccagggtttgggagggttgaatatgagctctacgggtggatcaacgaaaggagggagagggaaaccgaatgcatcaaagtcggtttcgaggtcgcacaatgccggtcttcaatttcctgtcgggaggatcgccaggttcttgaaagctggaaaatatgccgagcgtgttggtgccggagctcccgtctatctctctgccgtgcttgagtaccttgctgctgaggttctagaacttgctgggaatgcagcgagagacaacaatcagacccgaattgttccaagacacatccaactggcagtaaggaacgatgaagagttgagcaagcttttaggttcagtcactattgcaaat

SEQ ID NO: 195200 - DNA, 421 bp, Gossypium hirsutum
gacgatctgtcatcatccccaccgtccactttatcatcatcaacatcatcatcaccatcaggctcgattcaatcagcaacagctccgtcgtctccttcaacactggattctcccaccagacgtctgaaaatgacaagctctgaatagagcagcatattttactactaataaaaaggatttcaacttttagaagactagaccaaacccctccctgcaattctcccgttaatattttttgacggttcttgttgcgctttgcaaatcaatcaaagctcccttatcttcttctttctaagttttcgtactttctgttaatcatatttatataatggaacaaaatgggattccaattactaactcagattaaattatatttattcttctttttttacatatatttgaggccaatttcttttgggtt

SEQ ID NO: 195201 - DNA, 665 bp, Gossypium hirsutum
cccacgcgtccgcccacgcgtccgcccacgcgtccgcggggataattggaggacagctcaagctgttgctagggaggtgggtatccgagatgttagggcagaggtaatgccggctggaaaagctgaagttgtgcgatcattccagaaagatggaagcatagttgctatggtgggtgatgggattaatgattctcctgcactagcagctgcagatgttggtatggcaattggggcagggacagatattgccatagaagctgcagactatgttttaatgagaaataacttggaagatgtgatcacagccatcgatctgtccaggaaaacatttagccggatacggtggaactatgtttttgcgatggcgtacaatgtggtggcaataccaattgctgctggggttttgtatccatcattagggataaagttgccaccatgggcagctggtgcctgtatggccctttcctcggtaagcgtggtgtgctcttctttacttcttcggagatataaaaagcccagacttaccactatacttgaaataactgtagagtagaaacaaaatttgaacaactatttttctctccatcgccttcctttaggtttgtgtttttataaagaggggaattgagggggtgcgagtgaatcataaatttcccaattttgtg

SEQ ID NO: 195202 - DNA, 404 bp, Gossypium hirsutum
tctgagagtccttcggtaaaccgagcctttgagcgaatgtctagcttcagtaggttgagaatgaatgttagaaacaccaatgcgttgatagtcaatggtggcacaactgctcggaggagaagcaggagtaaggggttctttttcttttctattttaggtgcgttgtgtgccatattatggtttctgatagggatggttagggtcgtaaggagttcgatctcctcgtgaagatataatgtaagtgggaagttttgttagttatgttctactgggaagttggtgaaattgttgcatagtgaagtccaaatttgtcattaaattaaatagtttttaatgtctcaggaagaagtgttagcagaaggaaagcataataggtaccttgaaatttctttgtagtaggcgtc

SEQ ID NO: 195203 - DNA, 743 bp, Gossypium hirsutum
tttttataaactcatcacataataccatagcacatgcatgcataataaaatagatttacaaccccataatcaaaataggccaacacatatggttaaagccatatcacataatctaatatttaaactcctatacatgtcataggctcaaagtacttgaaatcactacaccaatagcgttagcttgacagtgtgataatatctctgacggcctccaacccgagctaacctggaaactctagaaaacatgggaaagaagagggggggtaagctttcgcttagtaagttcatatgaaaacaataagcaactcattaacttgttttatcaatgtttacaacatattctcaagttcactacaagctgtctttctgagcaacggtcactaaattatttatatctggagctacggaactctgaattaagtttcgttaattttccctgaaactagacttatttttctttcttccataaaattttcaaattttttggtttagccaaatagtacagtttattcctcaaagttacccctgattcactgtctgacagttccgacccttctatactaaagttcaattatctcatagtacaagactcaaataatgttctcgtctatttatcttgaaactaaactcatatgtctacttatttttttctagaatttttggttgggccaattagtacagtttattagttaaagtctcccctgtttcagggtatgaccactctaacccctgtgcactacaaa

SEQ ID NO: 195204 - DNA, 485 bp, Gossypium hirsutum
aagagttctgtagtgtaggtgatgattcctgcctcatactatgggatgcacgagttggcagtggccccactgtcaaggttgaaaaggcacataatgctgatctccattgtgttgattggaacccccatgatgacaatcttatcctgactgggtctgcagatcatactgtacgtatgtttgatcgaagaaatctgacttctaatggaattggatcacccatttacaagtttgagggtcataaagctgctgttctatgcgtgcagtggtctccagacaagtcatctgtatttggcagctctgctgaggatgggctcttgaacattcgggactatgacaaggttggcaagaaggtggaacgtgcttcaagatctcctagtgcttctgcgggactgtttttccagcacgctggacacagggacaaagttgttgacttccatttgaatgcatcttatccatggactgttgttagtgtgtctgatgaactg

SEQ ID NO: 195205 - DNA, 591 bp, Gossypium hirsutum
agagcatggactttacaagatgttcaagtgtattttcaatcagtaattgcaaccaaagattgtatctactttatctactgccttacatttgtcacttcacatctttgccttaaatttgctttgattcccattttatgccgatcagtcgaacgcattgcaaagttcttaaggcataattttagtcgttctaccttgtccgggaagtatttggaagatccttgtgtgtgggtagaatcggacaccaccaccctgagcattctatcatcacatgctgagattggacttggctggcttctacttgtttccttgttctcgtggcaacgcaacattgtacaaactttcatgtactggcagctgttgaagcttatgtaccattctcctgttagcgctggttaccaccagagtgtgtgggcgaagatcgggaggactattaatccacttatcctgcgttatgtaccatttttgaacactccggtttctgcaattcagaaatggtggtccagatagaagtaatatacaaaggattctttcttcgttttctagctttttttttttttttgttgggtggaggggggataaaatgaagttcta

SEQ ID NO: 195206 - DNA, 815 bp, Gossypium hirsutum
  unsure (1)..(815): unsure at all n locations
cttttcaaggagggatcgttttataacgcttttaccttcttggatgccttaacttgggggggggcgggggcccaaacacttagtgttgcttattcttaagggaacatttacgtgaacggaaatggaaggggtaacaccactatggttggaggaggagctgccgcaacatcgccaccacctcagcctttaacaccgtctaccactagcgcagtttcaccgggtttatcaattcagagttcagaagtaccagaaaatccaatgggactttcaccagcagcagctactacagctaccaccaatgttttcgctagcatatttgcacccaactctcaaccatccaaaatctcagcacccctcgtcgttccttcaggcgacgacaccattggagcgcacatccctctcgctttcctctccactctacctatccaacaatgggctcctcatcttttgcgggacttgaaacgaccattggcactatgcttcaatttcccaacacgaatgtgccgtatcggaatggttccaaaaagttgcccaattggtgcccccggtttcaaacctcaatgcttcaggtctaagcttgcagtatatcagcttccctgctgtcagatcctaacgtaagtcgagagcatcagcacagcagctcgcctggctccctaaaacggatttggtaaccatccatatggctatccccgtgtgaacagcctcaancttatatttgcctgatggcaaaagggatttatagggtatccgggctcactcttgggggtgataaagacgcccccctccggcggggggatttccaaaacgggggggga

SEQ ID NO: 195207 - DNA, 419 bp, Gossypium hirsutum
tttaaaaaaaaaagaaaatcctctgaaagaggaatggggaaggggctttcagcgctccgttgagcttccgtctccgacctttcacgcgcccacgcgccgccaaatacggtggctcagaaggctaaaaaccttcgttattctgggtaaaacacaggttaatggcgcaatcttcggcggtgggtcatgatccatgcgccgattgcggcgtggcatgggaactggaaccacagcgctgatggtggctactagaacggcgtgattcgaaaaggcgcgtctttcgggatgattgcggcgcctagggtttctgaaaccctaggcttctctttattctgctaatatcttgggcccgttgggctctgtgtactttgggttgagggtggaaatgggtctgctgggtggttgggtttactgggttattg

SEQ ID NO: 195208 - DNA, 518 bp, Gossypium hirsutum
gtgaagatatactttgtctcccccgacattgttaaaatgaaggatgacattaaagattatcgaacatctaggggtgtcgagtgggaagaaagtggtgatttaatggaagtggcgtctaaatgcgatgtggtgtaccaaactcgtattcaacgagaacgcccgggagaaaggatccatctttatgaagaagctcgtggtaagtatatagtggatgagaatgtgttgaaggtaatgcagagtcatgctgtggtaatgcatcctctcccgaggcttgatgagattaccgtcgatgttgatgcccatccgagagctgcttattttagacaagcaaagaatggtctctatataaggatggctcttttaaaattgttgcttgttggatggtgaggagaagaaaggggctatttttggatttattttgggaaatttggcatcttttaattcagcttgattagggtaatcattgtgcttttgagaaactgaagcaaataactaaaaaaaggatcaatttcttaata

SEQ ID NO: 195209 - DNA, 341 bp, Gossypium hirsutum
  unsure (1)..(341): unsure at all n locations
gaatccctatatatatttgatnaaaactaaactagctgtgttattattgtgaaatgcaaactgaactaggataatgactttgatctgtcggtggagttgatgttgtttgcaagtgtacaacttatagtaggtctcatgggtaggtttgctattgttggccatgagagtgttgtctaaatgtagaatcaattctcttgttctcctattgcctctaggtggccgttgtgatgtcttttaaacctgggcaccatgtctatattctttctgccaattaacaaactaagctatctaggatctgctatgtatgtatcttcaccttggctgcttctatctcgtatttt

SEQ ID NO: 195210 - DNA, 696 bp, Gossypium hirsutum
caccgactcatcaggcatatcaaccggcccctttttttttgtactctcaaccaccacaacccctgcaaggccaaccttccatgggccaccatcctgatgaggcagcttatgttccttctcagacctatccaccaaacctgcgccagccaccctctcagcaacccagtggccctccttcctcccaacagtattttgggattccacctcaaatgcatgagccaccatctagaaggcctggtctaggattttctactggatatgtcccacaatctgggcctagtgaacaatatgcttatggtggatcacctccacagtatggcagtgcctccccaatgaaattgcagcagctcccctcttctaccggaagtggttatccgcagcttccgacagctagggtactaccacatgcattacctactgtatccgggggtggtggtgaatcagctccgtctggacctggaaacagggttcccattgatgatgtggtggacaaggtaaccggcatgggatttcctagagaccatgttagagcaacagttagaaagttgacggagaatggccagtcggttgacctcaatgtggtgttggataagcctaatgaatgatagtgatatacagccacccagagcttggtttggcaggtaaacctgtggtatctttaattcagtcatgtatagaaattatcacttgattctc

SEQ ID NO: 195211 - DNA, 1013 bp, Gossypium hirsutum
  unsure (1)..(1013): unsure at all n locations
ctataaaattcacaataaaatacttcatcaacctctttactttctcatctcatcttgatttcccttttagcttttaacgaactcctttctttctctagatctctcgtccttccatctctggttttctttttatctcacattaatataatcaatatctcatagttctttccttgttgttcctcttattcgtgtgtttttgaatgctcatcaacatcttgtccctgatgtttgaggacttcatgtctcccgtcctcagtgaaatcctcctttctgggtttaatgatcaactctactctgaggcgcaggacccatcttgttcaatctttctctggtggcttcctttactggttctacgttttttatgaactctctctctctctcccctggatggtaccccatagccngccttatnttcttcagctttncttcaccatntttatatagaatccatactgagtttctttgcatataaaatttctgggttctgaggccagttggtgtttcttttgtttggtttattataattggtgttgttacttatggctacttcaagcagtggagcatcctcaggtccaagcacgctgagaagctcgagttcatcgagaggattttcagccgattttggatgaaaggaagcgcaagagaatgctatccaacagggaatctgcacgccgctctcggacgcgtaaacagaagcacctggatgagcggacggcccaacgctctgatctcaccaaccacaataaccagagccgcacaagcatcaagggcaccacgcagcttgactccaacggtgaggcggagaacttgggtcgtagagctcagatgactgagctcagcaacaggttgcaatctctcaatgaaatcattcatttcataaactccagcaatgggggtctccaaaatgacactaactttgaccaggcggcctactgtcatcctcatcatcagctcaatgatgatagtttaatgaatccatggaatttttccacaaccaatcaaccctttatgcc

SEQ ID NO: 195212 - DNA, 734 bp, Gossypium hirsutum
cttaccttagcacatgtaaaatcccatctgcagatgtatagaactgtgaagaccactgacagagcagcagcatcgtcaggacaaatggatgcatttgaaaatggatcatctggggatacatctgaagatatgatgtttgaaattcaaaacccaagaagatcagagatatcagttcagcagggaagatcgtcatcatcaaatgctcatcaagacaaagagtaccatggactgtggagcaattcgtcaagggaagcttggctgcatggcaaacctaatgattctcctctaaacttaccatctctccagaaggatatggatccaaaatgcttaagctatgagagaatatcagatgtaagctcatcaagcctttcagagacatgctccaagaagcctaatttggagttcacattgggggttccacattgatatagatataaatgattttatatattagggtgtgtactgctcattttgaaatgatcatatatatctctgactccgaagagaggagaagggggagttggtgaagagaatcaggtaccctctctctctctctctctctctgattgtaaccccatagcccgctcttattttcttcagcttttcttcaccatttttcataaataattccatatctgagtttctttgcataataaaatttctgggttctgaggccagttattggttcttctgttttttttgttataattggtggtggtacttatggctacttc

SEQ ID NO: 195213 - DNA, 556 bp, Gossypium hirsutum
cttttaacgaactcctttctttctctagatctctcgtccttccatctctggttttctttttatcttacattaatataatcaatatctcatagttctttccttgttgttcctcttatttgtgtgtttttgaatgctcatcaacatcttgtccctgatgtttgaggactcatgtctcccgtactcagtgaaatcctcctttctgggtttatgataaactctactctgaggcgcaggacccatcttgttcaatctttctctgttgttttcctttactggttctacgttttttcatgaactctctctctctctctctctctctctctctctctctctctgattgtaaccccatagcccgctcttattttcttcagcttttcttcaccatttttcataaataattccatatctgagtttctttgcataataaaatttctgggttctgaggccagttattggttcttctgttttttttgctataattggtgttggtacttatggctacttcaagcagtggagcatcctcaggttcaagcacgctgagaagctcgagttcatc

SEQ ID NO: 195214 - DNA, 871 bp, Gossypium hirsutum
aatttctaggtcttctctccccaattacaatcgaaatcagggtttttccctatccaaattctgatttaacccagtatgcctcaacgtcactcgaagaacaacaacgatttagccttcttcacgtacgatgagaagaggaagctaggttacggtactcaaaaggagagattaggaaaagattccattaagcctttcgatgcttgctgcctttgcttgaaacctttcatcgatcccatgtcttgccaaaaaggtcatgttttttgcaaagagtgcattctcgaatgccttttagcccagaaaaaggatatccaaaggaaacttgctgctcatgctgctcagcagaaactagaggaggaggaggaacaagagaggttgatattggagacagcaagagagctggacgcattcgatcaacaaaatcacggtgccttaccacaatacaacgacaagaaacacagcagagacaagaatggtttccacggagcaaacagtgtccaagtcacatcttttgaagaggaagcgctccggacaatgaaagcattttggcttccctccgccactccagaagcacctgttagagtcgacactccctcccaccagcacagtctgtccagagggcaaagaaaaactcaaactgaaaaccctttttcctatctacttcactgaagatgagagcgagcaaaagaaatccaatctcgataaaacctatatctgcccgagctgcaaggtcactttgaccaacacattgtcgttggtagctgtaagttcctgcgggcatgtcttttgcaagaaatgtgccgataggtttatggctgtcgataaagtttgtttagtctgcgacaaaccatgcagagagaggaatttggttact

SEQ ID NO: 195215 - DNA, 772 bp, Gossypium hirsutum
cccacgcgtccgcccacgcgtccggctccgtcagtgctcaaagcacgaataggattgaggagctacttcaagaggatcaaaatgtaaagcgtataagggagcgtttccagaagcagtcatcacttctttcaaaattaacgcgccaacttagcatacacgacaatcgagctgcttctgcttctgattggtctgacagtggcgctggggcagaaagtagcccgagaacaagtggtggctcagttggtgacgactggaggactgcatttgatgcagctgctgctaacggccctgtggattacaggaggtctggctctaacggtccaacacaaaacggtgacgtgaattctcgatcagggtccaacagtcgtcgtacccctaaccgttggccgcccgcgccgccacaatctggctccggttacaaatattaatggtcataattcttaattatgaaaagcctacttcatgatttaagcattttatcttttttcaaaattctctacaaatagcccattaaaacaggagacttgaccgagacgagacagacgtgtgtgtgtaaataggaccatagttgctatatttttcaagttcaacggctgtgtcctaactttggatctaatttttctactcaagttttgtcttatttttattaatgttatgttttttttttcatttttattcttggttataattttcctattttaaaatccatccttccacggatttatttgattgtattgactattattgatgctaaaaaattgtattcggattt

SEQ ID NO: 195216 - DNA, 648 bp, Gossypium hirsutum
cccatatttccttgttctttgtcttcaattttaaaaaacaaacaacttccatttttatttttattttattactaaattctacttattgaaaaaaattatttgtttttttttattatcttttatacgcaaatatatataaaaaatccatttacaaacatgaaaggtgaatatttagaatccaaaaatcagaaccccaataacatgttctcaaagctccaccaccaccagcaccaccctcatcaacatcaacatcaacatcaaccccaacaccaaactcaccctttctctcatcacttccaactctctcgtgattctcagactcccgactctgatgacactacccatacccctcccaaagatcttaccaccaaccacagcccttctctccccagtggtggtggcaacggcggtgcttctcgtggtggtgccaacagtggcgacggtgctagcatcgaaatcgttcgtagacccagaggtcgtcctccgggctcgaagaataagccgaagccgcccgtcatcatcactcacgagcccgaccctgcgatgagtccttacattctcgaaatccccggagggaacgacatcgtcgaagctatctcccggttctatcgtcgcaagaacattggaatctgcgtgctcacggcatct

SEQ ID NO: 195217 - DNA, 902 bp, Gossypium hirsutum
gcgtccacgcgtccggatcgaagcattaagctctggaacacccttggagagtgcaaatacacgatccaagatggtgatgctcataccgattgggtcagctgtgttcgtttcagcccaaatactctgcagcctaccattgtttcagcttcttgggacaagaccgtgaaggtttggaacttgactaactgtaagattcgcaacacactggccggtcactccggttatgtgaacactgttgcggtttcacctgatggttcattgtgtgctagtggcggaaaagatggtgttattttgttgtgggatttggctgaaggaaagaagctttacagtcttgatgctggttctgttattcattcgctttgctttagccccaacaggtactggctttgtgctgccactgagcagagcatcaagatctgggatctggaaagtaagagtattgtggaagacttgaaggttgatctcaaagctgaggctgagaaatctgatgtcaccgacaatgcaaacaagaagaaggtgatatactgcacaagcttgaactggagtgcagatggaagcaccttatttagtggttatacagatggtgtaatcagagtttggggaattggtcgatactaaaaccaacattcatgcatgcatgttgtgccttccaatgagtaatcatatagtatgaaggaacatgtagtgatacttttagttgcttctcttagcattttcaaaacccttttaaaagatttttgcttaaatatgttcgtaaaggaattgcttttcattttttgtttggaaggtttttcatttgaagcccttatgcacctttattgataattttgggtttgggcgttaacatttaaaaaaattatttttaaattaattttaaccatgaaattcgttttccctctctt

SEQ ID NO: 195218 - DNA, 700 bp, Gossypium hirsutum
  unsure (1)..(700): unsure at all n locations
gctggttctgttattcattcgctttgctttagccccaacaggtactggctttgtgctgccactgagcagagcatcaagatctgggatctggaaagtaagagtattgtggaagacttgaaggttgatctcaaagctgaggctgagaaatctgatgtcaccgacaatgcaaacaagaagaaggtgatatactgcacaagcttgaactggagtgcagatggaagcaccttatttagtggttatacagatggtgtaatcagagtttggggaattggtcgatactaagaccaacattcatgcatgcatgttgtgccttccaatgagtaatcatatagtattaaggaacatgtagtgatacttttagttgcttctcttagcattttcaaacctttttaaagattttgtttaaaatgttgtaaggattgcttttattttgtttggaggttttcattgagccctatgctcttatgttattttggtttggttgttacattagaagatattttacttaaataaaaaaatttatagtattaacttagtgacttttatttccttgacaaaatgcaatttttgcnnnnnnnnnnnnnnnnnnnnnnnnnnnnnnnnnnnnnnnnnnnnnnnnnnnnnnnnnnnnnnnnnnnnnnnnnnnnnnnnnnnnnnnnnnnnnnnnnnnnnnnnnnnnnnnnnnnnnnnnnnnnnnnnn

SEQ ID NO: 195219 - DNA, 934 bp, Gossypium hirsutum
  unsure (1)..(934): unsure at all n locations
cttcaactgataatttcgaaagaggttttcgattacgctgatcgaagaattaaagggataagtaaacaagactggtagaatggctctagttgcgggtggatcgtcaacattgaaccccaatgcccctctgtttgttccggctgtttatcgccaagtggaggatttctcacccgaatggtggaaactggttacgacaacaacatggtaccgtgactattggatcagccagaaccaggatgaagatggcttttacgacaacacagaggatgatgtatttgatgtcaatgacattgttgatttgcttgcagatccctttgactttgtctctgacgaagatctccagttcgaagagttcatccaatctaatgaaatggaaaccatagcacctcctttaccgtcaaatggtggtacgtacgagtaaataaattcttacgactctggaaatggagaattatgtgtgtgtttgtcgattctacttctacttgcatttatcatttcatcaaattacattaggctttgagaagggtgttgaatctctgatgaagaatctgagtttggtgccatctagtcctcggttttcagcagaaccggcaaaatacgtggagaagccggcgaagactgtgaatgctaaaagtggtcgtcgttgcatccatcaacctcgttgaatgtgtgtattagccgtccaggttttagctgaaattctctggtcgtttgtaactgttaacctttgtagattttcaagttctataactctgctaccattctaatgcctttgtttctagttgacgatatatcaaaaaggaaaaaaaatgtaaaaaagaatgtaaaattttagaaaaaaaaatagaaaaaaggaaaaaagagagaatcatctttcatcananaaaaaaaaaaaanaaacacccnncctaaaaaacccaaactaacnaacccc

SEQ ID NO: 195220 - DNA, 1082 bp, Gossypium hirsutum
aatgagccaattgtggttgatgctgcacgtttgcaacctcttggccctgctgccatctttatgcaaggaaccaaaagaatgcctggcacagcagttacaaagtctgttgtagcaaatgagcctggaggccggaagagagaggaagtttttgtggatataattgagaaaatcagtgtcacatttagctctagtgggtatatactgacttccgagattgatggcactattcaaatgaaaagttatttgtcaggaaatccagaaattcgactagctcttaatgaagatctgagcataggaagagggggaacagtctatgactataggagttcatctggttcaggcgctgtgatactcgatgacttgtaattttcatgaatcagtgcgtcttgatagttttgacatggacaggactctatctctggtaccaccagatggtgaatttcctgtcatgaactaccgaatgacgcaggaatttaagcctcctttccgtattaattgtttaattgaagaagctggacagcttaaagctgaagtgattattaaagtacgcgcggagttcccttcaaacattactgccaacacaattgctgtacaaatgccacttcctaaatatactactagagctagttttgagttggaacctggagctgttggacaaagaactgatttcaaagaagctaacaagaaacttgaatggggattgaagaagatcgtgggtggatctgaacatacacttcgtgcaaagctgacattttctcaggaatcacatgcaaacctcacaaaggaagctggtccagttagcatgactttcacaataccaatgtataatgtttcaaggcttcaggtgaaatacttgcagatagcaaagaaatccagctcctataatccatatcgatgggtgagatatgtcactcaggccaattcgtatgttgctcgaatatgatacagtcaaacctctctttttctttaatatgttctgtatttgttgactcccatatgacacttttttccttttttttttcccttttcactaactgctttaaacatctttatcatgtagccattacctgatttctatgtta

SEQ ID NO: 195221 - DNA, 383 bp, Gossypium hirsutum
tttcttttaaaaaaaactaaaaaaacctctgaaaaaagggctccgaccctcggagctccgacctcatggccgtcctggctcgtcctagggtctggcgtgcttggtctccacgcgcttaacgagccgccaccagagccaccgtatacggtggttagggtttcaaaaaccctcccttttctttgccgattctcaggtacttgcaaaaaaatctggcaatagcaaaggcttgacgatggtccactggtggcgttgatctcagcgtgagttggggcctagaatcatggccttgatggggtagcaggagttgaagagtcatgaggcttggcttctggaaccttctgtttgcggcgcgaagagaaagatggcagaaaccctagggtttc

SEQ ID NO: 195222 - DNA, 767 bp, Gossypium hirsutum
aaaaaataaaaaaaaacctcagaaaaaagggctccgaccctcggagctccggcctcgtggccgtcctggctcgtcccagggtctggcgtgcgtggtctccacgcgcttaacgagccgccaccagagccaccgtatacggtggttagggtttcaaaaaccctcccttttctttgccgattctcaggtatcaaccttctccctctgttttgagtttctatttttttagatctgcgtgtgtgcatgttagtaaatgaccagaataagattaaaaaagaagaaaacgattcgattacctttgaaaaacgagattcgccttttatttctctgtttcaaaaggattacaatggttcgtgctattctattaggtaaatccctataccttccttttttgtttctctttgcttctaaaaactctctttttttgattccctattattcttctctcggctttggtgtgggtgtatttctgctatccagtctctccctccccgtgtgtccttttttacagaataaaaagaaggctttatagcctcgactactacaatttttggaaagaaatctttgatttctttccgtatttgcttcccatgtctgctgtgattttctttccttttcttgcaggtacttgcaaaaaaatctggcaatagcaaaggcttgacgatggtccactggtggcgttgatctcaacgtgagttggggcctagaatcatggcctcgatggggtagcacgagttgaagagtcatgaggcttggcttctggaaccttc

SEQ ID NO: 195223 - DNA, 585 bp, Gossypium hirsutum
gcaaaatcctctcaaagaatgatgaacaccaccaaaagcaccttcatcttggctattcttatgatggcagcggcttcagtatgcgcagccaccgggcctgattttttcgatcccttttcatcatcgtccgatcaaaagctcaagacccaccagaaccaagttggtggggatgatgggttctacggaccagacgattttgatattccagggtttgaaaaagggtggggaaacgggatcatgggtggtggttacggtggtgggttcgggggtccgagtggaagtttctccaaaggtggcatcgttaggcctagtgttgtttgtaaagaaaagggtccttgttacaacaagaagctgacctgccctgctaagtgcttcacctcatttagccgttcagggaaagggtatggcgtgggtggcggtggtggtgggtgcagcatggattgtaaggaaaaatgtattgcttattgttaagagggtgatataaacatattaaaaatgagtagccctagttgttaaaccatgtatgattttatatgatcagatgcatggagtttataattaaaaatcataatatttatgtggttg

SEQ ID NO: 195224 - DNA, 695 bp, Gossypium hirsutum
  unsure (1)..(695): unsure at all n locations
tttccacgcgcccgcaagtgggtagttgttgcagaagagtaaaatagtaaagagtcacagctgaggcacggaagaagatgccttgcctaaacctttcaaccaacgtcaatctcgacggcgtcgacacctccgccatcctttccgaagccacctcttccgtcgctaaactcatcggcaaacctgaggcctatgtgatgattgtgttgaagggttcagtacccatgtcatttggtggtaccgagcagccagctgcctatggagaactggtatcaattgggggccttaatccagatgtgaacaagaaactgagtgctgcaattgctgcaattcttgaaaccaagctacaagtgcctaagtcacggttcttcctcaaattctacgacaccaagggttccaactttggatggaacggatccaccttctgagcctggcatgttctgaatttctcgaaacatcagtgatgtctattcaaaacaatcttactcgtatgatgaactggtgtgagaagaaattgttaaaacttggcatggtattttaagttgtttatctacgtgtttctgtanggattatgatatgtaaacgttcatgaacactaatccagccaggagcagtatgttatcttggctattggcagtcttcanatannaacgttgaaaactcttactaaaaaaaaaaaaaaaaaattctgcggccgg

SEQ ID NO: 195225 - DNA, 417 bp, Gossypium hirsutum
ttttgattccatgagtgccggaaaaaaatcaaagagtatcgatgaagactaggggtaaaaagaagagctacagagacggctgccaccaatcaaatatgacacaaacagaaacctaaagacttgctatagaaagcagacagagacgtgctagggtagaagacttatgtggatactgtggttttttgactatggaacctttaatgatacatattccatatacaaaacaaacactatttcgaatgttgcttgaaaatgaaaatggataatacaattggtaataaaagcaccataaaatttattttatactgaggatgacctgattcagaaatttgctactggtgtctacatggttactgcattgtctcttgccatctaatacccgacccttgcagctgcaccacacatggttcatcaatg

SEQ ID NO: 195226 - DNA, 1127 bp, Gossypium hirsutum
  unsure (1)..(1127): unsure at all n locations
aataactggtattttgaaatctgagaatcagaagtctgcaactccaaaaccatctgaacctactatcccacaagtccctgtgatgtcaaggccctccagtgcccctctaatacctggtaccaggccaactccttttgtttctatggttcaaactactcctttgcttgctcgatcagttagtgctgttggccacttaggccctgacctatccccagctgctggttatgttcctcaatcttacagaaatgccataatgggtaaccataatgttgcttctagttcggctggttttactcctaactctcctanctcaggcatcaacccatcactagtatactcacaaccacctaccttggtttctgcaccactgtatatgcccccgagctctgggaagatggagccaaattctgtccaatcaggccttccatttggcttggtaactnaggaaaactttcggagtgctccccactggatggagaattctcagaaggatagcagtagaagcatgcactctaatactttgcttggtgaatttgaaaatcttgacttgtacaggtctgtgcaaaatgggtcccgggaacacttctcaatggagtttccagcatgtgcatctgggcctcagacccaaggtgtcttggcagacgagtttccacatcttgacatcataaatgagttgcttgatgaggagcacaatgttgggaaggcagctagggctggagcaggcttccatgctcttggcaatgagccatatttattaaatcagcattttccttttcattccgatttgggcttgtcagatggaatgggatcctcaagtggctcgtgcagatttgagcgaatgcggagttaccataatgaatgggttccaacaaggttatagtagctcctccagcaaccatttcgatacagagagggagtttattccacaagctagccccctacgttatgctaatggacaacagattgatggactggtcccaaaccggtggcaaatggcatcttcggatctgtctttactcagcatgaggaatgcagatggtgaaaattacgcatactacagcccagagtatccgaatatggcatgtggcatcaatggctataccgtatttcgaccttcgaatgggcac

SEQ ID NO: 195227 - DNA, 1463 bp, Gossypium hirsutum
ggacgcgtgggctaacacacattcttcactattttagcaaagcaaaaaaaaaaaaaaaaaagggaaaaaaatggctatgcaattcaatcccatcgcttctcaaactaagaaactcccttcatatgctcttccacccatggcaagtcttagatctcccaaggtttctatggtctccactcttccacctcgctccaaaggggttgaagatctgaaacggcctttcatggctccaaagctggtacaccaggcttcccacaccatgccacctgagaagattgaaatctttaaatctttggatgattgggctagggataacattctgattcatcttaaacaagttgataaatgttggcaacccaaggattttcttcccgatccttcgtccgatggatttgaagatcaagttagagaacttagagaacgggcaaaggagattccggatgagtactttgtcgtgttggttggtgatatgatcacggaggaagcccttccaacttaccaaactatgcttaataccttggatggaactcgtgatgaaactggtgctagccctacttcttgggcaacttggacacagggcctggactgccgaagaaaacagacacactgatctacttaataagtatctctacttgtgtgggagagtggacatgaggcaagttgagaagaccatccagtatttgatcggttcaggaatggatccgggtacggagaatagtccttatctgggattcatctacacaacattccaagaaagggcaacttttatctcacatgggaatacagctaggctagccaaggtgcatggtgacatgaatttggctcagttatgtggttcaattgcggcggacgaaaagcgccacgagacagcatacactaaaatccttgaaaagctctttgagatcgatcctgatgggtcagtcttggcatttgctgacatgatgaggaagaaaatctccatgccagcccacttgatgtatgatggccgtgacgaaaaccttttctaccactactcgtctgtcgcacaaagaattggggtttacactgcccgggactatgctgatatagttgaatatctggttgaccgatggaagttgaaggaactcattggactttcacccgagggccgtgaagctcaggaatttgtgtgtggacttgcaccgagaattagaaagctagaggagagagctcaattgaggaccaaggaatcacccagtgttccattcagttgggtttctggtagagaagtgaagctctaaattggctatcctccaagtgacttgtaatacaagaaagaaacaacagggcttagggaggagcatgatgaaaactgcaactctgtgtttagctggaatgcaataagtggaggaagtgtgtgtgtgctgtttcgttgttacttttcttaaaacaagtaatatcaacatcttcctcctatttgatgaaatgataaacgatatctatag

SEQ ID NO: 195228 - DNA, 433 bp, Gossypium hirsutum
cggacgcgtgggtgcagctcctaatgacaggatcttagaagatggagatatggccttgctggacatgggagctgagtacagtttctatggatctgatattacatgcacattccctgtgaatgggaagtttacaagtgaccagagccttatatataacgctgtccttgatgctcacaatgctgttatagctgcaatgaagcctggtgtgagctgggtggatatgctcaaattagccgagaaaatcattctagagtcgctggaaaagggcaacatccttgttggaaaccttgatgatatgatggttgaacgagtgggtgctgtttttatgcctcatggtcttggccatttattgcgtattgattctcatgatcctggtggttatccaaagggcatagaaagaccaaacgaacctggtttgaagtctttgcgtact

SEQ ID NO: 195229 - DNA, 534 bp, Gossypium hirsutum
cccacgcgtccggaaattcacccttgacagtaatatatgttgtatatgtaaatcctagatgtgaaaacaggcgtaattcggccctgaaatgaaaaaaaagggaatatagatggaaaaaggggggagaggttggacgtagggtaaaaaaaaatcgatatgctaaaataaaatatgaaatgaaattgaaacaaggctaatgagatagaaataaggaatcataaatagagttcgggttcgaattccatagataatatggatggtgttgcctataatgatggacaaatgaaagactctcccaaaatttttatttatccacttcctattttgaaaataggttggttgaacttaaaaattccttcattgaataaggaaacaatccaattgcatgcacttgaattggatgggaccaacgaaatcgagcgctaacccccatttcttattgaattaaccgatcaacctcctgtcgaagatttattttgtattagataattttgtaaaaaaaaattgacatatttcacttaattatggaaataa

SEQ ID NO: 195230 - DNA, 625 bp, Gossypium hirsutum
  unsure (1)..(625): unsure at all n locations
cttaggtatgcgactgctatcaatgaaaaagatgcagttaggatggcaaaagtagccttacgctgcaggaattcattccccgcacttagaccaaccatgtctgaagttgtaaacacgcttgaaagtcgcaccctggttcctgaattaatcatggacccaagtatattttctgaagagacttgattcggagcaataaaagaccaacttaatctaatgcaatctcagactaataaaaccaccactattactcagtcattgtattctacttcaacagtattgctaggctcttcctcaacacttgctgaacatcaacgaaattcaaagcaaacttgattgatactttgaaaacttgatggacaaatgaagggctctcccaaaatttttatttatccacctcctattttgaaaataggttgttgaacttaaaaattcttcattgaataaggaaactcattttagagnnnnnnnnnnnnnnnnnnnnnnnnnnnnnnnnnnnnnnnnnnnnnnnnnnnnnnnnnnnnnnnnnnnnnnnnnnnnnnnnnnnnnnnnnnnnnnnnnnnnnnnnnnnnnnnnnnnnnnnnnnnnnnnnnnnnnnnnnnnnnnnnnnnnnnnnnnnnnnnnnnnn

SEQ ID NO: 195231 - DNA, 451 bp, Gossypium hirsutum
tcgtcgttctctcaaaattgaaggcgagctatatggtggaatccctcctggtgtggaagctcgacttgctaatctgacactagatacagatgatctgaagaagttctcagaaatgcggaatcgagctgacatgccgtcgactttccagctaaacaaccattactgagctctgcagaatacttgcctgctttctttaatatgcttaacgctcgccgtgctatcgtacctgctgctaatggacactgctcacctcgtgcacttgcacgctactatgcagccttagctgattgcggtgtggtgccgacaccacattcctctgcttcaaatacaccgcttggcagccatcctcatatccccaaatttccttcgaaaataacccattaaaagcaaaacggcatggttgatggtggtgttaaaaatgaaagaagtgatggtaggcaaaacatttaca

SEQ ID NO: 195232 - DNA, 582 bp, Gossypium hirsutum
  unsure (1)..(582): unsure at all n locations
cttaacccttcgtcctcccaacttccacacccatacgaaaatgacaacccgcttcaagaagaaccgcaagaagcgcggccacgtcagcgctggtcacggacgtattggtaagcacaggaagcatcctggaggtcgcggaaacgccggaggcatgcaccaccacaggatcctctttgacaaatatcaccctgggtatttcggtaaagtcggtatgaggtacttccacaagctccgcaacaagttttactgccccattgtcaacatcgacaagctctggtctctcgtcccacaagacgtgaaggcaaaagccaacaaggacgccgcgccgatgatcgacgtgacccagttcgggtactttaaggtccttggaaagggtgttttgcccgaggaccaaccgatcgtggttaaggctaagttggtgtccaagactgctgagaagaagattaaggaggctgatgggacggttgttctcactgcctaggttagggtttttgctttttgttctcttatattatcatctaggacttaatttttgaaatgagattttacaataacattcttaattntgcttcaacaatatat

SEQ ID NO: 195233 - DNA, 592 bp, Gossypium hirsutum
cggacgcgtgggcggacgcgtgggcggactcgttgtcggacgcgtgggcggacgcttgggcggacgcggtttttggtaagcacaggaggcatcctggaggtcgtggaaacgccggaggcatgcaccaccacaggatcctctttgacaaatatcaccctgggtatttcggtaaagtctttatgaggtacttccacaagctccgcaacaagttttactgccccattgtcaacatcgacaagctctggtctctcgtcccacaagacgtgaaggcaaaagccaacaaggacgctgcgccgatgatcgacgtgacccagttcgggtactttaaggtccttggaaagggtgttttgcccgaggaccaaccgatcgtggttaaggctaagttggtgtccaagacagctgaaaagaagattaaggaggctggtggtgctgttgtgctcaccgcctaggttagcttttctgtttttgtggtttttggatttgaatgacatttctgttatattattatcttatgttgtttggagttgatcttgaaatgagattttcaatttattttggtcaattatatatcaaagttgcgacgatttgggtt

SEQ ID NO: 195234 - DNA, 400 bp, Gossypium hirsutum
cctgttgaccctatgttgcttgggttcttcgttttcgttgtcattggatcatctcggttcgagattatgaggacagcgaccagtggaggcatggcataaggctgcatatagcccatgttaaaaaaaaaaattgcagaagccgcttgttatgttctttttctatagtgttggagcgaactgatgatataatatgtttactagatatgcgttgtaactcatgttgtgaagatttcaaaaatttaattagatcagatgaaatgggccacaaaagcatgcctctcgtgatgttaaaacaatgaaaaaaaacaacaaaaaaaacattggaaaaaggatttaaaaaagaaacgaatggctggggtaaaatagggacacatggctgatcgctaggcacccccaggtt

SEQ ID NO: 195235 - DNA, 917 bp, Gossypium hirsutum
gtacgcacaaggaatagcgcaagcatgttgcataaagcacttgttgagtttggttatgatggtaccacaattcaaggtgctctcaatcaagctgaacgagacaagatagtcaaggaatttaaagatggtttgactcaagtgctcatttcaacggacctccttgcccggggttttgaccaacaacaggttaatttggtcatcaactatgatcttcctgtgaaacacgacaaccgtgtggagcctgattgtgaggtttacttgcatagaattggcagagcaggacgttttggtcgcaagggagccgtgttcaacttactctgtggtgatatggaccaaatgataatatccaaaatcgaaaatcattttgacagcaaaatagcagaggttcctgactggaagaatgaggaagactttaaaactgctctccggtcagccggtttattatgaacggaaacccttctgtcaaagctatcttggtgaaatgctagagaagaggaacaaacagattgtgcttatagtatgctgtatactcgactatttgtgcccgattctgttggtttgattttgatttttggtagttgcaccatgttttagtaagttgctgtatgagtatttgaacggaggaaaagggcataaagtcatatgtggtctcaaattggatgcgaagtggggggtatcatgacgatttcagtggatccaaatcatattttatagtatgtaatttatgttctgaaactaaaatttgtaatttgccagcggattttcttggttcaagttcatgagaaaacaggatttcgactcggtatgttatttgttttcctcttaccagaataatcaactattgccgcttattaccgtttgtaacacacgatgattgaaagcagaaggtttaaatactagaggttgtgctccttttc

SEQ ID NO: 195236 - DNA, 387 bp, Gossypium hirsutum
  unsure (1)..(387): unsure at all n locations
ataggccaacaaataagcatttgcttttatggtcctctgtttagatttcctaccttaatgtaggacaggatggctgtttcatcctttcatattttctagaaaatgtaacatttttccttgtcgttaagagtcaatacttttatcgtacccggtgtcagtagaatccttgttttattcggcgcagctcccttcatatacaagctcgcaatatacatatactcagtaacgaggatttcagtttcaaagactatcaagactttgactttgtggttttaagtcaattgaaatctttttaaattataaaatatatagttttattnnnnnnnnnnnnnnnnnnnnnnnnnnnnnnnnnnnnnnnnnnnnnnnnnnnnnnnnnnnnnnnnnnnn

SEQ ID NO: 195237 - DNA, 802 bp, Gossypium hirsutum
ttctgcttgaaattttgcaccatcagggactcgtccgaccagttaatcccttctgtttcggttattcgcttctgttgctaaaatatgtgctaagctatttgtagatctagggatatgctcaaacttgcattctttaaaataaaacgaaagctgatggatgtcatggataaacgcactcaccactgatttatctgggctttttgctttgcacttttttattattgatagagaatctccttcgataataactctttcccactgtttgtgaacgccgatttggagagctttccggcacgccattgcttccgctccaaaagctgaggagaccctttgatgaacctccgaaaaagataagagaactaaaccctctttgtctctggctacaactccaatagccgctttattctgtcctttttcatatgctgcatcaaagttaattttgacaaagttatcctctggtttttttccattttgtaacaatagatggagtttgtctactattttgtgcaaccgattctaactctaaaatgtatctgttaacaaatcttcctatgtcttttccagatttacaccctttattatgcagtctgttattcttatcaccccagatggcccatacagcaacacagaagggcattaacgaaaaaggtgatccatagattcaggtccagatccacaccgaggacacactgaaaagattgttagtcttctaagaagcatattaacccaagttgctagaaaattccaagagatcttccaaactgtaatttttatttttgaaggaagatcaagaagccatagc

SEQ ID NO: 195238 - DNA, 748 bp, Gossypium hirsutum
ttaacttgctagagagctacgagccgttggatgtggtgatttggatgttgaaggtctcacagagtctctattttcatctcacgtggatgaatatcctgaacatgaacaagcatctcttggacaactgtatcaagcaaagttggatgaactgcgtgctgaaaaccccatgggtgctgattcaactggaactatagggcgcgctaaagcgacttcagtggcttcttcgcatcagcaaatatctgttgcagttgtgacagagtttgtaccgtggaatgaagaagcattaaccagatgcactttattttcgtctcagcctgcaacacttgcagccaatgtaaaagcagtgttcacttgcctacttgaccaagtcagccaatatattactgatggactggaacgggctagagatagcttgactgaggctgcagccatgacggaaaggtttgtgctaggtacaaatcttagtagaagggtggctgctgcagctgcttctgcggcagaagctgcagcagctgctggtgagagcagtttcagatctttcatggttgctgtacagcgttgtggcagtagcgtggccatagttcagcaatactttgcaaattctatatctcggctcttattgcctgttgatggtgctcatgctgcttcttgtgaagaaatggctgcagcaatgtctagtgcagagggtgctgcttataaagggctttagcaatgcattgaaactgtgatggctgaggttgaacgatta

SEQ ID NO: 195239 - DNA, 1438 bp, Gossypium hirsutum
acgtgtcttcaaacatgtatagactcattcgcggaatcgggtaacgtatcatcgcagaagaggcaatcaatcttgaagactagcatggagattactagcaatgctttagcgatgcttaatgggttatccaccatcgtgaaggaacttaacattccaaacgtcggcaacatcgacaccacgggggtcaatcgtaagcttttgtcggctgaggatatgcctgagtggattagtcaagctgaccgaaaactccttcaagcaaaaccaatggatttgaagcctaacgttgtggttgctaaagatggtagcgggaaatatgatactattaacaaggcattggctgaagtccccgtgaaaagtcccgatcgatttgttattcacattaaggctggtacttacaaggaaaaaatcaacgtgaccaagcagatgactaatgttgtattcatcggtgatggcccaaccaagaccatcatcacaaatgacattagtgtcgctaagaatccaccggttagaacataccgcactgcaactgttgctgcggatggggctggtttcatggccaaggacattggattcgataactcagcaggacccgaaggtcatcaagcagtggcctttagggccactgctgatagggtcatcatgttcaactgccatttcactgggtaccaagacactctctacgctcacagagagagacaattatataccaactgtctcatcaccggaacggtggatttcatcttcggggatgcggcgagcattttccagaactgtatgctcgtcgtgaggaagccagggcccggaccaaactggcatggttactgcacagggaaggaatgatcttggaacaaactcaccatttgtgcttcaaaactgcaccatctcgggcgcccctgattacatccaagtgaaggatacaaacaaggcatacttggggcgtccctggaaacaattcgctaggtctatcataatgcaatctaagatcgacgacatcattcaaccagagggttatgcccccatgacaggcaccataggaatagacacttctttcattgccgagtttggaaataggggacccggtgctgataccagccgtagggtagcatggaaaggtgtcaaaaagatagatataaatgaagccaacaaatggactcctcgcgtctatctcgaatctgagacttggattccgagttccggcgttccctatagtcccgacatggtccctggagtctaaacagcttattatcgataccaacgccattagtatgcttattatcatatcattgttctaattatgtcgttttttactaattaattaaacagattttttaatcttttatctatctatgtatatatgttaaattctttggttccccaattgttgtttccattcatttgttaatgatgcttgcaaaagccaaaaattaagttaacgttt

SEQ ID NO: 195240 - DNA, 476 bp, Gossypium hirsutum
cggtacattcccgattcaaatcaatcaaacaaattcccctgatattttcttcctccaccttccggtttcgttatatatatttcatgttcaatccttttcatgcttggattaacaccatcatcggttttaagttttcagcactcgttcttaaatatctggttgtttttctgttgggaaaaaaaagttgggtcggtgatgatggagggggaacctgctttaccttcttattataacgttctgggggtcaaggttgatgcttctattcaagatatcaagcgtgcttatcgaaagcttgcaatgcaatggcatccagataggtggacgagaacaccttctctattgagtgaagctaagcataaattccagcaaattcaagaagcctattcggttttatcagaccagaggaagagaactctgtacgatgctgggttatatgatcctgaagatgaagaggatgagggtttttctgattttat

SEQ ID NO: 195241 - DNA, 454 bp, Gossypium hirsutum
gattcctctcaacaatattccaggctttggggattcgagaagcttctgtttagagagtcaagaacgggaattcggcgtgacaggaaatatgcaattcaggcgaagaatgcattcgcaacgggagtgcatatgtcggagaatgttattgggaaaacattacataaaacagaaacaaagattcgttattatcactatcacaacaccattaccgtacaccaagagctatgcagagagtacctccctccctctgccaaaaacaatgtcacttggttcaataagctaccctatgtctacgatgataacatgaagaaactggccaacaccatcaaggaattcgagcataaaaccattggagacctcggttctctatgaccccacaccccacattccactccagcagctaccacatgtatcagtttaatgcgttaatggttgagcattcatggcatatgtg

SEQ ID NO: 195242 - DNA, 709 bp, Gossypium hirsutum
cttttacatattatggatgaactagtcaagaatggcaacgagatcgaggcagtgtacttggccagaccagctggccttacagagagatttgctactgtttctctactcacgtcctatcagcagaattccaaaaagaatgccaccacaatattgaacaatggaaattattccgcagctgcaatggaggagtcaaaaaatgtggagctgaattcaattaaagctattatcaaatgcgttgtagaccatatgcttgaatcagagttttctactgactcgttaagaaagcgagccacgcagctggaaaaagtcaagtcagataggaaaaatgagttcagcagccgctggaaagcctcagaataaacgaagtcatagtgctggtagtgcccgacgcagtggaccacctgctttccgtcccgcaaaagcagctaagttttcaaatgctttatccccctttcaatcgccgaaacccagctccctcagcgcagcaaagcccggctgcacgattttccgcacagtataactatgttggccagaatgttttcgaggctcctactgctccttatgcatcagcatatggtgtgactcactcacaaagtgctgctgcagttactcaacagcactacgtacacccggtggaaaatttgggggttttcagttttccaaccagtggtgcttatgggggtcaaactagttatgtagcatatgacta

SEQ ID NO: 195243 - DNA, 1184 bp, Gossypium hirsutum
tgcctatgcgttcgatttatcctagattgtcactcagatatctttgtctgggttggacaacaagtcgataccaagaataaattgtaggctttgactattggtcagaaatttcttgagcatgattttctcttagaaaaattatctcgtgaagctccgatatacatagtcatggaagggagtgagccaccctttttcacgcgctttttctcatgggactccgcaaagtcttctatgcacggaaattcgtttcaaaggaaacttaccatagtgaaaactgggggtacaccaacagtcgataaacccaagcggagaacgccagtatcatatggtggaaggtctagtagtgtgccggacagatcacaacgttctagaagtatgtccttcagccctgagcgagttcgtgtgaggggaaggtctcccgctttcaatgcactagcagctgcatttgagaaccctaatgctagaaacctttctactccgccacctgtggttaaaaaactctacccaaaatccgtgactccggattctgcaaaaaagtctgcagctatagcagctcttactgcatcgttcgaaaaacaaccaccaccagctcgagagaccatcatacctagatctgtgaaagtgagcccaccgacacccaaaacaacaccgacacccgagcctaactccaaggagaattccatgagtagcaaactagaatccctcactatacaagaagatgctaaagagggtgaagctgaagacgaggaaggccttccaatatacccttacgaacgtctcaaaataacatcaaccgatcccgtttctgagatagatgtgaccagacgagagacatacctgtcatccgaggagttcaaggagaaattcgggatgaaaaaagacgcattctataaattgccgaagtggaaacaaaacaagctaaaaatggctcttcaactgttctaagtcccccctttgattcatctgtgctatttattcaaaacccgctttcaaatgagagtgcagtgggaagaacccgaacccgttttctcaggatcgaaaaaaaaagggacagcatcagtgcatatttagctgcttctgctcccctaagaagcttttggtttttctcttttttgggtcattaatagacatatctggatttcaacccccccccctttttttctcatctggttgtttggatgtct

SEQ ID NO: 195244 - DNA, 431 bp, Gossypium hirsutum
cccacgcgtccgcgaaacccctgtttactctctgtctcctgtcaagagtctcgaaggattccctattcttgatccaatttttctctgattttttaaaatttgtttttcagggttcctttacattttctattggaggcttttgggggggtttttttattgaatttttccttcggtcgtcatcgcagacgaagaacaacaacgttaacataaccatcggcagagtcagcaacacaaggcggagaccctgaagttctcgcgagttcggatttctagttgtattttgtttttgggttttgtgcctgttttagggtttgagtaggtttccaatcggagcccctaattttggtggtgtaatctttcctttatagtcttattattaggaaaaagaaggattagctttttattctggaatttcagattcaattttggct

SEQ ID NO: 195245 - DNA, 473 bp, Gossypium hirsutum
caaaatctgagtttttattatttctacgttgaaaaacattgtataattttctttgttagttttctgagatgccgaaagtttgcttctctaaagacattttgatcatgtttgtggctcttgtgctctccgtcgccaccattgtatcagctcaggacagtgcaatggcgcccgcaccgtcaatggacactggatctgccttctcaacgccggttactggtgttgccgttacgttgtctcttattatttcccttcttgctcttttgaagcagtgagttacataatttgagtggttggttgtgtagtgtattgtaatatattgaatctatttctattattattattattatattatttttgcatcaataattttttaatttgaattaataattatactaacgttttggaattttctgcgtatggttgccctcgctttacaggttgctgcgccctggtaaacccttttaatgcctctt

SEQ ID NO: 195246 - DNA, 391 bp, Gossypium hirsutum
tcggagaatttgttcttaggcttatcatgcttgcaattacatcagtgtgctggtatcaagttaatctggttctctttgtggcaatggttactgggaattatctcagtttacttaaaatttagagactgcatgcttgggaggtcattcagccaataaggtggtttttgaggctacatgactaaattttgagcttgaggtggggaaaagaagacataatgttgacaatcttacttggtggttctgtttgttacatttggtattgaggctctcgagctttctatattctcttctgtgttaatcatttcttcttcttatttcagtgttatgtataggtaatttgtacttgttgtacattgtattactccatataagaatttggacctatgatatt

SEQ ID NO: 195247 - DNA, 572 bp, Gossypium hirsutum
  unsure (1)..(572): unsure at all n locations
acgccacgcgtacgggtcgcctcattttcttcactcgttcagtctttggttggttttgttcggtcttgaaaatgcttgctcggctcgcgtctcgacgttttctcgagatccgtcaagctttccgtcaatcttctcaggcctctcgatctttgtccactgccctgaactatcatcttgataccccagataataatcccgaccttccatgggaattttcggaggcgaacaaacaaaaggtcaaggagatattgtctcattatccatccaactacaagcaatctgcagttattcctttgctagatcttgctcagcagcagcatggaggatggcttccagtttcggcaatgaatgcagttgcgaaggttatagaagttgctcctattcgtgtgtatgaggttgcgacattttattcaatgttcaaccgatcaaaggtcgggaaatatcatctgttagtttgtggcacaacaccttgtatgatacgtggttcacgagaaattgaagaagccctattgaaccacttgggggttaagcggaatgaggtaacaagcgatggtttgttctcagtcngagac

SEQ ID NO: 195248 - DNA, 359 bp, Gossypium hirsutum
ctcagtgctgaggagtctcgcaagattagccaacttccacagttcaaagggtttccagctggggaatttgtatcagatgatggtccttacaagtctcttgaagagctttgggatggagagatttgattttcattatctaccggatttattacaaataaaccaaatggacccatatgcaaatctttatagtttggtggtattgtgtatatatgggaccatcattttattgtgttggaaccagcatttagcagacgagaactatggggacaataaaatgtgattgtggagcttattgagtcaagagtcatcctatttttctgtttgtcctttcttgtggagtaacatgttgcaagtattag

SEQ ID NO: 195249 - DNA, 225 bp, Gossypium hirsutum
ctcacttactggcttactgcctggctagatcttagcaagttgatacatgttcattgggcatggttgcatgaattagactatcttgcatgacattgggctcattatcctagttaggagaagccattgttcatgataacatcgacaatgttatgactatgtcttttgataaacaccttgctcgtattggaagagtgaagctgatcagcggcttaatctatgaggaaa

SEQ ID NO: 195250 - DNA, 704 bp, Gossypium hirsutum
tcttgaagaaaggtcaagatgaaggacaagagttgtttgagttcaggacagatgaagagcaagtcattgatggtcttgataaagctgtgatgactatgaagaagggtgaagttgcactgttgactattgctcctgagtacgcttttggatcatccgagtcaaagcaggagctggcttcggtaccccctaactcgactgtgtattatgaggttgagatggtgtcatttatcaaggataaagaatcatgggatatgaacaccccggaaaagattgaagccgcaggtaaaaagaaggaagaaggaaatgtattgttcaagtctggaaaatatgcgagagcttctaagagatatgaaaaggcagtaaagtatatcgattatgattcttccttcagcgaagaggagaaaaagcaagccaaggcattgaaggttgcttgcaatctgaacaatgctgcttgcaagctgaaactgaaggatttcaagcaagctgagaaactgtgcaccaaggttttagaaatagaaagttcgaatgtgaaagcgttgtatagaagggctcaagcatacatccatctggcagatttagatttggctgagtttgatgtcaagaaagcccttgagattgatcctgataatagggagataaagatggaatacaaattattgaaggagaagatgaaggagtacaataagaaggaagccaaattctat

SEQ ID NO: 195251 - DNA, 891 bp, Gossypium hirsutum
atttctttttttcttttagggttaattagttttggtgaaggaaaaaataaatctagatcatgtttttgttcgattggttctatgggattcttgcttccctcggtctatggcataaagaggccaagatcttgtttttagggcttgataatgctggcaaaaccacgctccttcacatgctcaaagatgagagattagttcagcatcagccaacacagcatcccacatcagaggaattgagcattgggaaaatcaagtttaaagcttttgatttgggaggccatcagattgctcgaagagtttggaaagattactacgccaaggtggatgcagttgtttacctggtagatgcttacgacaaggagaggtttgctgagtcaaaaaaggagttggatgctctcctctctgatgaatctttggctaatgttccattcttgatattgggtaacaagatcgatataccatatgctgcctcggaagatgagttgcgttatcaccttggcctgaccaatttcaccacaggcaagggtaaggtcaatttgggagactccaatgttcgtcccctcgaggtattcatgtgtagcattgtccgaaaaatgggttatggagatggtttcaagtgggtatctcagtacattaagtaggtagctaaagagaaatcagacatgctatgctttctttcttaatgttatttttatactggatttagttgggttatccctttcactttttcttccatttttgtttgaattggtaagcatacctcccctttacgaaacaatgagacatataagtaattgatgatttgggttaatttagagggttcccctttcactttttcttccattctatgttatccctttttgcatatgaaaaaaaaaaaaaaaaaaaaat

SEQ ID NO: 195252 - DNA, 498 bp, Gossypium hirsutum
  unsure (1)..(498): unsure at all n locations
ctccccttttctccagccgaactaagccaaacccttttggccatggccccatcgcaacctacaaccgaccgagttactaccccgtgattcctcctccactttcgacttcaacgaggcaaggaagaatcaatggcggattcacgaggtaaggcttcatttttctcttttcttttatttttagatgcaaagaatgaaaaagaaaatcagagggagcagatcaagagagaaaaaacgtaataaaccctagagattcaaaacaggaaatcaccttgctctgttttttttttgctttctattgcttctgtatgcctccagaagactttacaatcgcaaaacgaaaggctttatagccgagtgttccaaaaaagaataaaaataaattacaattttttctttttctctttggtttcgtgttgctgctggtggtnttttggttcttcgcaagtaccgggtgcgttggaatcttacggaggctgtgctggcgcttggcgtgaggcg

SEQ ID NO: 195253 - DNA, 572 bp, Gossypium hirsutum
tttggggatagtaaaataaagtacaaaaaagaaaaattgtgttttccgttggcttttaggttgtgaattgtgaatcgacgccgtcaacgatgggattaggtttcatggtcggcgttttgggggtcctattcctcttccacgcagcttattccacaattcagtatagggggctgttgaagattatggaggaggagttttctggtccgcccatgaacgtggttttagagttgcttctagggtttgttttctgtatttcagctgccctaaccgtgcccgggaattttctctccatacatcctgattctgaggagaataggattgtttctttatcagcaaacttggactttatgatcttcaatcacagagcgaaagcacttcctttagaaactgatatgaagctgaagcattaagatcaatgaagcttcatagtcctttgattaaggagattagcactgttggcaggtctgttgaacgtaagagtagagagcctatgtcttaggtcattgtcgattgttttctgaagtgatagtgtttttttaccctttcattacttgctagaatttggattttgg

SEQ ID NO: 195254 - DNA, 812 bp, Gossypium hirsutum
ctttatctgaggctaataaacaataaagaaaaaaaaattgaaggcctcagtttcaaaatggcttcaatgaggctccttgcaataattgccattctggttcagggcttagttatgggggtttctcacgaattgcctagtttcgatccggaactagccgtagccgaagtttgggaagttgctgaaggcaaggtcggccctgatgttaaagtttttaatgtggtggatttcggtgccaagcccgatggaaccaccattagcactatcaattttattagggcattcaaagcagcttgcaatcacaatggccgtgcaatgctggtgatccctgagggaaatttcttattaggatcgatgttattgtccggaccttgcacttttcaacctccgttgatggttcaattcaacggaaaccttttgccgcaaggttcaacgtccacggccgaaaatgcagactggatcacattcataaactttaatggcttgttcataagtggaaaaggtaccatcaatggccaaggcgagaagaaggcatggaactctgtatgcgatggttgccgtcgacagtctgctagtttgaagttaatcaagttgaacgacgtgctcattagtggcattacctccgtcaactctaaagggttccatatgatgatcagcgtttgcagcaacttcgtgatcaccaacgttaatatatcggctccggatgaaagccccaacacggacggcattcacatgagcaaaacaaataaggtcagaataagcgacagtatcatcggcactggcgacgattgtgttttaatgattcatggaaccac

SEQ ID NO: 195255 - DNA, 406 bp, Gossypium hirsutum
aaaaatagtaaaatcttttttcttctttaacaagtacaagaggaaaggagattgacaaattattcttgggaggagaatctattctctctctttgtcataacagccgtagcatctttcgtcaacaactctttccttccgagagttcacagggatttgaagcgtaaataagatcttattaagatatagtttgggggtgtagatattgctacctgttttgtttaaacatggtgatggtagagtcgattgcaacaacttcacttcttggacaccgccctttatgtggaagattttccgctagggatgtctcctgcaaacagaaatctttgagtaactgcctgtctcctttcaaagaatttattggccaaacgatcgttgttcctccttcgccaagattgagagtggaaag

SEQ ID NO: 195256 - DNA, 431 bp, Gossypium hirsutum
cttttatccaagctctaccataggaacattataaagtttgtagcagcatgcagaaaagcgccgttttattgtgttataacggaatatttatcggagggttcgttaagggcatatttacacaagcttgatcacaagtcccttcctttgcgaaagatttttagctattgctctcgaagttgctcgtggaatggaatacattcattctcaaggagtcattcatcgggatcttaagcctgaaaacatccttatcgacgaggaattccacttgaaaattgctgatttcggtatagcttgtgaggaggcacattgtgatctattagcagatgatccggggacttatcgatggatggcacctgagatgatcaaaaggaaaccgtatggacggaaagtggatgtttacagctttggactaatcttgtgggaaatggtag

SEQ ID NO: 195257 - DNA, 366 bp, Gossypium hirsutum
  unsure (1)..(366): unsure at all n locations
aaaacattgangggtttctttccttatggttctggctgtccaaagacatttcctgccgcgcgggccaggcttgtcttttctatgatctcattgacaacaagagaatctggtttgatatttggcgacaatcctgtctataccaatagagttgttcagtgggcagagtgggaaattgaattttttgtacgtttggtgaaggaaaatgcaccaccttcagagacaatttctgcactacgtgcagctagcatttgtgttcaggacagccttaactactgcttattgctggaatcacaagggttgaaactctcgaagttgcttctggtgctcttgcgtccgtatcttgaggaagttctggagttgaatttt

SEQ ID NO: 195258 - DNA, 297 bp, Gossypium hirsutum
atgggggtattgtggaaaaggggatttctggttttttaatgggttaagaccactcaggtctggtataggggggttaaatgtgcttcctgatcaaaactagtgacttcgaatatttattcatatattgtaaagcaaatcttgtttagtcgtgttgtggaatcagcccgtgaagagaatatttgggagggggcatgtttaaatttatgggcttaaatttgttaacctgcctgaaagagcgattgaaccaggtcggttatgaaaatgtgtccttgggtaaagtaggatgcgtgtttttca

SEQ ID NO: 195259 - DNA, 548 bp, Gossypium hirsutum
ttgtcgagttcgatatgtttggataaaatggttagaaatttcatcgaagatagccacaacgacaagcaaccgccaccgcagccgcctccagctaagtacggccgtaaccgctgtaattgctttaatggtaacagcaacgatagctccgatgacgagtttgatgagttcagtgagtcttccaacggatcaccgcctgatacttgcgaaactgtcaagagtctggtacaatgcgccactgtcgtcgagagaaacctcttagctgacacggcggtgatcgttggagagaataaaaactgtaaacggaaagatgatttgaggaagatcgtgaccgacggtttactgtcacttggctataactcttcaatttgcaaatcaaaatgggacaagtctccttctttccctgccggtgattatgagtatatagatgtggttatggaaggggagagaatgttgatcgacgttgatttcagatcggagtttgagatggcgcgatcaaccgggacttacaaagcgatcgtccaatcactgccgttcattttcgtcggaaa

SEQ ID NO: 195260 - DNA, 463 bp, Gossypium hirsutum
cccacgcgtccgggagaattgttgaaccattgttgtctccaattgtaaccccagaggggcttgagctgcctccattccgggaactgaatgaattatgcgactctcttggatattttattaaggaaaaatgtataaataagggggaagtggtgcacgccgagcttctattgcagctagatcatgatttgttggtaggagaggggtttgatagaagtagaaaagtagcaaaaggaaaagccgcttcttgtctgttgaaggaccttgagaacagaggaatctcccggaagaaaaaggaaacatgactgtgtggattcaagtcaaaccatggatgatgactcgttagaaccaacaatccctaagaggcaaaggagagccgaaattcagttgcttgatgaatcaaagaaagcatgcagtgctacgcctgccaccccagttattgtaacagtaaaaacgaagaaaggag

SEQ ID NO: 195261 - DNA, 481 bp, Gossypium hirsutum
cccacgcgtccgcccacgcgtccgcccacgcgtccggttttgattcatcataatattctgaaatgatagtgttatccatacttctactgtaacagggcattctcgaaataaatgggtcattggttcagctatttctccacatccgggaccatttggggttgactgctaccttcctgtcctccatatttaccttggtaggcagataattccatgaaagcctccatattgtaagctttatttttgttggtagattcaggctctaaagttttttgtagaattttctgtagatggtttgtaaagcataagctctaggattttcatccgaactctgtaatagtttataggcacttcggaccgtgaattcacccgacatttcacctccccaaatgagaaaatctttatgaggtgttcgtgccagagggattcgaaggattcttacagcgtcttcttctgtgaaggaattatttctatgtattcatgg

SEQ ID NO: 195262 - DNA, 467 bp, Gossypium hirsutum
cccacgcgtccggcgacggacagctatctgcatgcgaaggggctcttgtacattatgaagacatggggatcccgaaagatgtggcaaaactgggcggtcgtcacggcatggggggagctgtaaaaaggggaccactccggcatgagggcataccagagtgcaagaaaaaccgagacttcattgtctaaatgtgcactcatggcaagaatgacaacaaagatctcttgtgatgagaacataagttctcccggtcgtgttttgagggaagacgaaaacgatcaaagtatgggtattattaagaggaagaacgataacagccttaattggaagtggatcgccatagccggaaccgtggcgctggctttcggacttcgctcaggcgtaattggtaaggcattgttagttggagcagggcagagaattggccgacggtgagattttttttttctttggtctttttacatttg

SEQ ID NO: 195263 - DNA, 558 bp, Gossypium hirsutum
cccacgcgtccgcggacgcgtgggcggacgcgtgggcatcttcctcttcctctaaggggataattaataaattactgtcgggcgaaaaaaaagggtaagagatggctcgattaatgttaatatcgatgctatttctcttggcaggatcaatgcttatggtccagggcggagatcccacccttttttttcgaatggaacgtcacctatggcaccattgctcccttgggagtgccagtaaagggtattcttattaacgggcaattcccgggaccaaatcttaactctaccaccaacaacaatatcgtggtcaatgtgttcaataaccttgatgagccattccttgtaacatgggacggcgtgcagcataggaagaactcttggcaagatggtgttctgggaaccaactgtcctatcccccctgggaagaattacacctataaattccaggtgaaggatcagattggcagctacatgtactatccggtgacggctatgcacaaggcggttggtggttcggtggcctcgtgttacagccgctactcatcctgtccctacctg

SEQ ID NO: 195264 - DNA, 427 bp, Gossypium hirsutum
  unsure (1)..(427): unsure at all n locations
atcatctccctcttcctctagaggggataaacagcttaataaatgatattgccggcgtggccggcaaaaaaaagggttcagagatggctcgattaacattagtatcggggctatttctctgggcaggatcaatgcttatggtccagggcggagatcccacccttttttttcgaatggaacgtcacctatggcaccattgctcccttgggagtgccacccaagggtgatccttattaacgggcaattcccgggaccaaatattaactctaccaccaacaacaatattgtggccaatgcgttcaataaccttgatgagccattccttgtaacatggaacggcgtgcagcatangaagaactctttgcaagatggtgttctgggaaccaactgtcctatccnccctgggaagaattacacctataaattc

SEQ ID NO: 195265 - DNA, 562 bp, Gossypium hirsutum
ttattttcagtttgccaagggatactcaacctgggctgttaagggctaagaatggaggtaaaaagctgatggacttggggttggaatttattcccatggagcagataatcagagatgcggttgagagtttaaaaagtaagggctttatttcatgaatgtgtcttctacactaaaagctgtgctgtatagctgatgaggttgcagcttccccagaatcgaaagtagaaattgctactgaaattgccagtggcttgtcgaggaaaatgggaaaggatggattagtagacctgaaagagatggctaaagcagttcaatatgataaaagcaatggtaacacagaaaagaagaattagtgagggaatgatgcaacaaattaccttatacatgtaaactaatcgcaaccagcaaccttacgccatgtaattgaacaaaaaaaaaaaacattatgcaatgtatggatgtctatatttataaaggctaccaatttttctcaacgtacgccaaaacaaaacaatttgttaaacaagaaattcaataaacaacaacaaattggattatgtgt

SEQ ID NO: 195266 - DNA, 673 bp, Gossypium hirsutum
cccacgcgtccgcccacgcgtccgcccacgcgtccggtataaaccctaaaatttcaaatttcccttctcgcgttctagggttctctttctcttcgccaagatggcggattctcctcgtaaaaggaattctcagtctccctccccatggagagaacagtcaaggtcacgatccagatctagacctaggtctaggtctaggtcaagatcccgctcctggtcgaggccaaggcataggtccaggtcacatagtcgcggcaggtcaaggtcaagaagtcgaggcagggttgacgctggaaatcctggcaacacactttatgtgaccggtctatctcaaagggtcactgagagggaccttgaagagcatttctccaaggaggggaaggtggcatcgtgtttcctggttgttgaacctcgtactcgcatatctcgtggttttgcttttgttactatggacagcgttgaggatgcgagccgctgcgtcaagtatctcaaccaatcaattttagaaggtcgatacataaccgtggagaggtcgcgtatgaaacggcctaggactccgacaccgggccattaccttggactaaaaaataccacaaactatggtcgtggtgaacgtggcaggttacgtggtggtggtcgtgattactacgggtatcatccatctccaagggct

SEQ ID NO: 195267 - DNA, 427 bp, Gossypium hirsutum
tcgtccacacgtgcgctaaaatggtacaatctctggacatgctactcccaaatgactacgtttacggttgagcacgccaccatcatgcaccgcaaaattggctctgtcgtaatccccgcaggatctgtctccgcttttctcatcatcagcattctcctcttcacttccctaaatgaaaaacttttcgttcccttggctcgaaaaatcacccataatccccagggaatcactagcctccagaggattgggattggactagttttttcggtagctgctatggtaggggctgctattattgagaaagaaaggagggaaattgctgtagagaaagaagtcaaaataagtgctttttggctacttgttcagttcttccttgttggtgctggggaagcttttgcttatgttggacaacttgagttctttatta

SEQ ID NO: 195268 - DNA, 479 bp, Gossypium hirsutum
atcatcatcactctccccacccaccaacctttcccaacacaaaaacaaagcagctgtttttactagttttgattgtgagagagagagaggatgagagtgagtgtaaattatgcgaatcctttgtgacgcttgtgaaagtgctcctgctattgtcttctgtgctgctgatgaagctgctctctgccattcttgtgatgaaaaggtccatatgtgcaataagcttgctagccgtcatgtccgtgttggactagcaaatccaagcgctgttcctcgttgtgacatatgtgaaaatgcacccgcttctttcttttattgcgagatagatgggagttccctttgtttacaatgtgatatgattgtacatattggtggtaaaaaaacacatggaagataccttcttttaaggcaaaagagtcgagttttccgggtgaatacgtcggttgaacccgagtgaaaaccgggagaggccaaaatcaact

SEQ ID NO: 195269 - DNA, 946 bp, Gossypium hirsutum
atttcctttcatttccttccaaatcccttcctttctatcctcctctcttccccaacaaaagccctttcctttcattccctcctttcaaaacccccaccatttctctcccaacaaaatccatgatttccagctccaaactctctaatcacatcgacccattgttgaacgacacccaactcgaccgttttgcggaagtgggcaataagctagctgatgccgctggcgaagtcatccgcggttactttaggaagaaattcgagattcttgataaagaagatttgagtccagtgacgattgctgatcaagctgctgaagaatctatggtttcgattatattggagaattttccttctcatgctgtttatggagaagaaaaaggatggaggtgtaaagaggaatctgcagattatgtttgggttttagaccctatagatggcacaaaaagtttcataactggaaaaccagtgtttggtactctcattgctttgttgaagaaaggtaaacctattcttggtataattgatcagcctgttcttaaagaaagatggatcggaataagtggaaggatatctacattgaatggacaagaagtggctacacgagcttgtacagaactgtcacgagcatatttgtacactacaagtccacatctgttcagcggagatgctaatgaggcatttgcccgtgttagagataaggtcaaagtgccactatatggctgtgactgctacgcttatgccctcttggcttctggttatgtggatcttgtcgttgagtccggcctccggccatacgatttccttgcacttatacctgttatagaaggtgctgggggtgttgttactgactggaaaggcaatcatcttcattgggaagcttcttcaacttcacgtgcaacaagctttaatgtagtggctgctggagataaacaaattcatcaacaagc

SEQ ID NO: 195270 - DNA, 625 bp, Gossypium hirsutum
gagatgcagaaggaatatcaagacttgcatccctttccaaagagcaagggaagaataatgttgctttcctttgtttattcatgttgggtaaattggaggattgcctccagcttctggtggaaagcaatcggataccagaggctgctctgatggctcgatcttatcttccaagcaaggtttcagagatagtggcaatttggagaaaagacctcaacaaggttaatcccaaagctgctgaatctttggccgatcctggagagtatcccaacttgtttgaggattggcagcttgctctttctcttgagtctcaagtggcagaaacaaggggcgtttatcctcctgccgcgggctatttgaaccatgctgatacatcgcagatgacacttgtggaggctttcagaaacatgccagcagaggatgggagcctcttgaaaatggtgaccctgatcatgagaatctagaggacccagatggagaaaggggtacccaagagagctgttgtgtggatgctgatcaaacgatgtgcatgctcgtaatggcatgaactgagaagatgggtacgatatgaggacccgtagctaagcatggtcggcatgtaaatcgattgcttggctacccgaactgg

SEQ ID NO: 195271 - DNA, 466 bp, Gossypium hirsutum
cccacgcgtccgcaagtagcagaaacaaggggcatttatcctcctgccgcagactatttgaaacatgctgatagatcacatatgacacttgtggagactttcagaaacatgccaacagaggaggagcctcttgagaatggtgaccttgatcatgagaatctagaggatcagaatggagaagagggtagccaagaggaggctgttgttgtggatgctgattcaaacgatggtgcagtgctcgttaatggcaatgaacctgaagaagagtggggtacgaataatgaaggaaccccgtcagcctaaaagcaattggtcggggcagtgtgaaaatccaaattttgtctctgtgcttacaccggatcactaggttccttcaagacattcagttcgagctctattcagaacatatttaaggtgagaaaccataatcattgttattatttcttaaaggagaaaacattattag

SEQ ID NO: 195272 - DNA, 690 bp, Gossypium hirsutum
atagatcacatatgacacttgtggagactttcagaaacatgccaacagaggaggagcctcttgagaatggtgaccttgatcatgagaatctagaggatcagaatggagaagagggtagccaagaggaggctgttgttgtggatgctgattcaaacgatggtgcagtgctcgttaatggcaatgaacctgaagaagagtgggtgcttacaccggatcactaggttccttcaagacattcagttcgagctctattcagaacatatttaagatttcgacctagacagatgtgatattaaaatatagagatggctgattgtcttgcgttcctggaggtttggtttggatctatctacaaaagcacattgaattttgggatgggggcataatacaaagtattttcaattaagcgttccagttatgatattagattcttggccttttgggtttttagcatatatatattcttttttttttctgaggcattttggtccaagattttttattgtgccattgtgaatgtagaaagaacttgagaatcttagtgatgatttgatttaaccaaatcgagttgagcccattttatgtttggttttaaattttaggtacactatttgcctaattgcctcgctcaatatcagaacttgtactgtaaaacatatctacataataataaataaaaaacattatgtc

SEQ ID NO: 195273 - DNA, 770 bp, Gossypium hirsutum
  unsure (1)..(770): unsure at all n locations
acctggtgtctagaagaaaatattaagctgagatctcagcctgctcttgttccacttgctgttaatgatgagctggcttttgtagctggcattccttgttctttaaatactccatcttccagtccagaaaagatgctagagaaaaggcagttgttgcgtgatgcagtaagaaaagagatgggttgggaagataatgatatgcttgtgatgtccctaagtagcataaatgctggaaagggccagctcttccttcttgaggcagcacacctcttcatcgatcagtatcctttgcaaactggttctgaagttaaaaaatcattggatatcaggcatgatcattccaccttgggtgtaaagcatcatttaagaggtttggttttgaagtcgagcaacggtgatttatcttctagagatttgcggaccagaaacagtcacagaaggaagatgctgtttgatagccaaggaacagaagaacaagctcttaaagttcttattggggtctgttgggtctaagagcaataagatatcttatgttaaagaaattctagaattttgtcttagcatgctaagttgtagagtctgtactctgactnctacactacacgtcttgttttctatttaacaacagaagttacgtctgaactccaggaactagaaaacattgggagatgctggtgacatggctatggtctcgggtaggatgatctgagcgccaaaaatttgtccagtgaaagttttcgctctgtgtccgtgccagtttgcaaatctgt

SEQ ID NO: 195274 - DNA, 810 bp, Gossypium hirsutum
  unsure (1)..(810): unsure at all n locations
cccacgcgtccggtggaagtggctgtgtgtttgacaaatatgcttcattttctgattgtgtgtgggggcctgaaaaggaaatcaggatcattcaatatccttatgtcaaaagaagggataacctgccagaaccaaaggagaaagagaagccagttggcttgtggtctattatcaaggataatatcggaaaggatttatctggtgtctgtcttcctgtgtactttaatgaaccactctcttcactgcagaaatgctttgaggatttggagtattcatacttggttgatcgagccttggaatggggaaagcaggaaaatgacttgatgagaattctaaatgttgcggcatttgctgtatctggttatgcatcgacagaaggtcggcagtgcaaacctttcaatccacttcttggagagacctatgaggctgactatccagataaaggacttcgtttcttctctgaaaaggtgagtcaccacccaatgattgtcgcctgtcactgtgaaggtaaaagctggaaattctgggccgattcccatcttcaaaggaaattttgggggacgatctatccnactccatcctgttggtattctanctttgcattttgaggatggagagacttttcagtggagcagagttaccacgtccatatacaacattatccttggtaaaatctattgtgatcactatggtaccatgcgcataaaaaggcantgggcaattactcttgcaagctcaagttcaangagcagtctatcatanaaccganatccccatccnggtttcatggatttgtgccaaaacataacc

SEQ ID NO: 195275 - DNA, 333 bp, Gossypium hirsutum
cggacgcgtgggcggacgcgtgggccataatcgagccaaaatcggtgaaacccccccccccaaagaaaaaaaaaaaaaaccagtgcagaccagtttgctaaaatttatatttccttggtaggacataaatgtttttattgtccttaaaaaaaaaaaaaaaaaaaaaaaaaaaaaaaaaaaaaaaaaaaaaaaaaaaaaaaaaataaaaaaaaaaaaaaaaaaaaaaaaaaaaaaaaaaaaaaaaaggggggggccgttttaaaggatccaagtttacttccccgtgcttgcaacgtaatagtttttttttagggccacctaaattaaattcct

SEQ ID NO: 195276 - DNA, 1007 bp, Gossypium hirsutum
aaatcgtgtcatgctttttaggacagcacttgctttaatggagttatatggccctgcactggttacaactaaagatgcaggagatgctgttaccttgttacagtcattggctggctcaacatgcgacagcggccaacttgtattgacagcttgtatgggttatcaaaatgtaaatgagaaaagactacatgatttaagagagaagcatcgatcagctgtaatagctgcagttgaggaaagatcaaaggggcttcaagcttggagggattctcagggcctagcatctaagctatataattttaagcaggatcctaagtccatgattatggaaacaaataagacaaaagcaaatggggatctctctcattctgagtctggttccacaaactctgacgaagttcttattagtctgactggagatgctgacacaggtgctgttccagatcttcaagagcacgttgtgtggttaaaagttgagttgtgcaggttgctagaagagaaaagatcagctgtcctcagatctgaggagctggaaacggccttgatggagatggtaaagcaggataatcggcgccaattaagtgctagggtggagcaattagagcaagaggttgctgagcttcgtatggccctttctcagaagcaggaacaagaaaatgcaatgcttcaggtcctaatgagggtagagcaagatcaaagggtgacagaagatgctcgcagatttgctgaacaagatgcagctgcacaaagatatgctgttcaagtgcttcaggaaaagtatgaagaggccgctgcttcacttgctgaaatggagaaaagagtggtaatggcagaatcaatgttagaggctaccttacagtaccagtctggacaaagtaaagtccaaccttctccacgatcatcacaccctgattcatcagcacgcagcaatcaagagcctcaacaagaaatccctgcacggaaaattagcatactttctcgaccatttggactcggctggcgtgata

SEQ ID NO: 195277 - DNA, 1102 bp, Gossypium hirsutum
  unsure (1)..(1102): unsure at all n locations
gcgcccactcttccgggaaaagttgcgaaaggtgatgggaaggatgatctctctgtttactatggaggcaggcaaaacgtacaagtacaggatttgcaatacgggtatcaagacatctctgaacgtcaggttccaaggccacaccatgaaattggttgagatggagggttcccacacaatgcagaatgactatgactcccttgatgtgcatgttggacagtgcttcagtgtgcttgttactgccaaccaggaaccaagggattactatgtggtggcctctacccgttttaccagacgtgaggttacagcaactggcatcatccgttacaagaatggcaagggagctgcctcatccgagttgccaccaccacctgttggttgggcttggtcactcaatcaattccgtaccttccgttggaacttgacttctaacgctgctaggcctaaccctcagggctcctacaaatatggttccattaacattacccgcaccatcaagcttgccaacactgcacaaagagttgatggcaagctccgatatgctcttaatggagtctcctatgtcgaaccaaccactccactaaaacttgcagaatactacggcgtagccgacaaggttttcaagtatgataccattcccgatgagcctccaagtgacaacactaaggtaactttggcacctattgtcctcaacatgacacacagaaactttgtggaaatcatcttcgagaatcccgagaccgccattcagtcttaccacttgtctggctactcattctttgccgtgggcatggacattgggaaatggagccctgagaagaggatgaactacaatcttctcgacgccgtgagcagacacaccatacaggtattccccaactcctggtcagcaatcctattgacattcgacaactgcgggatgtggaacctgaggtcggagatatgggacaggcattaccttgggcaacagctttatgctagtgttatttcccctaaccgatccctcaaggatgaatacaacttgccggaggtgtatngacttgggcatcgtgcaagcatgccagggcctcaccttcagcagttaattaataagctataatct

SEQ ID NO: 195278 - DNA, 475 bp, Gossypium hirsutum
ccggcccgaattcccggtcgcccccccttccggggaatccaatctcctttttaagccctccccaattcctatctcgaagttgattttggatggggagtcttccgaggaggcgatggcggctttgtctaaccttctcagtgagaaagctgatctcggaagtgttgccgctgaaaaaatcaaccaaataccacccgccttagaggcacctggcagttgcgacaccgccaaccggatcaaaaccggtttccttcatttcaagtcagaaaaattcgagaaatatcctgatttgtacggtccacttgccaaaggccaatgccccaagtatttgatatttgcatgctcggactctcgagtgtgtccgtcccacatcctggatttccaaccaggggaagcttttatggttcgaaacattgccagcatggtcccgccatatgacaagaataaatactgcggagttggtgcggctattgaatat

SEQ ID NO: 195279 - DNA, 415 bp, Gossypium hirsutum
cccacgcgtccgcccacgcgtgcgggagcataaataaacgtttgggttttcgcgtatatttatcaagaagccaaaaattgacacgcttcggttttcctttttccgtgtagttttgcttccttcgcttacttatcctcttctttgcttctgacattgttcctacactcaggaaccaaataggaaattagggttcttgttctgaaattcaatgactttttatgatggtaatagtgacggtgagggaggagaggtggtgccagagctgaaagtaagagttgagggtgacgatgatggtgttaatggaaaaagggtaactttgagacagcgattattggaagaatgtgaagcagaagagaggtatttgttggtaaaggagcctgctttttcttgtgtacagaaaaggtctatttggttt

SEQ ID NO: 195280 - DNA, 402 bp, Gossypium hirsutum
tgcaaatgtaatgttgttccagcagcagaaaagtgtacctgttaaaaccgatctcttcggtggcggtgaactcaccggttatgcaaccaaccaggtacctgatagtgatatggttggtgaagatggagcctccgatgatgatgatgatgatgaggttgaaggtagtagctcagatgaagcatagacattttgttttggaaaaagatggaaggctcgatttttggtagttagggcttgctcattgtaactggaatatgtttttcttttcccttcttaatatgataaacatttgaccaagttaaattaaatttatgttttttcgttgtaattcgagaaaagaaaatttcttaatattttattatgagcaattttgttttaaaaaaaaaaaattacataaatata

SEQ ID NO: 195281 - DNA, 1279 bp, Gossypium hirsutum
  unsure (1)..(1279): unsure at all n locations
acctaatcagacccgaatggtggttccaaccttcaaaactagtagcagcacgcaaaaaccagccttgaagttcttgatctatggcaggactggctggattggaggtctgcttggtcagttatgtgagaaacaaggtattccctttgaatatggaagaggacgcttggaagatcgttcatcccttatggcagatattcagaatataaagccaacccatgtttttaatgctgctggtgtgactggtaggcccaatgttgattggtgtgaatctcacaaaacagaaacaattcgcaccaatgtggctggaaccttgaccttagcagatgtttgcagagaacatgggcttttgatgatgaattttgctacagggtgtatattcgagtacgatgcaggacatcctgagggctccggcattgggtataaagaggaagacaaacccaatttcactggttccttctattcaaaaaccaaggctatggttgaagagctgttgaaagaatatgacaacgtctgcactctcagagttcgaatgccgatctcatctgacctaaacaaccctcgtaactttattaccaagattgcacgctacaacaaggtggtcaacattcccaacagcatgacaatcttggatgaacttctgcctatttctatcgagatggctaaaaggaacttgaacggtatctggaactttacaaaccctggggttgtaagccacaatgagatcctggagatgtataaggcttacattgacccaaagtttcagtgggtgaacttcacattggaagaacaagccaaggttatagttgcccctcgaagcaataatgagatggacgcatccaagttgaagaacgagttccccgatctgctaccaatcaaggaatcactgattaagtatgtctttgaacccaacaagagaacctgagccttttgagcagcagtttacaggaatagaattcggtattatcctatgttttttcttcatttagttattgcctggaatatcttttcagtttaattcatttgttataatcttgtcttccacctcattagtttccactagataactcttaaggggtttactattagatttaaaccattcattgttactagctgcaccaagctgtatcctagtctgtccgtccattcttgaagaaactatctataggtgctttacaaattgtcatttgcaggctgacaggtgtattatttggcattacattagttgaatgttatgactttcaacagtcacctactggtcaaaaaataaanaaaaaaacaa

SEQ ID NO: 195282 - DNA, 637 bp, Gossypium hirsutum
  unsure (1)..(637): unsure at all n locations
aatttccatagcttattttcatcaaccctttgtcgtctccgtacaagaccttgcttagaagaaaaatgtcaaccttccctgactctttcactcaactcgccgacgactccttagactcttttgactctgttccacaccaggatgaagacggtgccggctacgccggatacgacccttctcagcaattcgactctttcgccgaccactcggatcatgccaagggctccactgatgatgtgtttgcatcagattcatacacaaatggggtaggttttggccaagattttggcggatcggacggcccggttttgcctccgccggcggagatggagcctgaggaaggtgttgctctcagggaatggagaagggagaatgcgattcggttggaggagaatgagaagagggagaacgagttattgagccaaataattgaggaagctgatcaatacanagttgagttttattaagaaaagggaggtgacctgtgaaaataacatggccaattacagagacaaagagaagatatttgtagccaatcatgagaaattccatgccgaagctgataagcattactggaaagcaatcgcggagctcattccttaatgagtgccaaccatagagaaaaggggaaaaagga

SEQ ID NO: 195283 - DNA, 774 bp, Gossypium hirsutum
ggcgtcttccaagaacccaaaccataagagcttagttggcatagattccaaaccttcaactctgtcagtaggtctggtgaactcgaatggggatttcaaagagccaaaggcaggaactaatcaggagatgattcataattccgttgcctattttgcagatatttgcagaaaagaaaatcagatgatgaagcaagctcttctagctaacctggcatacgtagagttagaactggagaatccattgaaggctctttcagcggcacgatctctcttagaactacctggttgttcaagaatctacatctttctaggtcatgtctatgcagcagaggccctctgcttgcttaacaagcctaaggaagccgtggagcatttgtccatttatttgtccggccccaataaggttgaatcgccattcaatcaaaaagactgtgagcagtggctaacagaaaaacccatcgattgtgaagaaccaaacggaggaggaggaggagcagcaacagctgccaagaacccttcccccgagggcatgcaggaattcatgtttcttaagccagaagaagcatgtggaacactttacgcaaatcttgccgccttgtacgcaacacaaggcgaactagatcgtgcccaccaattaacgacacaagcattatcgctactacccaacagtactgaagccaccatgaccgcaatttacatcgatctcgtgctcggtaagtcacaagaagctctatccaagttaaaacgttgtagtcatgttaggttcctttcaag

SEQ ID NO: 195284 - DNA, 500 bp, Gossypium hirsutum
gtctcatcttcatacccgcttagaagctgtacttgagaaactgaaggaacagctaaaggatgtggatgccgtccaatccaaggaaatacccttattctggtgtggcatggctgagagcgtacaagttatggggtcattcgacggatggagtcaaggggaacacttatcaccagagtacaccggttcattcgccacgttctccaccacattattgcttagacccggaaggtatgaaatcaagttcttggtggatggagagtggcatctatcaccagaataccctaccattggtgagggattaatgcaaaataacttgctcgttgtagactagagtcgagtatttgatacagctttatgttagacagatatgcgtaagtcttttttgtagtcacattcaaatatgtgttgaatacaagtacatatattattagggaaaatgaaaagattttagctactttgatgcaatgattatgagctttccaatagtaaaagattttaga

SEQ ID NO: 195285 - DNA, 631 bp, Gossypium hirsutum
aaatttctttctctttggtcagtattgtagatcattaagatggagaagaaaggttttgttagattgatgctactttttctgggtttttcttatcttcttctttcctgtgctgctgttcccactactagaagcctcaaatcaaacaaggaactcccttcttctgtccaagatttacttgctcaggatgtaatggaattgagtgatggagaggaagtgataacggaaggtgacagattcaatggggaaaggatgttaatggaaagcactgattatccagggacaggtgcaaacaagaaccatgatcccaaaactccagggagagcttagaaaaacattaagacccataacctatttgttttatgtatagcttaagacatgacaggataaaaggcaagtctttgaatctgggtttcctccaatatttcgctagaatttcctctcttttaaggtttgttgtttggatagtgggaaaactatgatggaaggtttggactgtactttacagtttacagacaaaacctggtgggtattgttcataaaattagataatgttaaaaagatgtctttttaagttactatgtaagggtcggtgatattttcattgataaataaaattattaattagtttatt

SEQ ID NO: 195286 - DNA, 553 bp, Gossypium hirsutum
ctggcatcagtctcttcttcagagaacctgcagcagacaaatgtaaatcaccagattcatggaacctctcgccagaatgaatcagcaactgcaggatcccaagcatccttttctgagttacgctccggttccgtccctgtaggtgtttatgcattgcagagagagaatgtattcccggagagacctggcgagcctgagtgccaattttacatgaagactggtgattgtaaatttggtgcagtttgtaagttccatcacccaagagagagagttcttcctgcccctgattgtgtgttgagtcctataggccttcctttacgcccgggtgaacctctatgcatattctattctcgatatggaatttgcaaatttggtccaagttgcaagtttaaccatcctatgggaattttcacatacagttactcaccatcatctccatctgatgccccagttcactgtttcttgggttcgtcgtcaggaactgctgggttaaacctgtcatcagagggacttgttgaagcagtccctacaaagccccaggcgactatcactg

SEQ ID NO: 195287 - DNA, 415 bp, Gossypium hirsutum
tccccggccgaatcccgggtcacccacgctcgaaggtttggtgtttggcctttgccctgtctctcttcttttgctgctgataaacgccaacagtttagggctattggagttccatttccagcttctgtatactatatttacagtgccatataactgttccctggcacagtgttctatggtgttaatgtttgaaggatttcactacacaaccaacttaagggccgatgtctatgtactatagctgatcttttcaagagaaggtagatacattcagtgttgtattggcatcactccaacttacgtcgtgctgcagctacatatgttactaacactacaatattacccacgcttggccatccatcgaatcaacaagcagctgctgaagctgagaaacttctcttctcatctttgtcaa

SEQ ID NO: 195288 - DNA, 506 bp, Gossypium hirsutum
gaaactctaagattatatggtccatcaattgccatgatgagaagagctgaaagagaagttcagttagggaagctagtcttgcctgctaatctagatcttctagttgtacattctgcgatctcaccatgaccctcaactatggggagatgaggtacatctttttaaaccagagagattcgcagaagggattgccaaagctaccaattacaatgcaggtgcattttgtccctttggattgggacctcggaattgtgttggtatgaactttgcaatcatcgaaacgaagattgcactctccatgattctacaacgctacaccatttctctttcccctgcctatgtccactcaccaattccttatatcaccattcaaccacaacatggaattcaagtaatactcgagtcactgcataacgatgcgtaatgtaacatagctgctaagaattcagggtttaaataagtttagctgctataaatttggggtttaaataagtttattcatgtat

SEQ ID NO: 195289 - DNA, 1088 bp, Gossypium hirsutum
  unsure (1)..(1088): unsure at all n locations
ctaaggtatgattatggtatataccttagtccaatgccaacatcaatcttaggttcatcaggaatccatgtaccatgcttctcatgataaacctaagattgatgttggcattggactaaggtatgattatggtatatactatgctgccagaaattcttacgatcagaacaaaaacagaagagttttgtggggttggattggaaaatccgatancgaagctgctgatatgcagaaaggatgggcatctgttcatagcatcccgatgacgattttgtttgacaataagattggtactcatttgcttcagtggccagtggaagaaatagaaagtttgaggttgaagagttacgaatttaaccaggtgaaagtccaggccggatctgttgttcctctagatgttggtccagccacacagttggatatcatagcggagtttgagatagataacgaggcgttagagaaaacaacagggtccaatgtaacattcagctgcagcagcagcggtggaactgtagaacgtggggcattgggaccatttggtctgttggtgcttgcggatgacagcctcagtgaacagacacctgtatacttctacatcgccaaaggatccgatggcaaactcaagactttcttctgcaatgatcaatctcgatcatctgtagcatctgatgttaataaacaaatttatgggaacttggttccagtactggagggcgaaaaattatccctcagagtcttggtggatcattcgatcgttgaaagctttgctcaaggtggaaggacagtcatcacatctcgggtttatccgacgaaagcaatctatggagctgctaagctgttcttattcaacaatgctactgaggccagtgtcagtgcctcacttaggatctggcaaatgaactctgctttcattcgaccttatccaaacgataaggagtcccaataggaccgaatagaagttaatccaaaagtcaccattgattaattaattattgtacctcctgctattcaaaggaaaatgaagtttcttgttttttgtactagttattcttttcggctttttagtaggccaataaaaattttattag

SEQ ID NO: 195290 - DNA, 880 bp, Gossypium hirsutum
tccgattttccattctcttctaagcagcagtggttctcccttcctcaaagcttccggctctcctcctcatctctgcctcaccatttctgtctctcagcttcgtcttccttctccatctttctgctccatagatctgtcgaggtctagagacaatattgagacaaggtcatagaggaggatagaaaatatgtaccctggtcgcgatgcaggttaataactcatggagtgttgtgaagagactacctgtgagggcggactcttcctacagttgggggctggcatttaaagcaggcggaaacaatttactagtaataggagctggaggtcatggagggcatgatgatggagtaaatgttctgcattcttagaatccagaggagagaaacagggatggacaagagtggaatgtgcttgctgtcaaggcacgggcaggtgcttttgtgtataattgtgcggtaatgggctgttaatgagagttgccgcatctttggtgcaaacatcgacatctggaagaccaagatcaacgatcttctatctgttataatttttattgtctcagtatcattaattttattgttctttttcccattttatgattcagaagaataattgacctcgaatcaatttcttaaagttatcaaccgaatgtgttgatccctctattgcaagcattaacctcaaaccaagtaatgactagttccatttatcttgtaaaaaaaaaaaaaaaaaaaaaaaaaaaaaaaaaaaaaaatttttttgtcttatttttaataaaaaatcataattactaacgcttttatgctacataatatcttatttttagcgccatctaaaataaattctttggccggcgctgtacaaagtctggactgggaaaacc

SEQ ID NO: 195291 - DNA, 450 bp, Gossypium hirsutum
gcgccgattagggattccattcccgtttcttattttctattccagtttctgccctcatcaacttcatcttctcagacatttccctttcatattgcaagcctgacaagtcgttacatcactcttttagcagctcgcactcttcccctgtttattttacaggttcaaattaaaccttctggacaaactgattcatgcatggttacaagaagtaatttaaagaacctatattggatagtgactcaacaggtagcacaccacacaatcaatggttgcaacctgaggccaggcgatctccttagaactgggaccattagtggggaatttgaatcatgtggatgtttgctggaactaacatggaatggacaaaaacaatttccattaaatgggacaactcagaaaattcttagaagatggagatgaagtaatcttctctagttgctgcagggagat

SEQ ID NO: 195292 - DNA, 777 bp, Gossypium hirsutum
gcatcatgcaaagaattgtgggaccatatttcgtggacctcaaaacgcaattccacaaaactggttccatcttcctattgcctatcatgggcgagcatcatctattgtcatctctggaacaaacattaatagaccaaggggtcaaggctatccaacaggtcaatctccaccatattttggaccttcattgaagctagattttgaacttgaaatggctgctgtggttggtccaggaaatgaattagggaaagccatagatgttaatgaggctgcagatcatatctttggacttgtcttgatgaacgactggagtgctcgagatattcaagcatgggaatatgttcctcttggaccctttcttggaaagagttttggtactacaatatccccttggattgtgacacttgatgctcttgaaccttttgcatgtcatgctcctaagcaggatccccatccattgccatatttggcagagaaaatatccaaaaactatgatattgaattggaggttcaaattaaaccttctggacaaactgattcatgcgtggttacaagaagtaatttcaagaacctatattggacagtgactcaacaagtagcacaccacacaatcaatggttgcaacctgaggccaggcgatctccttggaactgggacccttagtgggcctgaatttgaatcatttggatgtttgctggaactaacatggaatggacaaaaatcattgccattaaatgggacaactcgaaaattcttagaagatggagatgaagtaac

SEQ ID NO: 195293 - DNA, 682 bp, Gossypium hirsutum
  unsure (1)..(682): unsure at all n locations
ggaagaacccatttattaaaccccaaaacccccatttcggaaaaccataaaatttccaaccggggtttcagttccatctcccagtagtcaagtttgaaagcaaaccatggttccccccccccccaacaaggccatgatcttgtctataaccttaggctctcatcggttggaccaggttgtgtcaccggttcggacgtggttcatgacctaagcggcctggacttgaccatgaaactccattacctcaaagcggtctacttcttttccagccatgcagtggaagggctaactgtcatgaacatgaaagaagccatgttttacctgcttaacgattactacatcacctgtgggcggatcaagcggtcggagtcttcgggtcgaccgtacataaagtgtaatgactgcggcataagggtcgtggaaggtgtttgcgatgaaactgtggatgaatggcttgaaactgacgacgattctnaaaggaatttgcttgtttatcatcgagccatcggccctgagttgcccttttctcctttagtttacttgcaggttactctgttcaaatgtggtggaatttcactcaggctgaattgggctcatatccttggaaatgcattttcaatctctaatttcatcaacaaatgggggcaacacattgctaaaggtcatgtcaataattccccaa

SEQ ID NO: 195294 - DNA, 492 bp, Gossypium hirsutum
gaattggaaaaagaagattagatttgagagaatttgaagatggggaatgctctgagatgggtgtatagccattgctgcaagccaaccacagctggtgactcccaaggcaaggatggagtttcagctctttcccatgatctcttccaatttgatatcacctctcaggttcctgaagggctaagttatcacgtcgtttcatccaagaaagctcaggctaactggtatagaaagctattagatgcttggagagaagcaaaaccaccaccaaaaacacctgaggaagcttcaagccttgtcattcagacactgaagagacaccaaaaggcagatgtcgagggattattggcgtactatggtcttcctcagcagccttctgccagcgccacaacatcattgcctcaaggagttaagtttgaattgcagactttaccagtggacaccaaagcagtacctgatggagataccataacagtgtatgtaagtactacagat

SEQ ID NO: 195295 - DNA, 716 bp, Gossypium hirsutum
tcggccacgccttccgttttttcgtccgtatgtagtctgtattaattgattggggattcattcgggtgtgatttaacccccatacctctcttcttcttcttccttctggaccttgggtaaagctgtatatataaagcttgttcttcttgataaaaagtggaggtctggcaggggtcaaaaccatagcctttaaaatggctggtgggagcgggaggaaggaggaagaggaagatcaaaatcagcaagagaaagataagagtgaaagagaaattcatggatttttggcataagatgattttccctgttcgtagattttggtttactgtttcttctcctctcaaagctcgcaaaaacggtgcagggctattgaaactacgtgatgatatacaaacatgtgggtaccaagatgtgcaggtgatgtgggagatgctgagaagatccgaaactgagcatcatcatcctcatcccaagcgcaagcaacgacccttttggcgagtttttgtatggtcttcttctaacaacacttcttcatccacatccttgtcggccgatcatgcttgattttgttgacagccatttggatttggggtacttgatgatgatattatagtatactctatgtaataaaattttgttcctactgtcccctgcaatgctttttacataggcatcgttgtttcagaaccccgatggacggcctgctggccggtatgcgt

SEQ ID NO: 195296 - DNA, 500 bp, Gossypium hirsutum
  unsure (1)..(500): unsure at all n locations
accggnnccggaataacccgggggcgaccgcacgcgtaccgcccacgcgtaccgcttggctcgtaccccttcaaggtaatttcggtatctcttgaataagccaggtgtctcctccaagggcaagttgaagaactcctgtgtatcggtcttcattttctcaatcacttcatctgctatcccatggttgattaactgttgcacccaacagtaagaatgaactactgaatccatagacgtaaaaaaagtataattgtgtttcaattaggtacctggaagaaaccccagtctttgcaagcctggtggagttttttctgttcagcatcatggtctagtttgctcatgtcaattacaggaatctgctgggattcatctatggaaaccacatcgaattcgacctctggtctgatgtatctggatgggattctgttgaggttcttggatgcaagagcttggacattctcaactggtaaagaatataacatatctgtgctctgcacttt

SEQ ID NO: 195297 - DNA, 370 bp, Gossypium hirsutum
ccaacccttccggaaatactcgaagaacgagttgcagttgggaagcttccccactatacgtggcttacccaaacactcagctaagccaataaagtatgcctctgagaagagggatgttgattcattgatggccttcgttaatgccctccgatgaagggattcatatttttatttgtcgagttaacaaaaaatcaactgggggagcggtgattcatgctggtttacaatctcataaacctaactcatgaacccggagtttgtcatgcttccatcgcccgtagcatcataatgaacctcgggcgtttctgtttactgaacacaatgctccattttttgacatatatgggggaaatttgatgagttctttatt

SEQ ID NO: 195298 - DNA, 919 bp, Gossypium hirsutum
  unsure (1)..(919): unsure at all n locations
ccctaatctagacccagaaagctcttcccagaaaaaaatgggaagaggcaaaatcgagattaagcggatcgagaacaccactaatcgacaagttaccttctgcaagcgccgcaatggactgctcaaaaaggcctatgaattatctgttctttgtgatgctgaggtggctctcatagtcttctccagccgtggccgtctctatgaatatgctaacaacagtgtgagagcaacaattgagagatacaagaaagcatgctcagatgcaacaactccagggtctgtggctgaagccaacattcagttctaccagcaagaagcaaaccaaactccgacgacaaattcgtgatgttcagaacatgaacaggcatatccttggagaggctctgagctcattgacctttaaggaactcaagaaccttgaaggcaggctggagaaaggcatttgtaaaatcagatccaaaaagaacgaattactgtttgcagaaattggattcatgcaaaagagggaagttgaactgcagaacgataacatgtacctgcgagcaaaaatagctgaaaatgagggagcgcaacaacaatcaaaccagctgatacaagcagcctcctcctacaatcgcaactttctgccagtaaacctgctggaacccagtaataatgattactccaaccaagaccaaactcctcttcaacttgtataagcttctctcttccacctccatctattcaagctgacatgcaagcagcagcctctaattttctaccaactttatctctggttaagcatatatatatatcttataagccatgcaagtatatatatatatttatatatggnttataaacagttgaaagcgtagttgttgattgtgatgaatgtaaagaacttaagtttcagtactggactcctttttaactgtta

SEQ ID NO: 195299 - DNA, 490 bp, Gossypium hirsutum
cggacgcgtgggcttccgtgaatgcaccatctctggaacaatcgatttcgtattcggcgagtcggcggcggtcttccaaaaatgcaaattccttgtccgggagccacaatcaggacaacaaaacgttgttacggcacaaaaaagattggaccataatcagcccacagcttttgtgatcatggacagtgaaatcatcccagatgctgagcttgcaccagcgaagaacgaattcccagcattccttggtcgtccatggggtaagctatccagagctatcatcatgcaaacttacattgacgatatggtacaccccgaaggttggactagttgggatcccaaagaaccgacaaatctttgccaatacgccgagttcaataacactggccctggtgcttccacttcccttcgtgttaaatgggccggagttaggttgcttaacgaggcagaggccattaactacactccacccaagttcttcgacgtcggcgat

SEQ ID NO: 195300 - DNA, 878 bp, Gossypium hirsutum
gccttcccccttttacactcccccttcagatatcttcattttcatcttcttcctctttctttctgttctttgttttcttcaaatactgccctttcattttccttagttcttgttaaaaagaaaatgtgtgggattttagctgttttgggctgttctgatgattctcaggcaaaaagggttcgggtgctggaactttcccgtaggctcaagcaccgtggtcctgactggagtggcctctaccaacatggagactgttatttggcccatcaacgccttgccatcattgatcctgcttccggtgaccaacctctctttaatgaagacaagtctattgttgtcactgtcaatggagagatttacaaccatgaagaactaaggaagaagttggcccaccacaagttcaggactggcagtgactgtgatgttattgcccatctgtatgaggagtatggtgaagactttgtggacatgttggatggaatcttctcatttgtgctattggatactcgtgacaacagctatctcgtcgctcgcgatgccattggtgtcacctcactttatattggatggggactcgatggttcagtttggatagcatcagaattgaaaggattaaatgatgactgcgaacatttcgaaagctttcctcccggtcatttatactcgagtaaatctggaggctttaggagatggtataatccaccttggttttcagaggtcactccatcggttccatacgatcctcttgttcttagacgtgcatttgaaaatgctgtgatcaaaaggttgatgactgatgtgccttttggagttctgttatctggaggacttgattcatcattagttgcttccatcacagctcggtatttggctggtac

SEQ ID NO: 195301 - DNA, 952 bp, Gossypium hirsutum
tttttgcgtccgccagccaggtaatgttctgggggcttttttaaagctgcgattgcaaccaaatgggcaaaaatattatcagttctcagaatataacaaaaacagatactattaaaattggttttaatctcttgaatatctttgatgattgctctgatgaccgatctgtcttgttctgaactttgacactttttgataatcgttttcgaatctcccattatttgtaaatctttaagccccatagatcttcccaactctaaggcttgtaaccctgcatgtgcttctaccgcgaatggagttgtaatgttggtatggattactgactttgagaccaaaatctccccaccctggcctcgaacaatcagtcccgaagcagatcttgcattttgctgatcaaaggccgcatcaaagtagactgagattctcgtacatctctcaacagttcgcaggacaccatttcctgccaaatgatccaaagcccgcaacagaaaagtcagcactgttcgtttgtcccgcgactaaaaacccatagcatccacgaaaaatatgattacagtcctcctcttcctggttgcatcgaggacaccgggcatctgcaactatacgtttaatcttcagattagcaaaagtaggaatgtaattccaagaaattccccatattgtaattttgactttcgaggggatttgtaaattccatagttttttgtaaaaggctttattttcggtttgtaaattaataggattttgagtaccctcctgtaatagtttgtaggcgcttctaaccgaaaaattaccagatggttctcctctccacacttggaagtcttcatttactgacgttgcaaaaggaatctgcaaaatctttttagcaaaaaaaaaaaaaaaaaaaaaaataaaaaaataataatagtaaaaaaataaagaggggtggaaaaaaaaaaacaagggattg

SEQ ID NO: 195302 - DNA, 735 bp, Gossypium hirsutum
  unsure (1)..(735): unsure at all n locations
cttcccggaccccttggttttaaacagtcgtcttttttctctcaattttgatatcttagacgctccctctccactactcgatgaacgatattcggaacctccccaaccagttgctatattggtgtggattactgattttgaagccaaaatctcccctccctcacctcgaacaatcaaacctgaagcagatcttgcttgttgcttgatcgaaagctacatcaaagaagactgacacacttgttcttctttcttcagttctcggaccaccatttcctgccaaattacccaaagcctacaacaaaaaagtcggcactgttcatttgaccctcgactaaaaacccatgacatccacgaaagatatgattgcaatcctcctcttcttggttgcatcaaggacaccgggcatcagcaactatacatttaatcttcagattagcaaaagtaggaatgtaattccaagagattcccaatattgtaactttgattttcgggggaatttgtaaattccatattttttttgtaaaaaactttactctcggtttgtaaattaataggattttgagtnaaaaaaaaaaaaaaaaaaaaaaaaaaaaaaaaaaaaaaaaaaaaaaaaaaaaaaaaaaaaaaaaaaaaaaaatttaaaaaaaaaaaaaaaaaaaagggggggcggttttaaagaatcaaatttttcttccccgggcttgcaaagtaataatttttttttgggggccccaa

SEQ ID NO: 195303 - DNA, 433 bp, Gossypium hirsutum
cccacgcgtccggctttagtttcggtttgtaaattaataggattttgagtaccctcctgtaatagtttgtaggcgcttctaaccgaaaaattaccagatggttctcctctccagacttggaagtcttcatttgctgacgttgtcaaaggaatctgtaaaatctttttagcaacttccgcattgaagaggtccttccaaacagaaatacgatcccccttaccaaccctccagcaaagtcctcattcgagaatgccttttgccgactagatacttttccaggtaagcgaacgtaaattccctaattgagcagttagaaaacacgcattcggataatatttagctttcaatactcgagctagcaaagaatctggaaaattaatgagacgccagccctgtttagctaataatgcaatattaaatttatcaagttttc

SEQ ID NO: 195304 - DNA, 539 bp, Gossypium hirsutum
  unsure (1)..(539): unsure at all n locations
cccacgcgtccgtaacaaagcaaataataacaatcaccggcggatccccattcaccagtaattaaacgcaggtctcattcatttccggtgcgtttaataatccctttatacgccatggacatgaagaaggtctccaccgccatcattgttgctgccgcctcaatgagcgccgtcatggctgccggtgcaccatctcctgccccttcagccggtggttctagtcctagctcctctcctggttccgccccagcatcaggaccggattccagcgtggctgccgctaccttgcctgttcttggatcattggcctccattgtttctttgttttcttacatgctgcaataagctacatgtatgaaaaatgaacatgtcaacgaatgttttattttattctttttgaaagaaacatgtgatgaatattgaaaaaattgaataaaatggagctttgaatnnnnnnnnnnnnnnnnnnnnnnnnnnnnnnnnnnnnnnnnnnnnnnnnnnnnnnnnnnnnnnnnnnnnnnnnnnnnnnnnnnnnnnnn

SEQ ID NO: 195305 - DNA, 442 bp, Gossypium hirsutum
aaataataactatcaccggcggatccccattctccagcaattaaacgcgggtctcgttcatttccggtgcgtttaataatccctttatacgccatggacatgaagaaggtctccaccgccatcattgttgctgccgcctcaatgagcgccgtcatggctgccggtgcacctgctcccgccccttccgccggtggttctagtcctagctcctctcccggttccgccccagcatcaggaccggattccagcgtggctgccgctgccttgccggttcttggatcattggttggggcttccattgtttctttgttttcttacatgctgcagtaagctacatgtatgaaaaatcaacatgtcaacgaatattatattaaattttattttttattttgtgtaagaaacatgtgatgaatattgaaaaaaatgaataaaatggagcttt

SEQ ID NO: 195306 - DNA, 523 bp, Gossypium hirsutum
attttagaccacgccaacattccccacctccaatctctccaagttttgttttcattctcgggtgtatatttgctccattccatctcgttttctatttgtaatttcataaccaagctttccaagtctgttcaatatgaaggcaagtcattggcttaacagcttcatcgtactgttagtcctcatcctgacgatggacttccgccatggaatttattatgctcgggctgatgctggcggcaccggtttcgttcaaacaacagcaactaagtttgtcataaatgggaggcctttctacttgaatggctgcagtgcatattggatgatgatgttcgcgtctgacaatcctacgaggagcaaggttactgacgcatttcgagaagcctccaagtatggcatgaacataccatgaacttggccgtttaacgatggcgattacaagcctcttcagaattcccctggctcttacaatgaaaacttcttcaaggcactggactttgttgtaacgaagctaacaagtatggaa

SEQ ID NO: 195307 - DNA, 449 bp, Gossypium hirsutum
tgacttgccttgacttccactttcagacatcttctccctctcttcgcttctgatttcactttcagatggattggcaagggcaaaagctagcagagcagataatgcaggtgatgctattggtatttgcagtggtttcatttggtgctggttatgtgttgggatcatttcagatgatgatgctcgtatatgccggtggcgtgaccctcaccgctttgattactattccaaattggcctttcttcaaccgccacccactcaagtggttggatccaagcgaggccgagaagcatcccaagccacaggtagctgtgagttcaaagaagaaatcctccaagaagtagggtcattttggtttcatcttagcatcattagaaagttgctaggggtatgaattgatgttttctgccttctttccatctagtcggctaggtttctcaaagtttttgaac

SEQ ID NO: 195308 - DNA, 672 bp, Gossypium hirsutum
  unsure (1)..(672): unsure at all n locations
gtaaattgatgtttgaaatatctttgtatggtggattgaatgctgctgtatatgttgctcattaccgaattagtgctgaaactaagctaattaaatggtggataatttgctgtcgattatgatggaaatgcctattaaatgtttaaaattcctcttatttaattgatggttgctgctgtttaaatgctgtaaattgaagtgtttatatgctgtaaattgaagtgtttaaatgttgtaaattgaagtatttaaatgctgtaaattgaagtgtttaaatgttctttgtgtagcattttaagaacttcaaagctcacagatgatttcttatactctatatgagttcattgattctatgtttttgcaattttaggtatgatcatgggtgcagcagcttcaactgacaaggacttgtgcaggtctggagcaggtcaatcaagaagctctgctggaattaaactgacaagtaattgtagtatgcttgtagttgaagtttcttatagtgaacatcatgttgtttattcggcagaagtttcaaagattttactttttagaagaaagtgtattgtagtcattagattgggttttcaaagattgattatgttaacattttgatcaaatgaaaagttctcttattaatgtttttgaactcaaaaccccannnntttaattaat

SEQ ID NO: 195309 - DNA, 423 bp, Gossypium hirsutum
tccggtttttggtgccgtagcttgtctctcatgtcctattagggtcctgtttgcatccgaccagttgtgtccaagagctaggctttgatacttaaaataagaaccactatgggtatttctagttatagttgtccttccgtgtttttatttggtgccataatcccaaccctagaagctcatatcgctgagtatgacgagtactggacggcacgagaattggaagccattgagaacctggacaagggcctatcactccaacccggaggaggtggtccgccattacaatgaccacttctctaggaccatgctcgagttttatatcaccaaaagggtgttggcagaatcaaaaaagggtccctgggaggttaccaaccacgttgacagttgctggcgatgtgaacctgactgggaaaagaataagaa

SEQ ID NO: 195310 - DNA, 453 bp, Gossypium hirsutum
gctgaacgggtctatcgtgaactatccaccatactagagggagaagcagacctggagtgggcctgcattatggttcaggccttgaatttgattctactcacttcttctgagctatctgtgcttcgggaacttttaaaacagtcacttgttaatgctgctggaaaggatttgtttgttggtctttgtatgcttcatggtgccattcacccatggccattttaagtctttgtttgttggcacaggcatatcagcatgcaagtgcccgggttcagtccttggttgaggaagatattaatgtcaagttcttggttcaccttgataaattgattcgcttgctcgaaactcccatctttgcttatcttagattgcagcttcttgaaccaggaaggtatatatggttgctgaaagcattgtatggtcttttaatgttacttccacagcaaagtgctgcat

SEQ ID NO: 195311 - DNA, 872 bp, Gossypium hirsutum
tctcatgcccctcatgctcaagattacttactgttgatctgactacgaatgcagatggggggcaatctagcaaaacaacactgaaggggtttaaatcctcaagtattctgaacagaattcaattaaatgattttcagacgagcactaaaatagaggctttggtatgacttactgggattcattaattgctaaaaagttgctagactattttgagaggatcaaatcccaacagcgaaggaaacaagtactgcagctgctgctgctgccagtccatctcatgatacttcactgcattctgttaatttctgtgaaacgacaataaaaaatggaactggtgctattttgcctgaaaagccggtctcaactggccagactaataacctgatatcagctaagacttcagagacagctctgcttgatgagaggtctttgttggcttgcattgttcgcacgattccaactggtggcaaaattcggatcagttccacgctaccaaataggttggggaaaatgcttgcacctttacactggcatgattacaagaagtatggaaagctggatgactttgtagccagtcaccctgcgttgtttctgattgagggcgattatattcagcttcgagagggagcacaagaaatgatagcagccactgctgctgttgctaaagttgctgcagcagctgcagcctcatctccttactcctcgattttgccttctgttgctgttactccaatggcacaacctaaccgactaaagaagggtctcccaacagctgactccaaccatgcgaagaatgagaatgctgctttcaaggggtatgcagttatctccaaaactgcagctggtgatcattcacagctgtcaggaatgca

SEQ ID NO: 195312 - DNA, 494 bp, Gossypium hirsutum
cactgcttgagtatgaaaagcataaaatacacggtggcatgctccctcatgcagatacttcggttgttgagcctaatggagttgaagctcaagctggtagtaatcaagctcctgggtcaggtagggcatagagagatgctgctgctcgtgccatgcggagctggcattctcaacgtgttctcgataacggtgaggtctgtcatccaatcatcaaggacaagacctctagtccgacgctcaaaagtgacagacaacttaaaaattttggtttattgaagcgtaaaaagccatccactttggactctggtgtccgagtttctcaacttaaggcaactaaatcacagcgttcttttggtaggttggataccgcggttgttgatgttggagccccagctgattgggtgaagattaacgtgcaaaaaaccgttgactgctatgaggtctatgctttggttcccgggcttcttcgtgaggaggtgcatgttcagtctgat

SEQ ID NO: 195313 - DNA, 369 bp, Gossypium hirsutum
aatttaagaaattcataaaatttttttttattttacaataatattaaaattaacagtgttaagaatattcttacaataactaaatcacactaaaatgtttacacaatcacctcccagaaacaggtgcaccagtaaccacaagaacaaaaaaaaaagaaaaatacacaaatccagcaacaacagtttttggcaatcactttttcaggagtaataccgaaaaaataaccccctgatttcaacaaaaatgacacgttactcagaagtctgcttgctttgtcttcagtttcaaatcttaactgtagaaaagtaacttcaagggtgattaatgtaaaagcctttttcagctgaaaataacgataagaagagaag

SEQ ID NO: 195314 - DNA, 639 bp, Gossypium hirsutum
  unsure (1)..(639): unsure at all n locations
cagatttcggcttgagtgcccttggtgagcctgcgcatcaagatggattgctccacacaacttgtggaacccctgcatatgtagctcctgaggttataaaccgaaagggctatgacggggcgaaagccgatatctggtcttgcggggttatcctctttgtcctactggctggttatcttccatttcatgattcaaatctgataggaatgtataagaaaataagcaaagcagattacaagtttcctagttggttctcacctgatgtcaccaagctgctatcgagaatcctcaatcctaatccaaaatctcgaatttcaaccgcgaaaataatgacaaactcctggttcacaaaggggtttaaattgaaatcaagtcacaaaactgccgaaaaggacttgccttctaccgataccaatgtggtttttggttctgaggctaacacancagcattcgaaacaaagaatcacaaggatcagctcaccaagttgaatgctttcgacatcatttccttatcaagtgggctcgatttgtctggattgtttacggaaaccggcgagaaaaangaagttagattcacttccatgcatantgcctctgccatcacttctaaactaaaagactttgctgagcacttgaacc

SEQ ID NO: 195315 - DNA, 1306 bp, Gossypium hirsutum
ccggaacggaagttccgacccgagcgacgcgtacgggcggaaggttatttacccagcatctatgcttactcacctggcacccatggtagagttcgccaagctcctcctcactcaacacccttccctttctatccacatcctcatcgccacccttccttcacaaccttcctccaccgttccctcccccgttcctccttccatcaccttccactacctccccacattcgacctccttccaacctcaaccgacttagatccgcttttcttcgacgtcatccgcctcagaaaccccgatgtccgtcgcacccttctcaccatctccaataactacacactcaacgccattatcgtcgacttcttctgcaccagcgcagcattcgaagtggcctccgatctcaaccttccagcttactctttcctccctaccgccctcggtgccgctgcttgcttactttatttgcccaccctctgtaacaaattcactcaaagcttccaacatctcaacgttctccttgatatccctggtgcgccaccgattccatctgcagatatgccgccgacaacgttcaaaggcaacaagctgtatgacgttttcttagacatcgccaccaacttgcgccgttcaactgggattattgtggacacttttgaatatctcgagccaaagagcttcaaagagattaatgatggactctgcttgccggactaccccacgcctcccctttactgcatcggacctctcattgttaacaccaccgtggacggtgatggtgttcctcagtgcatcaaatggttagactctcaacctagtaaaagcgtagtgtttctttgttttggtagcttgggatcgttttcagtgcaacaattaaaggaaatagctgttggattagagaggagtgggcagagatttttatggattgtgaggaacccaccattagagaaccaaagcttgaacattgacacaaaagtcgacccagatttgaaatcattgcttcctccagggttcttggagaggaccaaagagaagggactggtagtcaaatcatgggcaccccaattagccgtgttgaatcaccactcgggtgggtgggtttgtgactcactgccgctggaaactcattgctaaaattcggtaatgtgcaggggtcccaatgttagcgttggcccctttatgctgaaacaaaggttcaacagggtgttgaatggtacaacaaaatgaccaatggcgttgccgatgggggagtcggaaaaccgggttcctgagttccacctgaggtgaaaaaccgaattcaaaaattgaaggggg

SEQ ID NO: 195316 - DNA, 586 bp, Gossypium hirsutum
ggaacttgttcctcgcttgaatgcagaagaagtaagaggcctttttgctccaccaccatggggtgatgatgtgccgccatcagcattttgcatgacgaatgtgggagaatgggacaaatttaggactatagatatggataaagaggctaatattattggcgccttaaataattcatctatgaagaagaaatttcatgctgacgctgatcgggcggcttgcttgagtgcatggcgaacagttgattgccgaacaagagaagcacttcgccgtagcgttctttcagatcttattgcgagctatgaggactgcatacggaccttcatccaggaacgtggacatggggatgtccttgctttacaggtccaagatcctttccatagattgttgctgcatggtgtctgtgagttctacaacgtggtctcggtaacagttacacagtcaaagggtgcggagtcactaaaggtgacgaggataaagaagaagaagacaggggtggttgagctccctaatatcaccttgtccaatttcctgaaaatgtcaaaggagggcatttggtagttctaggggcagaaattcgcccccccc

SEQ ID NO: 195317 - DNA, 696 bp, Gossypium hirsutum
aaaaccgggccgaccgcacgcgtccgcccacgcctccgcccactcgtccgcaatttctgaagtttagtatggattcctcggcttcgctgttaaacaagctcatgggtgcggatccatttttcttgttagcgggtcccaatgtgattgaatctgaagatcacattctaaggatggctggctacatcaagactatcactaccaaacttgggttgcctttggttttcaaatcaagctttgataaagctaaccgaacatcatcaaaatcatttcggggtcctggaatggctgaaggcttgcagatccttgagaaagttaaagtagcatatgacattccaattgtaactgatgtccatgaaactattcagtgtgaagcagttggaagagtcgctgatgttattcagattccagcattcttatgtcgtcagacggatcttctagttgaggcggccaagactggaagaattatcaatattaaaaaaggccagttctgtgctccttctgttatggtaaattctgctgagaagattagattggctgggaatccgaatgtgatggtttgtgaaagaggcaccatgtttggctataatgatcttattggtgatccacgtaacttggagtggatgagggaagcgaattgtcctggtggtgctgatatcacacattcactgcaacagccagctggaagaaagttggatg

SEQ ID NO: 195318 - DNA, 431 bp, Gossypium hirsutum
gacccacgcgtacgatttattcctttgctttcgtccaacactattagaagagaacgggccatggggatcaaccagttcatccttgcacttatctcccccccttgtctcttctccttctcagcctctaccaatgcgcctccacccctttccgacgcttctagccctacttcttcagaacttcatgatatgattgaggtcatgtctgaatcaccatctccatttgcatttgatggtacaacgttggaaagtattgacgatgtattaagcatactacctggcggcgtcgaccctgcccttcagcaaatctgtgggaacactgatcaccccgtcgaatgtataatagcaactatgccgttcctagatgagaaaactcctattgagcctctttctgtccttaaagctgggattgaagcaatggataaccagaccaa

SEQ ID NO: 195319 - DNA, 1557 bp, Gossypium hirsutum
cccacgcgcccggggaaagatcgattcatcagtcttcttctctgagtagaggttttggatttgtaagcatttacaatgtcttcgtcctatctcccagcaaccactgactcaattgctctggccttagaagccaaaacaccatctgaagccatctcaatcctttaccgtgtactagaaaatcctgcatctgctcccgatgctctacggattaaagagcaggccataacaaatctatctgatcttcttagacaagagaaccgagcagaggagctcagaagccttctgacccaactgaggcccttttttgcactaattccaaaggcaaaaactgctaaaattgtccgtggtataattgatgatgtagctaagataccaggaacatcagatctccagatttctctttgcaaagaagtggtgcagtggactcgtgctgagaagcgaactttccttcgccaacgagttgaggcaaagcttgcggcacttttgatggagaacaaggagtactctgaagcactgaatctcctttctggtctaatcaaggaggtcagaaggttggatgacaagcttcttctagtcgacatagacttgttagagagtaagcttcatttctctcttcgaaacctgcgcgaaagcaaaggcatctctaacagctgcaaggacagcggcaaatgcaatttatgtgccaccagcacaacaaggtaatatagatttgcaaagcggaatcctccatgcagaggaaaaggattacaaaactggttatagctacttctttgaagcatttgaagcattcaatgcccttgaagatccccgtgctgtctttagcctcaagtatatgttgttgtgcaagataatggtgagccaggccgatgatgttgctagtataatatcatcacaaggcagggctacagtatgtggggcctgaacttgatgctatgaaagctgttgctgatgcccatgccaaacgttccctgaagcttttcgagattgctcttcgtgatttcaaggctcaactagaggaagacccaattgttcacaggcacctttcttccctatatgacactctattggagcagaacctgtgccgattgattgagcctttctcaagggttgagattgcacatattgctgaactgattgagttgcctgtagaccatgtggagaagaaactttctcagatgattcttgataagaagtttgcagggacgctggatcagggtgctggatgccttgtcatctttgacgatcccaagaccgatgccattttccctgcaacattggaaaccctctataacattggcaaggttgtagataggccttatggggggggtggtaacataatgggctaagagtcaagatttaccgatgcttatatacagcttgcaactcggttctagcgaaaaacaagtgttcaggtacactgtatatgcacatgttttgacgtttcagcttttaatttaatgggattgcggcacaacatttgggtcaaaatatggagttgattcagacaatattgtgtttgctcaccatatgcttgtctactggttgacttttcaatta

SEQ ID NO: 195320 - DNA, 444 bp, Gossypium hirsutum
ttcactcgtccgttcactttcccaagaaaacagccaaatttcccagaaacctctaaaaactccccccaacccatgccctctcctctgggttcaccgacaagctcccggtctgtaacccagaccggcaatggctcccaccgtttcacgatcaaagggtattccttagccaaaggcatgggcgttggcaaacacatagccagcgagagcttcactgtgggaggctatcaatgggcaatatacttttatcctgatggtaaaaacccagaagatcattcaacctatgtctccgttttcgtagctttagcaagcgaaggcacagatgttagagcccttttcgagttaactcttttggatcaaagtgggaaagggaaacataaagttcatagccatttcgatcgagctcttgaaagtggcccttatacccttaagtataggggaagtatg

SEQ ID NO: 195321 - DNA, 888 bp, Gossypium hirsutum
  unsure (1)..(888): unsure at all n locations
ggaaatcaagaagcgtgattacagcggctcctgctatctcgatttctacttcgtttacacgccccagtccccttttcttctttccttttatttactcttcccataacattacattcccctttagcactcaaacccagaaaactgaaaaccttttctttctcccctaagagagctcaaaatgggagttgactactataacattctcaaagttagccgtaacgcgacggacgacgacctccggaagtcctacaagcgccttgccaggaagtggcaccccgacaagaaccttgtcaacaacaaagaagccgaggctaaatgcaagcaaatttttgaagcctacaacgtcctcagcgacccgctaaagcgtcagatctatgatcttcacggtgaacaaggcctcaactccgctgaatcatccagccccaacgggtttggcgccggcggtgtcggtggtatggccaacaagtttgaccaaaggaatggccaagggtacaagaaggcgtcgccggttgaaacccanttgctttgtantttggaggagctttataaaggtggtaggcgaagaatgcgaatttcgcgctctattcccggtgaatttggtaagctgaagacggtggaagaaatattgaaaatagatataaagcctgggtggaaaaagggcacaaaaataactttccccgagaaaggaaaccanaaacccggtttcactccatccgatcttatctttgtggtaaatgaaaaaccccatgctattttcaaacgggatgggaatgatctgattgccactctgaaaatctctctactcgaggccctcacagggaccatcctcagtttgacaaccttggatggaaggacccccccgatctcagtcccagatatcgtgaaacc

SEQ ID NO: 195322 - DNA, 493 bp, Gossypium hirsutum
tcggaactaggaaagaccgaggattcacatttacggggccggtgaacctacatgctggagcaaatcatatcgcacttgtcagcgtagctgttggattaccgaatgttggactgcatttcgagacatggaaaacgggaatcgtaggtgtttactcgaacggccttgacaaaggaaagaaagatttgtcgtcacataaatggtcgtaccaggttggtttaaaaggagaagcaatgtatttggcctcaccggaaggagtctcatccgttgaatggatccaaggttcactggccacacagagtcgccagtcaatgacctggtacaaggcatatttcgatgcaccaacaggtaacgaaccggtggctttggatatgcggagtatgggaaaaggccaagtatggatcaacgggcaaagtgtaggaagatattggatggcgtacgggaatggtgagtgcagtaagtgtagttactcggggacgtaccgacctacaaagtg

SEQ ID NO: 195323 - DNA, 581 bp, Gossypium hirsutum
gaataaccgggccgaccgacgcgtccgcccacgcgtccgatttggcctcacctgaatgtttctcatccgttgaatggatccagggttcgctggccacacagagtcgccagtcaatgacctggtacaaggcatattttgatgcaccaacaggtaacgaaccattggctttggatatgcggagtatgggaaaaggtcaagtatggatcaacgggcaaagtgtaggaagatattggatggcgtacgggaatggtgagtgcagtaagtgtagttactcggggacgtaccgacctacaaagtgccagagtggttgcggccatccaacacaaagatggtaccatgttccgagatcgtggctaaaaccgaaacagaatttgttggtggtgtttgaagaactcggcggagatgcatcgaagatttcgcttgtgaggagatcggttttaaatagacaccatcataataagtgataaaaaggtatgaaagtagaaaatgttgcagtttcattgtctaaatgcgccatttgtttttagaagagatgtttttagagtgcatgttttgaagaaatgaatcattcttgctttatc

SEQ ID NO: 195324 - DNA, 437 bp, Gossypium hirsutum
aaaagacccaattattagggtttcaaaacatcagatttttgaggctttccccttgcttttgcgatcactcgattgctactttccaccattgaaaccgatggatgatagctcaccatggagacgttttgttttcttactctaaacctctcccaaaagggtatggaggtgccagggaatggtgcttgcagaggcgtggggtggcaaatggcatgggggtgaccagggtttttccttttttgctgtttttttattattggcccgggctagagttagtggcctgagctgatgtaatttgggttcgggtatttgggttttgggccgggcataattaggcctgttcatggcttttatccatgttaccagagggaaaaaaatgactttttccagcttatttgagctttgcattggataatttaactcatcatatagggcccact

SEQ ID NO: 195325 - DNA, 803 bp, Gossypium hirsutum
ttctctctctctgggtctcaaattccggggctccgtgcccctaatacgaaaccgagcaaaacccaactctgatttactcctaattggtactggccgggtattttccatcactttcctgggaaaaaaaagcataaaaggaaaaagtttcaggagaaatgtactcagctattcggtcgttaccgttgaatggaagtgtaggagattatcaagggtcgtttgatggaaccaacttgcctagcgatgcttgtttggttttaacaacggatcccaagcctcgactccgttggacagctgagctccatgaacgtttcgtcgatgctgttactcaacttggtggccctgacaaagcaaccccaaagactattatgagaacaatgggagtaaaaggccttaccctctatcacttaaaatcacaccttcagaaataccggctggggaaacaatcttgcaaggaatcaactgataattctaaggatgcttcttgtgttgcagagagtctggacactggttcgtctacaacatcatcatcgaaactggtagcgcaagatttgaatgatggttaccaggttactgaagctcttagagtacagatggaagtgcaacgaagactacatgaacaattagaggtacagcgtcatcttcaacttcggattgaagcacaaagcaaatacctacagacgatactcgagaaagccttgtaaagctttgagcgatcatgtggctgcttctgctggtctcgaagctgccagagaagagctttccaaactgggaatcaaaatttctaacgattgtcaagggatggt

SEQ ID NO: 195326 - DNA, 620 bp, Gossypium hirsutum
gaaaacccgggccgacgaggcgtacggtgtgaagataaattatcatgccgctattcctctttgcactccattccattggatcaaagctggatgattgtaaaggactgtctcatagctgcaactgcgaaggactgtagtctgatgattagttttagaccaaaggaagatggtagactcccttctcacaatactgtatatctaggatcaactaaccaagcttttgagtacaaggtgtatttcattgatctggatctgaaacccctgaagaaaatggaggcttattacgagttagataagaaaattgttagctgctattctcagatggtgaaaactgagcatgaaacagataaagctgttacaataaactccaatggaagtgtacgagatcaaagatacgcattagaagacggtttgtttactgaaggttgtactggtaagtgcaagtagttcttattatatgttccctgaactgttgttgtaaaagtaaaggttgcaaggagccaagatgattaactcgtcattaggctcgagttcttcctttcaccactttttggggcttttggatttcccttggagaaaataatctcttgtatgtatcttttgcttaaagatttatttga

SEQ ID NO: 195327 - DNA, 688 bp, Gossypium hirsutum
  unsure (1)..(688): unsure at all n locations
ttccatctccnccataaccaatttttttccaaaaaaccttaaattcctggttagcgttttatcctacacctgtcgtcttcccctgttttgactgttgtgttcttctaaacaagatccctgaacaacgaatggggaataattgagtactttactactctcttcgttgttcaggatcgtttagaacaactccctatttacaacagcaaaaaaaaaaaaagtacaaagagacgaggttcatttcccatattcatttgtcgagaaggacagagcagtctccattgtcgcggaaagacagaaggaaaagaaaaagggtcaacctaacttcaccacggcaacaattaaggcacgccaacatccaaataatcccaatcatcttccagtcctgtaacattgacaatgtctagcccgatgatccttaagaacccaaactccctccaacggcggcaaccgctgctgcacagccgttccaacagcgtcgatagctgcatcacccctcgtgggaacaccaatctcaggttcggagaggtttgcggtggtactaccgccgacgttgcggctgtctgttgctgttgcccatgtgggttggccaaccttgtggttctagcaatatacaaggttcctgcagggctgtaccgccgcgctctccgccagaaacggctgcgcaagttgcacaaaaaaggttacttta

SEQ ID NO: 195328 - DNA, 704 bp, Gossypium hirsutum
  unsure (1)..(704): unsure at all n locations
cccacgcgtccgcattgagacattttttaaaacagatagtgtgtgtgagtgagagagaaagatataggaagaatggagctctcacagcatggttccttagaggagttaatggctgctgctccaagaagggacagttggaccactttttcaaatggggtgaccgagttcttccctaatggatggaacttcgaatcttttgatgctacaccaccaaatcttgccttcttagggttctctacaacaacaactgatgaaattgaaaacccaagctttgaatgtccttttagtgaccaaccttacccttttggtgatgggttttcagtatcagagatgggatgctccaacttcacctttcccacctgctcatgaagattacccatcaatggttgatgatgaagatcagcttggccttctcaccactgaccaccatcatcagcagcagcacagcttggaagaaatgaagcatagttgcaaagttgaaatggagcaaactagcaacaacattcacggtttcaacatgggcttgtttgtagagaaaaagactaaagcccaaagattagaaggtcaaccttcaaaaaatctaatggctgaaaggaggangangaaaaaattaantgacaggctttcaatgctcaaatcaatattccccaagatctgcaagatggatagaacatctatacttggagataccctggattacctgt

SEQ ID NO: 195329 - DNA, 522 bp, Gossypium hirsutum
ttgttgcgtgggcggacgcgtgggcggacgcgtgggcggacgcgtgggcgccaacctgaacgagccgacactgtgtactacggagaatacaaatgcacgggggaaggcgcgactcctgctacacgagagaaattcgtcaaacaactatcggatgcggaagctaaaccattcttggttcttgactacgttgaaggtaccaaatggttgcttccccctccgacagtacctaaataattcattcattcccaactttttcatgccggcaacatatcctcacagtattgctaattcaagcagactctcgtctacctctttgctgggtggaaataactagccatccattttattttatttattttattttcccttcccatggcttgtattttaacaaatagccaaatgtcaataagaagcagaatttgtcttatttttattaatagttaggatgttgatatttgccattatgtagaaaatttccatcatatcaagttaaaattatgtaataatatccatcatatatcc

SEQ ID NO: 195330 - DNA, 562 bp, Gossypium hirsutum
ctttgtgcgatgacaggggcaaccatttctttaaggattgccatattcgtggcactggggatttcattttcggaagcgggacatctttatatctgaacacggaaatattcgtggtaggagatccggaaggagatccggaaatggcaataattacagcacatgcgcgagaaagttcatcggaggacacgggttattcgttcgtgcatggcagaattacaggaacagcgaaggacgtatttttgggcagggcctggaagagcagtccgagggttgtttattcttatactgaaatggacgaaatcgtccatcctggtggatggtctagtaatcgccaacctgaacgagccgacactgtgtactacggagaatacaaatgcacggggaaaggcgcgactcctgctacacgagagaaattcgtcaaacaactatcggatgcggaagctaaaccattcttggttcttgactacgttgaaggtaccaaatggttgcttccccctccgacagtacctaaataattcattcattcccaactttttcatgccggcaacatatcctcacagta

SEQ ID NO: 195331 - DNA, 433 bp, Gossypium hirsutum
agacggtgccgatgtcacaatgagagatatcactaacgataccaaagggtcgcaattggatccctcggaatcgacatttttgggtttagatgataataggttgtgtcaatgggatatgagagatagaaaaggggtggttcaaaacattgccacaagtgattcacctgttttgcattggtctcaagggcatcaattctcgagagggacaaattttcagtgctttgcgagcactggagatgggtcaattgtggtcggatcacttgacgggaagattcggttgtattcgaagacatcaatgaggcaggccaagactgcatttcccggtctcggttcaccgatcactcatgtggatgttacctatgatgggaagtgggttttgggcacaactgatacgtatcttgtccctcatttgcactctgtttacagataaaga

SEQ ID NO: 195332 - DNA, 652 bp, Gossypium hirsutum
  unsure (1)..(652): unsure at all n locations
cgcttgttccgagacctcttcattcgtgaaggtttccagtttgattacgtgtttgattggacaatcctaaagtatcagcaatctcagattgccaatcctcctacccgtgctcttggccctggtgctggaactagctctggcttacctcctgcaggtgcaattgctgataggcagtcaggtgaagagaccagaccttctggttggtcttcagcagatcctacacgcaggaggcattctggcctgattgcaaattctggaagtttagctaaacaaaaaagtccagtagctaatgatctttctgctgctaaagatcctatgttgtctagttctaatttcttgcgttcaagtggatcttcgaggcgagctgctgtttctagcagtcgtgatgccgcagcaatcgcagttagtgactctgaacgctctcactttcgtacaaccgatgcaactgcagggccgttccagaaaatctcctgtgggccaagaaactcgcctgtgttatcatcagagaacaagcggccatcttctggtaggaacacctcaaatataaataatgtaaagtctgctgtgaggggcattgaaagcctgcattttaaaaacgaagaaaggttacactattancgtactacctactcancctgcctgaatctcctgt

SEQ ID NO: 195333 - DNA, 422 bp, Gossypium hirsutum
atggtttttaattgtcccaatttgaaagaggtatccttagaattttctcgccaagaaacccgccctaccgatcttacaaccatggttgatgcaatgggtagaagttgcccaaggttgcaaaacatacacattgtatcagttcgactttcacatgctgtagtgctttctcttacagctgctaatttgaggggcttgcggatgctttcgcttgttcttggctcagaaatcacagatgcatctgttgctgctattgcttcaagttattcaaaattagaattgcttgatctcagcgggtctagcatcagtgatagtggcattggaatgatctgcaatgtgttaccaaacacactgtcaagactcctccttgctctttgtcctaacataacttcaagtggaattcagtttgccacagctcaactacc

SEQ ID NO: 195334 - DNA, 926 bp, Gossypium hirsutum
cggacgcgtgggcggacgcgtgggttcccttctttctttcttcctttttcttttatttgtttcttgatcactatgtatgtgatacagtatttttattttcttaataatcattcattcctttgattagtctaaggtgttattggaagctgtattcttcattttattgcttgtaaaagctattagcttttctcctttagctttaataacctgtatctggatgagaacaagtcattgatcttaaagattgttgagagccagaattccgggaaatttagtgaatgtgctgagaatcaagcacggctgcagcgaaacctcatgtacttggctgcaattgcagattctcaaccgcaacctccggccatacatgcccaggctggagggcactacatgcagcaacagcaacaaactcaacagatgacaccgcaatcgctaatggctgcacggtcctccatgttgtatggtcagcaaccattttctgatctccaacaacaagttctgcatggtccacttggcatgagctccggtggaagcacgggtcttcacatgctgcaaagtgaagctagcactacaggtggcaatggagcacttggagctggagttttccctgctttcaggcatggctcttctggagaaggcaagcaagacattggaagtgcagggtcagccgaagctcgtggagttctcggctgcgattgacggcctaatggtctgtctactatcctgatttagcatagttaagaagatgaatttaggggatatatatttttttaaaggaaattgtttctgatgcaaggaacaatgttaggacataaactttagaccttttggtctgtgttttctagtacgagacagagcatcttatggtaaacttaacatgtaattttgtagggtctcatgattctactttccaaatctgtgtttttact

SEQ ID NO: 195335 - DNA, 483 bp, Gossypium hirsutum
gaaaaaaaacaaaccaaatcttaaaagggtatatcttttaaggttgagcaaaagaattttttttcaagttcgataactcgaaaaagaaaagttagttatctttgtgaatatccaagaaaattaagggaaatacagaaacatatgttgtaatggtaatgcatatgcatcatacagagaattataaggagctaatggaaggttgtttctgggttttgaccccccaaatagatgatatagagaagattttggagtgaattgtgtgcattttgtttttccatttgcagttttttttccttcttttttttttttgtaattgtcccatttctgttgtggttgggaattcgtttgacaaatgaaatgaatcttttgaggatggctttcattctcgttgtatggtcagcaaccattttctgatctacaacaacaagctctgcatgatccacttggcatgagctcccgtagaagcacgggtcttcacatgct

SEQ ID NO: 195336 - DNA, 556 bp, Gossypium hirsutum
accaggcttgcacttgcagatccttctgattgctgcagcaaacctaggaatcagcttacgtgggaggtcattctagtgcatcggggtaactgtagtttcactgtgaaggcaaatgttgctgaagaagctggtgcttctgcgatcctcataataaacaaccaaacagaactcttcaagatggtttgtgaatcagatgctgatgtaaatataaaaatacctgctgtcatgcttcctcaggacgctggttccaatttggaaaattatataaataataacaccagggtttctgttgcgctttactccccaaagcgtccggcggttgatattgctgaagtttttctgtggctaatggctgttggtaccattttgcttgcttcttattggtctgcatggactgctaaagaagttgctattgagcaagacaagctactaaaggatgcatcagaagaatttctacaagtgggaagtgcaggttcaagtggttttgttgacataaatacaatgtcagcagttctctttggtgtgtttgcttcatgtttctaggtcatgctttaca

SEQ ID NO: 195337 - DNA, 470 bp, Gossypium hirsutum
tgcttgcttcatcatctcttcatttcccttgggttttctgagtttggatcaaagtggagaaaaccagtttgagttcattcgctatcagatcggcaaagccccttagactttctgtttctacgacacgcaactcttctctagcgggtgtgcaacgtacctccaagatgtggtattcaacaggttcgcttgatgacttcgaaactgaggaagcgaaaagcgaagagatagatgagattcttggcgacaagcctaacaggcgtgagccactgctccaaggtgtcagacccggaaagggttggaatttccgtggtgtacacaaggcaattatttgtggaaaagttgggcaagcccccgtgcagaagatattgcgaaatgggagaactgtaactatatttactgttggaacaggtggtatgtttgacctgagagttgtacgggaccagaacacaccaaaacctgtccaatggcat

SEQ ID NO: 195338 - DNA, 1016 bp, Gossypium hirsutum
gcggagtataaataacaaagaacaacaaaactgccgcatcgacggtagacggaagctactcccatctacgagcaccgcgaccttccaaactccaccaccaaaatgcaaaatcaaaccgaaccaccgccggaaactaactcggacaaagacgatcaagcgattgaggttgatttatcatccaccaaccgctctcgatctcaccagcttccagctccacgatctcgactcggtggaattgccgtcaagccttaccgagttggaccttactgcgaatcgcttgtcgaaattggaccctcggattgcgaatctcattaacctcagaaagctctcttttcagcagaacctcatcgacgatgctgctatcgagtcgatctctagctgggactcattatctggtcttgaggagttagtactcagggataataaattgatgaaagtaccagatgtcagcttattcaagaagctcttggtttttgatgtttctttcaacgaaatcacttctcttcatggaatgtcgaaggtctccaccacactgaaggaactctatgtatccaaaaatgaagttactaagatggaggagattgaccacttgcatgagttgcaaattcttgaacttggttcgaacagattacgggtaatggaaaatttgcaaaatttcacaaaattagaagagctgtggctgggaaggaatcgaattaaagctataaacctttgtgggctcaaatacatcaagaagattagcttgcaaagtaatcgtttaacttctatgataggattggaggaatgtgttgctctagaagagttatatttgagccacaatggcatttcaaaaatggaaggtctatcaacattggttaacctccgagtattagatgtttcatcaaataagctaacatcagtaaatggcgtacaaaacttgacaaggttggaggacttatggctcaatgacaaccaaatagaatcacttgaaagtgtagctgaggcggtttctggttcaagagaaaagctcaccactg

SEQ ID NO: 195339 - DNA, 377 bp, Gossypium hirsutum
  unsure (1)..(377): unsure at all n locations
aattaacccnaattatttatcttacctcctttttttctgcaaactacaacgaaccccgcccttattttgatgttgatgctctcttcattaatgtaactacacttaatccgaagttcattgatatcataaaatcacctgaggtgaacaagaatgcctaaggttttcggttggaagctttcacagtacttgcagtagctgttccttgccaatggaaggtttaggatctgttccataataagacttttataaagaaaattaaatactaattttcaaggaataattcacgcttttattcacaccagtaccttaaactggattttctgtactattaacaattttagtgtttccccagaaatgcatttttcatttcaatttac

SEQ ID NO: 195340 - DNA, 670 bp, Gossypium hirsutum
gaatgctgaggtatcaatgggaagatgcggttagattttggaattcaaagaaaggagaggaccgtgagcgagttagaacagaaaataggcaaaaacaaaaattcacgcacacggcagggtcgagaagttttgcttctgtagctgaggccgaggaagtcaaatccggacaaaaagttccctgccttcagctttttgagattacgcataggaagaaagatggatctcctatgacatccgaagctggagaaattatggagaaactaaaggagaagaaggcggaatatgaagcgattgcttcagagtgatagttctgttaatcttgagaacattgataacagaattatcactgaagttttgggtcctgaaaggtacggtcgggttcgatttcaaggatctggtgttaccccgacccaatattttggatccggctcccagcaatacatgccttctggaagtcaagctcaagctgaagttcagaggttaagagatcagatagctcagatgcaagcgaacacggttgagcaaattgtcgaggttcaatgaaaatatgaagaactccagcaacaacttagagcggaggcagcagagagggaagcagagcagagcaaaaagtacgatgacctccagctacagcttcagtagatgatgcatatgtttcagcagtcgcaaa

SEQ ID NO: 195341 - DNA, 476 bp, Gossypium hirsutum
cttattttctctctacatacattaattcagtttgttaatggcttctcgtcttcccggttttggccccaccggaatccacgcttccgccgtttctgatcatgaccgccgcagaagtacttcgtcgtcttcctatgctaactggtgggctcccctttttcgagtttcatctgagccggattacataggatccgataagaaatcggaggtcacggagagaagagagggcggatcggaagcggatccgcggctaaatatggcgagatcgaagttttaccccggttgctttacggagaagaaggcgaagcagctccgattgatgattaccaactcgtcgtcgtttcatgacgttatgtaccactcggcgatagcttctcgactcgcctctgacttcaaaggtcgatccgatctatgagtgtcaggcaagtaactgaagtcagacctattaaaaccaagtttccgttaatttttttttcttc

SEQ ID NO: 195342 - DNA, 434 bp, Gossypium hirsutum
acgcccacgcgtccgcatcaatttaccgtaacttcctcatattgctactaaacttgcgatcagtccgctaaccgctgcaacgcctacccttaaccacactactctagaagaagctgaaggcgtaggctcttcagcgtcatcgtcgtcgtcggaatcgggctcaggaggcgatttcgacctggacttcgccttcgccttcccgggagattcagccggcgattctgatggtgaaggggactccgcttcatcttcatcctcctcttcctccgatggaccaggggaactgggggacttcttgggagcagcggccgggggcttggaagaacccgggggtggaggaagagcaaggatggcatcgccgaagccaggagctacaatgggtgtgctaatgtgaagcacagataagttgaaaggctgggagatgacagacccca

SEQ ID NO: 195343 - DNA, 444 bp, Gossypium hirsutum
tcccacgcgtccgtaaatacccaagtatctataaatttaaatatataaattaataagcaccaatctatggctcaactagggtcgtctctgtcagcagaaaccgagacactgagcaatgtcctaagcctggtggaggccttcagagcatttgattcagacaacgatggcgcaatcaatgctgcagagctagggggaatcctgagttcgctggggtacaacgctagcgagcaagacgtgagggccatgatgcgagaaggggacaccaacaaggacggattgctgagcatggaagagttcctagagatgaacaccaaggacatggagcttggggagcttgccaatttcctcaggaccgctttccaagcttttgaagtcgaaggggatgatgctttgactgctgccgacttgtatgaggttatggggaaccttggcatcgatcagctt

SEQ ID NO: 195344 - DNA, 524 bp, Gossypium hirsutum
tgacaactttatactcattagaggctacaatttccaaaagagagttagagttagcagggaaacatggaaagccttcgtggactaaacggctcttacttgatgaaaacttcttgtgctcaaaaatccgggaagaagcagatgagttgtgccgaatgctggaggagaaaaaggacagttcatgcattgcctcaaaaatggcagatgtgatctaccatgctatggttttgctaaggcgcaaagatgtaaagatagaaaatgttctagaagttcttcggcgaagattctctcaatcgggtatagaggagaagcaaagccgtgcatcaaccgagagttaaatgtaagctgtacttttgctaaggtctagatttgcagcttttatcccatgcttaggttgttttcaataaattcgaaataacctatatctgtcataattaccagttttttgcttttattttcgaagtacatgtattttgattttacttgaccttttcttgtataacaataagatgcattttgtttcttaa

SEQ ID NO: 195345 - DNA, 729 bp, Gossypium hirsutum
  unsure (1)..(729): unsure at all n locations
caataaccgagacatattatggaggagaaaattgggggacgaaactgatctgcaacaagcccttgagcttcaaaatagaaggttgatgagtctgcaactccttgatgttaagaaacactcaccaaccctttatggccagtctcttgtacttccacaagagaatagttctagccctgtgccggctacatcggtcactgctgccgagaaacaaacgagtacttggtaaagaaacagtcagttctgaagagaatggtagtgagaaggagagccctcattgtgaagatggcaatctgccagaaagtttggagcataaccttcctgatagtccgtttgcgtctcctgggaaagcctctaaagagtacctgtctttcaacaatgcggtcacggagaaggatggtaccatctcggctaacaataattggattccttcgaccttacttcctgcaaataatgcattagacatgtcatccttcaactccttcaactgccaaatccccaggttctcatccggacaagggacaatctgtatgtacacagggactggcgggccgacttgccccgttggaatatagcttcggacatcatcatcaaatatttatattttacttactagttactaccatanaaatgctccctaaaaaagcatgttcctatgtgnatatggaataacttggtttcagtatagtggnaacagtaanagcccccctgagtaannccccaggtctctgn

SEQ ID NO: 195346 - DNA, 541 bp, Gossypium hirsutum
aatcatgtctactacagcacttgattctgttggccagcccagtgaatgtttgctgctgaagaatatgtttgatcctgcaactgagacggaaccagattttgatttggatattaaagaggatgtcgaagaagaatgcagcaaatatggcagggtgaagcatatatatgtagacaagaacagcgccggatgcgtctatcggcgatttgactccgcagaagcggcaggtaaagctcaacgtgcaatgcacatgaggtggtttgcaggccgatcaatatcagccttatttatgcaaccccaggagtacgaagcgaggtttaaatgctgaagcagaagcaatattggatttgtttgttatgatatgatgtgtgttgatgggtgggtagggtgttacttttgaagacgcgttttattctgctgagtttagaattttattattataagcatagtacacaacgacctaattgtaagataaatgttatttgctaactcatttttttgttctgtaataacgatagaatttcggatgtctttatgattcaaa

SEQ ID NO: 195347 - DNA, 684 bp, Gossypium hirsutum
cagaggaggaaacaaatttgtcttttattatatatggtgaaggaggaaatgtgggcatatattaagttttaaggttttcaggaggaaaaacttttgcctctgaaactatggctccgttctctttacgtagccgtcttcaggcttctgcgctaagcaagaggcgtctcaaatccaaagccaagcatgggaggaaagggatgaagaacatggcggaaagcttcaaaagattgaaatctgaaatggaagaaataagcgaggaacaaaagaatatcagggaagggcaaaggcaagttaaagaaaaattcggaatcatcgaatccgagtgcgaggaattgaagagggaaactaggctcataatccagcaaagtgcgagaactcaggttaaacttgctcttatgttccgcatactgaaagcaagggaagccggcgagttgaataccgctgccactctcactgaaatgctccgtgaaatagtaggaagagagagggaggaaagcaaagctgacatctgaatgactatgataagcttcctcggtgcagctgctccaaatgttaagaactagaagcgtgtgacaattaagcgcgtgttatctttcagcattgccgttttgttattaagtactgctaatctacgtcgtttcatgtttggtatgttaaacttagaacttatcaaaccttttttct

SEQ ID NO: 195348 - DNA, 392 bp, Gossypium hirsutum
gggaaactaggctcataatccagcaaagtgcgagaactcaggttaaacttgctcttatgtgccgcatactgaaagcaagggaagccggcgagttgaataccgctgccactctcactgaaatgctccgtgaaatagtaggaagagagagggaggaaggcaaagctgacatctgaatgactatgataagcttctcggtgcagcttgttccaaatgttaagaaataaaagtgtgtgacaattaagcgcgtgttattaagtactgctgcaacttatatttcctatctacttcgtttcatgtttggtatgttaaactttgaacttatcaaaccttttttctgttgtgtgtctaaggttgaataaacaaaatctggtgacttgaaaacaacagaagtt

SEQ ID NO: 195349 - DNA, 924 bp, Gossypium hirsutum
tcaaaacacatcactgcccttgcactcggctcataccaatcaatcaaaatccccaaaaaaatattaaaaaaaatgagctctcagattttcagatctgcttctagagccgccaggtctctcctttcagcatccaaggcttctcgcttttactctgaagggcgagctgtagctgccgctgcagcagtttcacttggcggtaaagtgcctcttttggcttcagcttatggaagtactgcttctgccaatgcatctagagcatggctttcaggagtttttgctcttccagtggcagcttacatgcttcaggagcaggaggttcatgctgcagagatggagcgcaccttcattgctatcaagcctgatggagtgcaaagagggctgatttcagagatcatctctcgttttgagcgcaaagggttcaagcttgtggctatcaagttggtggttccttcaaaggagtttgcccagaaacattatgatgacttgaaggaaagaccctttttcaatggcctgtgcgaattcctcagctctggtcctgttcttgccatggtctgggaaggagagggggtgatcaaatacggccggaaactcatcggagcaacagatcctcaaaaatcagagcctggaaccatcagaggtgatctagccgtggttgtcggaaggaatataattcatgggagtgatggtcctgagactgccaagcatgaaatcaacttgtggttcaagccacaagagttggttaactatacaagcaacgctgagaaatgggtctatggaaacaactgatgagggcatcttttttcaagttaatcagtagtagttcaggaaaatttagtcccacatcaggtgtgggttagaggcataattttttagaataaatgcgttttatggaggtgaggagcattgagccaaaagctttgattt

SEQ ID NO: 195350 - DNA, 367 bp, Gossypium hirsutum
cttccgttaattttttttttgggactcctgtaattgaaagttgaaaaagccacgatgcatccggtgggtgcggttttggcggcgaggatgctatttaacacggcggcctcggtcagtgaatccgtcggagaagggattccggtcggatctccatggtggtttatctacgccgggattccttgttttttagtacttttcgcggggatgatgtcgggtctcaccctcggactgatgtcgcttggtctcggcgaactcgaaattcttcaacggagcggcactttcaccgagaaaaaacaagcagctgctattttgccggttgttcaaaaacagcatcagcttttggtgactttgctatcttgcaatgctg

SEQ ID NO: 195351 - DNA, 540 bp, Gossypium hirsutum
cacggcaattagcaggcgatttacattcgagtaacccaaaatttcgcagctggatccgcctccgcctccgaacagttgtcaccggaatcggaaattcagataagtgaagatgaatggagaagtccccaacataaagaaatgggttgttttctatcctgtttatattaattcgaagaaaacagtagctgagggaaggcgaatcagtttggctaaagcctgtgaaaatcccacttgtgttgaaattgctgattgctgcaaccatctcaaagtccctaatgccattgagattgataaggcgtaccctcgtgatttcatgcaaagagggagagtgagggtccagttgaaaaaggaagatgggactttatggaatccagccatttcttcaaggaagcagctgatgctacaagttgcagagttggcacctagacacccgggaaggactatgaagcaggaagcttcatcaacatcaaaagctgctgacagatcttacaagcacacgaagggcggaagaaaaaagcgatagttgcgcaaccttcctaa

SEQ ID NO: 195352 - DNA, 862 bp, Gossypium hirsutum
aaaacctttagagttaatcaaacgtttgtgtattatattcaattgcaaaaagttccccgcactatgtagcaaatgaagttccaacctgacattgtagttgataaacctaaacaagcaaccctgccgcctccgccgccacttccacgattctgggcgaggaagactagtgcagacagtgtaacaaaccgagagattgctaagttctggaggcagaagcatgccgaggaagaggatcacctcctagctgccatcaaagctgcagcacgcaaaagggcctgcaatctttcggaggaagactacaaatgtttcatggagtcactaagtgatgaaaattatgaaacttaacagaatatcacaaccccaacaaatcatagcaatggcaatgaaattcgtgtgggtataaaggactggtggacaaagagcaagtatgcatacctaaaccaaccagccattgagtctacagacaaaccaaggcgacgagcatccacttatataccaaactttctcaattataaacctgctcctttatatcctacatcacttggtgtcttttagaccactgagatcgaggagctttttcaacttccaattgattgcattacctccatatcagggcaatatattgatacgcatttactttaaagtgtcattgaaacctctgttcattcatttcagtttggttgcaaataagtgtggttagtatcactctaatctgtcatgaaaaagtttcattgtagatctaacagtttggctatccatatcatattatgaatttgatcatgtttatgttaatttatttatatgtagaatatgatttgctaataaggcatatttgtgtatattattatcagatctaaatgtc

SEQ ID NO: 195353 - DNA, 675 bp, Gossypium hirsutum
ccaacccgtccgcccacgcttccgcgaatgtgatgtttagatacggttatttgatccgcggttaaggattgtgaatttaactgtaaaacttgatatttacatgctactgcatggtggtttgactgttcagaaggtgcgcgagctgctctgaatcatgcagggactatgcttggattctacccagttagggtgctaccttcgaaaacagctattgcaccagttaatccaacatttttgccaaggaatgaggatgagcgtcaaatgtgtgcgagaactatctactgtacaaacattgacaagaaggttactcaagctgatgttaaactctttttcgaaacagtctgtggggaggtttatcgcctgaggttgcttggggactatcagcattcaactcgcattgcttttgtcgagtttgcattggctgaaagtgcgattgctgctctcaactgtagtggtgtggttctgggatcattgcctataagggtcagcccatcaaagaccccagttcggccacgagctcctcgccttccctcgtactaaatcattcaccccgaaccgattttagttccaagtttatatatatatttatttaaatacatacacagccatgtaaagatgtttccccatgttgctcttgctgatctacatatatatcgtccactgctgctatgtttc

SEQ ID NO: 195354 - DNA, 476 bp, Gossypium hirsutum
caacatctcgaggaatggtcatgctaatgaaaatggtgctggtaggcggaagaaaaagggcaatcaaggtaaaaggagattgaacaatttgacaagtatggcccagagagaagaggttgtccgtaggactgtttatgtctctgatattgaccaacaggtcaccgaagagcagcttgcaggtttatttgtgagctgcgggcaggtggttgattgccgcatatgtggtgatcctaattccgtgcttcgttttgcctttgttgagttcactgacgaagaaggtgcgcgagctgctctgaatcttgcagggactatgcttggattctacccagtttgggggctaccttcgaaaacagctattgcaccagttaacccaacatttttgccgaggaacgaagatgagcgccagatgtgtgcaagaactatctactgtacaaacattgacaagaaggttactcaagctgatgtaagctcttttt

SEQ ID NO: 195355 - DNA, 594 bp, Gossypium hirsutum
catcgacagttttagttataattcaccgaatcgtacggtgagagagagaataataaggcgttttgtccggtgagatggcatcgttgataacgaatccagtgacgaacacaaattctgatcgtagcaaaaggaaaaagaagaagaattctatggtgaaacagaatcttcaacggagccaaaaggaagatcatgccagacgcgggtcagaggcgcagcagcaaatctattcctcaaaacttcttcaagctttgagtcaggtcagtctcggtactccctctccttcggctccacgcggtggtcgagctgtccgtgaagccgctgatagagtgttggcggttgctgctaaagggagaaccaggtggagccgggccattttgacgagccggcttaaactgaaatttagaaagcagaagagatcacagagaggatccgctgctgccgttgctgccgcaacaaggactagccggtcgaagaaaccgagagttagcgttttgaaattgaaagccgaaagtgtaccgaatgttcacagaaaagtataggtcctaggcagattggttcccggttgccggaagcaaccgttaccggtaattcttt

SEQ ID NO: 195356 - DNA, 694 bp, Gossypium hirsutum
attttctgcaaattgggtgttgaaaagtttgtttagcagagtccggttttagcttgaaagcttacttccttgttgcactgggtgtgtttgatataagttgcatggtgttcattaaggatgttgaagcagctggggagtgtggaaagactccatttaggtctgctgcggtaagtttaagcccatgcttaggagctgctgggaacgcaaaggcaaaagttccgcctgcttgctgctccaaggttggtgccttacttaaggcttctccgaggtgcctttgtgctattttattatcaccattggcaaagcaggctggaatcaaacctgggattgccattggcattcccaaaagatgtaacattaggaacaggcaagctggaaaaaaatggcgaagctacacagtcccatgagacaaactaataccttatacaagaagagaagagagagctaataaataaacaagtgcagcattgcatttgcatggtcattgctgattcatccttccaaagcaattgtttatgtcgtttttaatgtaatcttcagcagctaagttacattatcatcttaattgagcaaatgctatttttatgctcactttccattatgttagtattatttcaaaaataatttctctttctctttcactaccgatttgtatttgatatcttgataatatataaaacttacttttatattt

SEQ ID NO: 195357 - DNA, 570 bp, Gossypium hirsutum
  unsure (1)..(570): unsure at all n locations
tcctatgcatttttcttggagaagggtcaaattgctcaattagttgatccttacctagntgaagaaaaagcaaacccagcatttccatcanccttgaaccagtttgggaaattgaccctgatacctcggaccattaatggattcanntatgggttggtgaacaaatgttgaagccagagacagtatnnggtagtggatcccaagctaatagttctgaaccaatcnncagggttcctgaagaaaaanaaccaaactcatancccctctagagatgnaggcagaacatatgcagaattgcgaatgccgttcgtgtgctgtcaactttaggtttcagtatcgaggcagatttgatcttggagacagttgagttgagcagcacagtgaaaattgacatacatgacatgctaggctcagagtttcatgttttggttgcggaaagggaagctgagcggagaagcttggtgggaaagcggaaaagatgatgtgatattcaactggcagcagttatctttcaagggaacatcgcttatttggttccatgccaggaaaatggtgaacctagtgcaaaat

SEQ ID NO: 195358 - DNA, 285 bp, Gossypium hirsutum
  unsure (1)..(285): unsure at all n locations
gggggaagaggaaaatcctttaatgccggttcaaggtccggcttggacgtgtctaatatgttggcggggtggcatacntttaacacattgccgtttgctgggaaaactgcggtttatatcgatgatagagcgaccgtgctgcctaggaagttggagtggtcgggattcgttttgaattctaggttgcttttggaaagacggagataagccggaatggatgaaagatattgatacattggatggggatatcgagagtccattggatttggttaaagacccgtcggt

SEQ ID NO: 195359 - DNA, 734 bp, Gossypium hirsutum
gatgatgagattctccaggaaccatggctatgaaatcgcctctggtgaagggaggctttgatttacaacagacttttacatagaaagcctgcaaaaaactgagatggatagaggccatctggaaaagagcccaagtccccaggaaaaataaccaagtcatagagccaacccgcatggctacttagttgaacggaaaaactgtgctgaatgtttttgctacccgtgggagatgaccatacgagattgatatttctactgtctttaacgccagaagtgtagttgttcagtggctcgacccccgattagacaaggatgtcgcatctccacaagcccgccacgagcagctcaatggtttgggtgctgattgaattgcagtgctggagattcaaccccaccagggtcttgcccaatttttttaggaaggtcatgcttttgtttgatactcctgaacaacctgaaaacgaaaggacttgcaagttgagttgctctgcgtgagacaaggctgcaataccgacatcggtgattgcacaccttgacacatccaagtcgctgaggaaaacacaattttctgcagctgctgccaaacttgcatcagtaatcctcctgcaaccgttgagattaagcaactcgagggttgcgccatgtagcttggtcaagtgcaaaacgacctcatcggtccagtttaagcagccgctcagacccactttcaccggacgcgtgggcggacgagtagg

SEQ ID NO: 195360 - DNA, 316 bp, Gossypium hirsutum
tttggaatttcacagatgctagctggtgatcagggtggaaagtagatcattgggatccccgcctgatcaaatgacttttatcttcacttctgcttacttgatggttaaccacttgaatgtcaaataatgctcaagaacctattatttgcctatgctttagggaataagaggcatttatttttagtatataagtagtaaaaacctgtcatccttctttaggtcttgaaggatgcctctaggctttatgctgcaagttgggtaagagatattggtcatgatcttagaccaaacgattataagaaggatgatgggactg

SEQ ID NO: 195361 - DNA, 698 bp, Gossypium hirsutum
cccacgcgtccgcccacgcgtccgcccacgcgtccgcaattgctagggtttcggcgccgcagctctgtggcttttccagtcccctttgccctggtcgctgacttgcaggctaccacggcaccacgcgcgccttcatcatccgtcgtagctctgaccggatccccaaggatccgtttggccttggacggagaggcaactgtcgattaagtcggcgtcgatcgacaggtaagagatcctcccccttctttatactcgtatcacagataaagaaaaataaataggagataaataaaaaagaaaaacgatgaatgaacaaccttgaaatctttgctttctctatttgattgcttgatattcggttgttttttggtgcgtatctctgtgtttatgttgcgttcgtaaatgtgcgtatccaaatacaatcgatcaattcctggctttagtagccgaaactaaaagggaatatgaataatcaaaatacaatctttttgctttttgctgctggcgtttaaccatttcttcgcaggtacaggggtacggggtcaactgtggggatatgtggcactagacgtggcgtgtacggaggcgttgaaggcggtcgaactgcgcgaaggctggggctcgcctgcggttgcggcgcaaatgtgaggaggaaaccctagggttacttttctaaaaacattgggcctatcgggctt

SEQ ID NO: 195362 - DNA, 569 bp, Gossypium hirsutum
atggcattttcccaacttatcgtgatagtccattgccagcagcatttaatcgtgttttacagtttggtgatgctagtggcatacaatcacctgtctcttttggtggtttcgggagcttgactaggcacctcggaagattatcaaatgggatttacgaagcaattgatggggattttctcgattcatacagtttgtccctgctgaatccttacatgcctaacttgagtgcttcatggttgtttcaaagagcaatgtctgcaaagaaacagtctaatgttccaccggattttattaacgagcttcttgacataaacttcaagagtatggagaggcttggagaccctgtgctaagaccgtttcttcaagatgtcatacagtttggacctcttgccaagacattaagcctcgtgatgctaactaagcctcaaattcttccatcgatattcaagcaagttgacatccctgttctcatcgattggtctcgacattttttcatgctcggatattatacgtttctctcgacctacatggatcctgttataaggtcatggttaaatggtttgccatcg

SEQ ID NO: 195363 - DNA, 556 bp, Gossypium hirsutum
cggacgcgtgggcggacgcgtgggcggcggttaaggggaggaggttcttggatcttaacgatgacgacgacaccgaggatgaaaacaaaggcgatgatgatgaagtaacggtggcgaagagaaaaaagaagagggtattgaggaacggtgcggtgcggaaactgggcgatgattttgagcgagtggcgaagaatagcggcttggtgagcaaaagagaggaactttagcgatgggataggtagcgatgtgaagaagatggtggaggaggttaacaatgaaccggaaagtgaaggagataaggagaaaacagaggcgcagagtgggagtagtaggacttcaccaagataggcaaggcgtagccgctattaaggttaatttcaagtgtatgcaacgtattctgtcgccacctcaagagctcgatgacctatacaaatcgacttgtggaggagactcgaggaatattagccaacattccacaaaaagtatattgagatgtgggagtgtagcttcaaagagtaggcaacattgccgtagaaggccaaaacgagtacctatc

SEQ ID NO: 195364 - DNA, 400 bp, Gossypium hirsutum
attcaacatatgggacccttgaagtctatgaaatatgggtcactaattaaggcaatttacaaattcacaatggtgcagcaaaactacggcaaatgagaggctgcaattgaagatcattttcctggacaagttgagccataaactatatatagaataagttttactgtttcaagtttggtcagcattaacttaaacatgatccatatacaacataaatagctgataattttcttgatgctggaaagcattttctccagaggtatttatttgtagaatcatcagtgtttgttaattatagtagaacttttattattgtggcccaatctggtgattatatgtatggaaaaactgtgaacttgagaaagatcaagtggaaatcaaatgaaaccttcattcatgg

SEQ ID NO: 195365 - DNA, 424 bp, Gossypium hirsutum
tgcttttccattttttacttactggagtatttctggctacatgttgttggttcttgacaaatgcttaccttcgggaagaggctccaaatagtcatgttgttgaacaacgggttgaatggctgtatgcatttgatgtgcactgcaattctttcttcccgatgtttgtaatgctttacgtaatacattattttgtgtcaccgcttctggtagcccatggttttatacctgaacttctgtccaatctgctgttcatggtggcagcttcttaactttcactaccttacctttttaggttatgacgtacctccctttttggagagaaccacctttttcctctacccaattgggggcattattggtctatcccctatcttgattttaagtggcttcaatccttcaagatattttatgaatatgtatttta

SEQ ID NO: 195366 - DNA, 424 bp, Gossypium hirsutum
ggctacattgcagtgcacttgtcactttcccctgtagcctgcgagcaacctgctggggctctcttcctcttcgttatacttcagcggattcacatttacttgcatatcttaacaaatccctttgcagcatttttacacagattccatctgggtctttctcattcaatggagaatccacactcacccatttctatcccagaggcttctcctaagccttacaagaaaagctttgttactactctaatggaagccgctagtcttcgctctccttttaaggaagatacctattttacctcccatttgaaagcttcagagaagaaggcgttgcaagagctcaaggacaagctcatggcttcttatggcccggacggtgaatgcaccatgtgggggattcctttacttgctgaagacgaaaaagctgatg

SEQ ID NO: 195367 - DNA, 650 bp, Gossypium hirsutum
  unsure (1)..(650): unsure at all n locations
gggaactacagggaagaaaatggatgatgaatatcagaatttcttggctgagctaggtggtactgtccctgattcagctaacaagcaaaactcttcgtcagtcagttctggaagcaatcctccttgggctagcagcactggaggtgctggaagtgcacaccctggcttaggttccaatgctgttaagccccccaaagaatatgatgatactaatttgtacattggatacttgcctcccagtcttgatgatgatggtttgattagtttgttttcagcttatggtgatattgtgatggcaaaggtaatcaaggaccgggttactggactgagtaaagggtatggttttgtgaagtatgctagtgttgacatggcaaacaatgctattaagggaatgaatggtagtcttctagagggaagaaccattgctgtgagagttgctggcaagccaccacaacctgcagtgcctcctggtccacccacattgtcaatgcccagttaccctgtctctagtcagcctgttggtgcctatccatcacgacaatttacaactggaggtcctattcctaatgctgcttctgctagttatgcaggaaatccagttccatggggaccaccagttccttctnnctccncttatgccccttatgccc

SEQ ID NO: 195368 - DNA, 570 bp, Gossypium hirsutum
cccacgcgtccgcccacgcgtccgccctcgcgtccggccacgcgtccgctgagctctccctagaggaaaaaatccaatggagaattgaactcaggaatcccacctccgatccgataacgccgtaacctacgaatcaccctacccactctacgccatggccttatcttccacgcccgccgtcacccatctcaactaccaacgcatcgctctcggcagtttcatcgaggattacactaacagagtccacataatctctttcgaccctgaatcacttaccctcataacccacccatctttgtcgttcgaccacccttacccacccaccaaacttatgttccaaccccaccggaaatcccctttctcttcctcctccgacctcctcgcttcatccggtgactacctccgtctctgggaagttgggcactcttctatcgaacttatctccattctcgacaacagcaaaaccagcgagttttctgctcccttaacttccttcgattggaacgacgttgaacccaatagaatcggaacatccagcatcgacaccacctgcaccatttgggacatcga

SEQ ID NO: 195369 - DNA, 762 bp, Gossypium hirsutum
cccacgcgtacgcggacgcgtgggcaaaactttctggtggtgtggctgttttgaagatcgggggagctagtgaagctgaagttggtgagaagaaggatagagttacagatgcactgaatgcaacaaaagcagctgtagaagagggtattgtgccaggtggtggtgtcgctctgttgtatgcattgaaagagttggacaagctacctacagctaactttgaccagaagattggtgttcaaataatccagaatgctctaaagacacctgtgcacacaattgcttcaaatgcaggagttgagggagctgttattgttggtaagctgttggagcaggataaccctgatcttggctatgatgcagccaaaggtgaatatgtcgatatggtaaaggctggtattattgatccattgaaagtaattagaaccgctttggtcgatgctgcaagcgtgtcatcattgatgacaactaccgaagctgttgtagtcgaacttccaaaggatgagaaggatgttccggcaatgcctggcagtatgggtggcatggattattaaggttattccccctaacaatacactgattttaagtgctttcctctaatctatttccatttcctcaacatctgtgagaaaaagaatatccgagtctcgatgtctaagttggaaggtggttttggtgataaagggtcaacaggactctcttattgttgttgctagaaagaacgaactagtttgtattgggccattttatcttgaaataaatgga

SEQ ID NO: 195370 - DNA, 573 bp, Gossypium hirsutum
ccctcgcgtccgcccacgcgtccgcggacgcgtgggtttccattgaagcatttcctctataggtttttactttttaatcccttttcctcatttttgcaacaactttttttttccattgcacatataatttaagaggaaaatgactttcagtggaacaacagagaaatgcaaggcttgtgataagactgttcatgttattgatttattaacagctgacggcatttcttatcataagacttgcttcaaatgtagccattgccatggtgtgtctggtgatgggaaactattgctcaatggacggtgtcctgtattgcaagccacactttgagcaacttttcaaggaaactggcacttaccaaaataagaatgcaaaaccctcctccgaaaagtcgaatggaacgggaaaggctcctagcaaattcgcatcattcttctctggtacacaagacaaatgcggtgtctgtaagaaaactgcataccccttagagaaggtgactgtggaaggagaaaactaccataaatcatgctttaggtgttcacatggaggttgtgtgcttacaccatcaacatatg

SEQ ID NO: 195371 - DNA, 511 bp, Gossypium hirsutum
cattcccattcccatttgttttattagcaattcatttgtcaaacaaaaacaaatatcaatggccaagattgttttgcttctggtattctcattggtcctggttctatcaatcaactccgccgtaggtcacgacgcccccgcaccttcccccgaagagacaaaccaggaaacttcagagccggcagacgccaccgggcagaatgaagagggtcttgacgagattgtggacgcaatgtcaccggaaatggcaccagcaagttcacccacaatggcatttgaagagtcttttggacccggaccagctatgaccattgaagaaggtgcggcggagggagaggcagaggcggagggagcgccagaaagttagatacgcagtaccagtatatttaaataaggatctcgatccatatgttcgttatcttactattttggtatttcatccctcataaaagaaagtgaaccataaatgtaaagttcacgaccataaataatatatatttatttatttacc

SEQ ID NO: 195372 - DNA, 443 bp, Gossypium hirsutum
  unsure (1)..(443): unsure at all n locations
accgcggacgcgtgggcggacgcgtgggtgacaaaattacaagaaacaacggtatcacaacaaaggctcatcagctgatgactccgatgagctttcttatttcctatttgcagtagattgtagaggccacttaaaattacctgccacatactttgggaactgtactatagcacgcaccgtagcagttaagagaagtgcgctgatgggagaaaatggaattgtggtggctggcaaggccattggaagagaagttatggaaacgtacaaaggaccactgaaaggggcagaaagggaaaagctcaaaagtcgacaccctcctatcatggtttcaccatcaccaaaattcgaattatataaggtagattttgggtggggaaggcctagaaagacggaggtcgccaacattgggtcgntgggatctctttctctgttttctattgcag

SEQ ID NO: 195373 - DNA, 434 bp, Gossypium hirsutum
  unsure (1)..(434): unsure at all n locations
cccacgcgtccgggagactcttcagtggtggttaacgatgagaaccgcgatgcggcgcggtgggctaaagccaaagccatggatgctatttctgaagggaagttagaggaagctatagagaatctgacacaggcgattttgctgaatccaacatcggcaatcatgtatggaacccgagctagtgtttatatcaagatgaaaaagccaaatgctgccattcgagatgccaatgcggctttggagattaacccagattctgctaagggctacaagtctcggggcattgcacgagcaatgcttggtcaatgggaagatgccgccaaggatctacgcttggcatcgaagttggatcacgatgaggaaataaacagcgtccttaagaaggttgaacctaatgcacaccgcattgaggagcaccgtangaagtatgatag

SEQ ID NO: 195374 - DNA, 359 bp, Gossypium hirsutum
tgcaaatttttgcactgtctgggcatgataatactgtttgctcagtttttactcgaccaacggatccgcaaattgttactggttctcatgatacaaccataaaattctgggaccttagatacggaaaaacgatgtcaactctaacacaccataagaagtccgtgcgagcaatggcaccacatcctaaagagcattcttttgcatctgcatcagctgacaacattaagaaattcagtcttccaaagggagaattcttgcacaatatgctctctcagcagaagactataattaacaccatggccgtcaatgaggatggtgtaatggctaccggaggggacaacgggagttttgtggttttg

SEQ ID NO: 195375 - DNA, 436 bp, Gossypium hirsutum
ccatctctccctccgtgagttatttttttggtggatctctttcaattgtgcagattttcggttcgttctttttgtttttttttcttttttgggttcgtacgattcttggttttttttttgttggtacaaacgattcttggtagttgatattagctaaggtctccaggttttcgattagtcggttagattctaggattgggatttcttgaacaacgatgtgattctggagagattagctttagatcttaaaatatgtagcccatgttttattgatttctttccttcgaattttgggctgttaaatacattgaatgggtattagcatcacaaaggaaacaaaacgcctaaaaacaatgctattgcattggtactgctttgatgaaatctggccttcattactagcttaacttgaacttgaattttggccaaatatccc

SEQ ID NO: 195376 - DNA, 703 bp, Gossypium hirsutum
ttcagcgtgtcgtcgaactcttcgtttatgtcttctgcgatcaccggagacggcagcgtttcgaacgggaagcaaggatcatctctatttttgacaccggcggcggccgtttccgcgggaaaaccaccactatcctctgctccattcaagaagaggtgccgcgaacatgagcactccgagaacgtctccggcaacggcaagtgtcactgctcaaagcgaaggaaaaacagggtgaaaaaagtaatcagagttccagccatcagttctaagatcgccgacattccggcagacgagtattcatggaggaagtacggtcaaaaaccgatcaagggctcaccatacccacggggatattacaagtgtagtacggtcagagggtgtcccgctaggaaacacgtggagcgagcgaccgatgatccgtcgatgttgattgtaacatacgaaggggagcaccggcacggggaaggcgcggcgcaggagaacatggctccaggtgtggggctggtattcaagtcaacttgataaacaaataaacttaaaagagttttgtaatattttagtggttgagggggctgaatgtaaatttgttttttccttagatatattataaattttcctaatgaaaaaagtaaagcttaattaaattaattgttgattggtgatgacgatgaaaatagcaataataatatcttaataattctac

SEQ ID NO: 195377 - DNA, 1799 bp, Gossypium hirsutum
cggagatgataccctcgaaacctctctagccaatgatggaattggcaatgcaaatatgattgaggctgcaactacgtttaaagggagttgggaattgttccttgagaatggcggtgtttccgccatgcatttgatattgcttcctaagatcaatcaggctttgatgtttgacgccacagtgtggaagatctcgaagataaaattaccgggaccgccatgccgacacgtcgagggaaccaatgaagaagattgctttgctcattcggttctcatggacgttgatacaggaaagcttaggccacttaggttgaactatgacacttggtgctcatcgggtgcccttgatatcaatggccgattggtaagcactggcgggtataacaatggctccgacaccgtgagaatcctcgacttatgcgatacttgtggctgggaagaatatcctggtgcacttggaaatggaagatggtacgcgacacaagtaaccttaggcgatggtagattcatggtgttcggcggtcgagatttcccaacatacgaatttgttcctccacaaggccagaaaaacacccttaaggatgtggtcgattttaatttcttggtggaaacacacgatcccgtggaaaataatttgtaccctttcgtttacctttcgactgatggaaatgtcttcatcttcgctaacaatcgttcggttcttttgaaccctaacacccaaacgatcgtccacgagttcccagtgctccccaatggtgctcgtaattatcctgcgtcaggaagtgcttgcctccttccgatcatgctcaagcctaatgaagatcgtagagtgatccccgccgaggttttgatatgcggtggtgcatcacatgatgcgtacgccaaggccgatttgcagcgccctaaggtgtttttgccagggaacaccgactgtgctcgccttgatatcaccaaaaggaacggcaaatggaagatcataaacatgccgtcagctcgtctgttgggagacatggtcgttttaccaacgggagatgtgcttattgttaacggtgccaagaccggttcagcaggttgggatgatgctagggagccgaatttgaaccctgttttgtacaaattccatactgatggaactggttccaagttcaccgtgcttaacccatccaacatccctcgcatgtaccactccatcatttgcacatcctccctgatgcaaaaatcctcattgctggaagcaacacgaaccctggttacctcgatgatgcattgtttcccaccgaagttcgggtcgagaaattctcaccacattacttggacccgaacttggccatgttccgacaagagatcattgtcgagaagtccaataaccaagtgaagtacggccagaaattcacagtacagatccgtggaaatggcgaaatcgaccaacaaaagcttcaagtgacgatttactcaccgccgtttgtgacccacgggatctccatgaatcagagattgattcaattgggaattgtggaatttaacaaaaatgttgccctcaatacaaacaacacttgttcttcaagctcccatgaatggcaacattgcgccacctggttattacatgctcttcgtaaactacaatggggtgccttgccgtcgatcgatgtgggttcaatttttgccatagatatttcactggaagcattgaatcgcaaagtcgttatatgaaattattatattctcttataaagaaaaattaatgaatcactttgttcacgttttgttgcacacattattcttttaaagatcatatacaatac

SEQ ID NO: 195378 - DNA, 471 bp, Gossypium hirsutum
atacggtcagaaatttacaacgcagatccgtggaaacgtcgaaattgaccaacaaaagctggaagtgacgatttactcgccggcatttgtgacccacggggttgctatgaatcagagattgattcaattgggaagtgtggaatttaacaaatatgtggccctatatacaaacaacattgttcttcaagctcccgttaatagcaacattgcaccacctggttattacatgctctttgtgaactacaatggagtaccttgccgtcgatcaatgtgggttcgaattttaccttagatctttcacaacaagcattgaattgtcaaagccactatatgtaatacgaatcattggtcacgttttggttcacaagttgctatttgaagatcttatataaaatgtggataattagatttattttaatttctctttataaattcttaagtttataatattttataacaaatatttggttt

SEQ ID NO: 195379 - DNA, 505 bp, Gossypium hirsutum
gctatagctcagttaaacataagatgtgtcctataagaggggaaaatgtacaaacacaggctcctgctcgaagtacgcctgataaatcacacaagcctgaagatggccttagtaaagacattgaaattaatttttttgagaacaaggataccaccacttcttttcaagatgaggcgtttaacacctttgttgctgaatttgatagtaataagatcagttctggaattattaataaaaatactggaaaagaaaaagcattggaggctgaaatagtgaggctgaaagaacagctaaaacaatccaacttggagaaggctgagatgacttccaaatttgaaaagttatctgcaatttgtcggtttcagcggcaggaaatacaggagctcaagcaaactctagctgctagaactccatctcctaataaaagtacttcaagatatcataactcaccaggaagtctgggagagaaggttgaaggaacatttttggaatttgcacaagaaaa

SEQ ID NO: 195380 - DNA, 515 bp, Gossypium hirsutum
gttatatgcctcccccgatgctctccctctctcgtgactccaagctccattacatgcgcgatattattcttcgttactctcctgaaggcgaacgtactcgcgttcaaaagcagcgagaatacaggcaaaagattatatcacactatcagcctctacaaagggaactgtatgccatgcatgcctcaaacttctttgcgccctcatttctcaaagcaattaatgagaataaaggggaaagttttagaagtataatggctgaacctactcaaggagtttttacatttgaaatgcttcagccccatttctgtgaattgttgttatctgaggtagaaaacttcgaaaaatgggtccacgagacaaaattcagaatcatgcgaccgaacacaatgaacaaatttggtgctgttttagatgactttggtctggaaaccatgcttggcaagttgatggaggactttatccgacctatatccaaagttttcttttctgatgtgggtggatctactctggattct

SEQ ID NO: 195381 - DNA, 1014 bp, Gossypium hirsutum
gaagaggattaaacggccttatcagtcaaagacctttaaagtggagatcagctttgctgcaaagattcccatgcaagccattcaaaatgctctgcgtggacaggaatcagaaaactcacaagaggccctaagggtgttggatatcattttacggcagcatgctgcaaaacagggatgtctactcgttcgccagtcattctttcaaaataatcctgataattttacagacattggaggtggtgtcctgggctgcaggggcttccattctagcttcagagcctctcaagggggcctttccctgaatattgatgtctcaactaccatgataattcgtcctggtccggttgtggactttttgcttgccaatcagaatgccagagatccgtactccctggactggaccaaggctaaacgaaaccttaagaacctgaggataaaggtcagtccatccaatcaggagtacaagatcactggattgagcgagcagttgtgcaaagatcagttgttttcattgaagcagaaaagcatgaagaatgataatggtgaagctgagaatctagagattactgtttatgattattttgtcaaccatcgcaacatacagttgcgctattctgcagacctgccatgcattaatgtcggaaagccaaaacggccgacatatattcctttggagctctgttccctggtgtctttgcaacgttacaccaaagcgttaaccactttccagagagcttctttggttgaaaaatcaagacagaagcctcaggaaagaatgacagtcttatccagtgctttacagaggagcaactatggtgctgagccaatgctgcgttcttgtggtatttctatcagcactaatttcacccaagtcgaaggtcgtgttctgccagcgccaaggttaaaagtggggaatggtgaagatttctttcctcggaacgggagatggaattttaataacaagaaattagtggagccaactaagattgaaagatgggctgttgtcaacttctc

SEQ ID NO: 195382 - DNA, 566 bp, Gossypium hirsutum
  unsure (1)..(566): unsure at all n locations
cccacgcgtccgcccacgcgtccgccgaggtgcaagcagaagcatccaatgttgctccaggaggtgagacaagtattactaatcaaggggtgtttttatctaatttgcttcatcagatcatgccatacatatctcagcatgcgggttcacaacgaagtactcccgaagaagcaactacttctgccccggctgacctctctagtaccgggaattcacgcagaccaaatgacactgaacaaaatccaccgaactcgaaacgtcagaagacggagtaacttatcaagaggacgatttaccgaagcttcccgtggttatgaaaattcgtaattgctgatttgagaactttattggtatatgaacagcggcatgacttatatgttaaaatgtggtaatatcatggtcccttttattgcaaaaatgagatgacattctattatttatattataggggaaatttgtagtcacattttttttggtttttgacttttataacatagtagtaatgttggttttatttgtttaatncctcatcccactaaaaaaaaaaaaaaaaaatatatttatta

SEQ ID NO: 195383 - DNA, 876 bp, Gossypium hirsutum
atcttaaattccttatcgggaaaaatcccagacctgttagggaaccttcaaaagctcaccgtctggaacttagctgataataaaatcaacggcgaaatcccaagctccattgttcaactttccagtttaaaacacctcgatttgagcaacaacctcctcaccggcgaagtcccggccaactttggcaacctgaaaatgctgagccgtgcattactgagtggaaaccaactcactggtacgatcccaatctccatcagcaacatgtaccggttagccgacttggatttatcgagaaacaaaatacagggtcaaataccagcacagttaggcaaaatgaaggtgctcgcaacgttggacttaggcagcaacatgctcaccggcgaaataccgccggcggttctgggcagtaccggtttgggtatcttaaacttgagtcgaaactcccttgaaggcaacattccggacgttttcgggccgaaatcgtacttcatggcacttgatttatcggtcaataacttgaaaggtccggtccccggatctctatcgtcggcgaagttcgtcggacatttagatctcagccataaccatctttgcggtacgattccggtgggaacgccgttcgatcaccttgaagcttcatcatttgatagtaatgattgtctttgcggcaacccactcaagacttgctaataatatttgctcaatgaaattaataattgtgcatgggggattaaattgtaatagaatgttttattttgggttattattagaaataatagaagtattgaaggttgtctttggttattacaccgatttcatttatgtgtaataacatgtaaaaagtgtacgtattatgtaacgtaagcgtgtgtattc

SEQ ID NO: 195384 - DNA, 1412 bp, Gossypium hirsutum
cccacgcgtccgagaaaaatagcgatgaaactgagcctgataatgcaaagagtgaaagtgagaatattaagcagtctgaaagtaagaaggatgagccagtttctgatgctgttgctgataaggaaagtgctgagcataagagcagcgttgctgtaaatgaagaaactcaaaaggaggccaatgatgaaaaactggcgggagttgaggccaaggatgaagataagaaaggtgacgagactgcaaatgctgataacaaagataagagtagtgaaaatgccgattcaactgcagaaggtgcatcattgagttcattccagcagctttcaagtagccagaatgccttcacaggactcgctggcactggattttctacttcttcattctcctttggatctgcaacaaaggatggtcctacaggtgcttttggttttggtctttcaacaaatggaaattcatccctcttcaacacatcagggacttcaattgtttctaagagtgagggaagtggttttcctgccttgcaggaggttccagttgagacaggagaagagaacgagaaagttgtattctctgctgattctgtgctgtttgaattcatagatgggggttggaaagagcgtgggaagggagaacttaaggtgaatgtctcaacagctggggctgaaagagccaggttgctcatgagagctagaggaaattacaggttgattctgaacgcaagtctttacccagatatgaagctgacaaatatggacaagagaggtatcacttttgtctgcatgaatagtactggtgaagacaaagagggtctgtctacattggctttgaagttcaaggacgcttccatagtcgaagagttccgtgttgctgtaatggcacacaaaggtaacacagctactgttctgaagacacctgaacattccccttaagctgcagaagcttgaaaggtatctccgttagatctgatctatcctgaacttgccatttccagtagtcctctttcgttattgaggaagtatcgttgcttgggcatatgcttttataatgcctatgctcttgtatgtagcagagtccgagtcaaccgagaccagttcaatctgtttttgattgttataaatcgtgtatgttggagagtcggtcaatagagaccgatcaaatcttttatcggtttgttataaactatgtagcctgcgggagaatgtttcaacctctcttgtttttcatggttcccgtcatggaattaaacaacttcatgagctgccaagctatcaagatatgctatttactgtttaaaaaaaaaaaacaagatctaaaccagaaaaaataaagcccttttataatgaaatgaaacagaaactcttaaaggccaacaacaaactcaaagggaaaaaaaatcagcaaacactattcct

SEQ ID NO: 195385 - DNA, 592 bp, Gossypium hirsutum
caaaatcaaaacaaagaacctaagcttcctatttctctctcactcagtcgaatccaagaaaaacactccaactacgattttgcttccatattcggccgaccgatgctacgccaccataacaacgatctacatgcccgccgttcgactgcttttcagccttagatcccctctatgcttcgatttcgacaaagcaaaaggaatccacggcatttggtaatgtttttcttttattttcaaatgttttaaaattataatgaaaaagaatagaaggaaatagaatcgaaataaaagcatagaacctagaaaagatgaatctaaaatcaccttttaaaaactgactttggattggtcttatattttctttacaatatgcgtgtatttctctgggaaaaccgaccccctttacaattgattatctggctttttatagccgaataaagagaaataagaaaaaataaaaaaataaaagaaaatacaatggccttggattttctgttatgcctttgctgtcaattgctagatatctgctgtgttgtttgctagtccgttttgcaggttcaaaggtcgtggtgttgctgatgcggtggagctg

SEQ ID NO: 195386 - DNA, 653 bp, Gossypium hirsutum
  unsure (1)..(653): unsure at all n locations
gaaagaagtcacctctgccatttgattgcttttttgttttctctatgcgtatatttcgtttgtccaaaatacaatgatttttttgaggcctttatagctgaaaagaaagaaaataaaaatacaattttcattctttctatttgctgctcgctgtcgtttttttgtttgtgtttgctgctgtggtttgtccatttcttcgcaggtacaggtgcgttggagctcgggtacggggctgtactggagcgggcgtggctgctggacggtacgaatcgtacggcgttagaggcttggctgcggcgcaagggagataaccctagggttttagggttttaattttctaggcctatcgggcttgtattttgggtcttgggttaatttggggattgggtattaatttgggcttgtaataattttggactgatggactgtaaagggacatttaatatcatttatttatttttttattatatatttttttatttttatttattttgtatttgctcttctttgggcccgggtaaattggcctgtttacagttgtaatttagccattcgaataattgagttgaattaggtggcgtgtaaacaaaggtgtattctatatgtagagttgtaaggtggaatgacatgtttaatttctttatagntttctt

SEQ ID NO: 195387 - DNA, 492 bp, Gossypium hirsutum
gtgttcccaccgcagattaccttatgtgcttatttaaacccccccgcgcgtccggacaatttactcaccggtcagattcctcaacaattaggctttctatcacggttgtcagcttttgatgtttcttacaacaagctttcggggccaataccagcctctttagggaacagaagtgggaatcggccgagtttcaatgtcacttcttttgaaggcaataaggatctttatggataccctttaccacccatgaaaagcaaagggttgtcagttttggccattgttgggatcgggttaggaagtgggcttgctagtttggtgcttagttttacaggagtttgtatctggttgaagattagagatgaaaagatggctgccgaagaagggaagatgagtcaccctatgcctgattattaaaaaaaaaaagaagaagaacaaatatcattgaagatcattgagcttaaattcaaaaaagaaagaaaatcccaggtatgt

SEQ ID NO: 195388 - DNA, 1121 bp, Gossypium hirsutum
  unsure (1)..(1121): unsure at all n locations
atttgttctctctctctcttattagaaattagacactactagacttgtagaaatgcaagggctcgtcttgttgccggtactcctttgcgccacctaccatatcgctctttccgcgaccaacgttacggtggcggacgggctgttagataatggtaactttgagcaagccccgaatgcctcaaacatgaagggcacggttgttgtggggcgttatgcaataccaggatgggtaaacgaagggtttgtggaatacataaagtccgggcaaaagcaaggggacatgttgctggtggtgcctgagggagcctatgcagtcaggttggggaacgaggcttcaatcaagcaggagataaaggtggcgaaagggatgtattactccatcaccttcagtgctgcccgtacttgtgctcaagaggagcgtttgaacgtgacggtagcacccgattccggtgtgatgcccatccagacagtgtatagcagcagcggttgggacaactatgcttgggcattcaaaacacaatctgatgcggtcatgttgattattcacaatcctggagtggaggaggatcctgcttgtggaccactcatcgatgcggtagctatcaaggctttatatcctcccagacccaccaacaagaacataatgaaaaatggtggttttgaagaaggtccttatatattccccaacactccatggggtgtcctaatcccacccaacattgaggatgataattctcctctccctgcctgggtagtcgaatccctcaaggccgtcaagtacatcgattcagcccattacttcgtgcctcaaggccgaagagccgtggagctagtttgtggaaaagagagtgcaatcgctcanataacaagaaccatgntggcaagaatacaggctctncnttctgggggcgatgcctacaactccgtgaagtttttgtcctcaagctttcccgtaaagcaccctaaagtccttacaatttaagggatgtgattcaacgactgtcttaattcctgtggtcaacggccngatatgtctttacagtttaccctgaaagagactctttttatacggcgtgttcattaaacttgattcttactgattaccatttttgggggagaat

SEQ ID NO: 195389 - DNA, 942 bp, Gossypium hirsutum
tctttcacgcgtccgcttcatcttcatctccatctatttcttcttaattgtttctctgtatataattttttagattttcaattataatcggaaaaaaaaccaaaaaaaatcaaataaaaatgcggaggataattgctgcaagttctttttgcagcaaaattttgagaaaagaaaggcagcgggcttttttctcttcaacttccttactctttgatgaaactcaattacagttcaaagaaagtgttaggcaatttgcacaagaaaatattgcgcctcatgcttccaaaatcgaccaatctaattctttccccaaggaggttaatttatggaagctcatgggggattttaatcttcatgggataactgccccagaggaatatggaggacttggtcttggttacttgtatcactgcatagcaatggaagaaataagccgtgcttcggggtcggttggtctttcctatggtgctcattctaatctgtgcatcaatcagttggtgaggaatggaaaccctgcccagaaagagaaatacttaccaaagctcatcagtggagagcatgtaggagcccttgctatgagtgaacccaatgctggctctgatgttgttagcatgaagtgcaaagctgatcgggttgatgggggttatcttctaaatgggaacaagatgtggtgcactaatggtcccgttgctcaaacattggttgtttatgcaaagacagatgtctcagctggctcaaaaggaatcacagcatttattgttgagaagggaatacctggatacaccactgctcagaaattgtacaatacttggcatgctaggatagtattcatgtgtgcttgttctttgagaattgtttttatatcattatgttatcttgatttttcttatattgcttatgtttgttctcttttgttatttttactatttcttttgtttatgt

SEQ ID NO: 195390 - DNA, 432 bp, Gossypium hirsutum
cccaatgctgcctctgatgttcctagcatgaagtgcatagctgatcgcgttgatgggggggatcttctaaatgggaacaagatgtggtgcactaatggccccgttgctcaaacattggctgcttatgcaaagacagatgtcacagctggctcataaggaattacagcatttattgttgagaagggaatacctggatataccactgctcacaaattggacaaacttgcgatgcgaggaagtgatacatgcgagcttgtctttgagaattgcttcattccacaagaaaatgttcttggcaaagaaggaaaaggagtctatgtattgatgtcaggactagatttggagagacttgttttgtccgctgggcccattggtataatgcaggcatgtcttgatgttgttcttccttacatacgagagaggtcacagttt

SEQ ID NO: 195391 - DNA, 505 bp, Gossypium hirsutum
  unsure (1)..(505): unsure at all n locations
attctgcaaaggtttttagtgtgttgtcatggagctggtcttctaagtcccttcagcttgcaagagatgcttttcagtgtcgatatagcgaaccatgcaatcctggagctcattgcattactcttgataagctatatgttgcagagcagaagctttacaaggaagtaaaggaggaagaagttaccaaattggagcttgaaaagaaattgatgttgctccaaaagcaagatgaaaaccatgactggaccaagactcagaaaatcaaatcaagtgttgagaatctggagaatgacatgacacgcttgcaacattcaataagtacagcctgttcatctatattggagctcattgatgaggagctttacccacaactggttgcattaacttcaggtctgatggggatgtggaagatgatgtacaaatctcatcaatttcagaaccatatttcaaagcagntgaatcatctcactgatcatttaagcatggatttgactactgaatcccg

SEQ ID NO: 195392 - DNA, 737 bp, Gossypium hirsutum
gcgtgtcatagcagagagactctctgaggaagaaattggtggcttgaaagagttgttcaaaatgattgatactgacaacagtgggacgattacatttcaggaactcaaagatggtttaaagaaagtgggatctgaacttacagaaacggaaatcaaggatttaatggaagctgctgatattgataacagtggaacaattgactatggtgaattccttgctgctacactgcacataaataagatcgagagagaggaaaacttagttgctgctttctccttttttgacaaagatggtagtggttacatcaccattgatgaacttcaacaagcttgcaaagagtttggtctatgtgatgtgcatttggatgagatgatcaaagaatttgaccaagataatgatgggcgaatagactatggggagtttgctgcaatgatgagaacgggtgatgggggtatgtgaatgacagatcattgtgaaccaggctgactctagcatatccgatggccttggaatgaatgactctcacaggatattatatgaaaccatgtactggatataatgccgattcatgttttttccacacagtattcaataaatgagagccttcaagtgtaatgaatctattgttgatattaatgcctttgtcactgaatcgatgttattccttgattacgtcatatgttgtctaggtgttttatctttgtgtggtgaattttaccatcttgtggtgtctttt

SEQ ID NO: 195393 - DNA, 755 bp, Gossypium hirsutum
  unsure (1)..(755): unsure at all n locations
gattgaacagctgtaggaaaccttaatgattactggtttacctatccctgtaactttgtatcccactggcagatggccaagttctttaatataaggttttagttgacttggcggggagagggatctttttctttgatgagcattattccattattggatacagttgttcatcggatggcaagtatgatatcaaaacgttattatatgcctcacctcatgtaactcatgtctggtctcttgcttgatgtaaagtggtgaagatgggtgtggttaatggtacctattagcttgtgagcggtaaatatgaagttggttctgtaccgctcctgttctatcatccatgtatttcagtgatgaacctgaatatctgaggaaaactgtttgtatannggtgtgaagctaggggcaatcatatactntcatttcacttggcaggcaggtcaatcgctggctgtatttgagagataagatgtgaccactaagagtgaataggcatgttttttatcagtgcacttgacattaggttgcttgcttgttcttacaattttnaacatgttgggtcaatcgttttgcaacactgtgatgctgcatagaaatggagaaaatctgcctacggttaacaggcaaaacgaatgtttatccacaaagtgctccgtntctgtgcgtacattgaatactgtgaaaatcctcgaattacgtgaagcaattcatcatggtaaactctattgggtaacttaacttaattactggggggg

SEQ ID NO: 195394 - DNA, 798 bp, Gossypium hirsutum
atgcgagttgtttgaacaataatcagcaaagacaaaacagttacttggatataatttccccttgtcaaaccgaccctctgtaagcaatccgccatggacacattagcagctcgattcaagctcattgttttgccctttctatccatttctttgcttttcttaccttttctccaggccactgatttcgattactgcgataataaaggtaattacgttgtaaaagtcgatggagtcgacatatcacctaatcctgtgattagcgggaaaccggccaccttcacgatctcagcttctactggtcaagctatcactggtggcaaagcggtgattgacgtttacttcttcgggtttcatatccatcaagaaactcatgacctttgtgaggaaacatcttgccctattactgttggcaactttgtgctctctcacaatcaagttttacctggttttactccacctggttcctacaaacttaagatgacattatcaggtgcgggaattaaactgttaacttgcatttccttcgatttcaaaatcagttttggtgcttctgaatcttcagtctctgatagctgatcagcccaccaagtatatatatgaaatatggactgcagtaggatgttatatcttatttattgcgaacagatctcacattctacaatatattgcacttgtattccgtattatcgttcttgtgaagatgtcatgagacaaactacgattacatggaagtcactccaatctgctgaatcatgttaacaatgttaatttcccttaatatcaaatcattatacatgc

SEQ ID NO: 195395 - DNA, 676 bp, Gossypium hirsutum
gtcactcttgggacccttataccgataaggccaaaatgatccaccatgatggtccgatgcttaccaagaacgttaaactagccttaatatggtacggagattgtggaaaagacataaagaatacgatgaggaatttcataaaatcgttggtgttgccaggcaaagaccaccttcaacctcaagtcacccgttggtgggaggtggtggaaagttatcaagccatgatgccaggcgcaaagcctgggaaaagccccaaaatcaaggtggaagtggtgaaacaatcgactaataaatcatattccccccgcgcggccgtgactttgcaagcacatatcccaattcttatcgaggaactcactaagggcgatactagtgtccttcccgtcatcgttgctgcaagagatgtctccattcaaggactttgcaatggaaagtgtgccgatcatctacttactgaggatcccaagccgcgcccatacatcatcgtcgggaacccggaaactgagtgccctgaagaatgtggatggcctttcgttcccgctgaacctggctcaaaaggaccagtccttaaaccaccaagtggcaatatggcagctgatgctatggtcattgccttcgccagcactttggctgatgcggtcacaaaccctatggagaacggcatctaccatgagaa

SEQ ID NO: 195396 - DNA, 511 bp, Gossypium hirsutum
cggacgcgtggggagcaatctttacagagcttaacaggagtttctctgggggaaggtacgggggcaacaatgtcggatgatgatgaagaccaagtggacagtgatgccaatttgtttgatgcaagtttggacggtcctgattcaatgggatttggccctctcattccgacagagactgaaaggtctttgatggagcgtgtgagacgggaactcaaacacgaactcaaacagggttacaaagagaagattgttgacataagggaggaaattttacgtaagagaagggcaggaaagcttccaggggatacgacgtcggttttaaaagcttggtggcaggcacattccaagtggccataccctactgaggaagataaggcaaggttggttcaagaaacagggttacaattaaaacagataaacaattggttcatcaatcaaaggaagcgaaactggcacactaatccatctacttctaccgccttgaagaccaaacgtaaaactattgcaggtg

SEQ ID NO: 195397 - DNA, 363 bp, Gossypium hirsutum
cgggcttattagatgggaatgggggatattcactgggttatggaggtaaccaaaggaaccgggtgcttggtggggatttcccctggcacatggttgtggccacagtggaaaagctgcgcgtgttgaaaagctcggaactgtctgcccttagccttggaagcagtaaacgagggaagtaccggcttgactctgtctccaccaaagtttgaagatgaggcattgaaatttgaattatgttcatgttttgacattttgttccctgttttgcctttaaacctgacgcacttactgtatatattagtaggtcggtatgtaatttttgacttcgttttctttctttccctacatgaatgccatttgctg

SEQ ID NO: 195398 - DNA, 500 bp, Gossypium hirsutum
attttcttggtgaaaatcagatctctactgtaaattaccatggcgaggtgcctgcagaacaaagggttgaaaacctgaacaagttcaagagtgatgatggagactgtcccacattggtttgcacggacttggctgctagagggctggacttggatgttaatcatgttatcatgtttgatttccctttaaactctatcgactaccttcatcgcactggaagaactgcacgaatgggtgccaaagggaaagtaacaagtttggtggctaaaaaggacttattgttggcagaaaggatagaggaggcaataagaaagaatgagagtttggaatctcttacagttgataatgtccgaagggatactgcaaggactcggattaccgagcagaaggggaagaatgttaaactgttcaaggcatcaaatcagaaaaacaagaccaaagctgtgtctgcatctgtgcgcacatcagggaaaaaacccacaattgcaaagtcggtaaaa

SEQ ID NO: 195399 - DNA, 359 bp, Gossypium hirsutum
cccacgcgtccgctctgcgttacttaaatctcttctttctttgctgatagatacaaagttctcaagttgactactgctccatcatcgaagagctgggtgaggagaagagagaagatagcataggcaatcaagatgaaacgaacaagggagaagagcctgcacagattgtactcaaagttgacatgcactgtgaagcttgtgccagaaaggttgctagagccctcaaaggatttcaaggagtggaggacgttgccacagatagcatggcaaataaagtagtggtgaagggtaagtctgttgaccccatcaaggtttgtgaaaggctacgaaagaagagtggaagaattgtggaattaatt

SEQ ID NO: 195400 - DNA, 426 bp, Gossypium hirsutum
atcaagtaatcagattcggagttcttcgggatcatcatcttcatcaattactcaaaagctgtcaagatgattgatgatcaagaccttggcttcttcgcgaatttccttgggatcttcattttcgttcttgttatagcctatcattatgtgatggctgacccaaaatttgaaggcaactgaagattttgcactttttggttgtgtctgcaatggatatttagatgataattttggtagacttgagttgtttcagaaacgaagacgaatcactgttgttaaaaaccttcaacaagttattgatataaatgtcatcttattgctcaccgctggcgtggattatatttatatccatttttcttgtttttgctttacatttaatattgctcaagtgatttaacatatggtgcaccttgaggcagcactctg

SEQ ID NO: 195401 - DNA, 790 bp, Gossypium hirsutum
  unsure (1)..(790): unsure at all n locations
ctgaacaaggaatgcagcacgagcaacttaagagggacaaggctcaaattgaaaaatcactaatgctggaaagtcagaagtcaccactgtgtcacacagatttaaatgatatcctcaactttgaggagtttgtgaaacatttaacaaatgaagagcagcagcagttgttgcagtacctacctccagtcgacattgccaaacttcctgatagcctccaaagcatgtttgaaagctctcaattcaaggagaacctatgttactttcagcaactgcttgcagaaggggttttctaatatctctggcccaggggttgaaagctgaagaattgtaaggacttctgaaacagaactttgcattatttaattttgactaacatcccaatggggggtaaaccgccgctccatgtactttaaagagatgtcaagattagtatttggagcgcctgtgagtcctgctagaggaaaccaaccgccactacatcgaacaatttagtgattcatgaagagataatgtgacagccanagtcaaaattttcagaagcaaagaccataagtgccccaaaaaggtgtcatganggctactgcgaaaaccaagagtctagcccatggatgtctgcgttatcgagagctattcgcttggcctccgaggactctttggcggaatctccctttggaagagagtccacaaattgtgtttaggccccagggtgtttcgaggcgactgtatccttatttatgcgaagtaccttattatacctccatgatctcttaacgggggataaaaaaaaccc

SEQ ID NO: 195402 - DNA, 451 bp, Gossypium hirsutum
  unsure (1)..(451): unsure at all n locations
gtcgttaacattttataccagcagagggaagtacggtccattcggtgaggaggtaggcacatatttcacttcaactacaacacaggggaaggtggtggggttccatgggagatgcagctcttacttggatgctattggagttcatatgcagcactggctgggaaatcagaaagcctctaagatgtctctcttcaaaactttcagtcgaatatctattgctctgctcttttggttcagtataattaagatgaaactggtaccaaataatgaattattactatcttgattcacacacacacaaaaaggaagcccaatccaattccaggctcactctggtcctgttgacttgaaggattgttattggaatctctatctctgagctgataaaataaatgaaagtgtatgctctatgcttgttaaaaaaaaaattntgcaatctgaattgctactt

SEQ ID NO: 195403 - DNA, 412 bp, Gossypium hirsutum
acgcgtccgtgattttacatccgataccgccttttgcttccttgttgctgctactggcttgcagagtggatggagcttatcattagctattattgacatttatgctcttctagtgatgcgttcacttcagaattatcgagtcgttactttctttaccattggctgatggtgatcgcatccactttgacatttgccgcagcttgtgcttctgcaggcataaccgttcttattgacaatgatcttgatatctgttcgcacaaccatggtgtgcagtttggaactgctactgcaatggccttcattagctggtttactgcattaccttcatttcttcttcatacctttggtcactggcattcccgttagaaggttacaacagaaaaaatcggtgtaaatgatgcattttattatg

SEQ ID NO: 195404 - DNA, 392 bp, Gossypium hirsutum
gttttattagacatgaggcgtctctaccaagagaactgaggcggcatctaaattctctggaagagaggcttttggagagcatggtgtgggataaaggttcctcaatgtacaattctttgatagttgcaaaacccgccctatctgctgaaataaatcgtcttggcttattggctgaaccaatgccacctttggatgcaattgcgacacatgtgaacttttctggaagtacacctccagtgccttctttgcagaaacacgaaacatcaacgggtaatgctggtagctcaatcttaggacaaaatggggatgtcaggtctcccatgagaccttgcactgagttgacgagtgtgttggttgaacggaatgcttttacatcgccagtgaaggatcgc

SEQ ID NO: 195405 - DNA, 665 bp, Gossypium hirsutum
  unsure (1)..(665): unsure at all n locations
cccacgcgtccgcccacgcgtccgaaagaggttagagtggctgtctccccagggaaagcggaaggacatagaagaaataacgaggagtacatggagagagaggatttcagctttgggaaccgaggattggaacgagaaatgaccaacaaccacgaaggtgacaaagtgggggatggcaagcccaaaactatgcctcctgcaagtgtcatcacaaggctgatactgatcatggtttggagaaagcttatcagaaatcccaacacttattcaagcttaataggactcacttggtctctaatcgcattcaggtggaatgtacaaatgcctgccataatagccaagtccatttccatactgtcagatgcagggcttggcatggccatgttcagtcttggtctgttcatggcattgcaaccgaggatcatagcatgtggaaattccgttgcagcttttgccatgggtgtgagattccttgcaggtccagctgtgatggcagccgcttccatagctgtcggactccgtggcgttctcttacacgttgccattgtgcaggcagctctcccacaaggcattgtcccctttgtctttgccaaggaatacaacctacaccctgatattctcagcactgctgntatttttggaatgctaatagccttgcccataac

SEQ ID NO: 195406 - DNA, 482 bp, Gossypium hirsutum
  unsure (1)..(482): unsure at all n locations
tatctgctctcaaaggctaancaatgcctttattccaaagccattccagaaccctagcctacccctccttttctccttagccgatccctacctctttagcactagcgccgatctgccttcacacgcagcactcgaccagttcgggttttgaagggctaccttgtagcctctaagctccccttaaaactccgatttcgatggagcaaaagaaaaccgatggccctaaagcaaggtaaagctcatcccatccctttccttttattttctcttttttttaaaaaaaaatgatgaaagattcaagtaaataacagcaaaaaaagagaaaagattatagaaatcgaaagtggcaatcaccttatctgcttttggttgctctgcgttttgttttttgtaaatgtgtgtaaccgattacaagattagaatctggctttatagcccgaaagaaagaggaaaattaatcaaaatacaatatgtgttttttt

SEQ ID NO: 195407 - DNA, 641 bp, Gossypium hirsutum
  unsure (1)..(641): unsure at all n locations
gaatatttgttcttctactctgattgatcctccaaaagaatggcgcgcactatcaaagaccctagaaaggctaagagaaagaataagggctcaaaaaaaggcgatggagcatcaacgtcttcgtcagtgccgacaattcagccaagggtttggcaaccaggagttgatgaattggaggaaggagaagagcttcaatgtgatcctttagcttataattcacttcacgcttttcatattggatggccttgtttgagctttgatatcgtacgtgattcgttgggttcagaccggaaagattttccacattcggtgtattttgttgcagggactcaggcagagaaggcttcttggaactctattggagtgtttaaagtaagcaacatttcgggaaaaaggcgtgagctagttcctaagaaatcttccgaggatgatcctgatatggatggtgaaagtagtaatattgatgatagtgaggatgaaaaaaaagtgcttctggtgcaccggttttgcanttgcgaaaggttgctcatcatggatgtgttaaccgtatacgtccatgggacaaatcctcacatatgtgcatcatgggctgatattggtcatgtgcangttatggacttcagttctcatctgaatgcttt

SEQ ID NO: 195408 - DNA, 851 bp, Gossypium hirsutum
gcaagctaacgcttcggcagcgaaggcagagggcattccaaaatgaagctttgtacatgacaggagaacaaactcttcactgtttctggctactatcccagaggccgattgttcattacactcgtcaaacgctccatcaaaatttatttttattaactgcccaggtgggggtttccactttttaacttccttgacgatattaggcttccagttcttctaaatagctaagaacaaagcttgcaatctcctgacccgatctttttgttttgtcatgtacacgagtatttctgtctccccagatggcccataacgcgcagcaaaacagtttgcagagaggttgagggtggagaacaagagtcatggacaatgacggaaaagatggttcatcgtttctggttcttccccacatcgagggcataatgtgctgtttgtcagtttcctacaaagcatgttcactcgagtaggcagataattccatgaaatcttccagatggtgattaaaattttatgtggtagatcgaggctccataattttttataaaattccttgtagttggtttgtaaagcgtatgctctaggatctaagctttgtaatagtttataggcactacgaactgaaaattcacccgaaggttcaccgctccaagcctgaaagtcctcatgaggttctcttgccagtgggataccgaggatcttacctgctgcttcttctgggaaggtttgtttaaggaattattaaggaaaactggaaaattcgctagtatgctatgaggaaccgaaaaataagattgcgcccagaattgtccctacacttgatagttgtccagataagaacagtaatgtatgagtgc

SEQ ID NO: 195409 - DNA, 510 bp, Gossypium hirsutum
cccacgcgtccggttcttccccacatcgagggcataatgtactgtttgtcagtttcctacaaagaatgttcactcgagtaggcagataattccatgaaatcttccagatggtgattaaaattttatgtggtagatcgaggctccataattttttataaaattccttgtagttggtttgtaaagcgtatgctctaggatctaagctttgtaatagtttataggcactacgaactgaaaattcacccaaaggttcatcgctccaagcctgaaagtcctcatgaggttcttttgccagtgggataccgaggatcttacctgctgcttcttctgagaagttattgaccattaactccctgttccattctcttacgttattattgattaactcagcatccttaaaatcctgtgaggtcgcctcaccacccgcgcgtccagcatttctaaaagcctcctatgctaccatagaaaaaatataacacaacaacaaccccctttaatgtgtcctacccc

SEQ ID NO: 195410 - DNA, 569 bp, Gossypium hirsutum
caaaaaagggaataattttcgtctccattcaatctttctgctgctgaccattctttcctaagggcattatggatgcgagattcgggctcttgttcctcttcatgttgggtgctacttgggcatgtaacgcccgacaactagaagttgttgaggtagtaatctcggatccatcagttgtccaggtaaactggaggcaagatgaaaaagtgatagaaacggtagctcggaatgacaacgtgtgcaccttgtgtgaggaatttactactgaggcagttgattacctttcacagaataaaacgcagactgagataattgagattcttcacaaaagttgctcccgtttacgagcttttgagccccagtgcattacacttgtggactactatgcacctctcttcttcttggaaatatcttcagtacaacctcaagatttctgtacaaagttcaacctttgtcaaaaagttgcacttatatcttcacaattccgcgaagatagttgtggcatgtgccaccgtgctatttctgaagtactaatgaagttgcaagatcccgatacaaagttggagata

SEQ ID NO: 195411 - DNA, 656 bp, Gossypium hirsutum
ttctcacgcgtccgcggacgcgtgggttaaaagagaaaaactcaagaaatgaaaagagaagagactacaaagaatcggcatttcctcgccgataaaagatggtttatgcctattaccatagctggctttattgccgggacgatacttatctcgagcttcataaaaaccgccgattactccatactatgttcgctcgccaaaaccagatccatagccgtagaggaatactcctcctcgccggtccaactccaagctatcatccactacgccacttcatcaatagtcccgcagcagaacttcaaggagatctccgtaacctttgacgtactcaagaaacgctctccttgtaatttcctcgtctttgggctcggctacgactccctcatgtggacctccctcaatcccaatggcaacactattttcctggaagaggatcccaaatgggtccagtccgtgctcaaagacgccccggtcctccacgcccaccccgtcaagtaccgtacgcagctcaaggaagccgacgctctgctctcccattaccgctccgaacccagctgttttccctccaaagcttacttacgaggcaacgacaagtgcaagcttgccttgaggggctttcccgatgagttctacgatacggagtgggattttatgat

SEQ ID NO: 195412 - DNA, 463 bp, Gossypium hirsutum
  unsure (1)..(463): unsure at all n locations
cccacgcgtncgcaaaaacctggtccgctctttctcttcttcttcttcttttatataaccaaagtaaggccgattttaaaccggctatttccttttgatggtagtatttcttgtttcatttaatcagattatcaagtgagaaaacgggagaacgtaatgggcagatacagctaggaatgggcattccctcgccgataggagatggtttttccccatcgctatcaccggccttatagctggtgcgattgttacttccagcttcataaaagccgccgattactcgctgctatgctccgtcgccaacaccagatcaccccagggcgttggtaaagggtcggccacgccgatccaactccaagctatcatccactacgccacatcacgcatcacaccgcaacaaaacttcagggagatctccgttacctttgatgtcctcaagaaaacgtctccttgtaatttcctc

SEQ ID NO: 195413 - DNA, 1475 bp, Gossypium hirsutum
gtgaataaaaataaagtatggctattcaatttaattttgtttcatccatgttaatactcggacgtctgtccatatcatccgttgaaggtcaaggaggaggaggtggtggtgttattgatgttgttgcaaagtttggtgcaaaggcagacgagaaaacagatttgagtaagccattgttggatgcttggaaagaagcatgtgcctcgacatctccgtcaaaaattgtgattcctaaagggatatattttttaagtacagctaccttagatggtccttgcaaggctcctattgagcttcaagttcaaggcactgtgaaggctccggcagaccctggtgctttcaaggagcctaaatggattgctttcaatagaattgaaaatttcaaattgtctggcggaggagttttcgacggccagggaaccactgcttataaaagggaaggttgcaaaggtcatgattattgtggttcacttcctattaacctaagatttgattttttaaccaacgcaatgatacaagatataactaccaaagacagcaagcagttccaggctaatgttctaggatgcaaaaacattactttcgaacatttcaccgtatctgcacctgacgaaagcccaaacacagatgggattcacattgggagatcggatggggtcaatgttcttaactcggagataaaaactggtgatgattgtgtttcaattggggacggttccaaaaatttggttatcaatggagtaacttgtggaccaggacatggtatcagtattggtagtctcggattgtttaaaaatgaagaaccagttgatggagttacagtaaaaaattgcaccatgactaatacttccaatggtgttagaatcaaaacttggccaggtgctgaacctggcacttgttcgaacattcactttgaggatattaccgtgaccaatgtcagttctcctattataattgatcagaaatattgcccatggaacaaatgcaaaataaatgaagaatcgaaagttaaactaagcaacattagtttcaaaaacattcacggcacttctgcgcgtccagaagctgtcaagattatttgtagtgctactttgccttgtgaaaatgtagaacttgcagacattgaaattacgcatagtggaccgactggacctgcagtatcacaatgttcgaatgtgaagcctaaagttagtggcaaacaaaatccagctgcatgttctgcccctatcccagcaaaacctaccccgaccgcttaatcaatagcagaggtataatgttttttgaagacgttgtaactcttataattatatttatttcgcaaaataaatttggtttttttatattctatgttataaagaatatttttcataaacttaattattttttaaaaaaaaaaaggaaggaaaaccttgttgaaaaaactggaaccctttttgaatttggttgaagaaaaacaaaaaaaaaaaatcccgccg

SEQ ID NO: 195414 - DNA, 806 bp, Gossypium hirsutum
  unsure (1)..(806): unsure at all n locations
cccacgcgtccgcaatttgggtgaaatgaaatttcatcttttgtttgaaaacttttgacgtaaaaaaagctcaagtttttgcttgaaatcgttggcaaacgcagacagtttttactcttcactggctttatcctcaatttctgtgtctccaaagttccacaggtctatcaagtaaaatgtctgaatctgagcaaacccaaacccaaacccaaaatccagaccccaaaacacccgagcccaaggttcgagcagttggtgtcactgagtatagctggtgcagagccgtgcccggtggcactggcatcactgtcttgtccctcctcctctctaatgtccccgatatctcatttcttgaagcactcctttgcaggctccaagtttctcatcccatcctccgttccagggtccgctttgatgcttcctgcaacactggttacctcgtaacgccttctaacccccatgttcaaatccaatcctttgatcttcaatctacttctcacatactccaaagctccctgggcgattcccacatcgattcccaccacgttttactcgagcacgagttgaataggaactcatggaaccgcactgatggtgaccaagctgactgggatgtctttttcgccagcctttacactataagagacgcaaggtggtttttggtgttccggctacacacgtcagcttgtgaccgcgctgccgcggtgggactgttgagggaattattagagatggtgggtggcggaagagccaaggcggaggaggagatagagcaagaggtggggattgaagattngattcctagt

SEQ ID NO: 195415 - DNA, 678 bp, Gossypium hirsutum
cccacgcgtccgcggacgcgtgggtaaatttgtagagcagagacaatgagaggaacattgacgttgacttggattctgatggtctgcctctcccaagtagcggtgcagagccaatactactcggagagcttaccatatgatcccaggccggttaaggtcactaatctttacttctttttgcatgaaactctccgcggtaagaacccaacagtagtcatggtagcccaagctaacaacacaagcaacgacaactactcatcagtgccatttggcaccctatatgccattgatgatcccctcaagataggtcctggggacaactcagaggtgattgggaatgctctgggacttgggatcttgtccggcaaaaattcaacgaccgtggtgatgtacttagattttggatttactgccggaaagtttaagggcagctctattagcatattttcaaggaatccgttaataaagatggaacgtgagctttcggtggtgggaggaagaggagaattcaggatggcagaagggtatgcacgactcaagaattactttttcgatggcaccactgttattattgaatataacgtgaccgtaattcattactaagaggacattctcttggactgtgcaaaattcacatggttttgcagcacttgattagaataaatgtatgagaaattt

SEQ ID NO: 195416 - DNA, 414 bp, Gossypium hirsutum
cccacgcgtccgcagatatacttcacatttagcaaaagaatttttttttccaacttgggtatttaactttactccatcttcctcctcccccttcttcctttttaggatctgggttttttccccccaattttttaaggttataaaaaaagaaaatggggagaggtagggttcagttgaagaggattgagaacaagatcaacaggcaagttactttctccaaaaggagagctgggttgttgaaaaaagctcatgagatctccatcttgtgtgatgctgaggtcgctttgattgtcttctcccacaaagggaagctctttgaatactccactgattcctgcatggagaagatccttgaacgctatgaaaggtattcttatgctgagagacagcttgttgctagtgagcctgaatctc

SEQ ID NO: 195417 - DNA, 453 bp, Gossypium hirsutum
tcgcccacgcgtccgcccacgcgttcgcccacgcgtccgggaaactgaagtaaatatactgatggtgcggatgggcatgaaatgggtgcaaaccctcagcccataattgatcaaggcccttcattctatggaaactctccaggttcaagcttcatgtatactgcccctcctcctccttactcatatgttagccaacctccacctttccctgttgttcgacttcgtggtcttcccttcgattgcacacaaactgatgtggctgaattcttccatggtctggacatagtcgatgtcctttttgtccataaaaacagcaagttcactggtgaagctttttgtgttttgggttatcctcttcaggttgattttgcccttcagaagaataggcaaaacatgggcaggagatatgtagaggttttcagaagcaagagacaggaatattataaggcaata

SEQ ID NO: 195418 - DNA, 569 bp, Gossypium hirsutum
  unsure (1)..(569): unsure at all n locations
taaaaataaaaatggcccaatacatctttgaacatttaagcctcatgctaattaattaatgtatacgatgagttgcacattcctngacaaggcagccattctgacggaagaagatattgtaaaaccagggcaagctcctaatctatggagactgaacaccatccatcgagtggaggaactaatagcagtgatccgaatgggacccatatgggcagcgggaatccttctcatcacagcctatgctcagcaaaacacattctccctccaacaggccaaaagcatgaacaggcacctcaccaagtcatttgagatccctgctggttccatgactgtcttcaccatggtctccatgctctccaccataaccttgtatgaccgtgtttttgtccgcattgcccgtatatacacattgctcaagcgaagcatcagctttcttcacaatatgtgaatatgattcatgatatcattattagccactctggtagcatgcttcgtgtgaagtgaaacgtaaacaagcttctttaccacattggcttcattacaaagctcattcaatcatccccatctca

SEQ ID NO: 195419 - DNA, 436 bp, Gossypium hirsutum
ctttgggatatccggaaaatgtcctccgatacctcttgcaatttagggtatcggaatttcgaatgggattacagatggatggactaccctccacaggctagaggtttggggcacccaagtgatggatcagtggctacttataaaggtcactcagtgttgcgcactcttattcgctgttatttttcacccgaatacagcacgggccaaaagtacatttacaccggatctcatgattctcgggtttatatttatgatgtggtcaccggagcccaagttgcggtactgaagcaccatacatcaccagtaagagactgtagttggcacccgcattaccctgtgttggtcagctcctcttgggacggggacgtggttaagtgggaattccctggtaacggagaagcgccggtccttgcgaacgagaggagagtcaggaggc

SEQ ID NO: 195420 - DNA, 986 bp, Gossypium hirsutum
acgaccaagccttgtctcaacaaaatggttctttaaccaaagtagatcctcaacatccttcagcgaaccttctaagtgatcttttgggcccacttgccattgaaggccctcctggtgctactgtccaatctgagcacaatgcagtctctggattggaaggtggtccagatgcagttgatggttcagccatagtgcctgtcgaagagcagagaaatacagttcatccgataggaaatattgctgaaagattccatgctttatgcctgaaagatagtggtgttctatatgaggatccttacattcagattggcattaaagcagagtggcgagctcatcatggacgtcttgttcttttcttgggaaacaagaatacagctcctcttgtttcagtccaggctctaatgctgccccctgctcatctgaagatggagctttcattagtgcctgacactatacctcctcgagcacaggtgcaatgcccacttgaggttgtaaatcttcggccaagccgggatgtagctgttcttgacttctcctacaagtttgggaccaatatggttaatgtgaagcttcgccttcctgctgtgttgaataaatttcttcagcctattccagtgcctgctgaggagtttttccctcaatggagatcactttcaggacctccattgaagcttcaagaagtggttagaggtgtaagacccatgcctcttccagaaatggccaatctactccacagtttccgggtaaatgatttgtcctgggcttgatccaaatcctaataatctagttggcaagcactaccttctactcggagagtacgcttgccatgctatgtttgatccgaattggaaacagatcctgcagaccgaacccagttgcgaatgacccttgcttcaggcgatcctacattaacattcgagttgaaggaattcatcaaggaacaattgattagcattcctactgcttctcctcagtcaccagcacca

SEQ ID NO: 195421 - DNA, 632 bp, Gossypium hirsutum
  unsure (1)..(632): unsure at all n locations
cccacgtgatcgcagagtttcagtgagagagctaaagaggaggaaaattacacacaacactttgtctgctattaagacacaaacaagatagaagagagagaaactgtaaagaaagaaaacccaagaagaagaagaagagggtttcaagatctggtcagatcaagtcaagctacataaacatcggaatggggagggaactcacggatgtggacatggacggtaagccaaatggtgtggtgaattcaaatggcaacctaacagtttcagaaggctccgagtctaataattatgaggtcaaggaatgcactgcaaaaaactcggtcgtggacaatggtcatgagaagcaagaagcgctgggtgttaaaagcataaattttggtactgacatccctgaagatcagaagtgcatggacaatgacgagcttagcgcgactgcatcgaaacccattggtgctggacaagctcaccatgctacctctaaaactggtgcaaatggcaccgcaaatgtcaactctgcactctcccctgctaccacaaagggatcagagccaaactctccaataactcctttgatcttgaggaagccattgcaaccttatgaccggaagcatnctgatgacgaagataactgg

SEQ ID NO: 195422 - DNA, 453 bp, Gossypium hirsutum
  unsure (1)..(453): unsure at all n locations
gttgcccattattcctcagtcctatgttacacatgcgcttagagtggaaggtcttcgaggtataataacagtgccagccaagctggaatcgacaaccctcgtctttgcacatggagttgacctatttttcacgcagcttgcaccttcaaggacatatgattcactcacggaagattttagttatgccttgctactcattacaatcgtggcactcgtagcagccatctttgtaacatggaggttgtccgagaggaaagaactgcaagagaaatggaggtaaagtagtttcttctcattacgtttgtgtattaacacatttgcttagatgacacacacccttaattatttatttgaattagattagaaggggtctccttatgacttgtaattcttccaagttttgtagcattcaatctttaatgtctattttcattgctctgttttnacananaa

SEQ ID NO: 195423 - DNA, 338 bp, Gossypium hirsutum
cgcatctcaagctttacttttaacacgtggaagggcatgggcgatttcccttgcacctagaagcaccatcactgaagaaattttgaaattatgcttttctgctgatattgttggaactgatcaaaatcttctttatcggtcctctactcatggaaaaggcttgaacagattctggtcgaatgtcgaaggtcctcatggtccattacttgctctcatatctgctaattcagaagatgcctatcaggataataacacagcctggaaatggatcataggagcacttacacagcaaggtttctaaaataaagattcattctattgaagctcggagaacctat

SEQ ID NO: 195424 - DNA, 652 bp, Gossypium hirsutum
gaaagaatggcgactaaatccctaattagaaacggagctatgctgatgaatcgagtgttagtgaagcaagctctcaactcgaacccgatttctaagaatcgagtcttgaatcaaggcattcaaatcactcctcagctgttcccatctctctcgaagtcaaaacttgaaattccccatttgcctcgaaacgacgtcgattctctctctgaagtctcctctacggggtttctttatccatttggtctcccttctctccgtttcttccttcccgacggagattcatcaagtgagccaatgctattattccccaaaagaacatatcagcctagtaccatcaggcgcaagagaaatcatggatttttcgcccgcaaggcaacgaagggcggtagaagagtcattgctcgaagaatagcaaagggtcgttcaagaattaccgcttagaatctggattttcagtgatgcgttcatcagaatcaaaatccggaagctgccttaaatagggtacaactaaacaaaattcgtatcaacttttttggttaattcaataagctctggctattctaaagacactctttggaggaatttttttctttcttcaaatagaattatgttcacttttagatttctttttgatacataaaacttgcaagaa

SEQ ID NO: 195425 - DNA, 602 bp, Gossypium hirsutum
  unsure (1)..(602): unsure at all n locations
cgcgtgggcacaaagatggcaggcgcagcaaattgggtttccataaccttactgttttcagtatgtttatcggcgtcctatggtaagaggaccggaatctccaccatggctgacggagccgatgggtttcaaccaagcaacggttttccgcatgaagctgatcctgattcttcaacctctatcgatcctgatcctaccggattcggtgctggcataggtataggttatgaaagaagcccttactgtatcgactgcgacgatgtggatatcatgggcggcagcttttgcggcacctgcaattacggatgcccttaccgcaggttcaataatgggtgtggtggtggtatcgcttatatggatgaactcaaacgaacgattaaggaccttaccatgaaacttgatgccaatggtcttttagggaaaaagaaggccatgaatatacaagctatggcgccagaatcttcatagatttatatatagattatagaaactacggattctatacaaagagaaagaaaataaaggaataaccaagccgcttgatatatgattgaattacaatgtgctagctgntttttttatctttaaatatatatgaataa

SEQ ID NO: 195426 - DNA, 405 bp, Gossypium hirsutum
  unsure (1)..(405): unsure at all n locations
gaagcagctaactatgttgcagacggacaccgttctatttttcggtcaaaatcatacctccctgggctaagagacttaacaagccagcgttgggctgctgacatgggccaaagaccttcattcttggatattctcaagaggctggaaaagatcaaggaaaatgtaccttcagatcatccttggaatatattcagcacatgacattggaagattccatgaaactaatacggagggtatacatcccctttcctccgcccacatcccgcttggccattcctgcagatggtattgtgaatgcactcacttagtagttttgtgatgatagatttttttcttgaccggatttcgtctatttgttgcggaattcaaccatgaactangtgtgtctttatttcgactattact

SEQ ID NO: 195427 - DNA, 257 bp, Gossypium hirsutum
  unsure (1)..(257): unsure at all n locations
atttgattgtggtgacccagtgggtttctttatatatagaactattatagggtgtgattgcttttaagttcatagttgtatctgaattcttaaacctagtacttgattgaaggaatattgtaagtttgattgtattattcacctcnnnnnnnnnnnnnnnnnnnnnnnnnnnnnnnnnnnnnnnnnnnnnnnnnnnnnnnnnnnnnnnnnnnnnnnnnnnnnnnnnnnnnnnnnnnnnnnnnnnnnnnnnnnnnnnn

SEQ ID NO: 195428 - DNA, 435 bp, Gossypium hirsutum
cccacgcgtccgcccacgcgtccgcccacgcgtccgctttaagccttttttttttttaaataataagaaagaaccccttaacctgctctggtggggttagttcagcatgcagccgccaaaccaccatccattcgatggtcgacggagtgaacaacggccagatttcgccaaccgaggccgtgactacggtgatctggtaattttgctcctttttttctttatttaaaaaaaaacctcgaatcttatgatattcttttaaaaaacgaaacaaaccttgaagatttaaacaaaatctcgataccattcgacccttcgcccacatctatatatttttgaggatgttcgggctctcatcggcgtcgattcgagtatccacttcatgtattcatccctaaattgtaagctaatcacaagaaacgaaaaataaaacaaatt

SEQ ID NO: 195429 - DNA, 668 bp, Gossypium hirsutum
  unsure (1)..(668): unsure at all n locations
cgttttcattggcactctgcatctctaatttgtttggtttttctttttggctaatcactcgctttctgtttctcgcatctttatatttttctccgatttatacacagtcgaaatcttttctctttgtgatttgcaaagaaaagaaaatgaaggaaagtatgggcaaccctcttcacctcaaatctttgaaccacatctcccttgtgtgtagatcagttgaggaatccatgaacttttatcaggatattcttgggtttgctccaatcaggagacctggatcatttgactttaatggggcatggttgtttggatacgggaatggaatacatctcctgcaatcggaggatccagagagtttgcctaagaaaaaggaaatcaatcccaaggataatcacatttctttccagtgtgagagcatgggagcagtggagaagaagctgaaggaaatggaactggaatacgtccgggcaatagtggaagaaggtggaatcgacgttgaacaactcttcttccatgacccagatgggttcatgatcgagatatgcaactgtgataacctacctgtcgtcncactagccggtgagatgcctcgttcatgctcccgacttaatctgcaacacatgcagcgtcagcagatacagcaagtggttcagcaataggaacgacga

SEQ ID NO: 195430 - DNA, 864 bp, Gossypium hirsutum
ccttctcgtccgctccattcttggattgcagtttctggtctacattctggtgatctttgggtggattcttgttgccggcacatctattttatgtggtgtatttaatctcctccacaatgttgcaggagatgcatgtgttgccatggaccagtgggtccagaatcccactgcacatactgcgctagatgacattctgccatgtgtggacaatgcaacggcccaagagaccttgttacaaaccaagaatgtcactcaccaacttgtaactgtcgtgaatggcatcatcaatactggtgccaaccgccatttcccaccacaattggcacctttatattacaatcaatccggtccattggtgcctgttctctgcaatccattccattcaaatctctcggagcgtatgtgtgcatctggtgaagttagcttgtacaattcttctgaggtttggaagaaatatacctgtaacatatctacaccttccgggatttgtactacacctgggcggctgacccctcaattctatagtcagatgtcagctgcggtgaatattagttatggtctatatcgctacggtccattcctggttaatttgcaagactgcactttcgtgcgcgatacattcacagatatcagtcatgatcattgcccaggtctgcgccgctatagtcaatggatctacatcggattagtaattgtatctgcagctgtgatgctgtcattgatgttttgggtgatttatgcaagagagagaaggcatcgcgtttatactaaacagcacgatgctagagtggaaggcgtaaacaagtcactagaacgttacaaaccgcacttgtttatttccgagtaactttcgttgcattactt

SEQ ID NO: 195431 - DNA, 722 bp, Gossypium hirsutum
gcgaaaacaaattcaacaggttctgaaataaagtggaaaattccaacagaggcgactcctacagaattatatgccagatttatgagtgaactgtacagtctgcttgatggatctgctgataatgctaagtttgaagacgaatgtcgagctataataggaaaccaatcatatgtgttattcacattggacaagttattatataaattggttaagcagcttcaagctgtctcagcagatgatatggatactaagcttctccaggtgtgtgagtatgaaaagtcccggggacatgggaagacaatggattctgtttattatgagaatgcacgtgtcctccttcacgaagagaatgtttatcgattgaaatgttcgtcttcgccgcctcatttgtctatccagctgatggacaatgtcattgaaaagccagaggcatttgctgtttccatggaacctaacttttcagcttttttgcacaatgattttctgacggtgtttcctggcaaaaaggagccacatggcattacactaaagagaaacaagacaaaatatgcaaccctggatgaatacggtgctacatgcatggccatggaaggtgttgaagtggttaatggtttagagaacaagatagcttgcaactcatacaagatttcatatgtgttggacacagaagatttcttctttcgtagaagaaaatcaccacaacacaaatcttcaaatattta

SEQ ID NO: 195432 - DNA, 571 bp, Gossypium hirsutum
cccacgcgttcgatcgattctatcgaaaaccatggaaaaccccgataaaagaggaggggtagtggtgagatggtgttgaattcaagggtttttgagccctgaaagatcaaatctcccatctcccccctccccttgtgtttcgtggtgatcaacagtttagggtttttgttctctttctgaacaacaaaaatggtggggactactgagggagtggattcctctgcctccaacagcaagaagaaccggctccaagtctccaatacccagaaaccccttttcttctacgttaacctcgccaagaggtatatgcagctatacaacgaggtggaactctctgctcttggaatgggtattctttttttgcttttcttcacacttgcattctatttcaccttgttttctgtttagattttgagggatttgaatatgtcatttacattgatagcttccttacaaggaacaaagtgaacgttttgttttataaaacataggttgaaatacaacacattaccttgacatacatacatacatgctatgtgtacgtcatttatggcatgtaatttatgctact

SEQ ID NO: 195433 - DNA, 470 bp, Gossypium hirsutum
gttgaggggtagtcgtgagatggggttgaattcaagggtttttgagccctgaaagatcaaatctcccatctcccccctccccttgtgtttcgtggtgatcaacagtttagggtttttgttctctttctgaacaacaaaaatggtggggactactgagggagtggattcatctgcctccaacaacaagaagaaccgtatccaagtctccaatacccagaaaccccttttcttctacgttaacctcgccaagaggtatatgcagcaatacaacgaggtggaactctctgctcttggaatggctattgctactgttgttaccattgctgagatattgaagaacaacgggctggctgtcgagaaaaaaatcatgacttctaccattgacatgagagaggaatcagggggacgaccagtacaaaaagcaaaaattgaaatactgctggggaagtcagagaagtttgatgagttga

SEQ ID NO: 195434 - DNA, 416 bp, Gossypium hirsutum
gttattgtccaagcaagggggccaaatgttcctttgggaaattctagctttcttaaaagctcaaaagaaaacattattcagttgtggactgctgtcagacagcccaacgtatttcttcccacagtttttattttcttgtggcaggcaacaccacagtcggactctgccatgtttttctttaccacaaataaacttggtttcaccccagaatttctaggacgtgtcaaacttgttacttcagttgcatcgctggctggagttggactgtataatggatttttaaaaaatgttcctttgcggaagatttttcttgccacaacagttactggtacagttcttggaatgactcaggtctttcttgtcacgggattgaaccgacagtttggaataagtgatgagtggtttgcaattgggga

SEQ ID NO: 195435 - DNA, 571 bp, Gossypium hirsutum
  unsure (1)..(571): unsure at all n locations
cgctgcacttttcacaccttcttcacttcagcagagaaaacagaggcaggcagccatggcaaggatcaaggtgcacgagttaaggagcaaatcaaagacagagctgttgactcagctcaaggatttaaaagccgaactttctctccttcgtgttgccaaggtcactggtggtgcccccaataagctctccaagattaaggtggtgaggctatccattgctcaagtattgacggtgatatcccaaaaacagaaggctgctttgagggaagcttatacgaagaagaagtttttgcctcttgatctccgtcccaagaagaccagagctattcgccgccgccttaccaagcaccagcaatctttgaaaaccgagcgggagaaaaagaaggagatgtactttccgatgaggaagtatgccattaaggtataagcttgaaatttgacttaggatggatacctttatgttagtttcaaagtgactactcgaggttattgttgaagttttgtgttgttgaattttcgttttcttcataacattccctattatgtttaagtntcttacaattctgaatta

SEQ ID NO: 195436 - DNA, 452 bp, Gossypium hirsutum
cgagaacacagttccaactggagaaatcaagccagttaaagggactccttttgacttcactgctgagaagaaggcgggccttcatgtccatgaggtaggtttgggttgtgaccgtcactatgttcttggcggtggggaacaaaaattgggggggaaacgtgctgccaaattgaaggacccatccagctcgagggtccttaacgtatggaccgatgcacctgggatgcaattttacactggtaatcacgtgaatggaggtgcccggaaaggaggtgctgtttataataagcatgcagggttatgcttggaaacccagggatttccaaatgccatataccaacctaacttcccatcaactgttgctcaacctgttcgcaagcaccagcacaccatgtagcatgagttgttaggtgagtaagtttgtaaagtctatttgataaagatttgggaat

SEQ ID NO: 195437 - DNA, 944 bp, Gossypium hirsutum
ctcacatggaaacctagacgagcagatttcgcagttgatgcagtgcaagcccttagcggagcaagaggttagggtattatgtgataaggctaaggagatactgatggatgaaagcaatgttcagcctgtgaaaagtcctgttacaatatgtggtgatattcatgggcaatttcatgatcttgctgagctttttcgaattggggggaagtgtccaaatacaaattacttgttcatgggagattatgttgatcgtggttactattcagttgaaactgtaacactcttggtagctctcaaagtgcgttacccccaacggataactattctgaggggaaatcatgagagccgtcagattactcaagtgtatgggttttatgatgagtgcctaaggaagtacggcagtgccaacgtttggaagatcttcactgatctgtttgattattttccactaacagcattggttgaatctgaaattttctgtctccatggtgggttatctccatccattgaaacactggataacatacgtaactttgaccgtgttcaagaagttcctcatgagggtcctatgtgcgatcttttgtggtctgaccctgatgatcggtgtggatggggcatttcacctaggggtgccggatatacctttggccaagacatatccgagcaatttaaccatacaaacagtttgaagctgattgctagggctcatcagctggtcatggaaggatacaattggggtcatgaacataaggtcgttactatatttagtgcgccaaattattgctatcgatgtggaaacatggcctccatcttggaagtagatgattgccagggtcatacattcattcagtttgagccggctccaaggagaggagagccagatgtgacccggaggacacccgactacttcctataaaaacaaactggcattgaatcaacgagtc

SEQ ID NO: 195438 - DNA, 579 bp, Gossypium hirsutum
tcgcccacgcgtccggtgcttctgaatcagttcctcagaaatcaatccatgaattcactgtcaagaatagcaaaggccaggacgtggaccttagcatgtacaaaggaaaggctctccttgtggttaatgttgcttctaaatgtgggtttacggattcaaattacacccagttgactgagctttacaacaaatacaaggacaaagggttggagatcttggcatttccttgcaatcagtttttgaagcaagaaccaggtaccagccaagaggcagaagagtttgcttgcacaagatacaaggctgaatatcctattttcaaaaaggttcgttgcaacgggccgaatacagaacccgtcttcaagttcttaaaagcaaagaaatctggtttcttgggatctaggataaagtggaacttcactaagtttttagttgataaggatggtaacgtcctctctcgctatagcccaaccaccacaccactggccatagagggtgacatcaagaaagcattgggagtggatacgtgaaaatataggaggtggagggaaaatggaaactaaaaacaatgtatataggatg

SEQ ID NO: 195439 - DNA, 459 bp, Gossypium hirsutum
cccacgcgtccgctttagggaagtataatggcttctctgactatggttccaagttcagtggacgaatcccatatggagaaaggtttgcacagactgatggaattgctccagttgggagaggaaggggaccttcttggagatctgaaacgtctgatgattgggatttccctgcgtttaatgcatcaaggaatggacaatttcaatcaagaagagctccagctagcagcggcctggatggtagatcacccaaatcagaacacgagagtgatcagattggtggcaggagaggttgggacaagggtcccgggcctgaaagacttggtgaaggaccttcagctagaagtgtctggcaggcatcgaaggatgaagctaccttggaagcaattcgtgttgctggggaggacaatggagcatctcgaactggacgtgtgcctgaattaaccgctgaagctctaggag

SEQ ID NO: 195440 - DNA, 593 bp, Gossypium hirsutum
  unsure (1)..(593): unsure at all n locations
ctgaaccagagaagaaacgccaagtatcatttcaaggtgtaggaagaactcttggtagcagcagtacttcggcagctcctgaaccaactaccggttccagtcctctcaacacagctctgaacccttcacctggcttggttgtagatgaaagtttaccatcgacctcaattcaacttaggctggctgatgggactcgcatgataacccgcttcaatctccaccacacagttgatgacatccgttccttcatcaattcatctagacctgggggtgcaacaaactatcagttgcagataatgggtttccctcctaaacttcttactgatccaacccaaaccatagagcatgcaggccttgccaattctgtggtaatccagaagttctaggcccctgactgtgtcgaaagtgtcgtatctgcttatctctacaagtgcttattgtaccaagcgaaaaagattccaaatacttgtaacgattatgaaccactactatatactggaagcaggtttttgatggttctttctagctaaataggtatggaatcgtttgaaacanaatagaattttgatcggaaatttacatgtagaacgggc

SEQ ID NO: 195441 - DNA, 695 bp, Gossypium hirsutum
cttgacttatgtgatacttgtgagtggcttgaatttcccggtgcacttggaaacggaggatggtatgccacacatgtaacattagctgatggtaagttcatggtgtttggcggtcgggatttcccgacatacgaatttgttcctccagaaggacaaaaaaaacactattaatgaagtgatcaatttcccattcttgaaagaaacacacgatcccattgagaacaatttataccctttcgttttcctttcaactgatgacaacctcttcgtttttgccaataattgttcggttcttttgaacacccaaacccacacgattatccacgagtacccagtgctccctggtggtgctcataattatccgtcatcgggatgcgcttctctccttccaatcatgcttaaacctaatgaagataggaaatcaatccctgtcgaggttttggtgtgcggtggaacgccgcatgatgcatatacaaaggccgatttgcaacgccctaaggtgtttttgccagggaacaccgattgtgctcgcattgacatcaccaaaaggaatggcaagtggaagatccaaaacatgccctcagctcgtttattgggagacatggtggtgcttccgacgggagatgtgttacttgtcaacggtgccaagaccggttcagccggttgggatgacgccagggacccgaaattacacc

SEQ ID NO: 195442 - DNA, 441 bp, Gossypium hirsutum
tcggccacgcgtccgaaaaaagaaaacagagggcctttaccctctctccctctccctgctcatttcggctagggttcttagaaccttcatcgccgccttcaccgcagcgccaccacaggcggtggttggggtgtaaaccgggctttcaagcccctgtttaaggcgaactcaacagcgaaaacttcctcgaccaaagaagatccaaagaaggaaccccctacgacctcttcgggtcgaatccgacgacggaggagcgatctccgacgacggtcacttcgattcggtcatgggagtgtcagacgcgtggaaggccggtgattggcgccccgagcggtggtggcgcgcgtgagaaggctggtggctgaaggcatgcggctaaaaactttggtggccgctgaaatttttttttaacatagtgggcttgggctattagggtttata

SEQ ID NO: 195443 - DNA, 423 bp, Gossypium hirsutum
  unsure (1)..(423): unsure at all n locations
naatggaggttcacaatccgtttccctgtgttttggcctacagcctgcttaccgccttggcggctttctggccgtggcggacaattataagatcttgcaatcaaaatatgaaggttcatggaggaaaatgtggcttttaagacctcgggtacgaactgatggtctctacctaagtccgaatacttatattcgcgctgcacttgcacagtggaacatcacaaatccagctcacattgtctgctactctcgttactcgagatttttcccttctggcagatttctatacaacaattcctctcataaaaataaaggatgcagcactagttcatgaattttcgtgcatccaaagcagactgtgtttttggtggccattacactttgtccgataacaaggttgaagctgccgtcttgtaccctggcatg

SEQ ID NO: 195444 - DNA, 428 bp, Gossypium hirsutum
cccacgcgtccgatcaagggtgaggtgcaatgactttgtggaccatacactagttggaagcttcaccatggctggtattaaggatatgatcaagttggcattgaaatgcatgagttttcccggggaaaggcggccagatatgaacaccgtttcgattgaactcgaacggatccgtgaaaacgagatggaaatgacaacagtcaaaggtgaaggtactgcaaaaatcgctctaggtagtgagctatttgcttcaaaataaggatccatcccaatgtagttttattaaagcttggggccaaagcttaggataaaaaatgaagtgtttataaagtaggggtagtgaagctgctatcattaattaatggaaatgtgtatatttattttatgggattttattgataaatattaatgtatcatacagcttatta

SEQ ID NO: 195445 - DNA, 716 bp, Gossypium hirsutum
cccactcgtccgcggacgcgtgggggacctaaacgtggggaacagttcaacagccatctatgggactctgccaatctctgggattctgcttgagaagatctcactctcatgaaatcccaatctcttcctcatctgagtcttctcctcgtccgtctcatccattccccaaaaccaccccgcaacactttaacccttcttcttctaaagctacttcatcatccggtattggaaccattttgctcaaaccatatgttgatatcaccaccatttatgatcttgacaaagagttgggcagaggtcagtttggcatcacttatctttgcagatgcgtgtgagagacttggagcagattttgaatgtactgcggggaaatgttgtcgacgtagtggaatatggatatgaatgggaaatagaggatgaagaatcagatgaggaggatgaggatgaggatgaggatgaggaagaccgagaataaaactagtgctgtttttctttccccgttgaactttatttacaggtcacatggaagctaaaatttcctgtaacattaagagtatgccctttggagtgttacctgaactttgttcaggatttagttattctgatgtgatatgctagtgttaatcaatatatgaaagctttatctaggttacaaagggagaagcgagcttgttaaatggtatgtgagtttgagaagcaagtaaaaaaatccttgt

SEQ ID NO: 195446 - DNA, 513 bp, Gossypium hirsutum
aaagaatcatgccaggattgtggtaacgaaaagtttgcatggacttacacctcacaagagtttccgatggctcaggaaaattgtttgcagaatttcaggcttccggaacctgttctttgtattggtggaatattacagattgagctgttgggtagggtccagagacaggaaatgggtagcttatactatatatgggtgtctcatgctcaagttgtggggcggccattatctcctgcattgggtattcagacatttgaacactctgaaaaatttgtgctggaggcactgagttataaacaaccaacttcacctgctcagtccagctccgcacccactttgcagatgcgtgtgagagacttggagcagattttgaatttacttgcggggaaatgttgtcgacgtagtgggatatggatatgaatgggaaatagaggatgaaaaatcacatcatgcagatgaagatgaggattatgatgaagaacacctataataaaactactgctgttttttctt

SEQ ID NO: 195447 - DNA, 590 bp, Gossypium hirsutum
ggggagttccaatgttacgacaaaaacatgcttcaccttcttaagcaacatgccgaagcatgcggaaagccaaagtggggactaggtggccctcatgatgcacccgctaacagcgagttgcctacagcaaacaccttcttcaaggatcatggtggatcttgggaaagtccttatggtgatttctttctttcttggtactcaagccagctcatagctcatggagatcgcctactctcacttgcctcttcggttttcagtgatagtgcagtgaacattttcgggaaagtcccgttgatgcactcttggcacggaacccgttcacatccttccgagctcacagctggcttctacaacactgccacgagaaaaggctacgaagaagttgcagagatgtttgcaaggaattcatgcaaaatcatcttgcctgggatggaccagtcagataagtaccagcttaaggaatctctctcaagccctgaatcattacttgctgaaattggaacagcttgcaacaaacacggggtcggaatttccggccagaactcgactatcggagctcctgatggtcttaagcagatcaagaagaacat

SEQ ID NO: 195448 - DNA, 323 bp, Gossypium hirsutum
cccacgcgtccgcccacgcgttcgggaaggtctcggtgatcaacatagttgtgcttatcctactcgtcatcttctatgtcatcggctgtgccgccgcccgcgcctccgagagcatcgataatgatgaaccttatggcgaggcaaggatgacaaaagcacaacctagcaggattcagttatagaaacctaatggtaatggaggccatcgcttttattcagaagatatgtttgtatgtatgttctaggttttggatccatattttatggtcgggttgacatatgaactcgaatttggtcttggtttaaaagtggatgtctgtata

SEQ ID NO: 195449 - DNA, 477 bp, Gossypium hirsutum
caagaaccacaaagagactcattaaaccagggaattcagctaacagctcgtaacaacaacactgttcggcaatttaatctcccaatggggttgggaaatgctgaggattccacagcagattcatctactagcagtagtaggagagaaagggatggcggagttgttccagtttggtctcctccagcttctagttattcagagcagttcataggtgatgaaaacgatattggtacgagctcatcttatttaccaaggcatccacagtcccaccaaatagtaaactggaggcgtttatctcaaactggataaacacttacgaacaccggaatcttgtagtcagagaatgccagaatggccaatcttgtgggctgatggggtataacatggcttcaatctaccacactcgttatccccaatctaacttgatcagcagttgccctcctatgtgtacgaaacttaagattgatccggctgctg

SEQ ID NO: 195450 - DNA, 483 bp, Gossypium hirsutum
ggagagacattttaaaccaagcgattccagaaacagcacgcaacctgcaacttaacttcccgatcgggttgagaaatgctgaggattccacagcacaatcatctagtagtagtaggagagatagggatggcggagttgttccagtttggtccccgccatcttcgagttaccccgagcaatttataagtgaggaaagtggtatcggtgcaagctcatcttttcttcaagggcatccacagtcccaccaaatcataaattggaggcgattatctcaaaccgggtaaaacgaatgcacgccaaaggcagggacctagtacttgcagaacgctcagtctagtggccggattggacgataacatggcatgttatcaaccccatgtattgtccaccaatctaactcgatctgcagccaactcgggagttgggtgaatgatcagctatccaatgttctaccatacgcatagctctgctgtatagtgtttt

SEQ ID NO: 195451 - DNA, 663 bp, Gossypium hirsutum
aaagctgatgacagcattgttaaacagaaccttgattctgagcatgctggatctgtcaaacactctgataatatcgaacatgctgacaatgaagtggcagttcctgtacaagcgtcaaaggatgctggtaaggatgttcttactaatggctttgatggtacagttcagatgtctgaggatgtaaatgacatcaagcatcatggaaattctaaattagagatggtagaatgtgtttctgattttgtcaagacagtcgttcagtctgaagaagcaaaaattttttactttgtaaagtcgatctttcagtctgaggaagaaaaaaattgccatgctattggcatagatgcgaccaaccaatcttctccatcaactagccaaggtgctcaacatgctcccaatggtcattacgatgttgcatccaacgacagtgaaagtggcccttccagacagggagtcaagatggaagcttctggagaagtgtcatctacaatcgatgtaaatttcattacttacgaggtttgcagtgatacttccaaaagagaaaatgtgcagcagtgcatgtgcaagcctgcagaggttgtctcagctggttctgaggtttgccatgactaacatgcatgatcagagacacatcaactgcaacagtgtcggatatctgaaaag

SEQ ID NO: 195452 - DNA, 547 bp, Gossypium hirsutum
cccacgcgtccgtgcctctcgaccagccatggctcgtcgatattcggaactacagggcaagagcgtcggcagcatgcaccgccactgcaacctgctatgtctgccactgcactactgcagaaagctgcacagatgggagcagcagcaagtaatgcatccttgcttcgcggtctcggtattgtggcgtcgtcagcaccacaagaaaatttacaatggggtcaggcacaagtcgaccccgacaatgcctccattgcagcagggcttggactcgggcttccctgtgacggaaggtcaggattaaaggaactgatgatgggaaccccagtgttcggtcctaagcaaactactctcgatttccttgggttgggggtggctgccggtggcaaccccaatgccagcctgtctgctctaattacccctatcggaggaagatttgatgctgccacggcggcagcatcgtttcgaggtggagattacaccgacaaggacattggaagaagctcgtgatacattgtgaagggttatctattatcaaaatatacggcat

SEQ ID NO: 195453 - DNA, 403 bp, Gossypium hirsutum
cccacgcgtccgatttgaagaagttgaacttcctaggcttaaggaagagaagccgggtcgggctcacacccaatacaaggatttgatatggaaactatggaagaaatctccagacaatcctctaaaccagatgtccgagtgatcgatacaaaattttcctcaggtgtgtggggggttatctgataaactttatgtgcagtgtctgctaagtgctgaaaactaaataaaaaattatttgtagaataatactggctatctattattactgttcaagatcctatatatgtgtttagttagtttaacttggtttgttgcccactttcataaaagattgactgatgtacgcacagaggaatagtgcaaattactgattaattttctattataatgaaagttttacatt

SEQ ID NO: 195454 - DNA, 565 bp, Gossypium hirsutum
tcccacgcgtccgctcctctgctcttcttaaccccccccccctctctctcctttctctccttcgcaattctccaacaacagatatgtctactgtaatgagacctgtgtctctggttgactcaacttgccttgtttctttgccttcactcttcaccacttcttccaagcttccatctcttctctcacttccttcaaagcccatcaaccttgtcctcttatcttcctccactcagccaaccttatcctccctcaaaacaaaaacccatttcccttccctcgttgcctttttggcccagacgtcagattgggctcaacaagaggaggaaaacgacaccaccctaaccattgatgaccaaggaactgaaagtgaaggaggggaatcaacatgggaaaatgaggagagtgatggggctgaagcaagtttgtctgattgggaacctcaaggtgaggttactggtagtggttcagaagaagaggatgcttccgaaccttctgaggaagctaaattgttcgttgggaatctgccttatgatgttgatagtcaaaagcttggctatgctttttg

SEQ ID NO: 195455 - DNA, 549 bp, Gossypium hirsutum
ctttgattgctgaagaagtgtgctttcttgatgtgattccagctataagaaagttcttgaaggatacaattgagccatggctggatgggacttttaatgggaacggtttcctgtatgaatcgaaatggggtggaattgtgactaaacaagggtcaacggattcaggggcagatttcgggtttggagtttacaatgaccaccattatcatattggttacttcctttatggaatagctgtcttgaccaagattgaccctgcatggggaaggaggtataagccccaagcttattcacttgtggctgattttatgaacttcggcaggagatcgaattcaaattatccacgagtgaggtgttttgatttctacaagctccattcttgggctggagggttgactgaatttgcagatggaaagaatcaagaaagcactagtgaagctgtgaatgcatattacgctgctgcactaatggggttagcctatggagacacccatcttgttgcaactggttcaacacttacagcactggagattcaagcagcacaaacat

SEQ ID NO: 195456 - DNA, 497 bp, Gossypium hirsutum
cccacgcgtccgaccaagtactgcacttatagatcgtggcattgcattacacacaatgattaggctcgttacaatgggactaggtggagaaggatacttgaatttcatgggaaatgaatttggacatcccgagtggattgatttcccaagaggtgaccagcgtcttcctaatggcgtagtaattcctgggaatggttacagttatgagagaatgtcgacgtagatttgatcttggggatgccgactatctcaggtatcgtgggatgcaagaatttgatcaggctatgcagcatgttgaagagaaatatggtttcatgacttccgagcacacatatatatcgcggaaggatgaaaaagatagggtgattgtctttgaaaaaggcaacctggttttcgtattcaacttccactggaataacagctattttgactaccgtgtggggtgtgcaaaaccaggaaagtacaagattgttttggattcagatgatccgttattc

SEQ ID NO: 195457 - DNA, 447 bp, Gossypium hirsutum
tttttcaagcaatgaatatgaaccatctcatcgagatatcctttatgctgaagggatcacccaagggaatggtttggcattcatagagttttctcttgatgatcgtagtccaacgtctgaaacctacactgacaatttggaagctccatccctccccctgaccaagtatcaacttataagggtaaatgcaaaggggatgaatgagggatgcaagtgggtggaaatgtttgaagatgtgcgatctgtagtcttctgcgtggcccttagtgattatgatcagatatcgatatcaccagagagcagtggcagtggaacgctacttcaaaataagatgttgcagacaaaggagctatttgaaacaatgataaggcatccttgctttaaggataccccattcgtgttgatactaaacaagtatgatctgtttgaggacaaatcaatcgggtg

SEQ ID NO: 195458 - DNA, 544 bp, Gossypium hirsutum
accgcaactggaacccgaaaaacaagaagagaagaaggaaggcgaagagaagccagcggaagaagctaagccagaagaaaacccggataaaaaagaagaagaaaaaccagcagccgaagaagaagccaaggaagaaggaaacaatgaagctactggtgagaccaaggaaggagaagataagaaagaagacaacaatggcagcaacaatgaggatgaatctatgaagaagatgatctactattatcagccgctctacgttattgaacgaatgccaccggctcctcagttgttcagcgatgaaaatcctaatgcttgctgcatttcatagtcaaatgatcatactagttgacagtatatagtgtatatgtatatattttgttgagtccgtgccactggtaatgagaattttagagcaaagcggtggacggatcgcatgatgatcaatcagtgaatgtggggaactcgggataatcacaatacaagtgaggctaataataatatgattattatgtattaaaatgtatcatattggtattataatatg

SEQ ID NO: 195459 - DNA, 593 bp, Gossypium hirsutum
gcaatgagtttggaatcaaagttactcttttccatggtcgaggagggagtattggtcgtggtggtggcccaacttacctcgccattcagtcccaaccacctggttctgtaatgggcacacttcggtcaacagagcaaggggagatggtgcaggcaaaatttggtttgccacagattgccactagacagctagaaatatatacaacggcagtgctgcttgcaactctgcggccccctcaaccacctcgagaacagaaatggtgtaatctgatggaggagatctcaaaaatcagttgccagaactaccgaagcacagtttacgagaacccggaattcctggcttatttccaagaggctacaccccaggctgaattggggtatcttaacatagggagccggccgacaagaagaaaagcaacgacaggaataggacatcttagagcaattccatggatatttgcatggacgcagaccagatttgtactaccagcatggcttggggtaggagcaggtttaaagggggtatgtgagaagggacatacggaagacttgaaagcgatgtacaaagagtggccgtttttccagtccacggtg

SEQ ID NO: 195460 - DNA, 1651 bp, Gossypium hirsutum
tcttctcacgcgtccgcggacgcgtgggagaaaaaaaaaggaaaagaaaatcaaagttatttttctttcaattgagcccttcatttttctctcattttctttcttcccaaacaacaaattttaaagaaaatgccaacagatacaagcaaacccatgaaattagaacgatacaatagctatattcgtaaagtccatagcacgaagctgttgaatgcttcatctaaatttctatttcgtgttacccttcttattgctttagttttgatcttgtttttcaccattaattaccctccactttcggataatacccacagtgcacctcaccatcatcaccgtcatagctttctttcaacttcacttttctccggttcttccctcgttggtggtgcggcgtgggagaaacaagtccgtcactcttcgactccacgtagggttaatgggttttccgttttggtcaccggcgccgctgggttcatcggttctcactgttcacttgctttgaaaaaacgcggcgatggggttttgggattggataattttaacgattattacgatccttcgttgaaaagggcgaggcagaatctgttaagcaaacaccaaattttcatcgtcgaaggggatttgaacgacggcccgttgttgacgaagctgttcgacgtcgtcccgttcactcatgtgcttcacttagcggcacaggccggtgtacggtacgccatgcaaaacccacagtcgtacgttaagtcgaacattgctgggtttgtgaacttacttgaagtagccaaagcggtgaatccacaaccggcgatcgtttgggcttcgtcgagctccgtttatggactcaacactgaaaacccattctccgaacgtgatagaactgaccgtccggcgagtctttacgccgcaacgaaaaaagccggtgaggaaatcgctcacacttataaccatatatacggcctttccctcaccggacttagatttttcaccgtttatggtccatggggaagacccgatatggcttacttctttttcactaaagatattcttcaagggaaacccattgatatctacagaacccaagatcaaaaagcggtggcgcgtgacttcacttacatcgacgacgttgtgaaaggttgtttaggagcgttagacacggcggaaaaaagcaccggtagcggcggaaaaaagaaaggaccggctcaattaagggtttacaacttgggaaatacttcccctgttcccgtcggccgattagtctcgattttagaaggattgctcaacacaaaagccaagaaacatgtgatttcgttgcccagaaatggtgatgtcccctacacacatgccaatgtcacgttagcttacaaggattttgggtataaacccaccacggatttagctgctgggttgagaaaattcgtgaaatggtacgtgagttactttgggattgaatcgaaacgctcaaaagaaacccaacatttcgatgaatccagttaagaacaagctttcatattttcatttccatggctgctgcccggtcctttttaatttttccttgttatttaatggttatattgatgtaaaaaagaaaaaccaaaaaaaggaaagggatcaaaattgttgctcctgtcgttcatgttgttttttgtgttttttt

SEQ ID NO: 195461 - DNA, 419 bp, Gossypium hirsutum
tctttaacttttattcttccttttctgggtgaatcaagttctttaaccatcagtgaccgtagcagcatactaaaatatgggtcgtggtctgggatccaacaccatgtctccggttatggcacgattgctgttgctgagtatctgcataggaatattggcgaaggcggcatcagcccaagtgaagcccccatatgcgttggcctcaaaactggggggctattgcggcaagagtaccatgtcctgctccatgaaatgcggttatctcggctgccttgcaggctgtgtgacatctccctcgatcggatgcggcactaagtgctttttcgaaaacaccagttgccaatttggctgcaccccctttgatattcgaagccaaacagccccgtgtaagacctaaaaggatatatatatatgtgtgt

SEQ ID NO: 195462 - DNA, 1329 bp, Gossypium hirsutum
  unsure (1)..(1329): unsure at all n locations
aagggtaaaatccctgataagctttcaaatagcctcagtgcatttaatgtgtccaataatgatttgtcgggtcctgttccagaaaatttgagaggcttccctaggtctgcattttctccaggaaactcattacttattttccccaagggcatgccaccgacaggcttgagtcaggatcatacccttgatcatgtgagacatcacagttcaaagggtagtattagagtagcaattattgttgcctcagttgtagcagctgtaatgattgtttttgtatttttggcatgtcaccgagcccaacttaaagaatttcgtggaagatgtggatttagtgacacaactactggaggcaatgcaaagtcaggtgggcttgcacgaccctcccgtttcaagtttcactcaactgctcaggcaccacaaacttcattaagtttttcaaatgatcacttgcttacttcaaattctaggtcagtttctggacagcaagaatttgctgctgaaattgttgagcatggtgcagccgagagagtgacaacctcttcagcatctgtgaatcctaatctactagataatgacccagtatcatctgggaggaaatcctccccaggctctccattagcatcatcaccacgtgttatagaaacatttgaacagcctgtgacatngggatgtttactcaccagatcgtttggctggagaattattctttcttgatacttcattatcattcactattganagagttatctcgagctnagcaagaagttcttgggaagaggcagccatggaactctttataaagctactctgcgtaatggcatatgtgcggtgaaagtggntggcgtgtaggaactggttaaacataagaaaagaattgtanngggaagttaaaagatagggtctccgtgaggcattctaactttgctccagtccgagcatactattggggaccaagggaacaagaaaggcttcttctatcagattatatccagtgtgatagcttggctttgcatctctatgagactactcctcgaaggtaccacccattatctttcagccaaagactgaatgtacctgtggaagttgccaagtgtttgttacaccttcatgatagagggctgccacatggcaaaccttgaaacccgacaaaatataactcctctgctgaccctgattaccatgcttgcctcaccgattattgtctgcaccggctgatgacaccaactggaatcgctgagcagatattgaatctgggagcccttggatatcgtgctcccgaacttgccttcacatccaaaccagtcccatcttttaaagccgatgtgtatg

SEQ ID NO: 195463 - DNA, 462 bp, Gossypium hirsutum
tttttctacttattttttgtgcagggtagtgatgccttgtcaatggctgaaggacaaaatgaaatgcaaaagcttttcaaggaatatggcgtgactccatttactctgctgaaagggatttttattcagggtcccatctttgtgtctgagtcacaaaaaagactacctacagaagataaaagtggtgctggtatcagaattcatgataacaatgaaggagaggaatccgcggcaaggggaagtgtcactgggagatttaatatggctcaaactccttggggaaacatggtggcctgcagtggtatgcctattgctgtggttgtttgatctagcaactagttctctttttcggccttttaaagattaattagcatttggagcagacttatgtagttctgtggattttatttgtcgatattgtttcaggttgtattattaattgtgttattaatttattatttt

SEQ ID NO: 195464 - DNA, 513 bp, Gossypium hirsutum
aaggtttcaataattcgaacgcggtgtcgagttacgcaccaagcaatcggctcaacgcgcgtagatctgcgatgacgaactcgctggtgaggattggtggagtcgaaggagatctggttaagagagcgttgtcggctttgattaggccttcctctcaccagcagcgtcgccgagcagcgttccagccgaggccgagccggctttccgtgatgtctaaagcggaggatttatgaagattccttttgcggtatgtgtaatcttctaatgctttttggttaagtctccaagattttccggtgataggggatcgagcttcggagtaacgccggatggtagcgttgcagtcagatttcggcgtagaggttggagatctggacgaaggattcgggacggatatgatttttagtgtactccgggtgaccgaaaccgtaaaatccgaggaacaaattatcatatagtttgttggtgtaaatacatatatttgcaggcaatggtaaatttgaggagcttttg

SEQ ID NO: 195465 - DNA, 526 bp, Gossypium hirsutum
ataattttttatagaagtttcttgttttgggctgtaataaataaatattaggattgaagctagaataatgtaatagtttataggcgcttcttactgagaactcctctgaaggttcctctttccacacctgaaaatcagcatgttctgtctcggctaaaggaatctttagaattttttacgctatgtttgattgaaaggaatccaacaatcagtccagacatcaatctcagtccctcattcgaccctctaacacaactcatcctgaataagccctcgcgctgcccagatgctcttccaggtatatgaagtgttaagagctcggaggtcggatttggtcggagacacatcacactgtcaacctcaggatttcggtatataaagaaactttattttggaaatcaatggcatgtataagctaacaaagtaaatgttaacgtgaaatgaatgtaaagttagccattagtatggttaacaaacctggttttagatatgtgatgacgttatcttataaatatgcatgaattta

SEQ ID NO: 195466 - DNA, 541 bp, Gossypium hirsutum
ctaacaagccgctgtcgctgccggtgccgctgcctgtgcctctgcctccacaccttccagcgtcttacgtcatatatctattcaatccatagctccccatttcttcgccgattctctctcactctcactctcggtctcttttcaaaattttcctgtcattcttttttagctttgggtaaccacaggccaaaaaacacacacgctataataggaagagagttttcgtgagagagaaaccctaagtttttctgccgtttctggtttttgtgatttttgaaatccgctgcttcatcggagactcatttcagataggacttccagaggactggaataagcactttagtcgctgtgggagtccgagatattagtgcaacttggttctgcaacaggtgtctataaaagccttgtaaagtacttggttggagttctgcaagtttgtctacattgtcttgttgtatgtagctgttgcgatctgataagttgaagagtgattatttgtttggttcataaaatggctattctgcagaagcaggcagataat

SEQ ID NO: 195467 - DNA, 415 bp, Gossypium hirsutum
  unsure (1)..(415): unsure at all n locations
gatgatttatgcaggatattttctgctttgcctatggtggtcaacaacgggtcagtggagctgatctatcaaggtgtttgccttggcaaatgggtgtgcgttcaaaaaagttaggtggtgatggtgctgtatgcatgtgtaagccctcaatgctactagcaatttctcaaagtgcagtagtcctgaaacgttggcgggatagtaggagagaatgtagaaagttgtgcttttgattttgttaacatgtggtttggtacttcctactcttatgctagtcggatcatggtggaactgtttcaagggttgtagctttgtgcaagaaatttattttttgattatgctggctcatcttttgtcatatgaataaataaaggcatctgacatttaaaaagaaanaataaataaatattattta

SEQ ID NO: 195468 - DNA, 729 bp, Gossypium hirsutum
aggaaaagatgaagaagcgaagaagaaggaggaatctctagagaacgacttagctaacatgtgggtgcttgttgctaagttgaagaaagaggtatctgctacacttgagagtaatacagataagcaaaatagtcatggaatggataatgttgaagatccaaaagcaaacaacactgagagtaacaatgtcctgaaagagcgacaagtttcagaagtgtcatcaaaaccagccaatgaaatacccaaggaagaacccctggttgttcggctaaaggcccgaatgcaagagatgaaggaaaaagagctcaaatccctgggaaatggagatgccaattcccatatgtgtaaagtatgcttcgagtcaccaactgcagcaattcttctcccttgccggcatttctgtttatgtaaatcctgctcgcttgcttgttccgagtgtccaatatgtcgcacaaagatatcagacaggctttttgcattcccttcttgatacacaacctatttctaccctcctaatgaaggggttcgtgaccacctgtttgatattttcaatgtgagaagcgggtgcaattctttcattagtctgtatgtaaacagtctaaaaaggtatatccatatcaatagtttgttccctagtctctactcattaaaaggctgtaaaaataagaacgagattaaaggttaaaaagaaaggaagaaaaaaagaaaagaaaagtgaattcactattt

SEQ ID NO: 195469 - DNA, 569 bp, Gossypium hirsutum
aggcagactagattctccggtttctcaagttagatcacagttaaaggattcaggaaatggagagaaggcctctgtagcaaaactctttgaacaagtgggattgcaaaagatcttgtcactgcttgaagctgaagatgctgatgtgcggattcatgctgtgaaagtagtagcaaatttagctgctgaggaaactaatcagcagaagattgtagaagctggaggtctaaagtccttgctgatgctgctgggaagctctgaggatgaaaccatacacagagttgcagctggtgcaattgccaatcttgcaatgaatgaaaaaaaccgggaacttataatgtctcaagggggcattagcttattatcaacgactgcaagccatgctaaggatcctcatacacttagaatggttgctggggccattgccaattctgtgtggtaatgataagctgcttactaatctaagaggtgatggtggtattaaggctttgcttgaaaatcgccaaatgtggacacttcagatgttcttgcctaaggtgctcgtggaatagtgaactttgctaattgtgagt

SEQ ID NO: 195470 - DNA, 919 bp, Gossypium hirsutum
cgagactatagtaaaccaagtgaaatgtcgaaggaagagatgaagatcggtagaagatttgagggcaaagtcgcaattgtgacggcttctactcaaggcatcggcttcagcatcgccgagcgtctcggcttggaaggcgccgccgtcgtcgtttcttctcgcaaacagaaaaatgtggatgaagcagttgaaaagcttaaaaataaaggaattcaagtgttgggagttgtttgccaggtctcaaatgcgcaacaaaggaaagatcttattaacaagactgttgagaaatatggaaaaatagatgtggttgtatcaaatgctgctgcaaatcctactgtcagtctattgttagaaacaccagaatctgtccttgacaaagtatgggaaataaacgttaaagcaagtgtacttcttctacaggaggcagctccttacttgcagaagggttcatcagttgttcttatttcctcaattatgggttaccaccctcagattgctatggctatgtatgggataactaagacagctcttcttggattgacaaaggctctggcaaaggagatggcacctgatacccgagtaaattgtgttgctcctggtttggttcctaccaactttgcggcattcctaacaaaagatgaggtcctgaggaagacggctgaggaaatcacattacttggaaaacttggcaccccgggggatatggctgctgcagcctctttcttggcatccgatgacgctagttatatcaccggagaaactcttgtgatggctgggggagccccctcaagactttagtaagtttctaaaggttaatattacattaacagcaacaatgtaatattccatcaaaattattgcatttgttttgataaaaaacttttcgtaatgcaagatttgtgtcaattttattctttaa

SEQ ID NO: 195471 - DNA, 411 bp, Gossypium hirsutum
  unsure (1)..(411): unsure at all n locations
tggactttntgcatagtataagacggagataattggatccatgtgccgccgatcaagggttctctcgtcatcaacgtcggagatgcattgcagataatgagcaatggaaagtacaagagtgtggaacatcgtgtggttgccaacggaagcaataacagaatttccgtccctattttcgtaaacccaagacctagtgatatgatcggaccattgcccgaattaatcgaaaacggtgagaagccgatttataaacaagttctttattcagattacgtcaaacattttttccgttaagcacatgacgggaagaaaacagttgcgcttgctgaattataaatattttaatcccatagttgtaaacagtcgtagatttgaaaacaataaattgcaagcataaaagctgnttattaa

SEQ ID NO: 195472 - DNA, 372 bp, Gossypium hirsutum
cccacgcgtccgcccacgcgtccggggggaatcacaagaaaaaaagacattttggcacttttatatacaagcaaagtttccagggaaacaaacactcaagggtaaattttatattcattttgtagtcttcatggttctgtaataagtatggctgtctttagtgtttgagctgagagaatcagaaatggccgtaatgtatgtttttctatttaattttatttgaagtattcatgtccaacacattgagaggaatatgaaggatatttcaaataatttggttgcgaacaaaaaaaagaaaacacaaaacctaaagaaatgatcagatcaaataatagaataaaaaaaaaatagagaaaaagacaataaataaac

SEQ ID NO: 195473 - DNA, 443 bp, Gossypium hirsutum
cccacgcgtccgatcgcaggggctcagcgcttagttgaaagacactgtgcctcaaaagagatctgagcccagccctagaaggaggattgcttctatcaccagtaggcgaacagagctttcaggcatcgggatcatagtgtaacctatgactaagctccgtgactagctccattgtcatcatctaagttcttcttcatcacaggccaaccaaaccgctcgaccatagggaaatgaggaacccatagcactggactgaagtgcctgccccctcttcatcttccgagtcatgcccggaatgagtactttgcccttgagatctatccaaagcaaaagaaagaggaaaagagttcagctgcttgccgagctgtctaaaatgactaatagaagctcaatcgaacagaccttgcctaataaactggaatggggttagcccagaacacgcg

SEQ ID NO: 195474 - DNA, 558 bp, Gossypium hirsutum
tttttatagaagatcatacaagtttattagacaaagaagtgaacaagcaaatatgaagggttgtaaaaggttcgtgttgattgctgttggaggtcttggatcttgggatgagccactgaattctggtgaaatctatgattctttatcaaataaatggagtgaaatccagaagctgcctatagactttggggtcgtttgtgctggtgttgtttgtaatgggatgttttatgtttgctctgagaatgacaagttagcgggctatgacatagaaagaggtttctggattggaatccaaacctctgcatttcctccccacgttcatgagtactatccaaaacttgtttcttgtaatggttccttgtttctgctgtctgtctcttggtgcgagggagatgggcatattggtcggagaaacaaggccgtgagaaaattgtgggagctagatctgatgtatcttacatggaccgaggtctcagtacaccctgatgctccaatggactggaaccctgtttttgttgctgacaggaacttaatatttggtgttgaaatgttaaaata

SEQ ID NO: 195475 - DNA, 503 bp, Gossypium hirsutum
cccacgcgtccggtaattcgcagggttgcaacagcagcagctgggagaaaagacgatccaaaacccttcctaaaacgagcaaaaatagtaagagttatattaatggatccgtgtccttttgtacggatcctggtaggtaatttggccctgaggtttccactttctacaaagccctcgctttcaaggatccatccttctacttctccatgttactgcaagatcaaactcaagaacttccctcaccaagtgggttcaatccctttgatccatgcaaacacccaaaacccagaaagctgcaacttctctttgcagaaatcgctcgctgcgtgtttcagtttaagcaagtcccaggtggataggatcatctcgaaagggggttcatcatataaactttccatcgaggtttacgctgaccctgatgacagtacctgcggattggcatctgggaagttattggggaaggttacggtgcccttggatttacgtggagcggaattaaagcc

SEQ ID NO: 195476 - DNA, 411 bp, Gossypium hirsutum
gaaaaatgatcacggcaacatacatgatacctcaaacctacgaggcaaagtttccagatagtaacagataattgaatggtgtttagtaaacctaaactgttgaaatcaagagggtctaattccccggtgaaatatatatatatctatgtcatacgcgcgcgcgcgcgctcacatatatatattactgagatacatcagcaggttgggacttgtatggggaaattaaaaaaatatttggaattagatgggtactgtttctactaattttatattcccatgtttggttaatgtactagtggttgccttttgcctttgtttagttggagaagttataaagtatcaatgtattggtatttttttgaattgtaatatgcacaatacaattaaagtataaatacaagtccgaatttt

SEQ ID NO: 195477 - DNA, 586 bp, Gossypium hirsutum
cagacatccagatgttctttcccaagttgctcgtggaattgccaactttgcaaaatgtgaatctcgtgcatctactaatggtatacgaagcgggagatcacttcttatcgatgaaggtgcacttccatggattgtgcaaagtgctaacaatgatgctgcacctattaggcgacacattgagctcgcactgtgtcatttggcacagcatgaagcaaatgcaaaggacatgatatccgggggtgccctctgggagctggttcgcataacacgggactgttctcgagaggacattagaagtcttgctcgccgaacactgaattcgagcctgttatttcgatctgaaatgaggcggctaaggatagagttgtgattgaggtgaagttttgggcctttttgtaacctgttctaaaagtgggatgtcaggaaaacaacatatctcgacactgtatagtcttaaaggtcgagagaatggtgtaataccaccctcagcgctgaaagagcttccacaggcttatgtaaatgaatctggggtgggtttgtagtagtattaattatttatgctaggttctttcgttgagcttaacgt

SEQ ID NO: 195478 - DNA, 724 bp, Gossypium hirsutum
ggcgcaacgattatgcgttgctctgtgaattgattttcagattcggactccaatcaagtgaagtgctacatccagcggcaaaggtttttcatttcttgagatcccaactctgatcccttctgaaatctttccttttacagttctcaccaagatgttcaaaaaattttcatctgaagatgtgtcttcacaaaaccaagtcaaagcatctgtgcagcggaaaattcggcaaagcattgctgaggagtacccaggacttgagcctgtgttggatgatttgcttccgaagaaggcccctttaattgttgtgaaatgtcaaaaccatttgaatctggtattggttaatagtgttccactattcttcaatattcgtgatggaccatacatgcccactctcagactccttcaccagtatccaaacataatgaaaaagtttcaagtggatcgtggtgcgataaaatttgtccttgctggtgcaaacataatgtgtcctggtcttacatcccctggtggtgctttggatgatgaactggaagcagaaactcccgtggcaataatggctgaaggaaaacaacatgctcttgccattggctttaccaaaatgtcagctaaagacataaaggcaatcaacaagggaattggggtagacaacatgcattatctcaatgatggcctatggaagatggagaagctagaatgagtaaatctcgggggaaaaaaacagcac

SEQ ID NO: 195479 - DNA, 409 bp, Gossypium hirsutum
  unsure (1)..(409): unsure at all n locations
ctttcgtgcagcaattgattcctgtttgactagaaaagccaaatcccacaagaaaataagcggcattgttcttttggtcctcgcttaaagacccaggtgaaccacacccaaatactctgaatactattgttaagcacccaagagaagtttaaatacctccaaactgctgtccgatgtagagacatacttctgaaaacatgggtgcgtggcttcctctaactgccgacatctggggcaccaggcttcatttgcaactcgcttcaatttcagattagctagcgtagggatataattccaggaaattttccagattgtaactttaattttcgaaggaatgtgtaaatcccgtagttttcatgtgnnnnnnnnnnnnnnnnnnnnnnnnnnnnnnnnnnnnnnnnnnnnnnnn

SEQ ID NO: 195480 - DNA, 512 bp, Gossypium hirsutum
cccacgcgtccggccacgcgtacccaaatctttcgtctcttaattttggttggatatcgaagatgtcaggaagaggaaagggaggcaagggtcttggcaagggaggagctaagcgccaccgtaaggtcctccgcgacaacatccagggcatcacaaagccggcaattcgacgccttgcccgtaggggaggagtgaagcgtatcagcggcttaatctacgaggaaacccgtggagttctcaagatcttcttggagaacgtcattcgcgatgcggtcacatacaccgaacacgccaggagaaagacggtgactgccatggatgtggtttatgcactgaagaggcagggtaggactttgtatggatttggcggttagttgatttagggtctaggttttaaaataggggaagaattgtaggactcagttaaagttacaaggtgggttttgttgttcgctgttataatttctaattcgcatcatcaattgcatattttattgaattttgaaggtcat

SEQ ID NO: 195481 - DNA, 432 bp, Gossypium hirsutum
gtttcttaattttcattcgatatcgaagatgtcgggaagagggaaagggaggcaagggacttggcaagggaggagcgaagcgccaccgtaaggtcctccgtgacaacatccagggcatcacgaagccggcgattcgacgcttggcccgtaggggaggagtgaagcgtatcagtggcttaatctacgaggaaacccgtggagtcctcaagatcttcttggagaacgtcattcgcgatgctgtcacctacaccgaacacgccaggaggaagacggtgaccgccatggatgtggtttatgctctgaagaggcagggcaggactttgtatggatttggcggttagtcgatttaaggtttaggtttgtaattaggggagccctggtatggcttagtcgaaactacaagttgggtcttggtgttcgatgttatgattt

SEQ ID NO: 195482 - DNA, 763 bp, Gossypium hirsutum
tgtgatctgatgacacagataaagaagaaaaagaagaagccataagaaggggtctcggggttttcgatttcatcctagatggatgatgttatgagtcgggatttaataagtgacttgcctcaaagcattatagaaagtatcctcacacgtttaccaatacgggatgctgtgaggactagcattttatcaagtaaatggaggtataaatgggcaacacttactcaacttgtatttgatgaaaagtgtgtgattttatcgaatgatcgatgtaaagttgaggatggtcttgtaaatttcatcactcggactctttttcttcaccaaggcccgattcataagttccagctaacgactacgcacttgcagtgctgccccgacattgatcaatggttacttttcctttcaaggaatgacatcaaagagttggtccttgaattgggtgaaggagagtggtttagggttccttcttgtcttttcaactgcaaaaagttgacccgtttggatcttttccgctgtgaattcgatccgccccctagttttaaaggattcttgtgcttgaagagtcttaatctccaccaggttttggtttctcctgaagcaattgaaagtcttatatctggttgccctcttcttgagagcttagcattgtcctactttgatagtctagcgcttactatccgcgctccaaatctcaagtttttgtgtctggaaagtgaattcaaagacatttgtctggaaaatactccgcttttagttgcaatgt

SEQ ID NO: 195483 - DNA, 1044 bp, Gossypium hirsutum
  unsure (1)..(1044): unsure at all n locations
cagataagtattttctcctttctcaagcgcattctttgctaatctgtgagcatccatgttctccgatctatgggtatactgaaaaatgagttcttgaaaatcggctttcttgttctgaatatctctaataatggctccgatgactgatttatctgtggaattctcctggcattttttattactgtttttgaatcccccataagaattaccgactggatccttagtaaaacccctagctttgcaccgtctaaacatgcatatgcctctgccgcaaaagaagaaggaacgtttctatggataaccgtctttaaaaccttaacatttcccctcagatcccgtcctacaaggccagacgctgaactgaaagtttgctgtcgtacgctgcatcaaagtggatcctgactctcgaagcatatccaccataacgcgtaacagaatagtagacattggcccttgtcgctcctcttgaagacccaggacattctcggaagacgtggaggctaccttcaaccgcagaactgcatcgaggacatatgtcatttgaaacaactctcctgattctgaggttaacaaagtttggtaaaaaatcccaagagatccgccagattgtaaatgcaatttttgatggcatctgtaggttccacagtttcttgtaaaattcttttatttcggtttgtaataaatagtaactaggatccgagttagcaatttgtaatagtttataggcactacagactgagaacccaccaaataattctcctttccaaacctgaaaattttcatgctcaatctctacaaggggaatttgaagaattttccgagcaatgtcctcttgaaaggtattattaaccagatccaatgtacattctctattagaagaatcnnnnnnnnnnnnnnnnnnnnnnnnnnnnnnnnnnnnnnnnnnnnnnnnnnnnnnnnnnnnnnnnnnnnnnnnnnnnnnnnnnnnnnnnnnnnnnnnnnnnnnnnnnnnnnnnnnnnnnnnnnnnnnnnnnnnnnnnnnnnnnnnnnnnnnnnnnnnnnnnn

SEQ ID NO: 195484 - DNA, 604 bp, Gossypium hirsutum
gctcttctcccacaggaataagcaggtatattttgggtcaactctgtttgctttacaacagctatctggtataaatgctgtgttttatttctcttcatctgtatttaaaagtgcgggagtgccttcagatgttgcgaatgcgttcattggagttgctaatttatcaggatctatcatcgcgatgcttttaatggataaacttggaaggaaaatgctccttttgtggagcttctttggcatggctatatcaatgctcgtccaagttgctgctgcaaatacttttgtgtcaggctctgcatctttatatctatcagttggtggcatgttgatgtttgtcttaacatttgcattaggagctggtcctgttccaagtctcttattaccagaaattttccctagtcgaatcagggcaaaagctatggcaatttgtatgtcagtacactgggtaatcaatttcttcgttggcttgctcttcctgcgtttgctcgagcaacttggaccgcaactcttatactcgatgttcgcaagcgtttgtatgatggctgtagtctttgttaaaaagaacgtaatcgagaccaaagggaagtctcttcaagaaatcgag

SEQ ID NO: 195485 - DNA, 584 bp, Gossypium hirsutum
cccacgcgtccgaaaagtgagaacgaaagaaatggcaaatattcccataatcgctcttttctgcttcaccatttttgtttcgtcctcactcaatttcgtctatggggctgaaaatatgagctacgtcgtcgtaggccatgtttactgtgacacttgccgtgttgagtttgagaccaaactcagcgaacccatcgctggagcagtagtgaaactggaatgcaggaatcgtacagacaatcaccttaccttccagagccaagaaatagtgactgacgaacgtggagactatcacattgtagtggaaggcgattatgaggaatcagactgcgacgtcgccttggtgaggagtcccaacccggattgcaatgatccctccgaaatgtggaggatatccagggtggttctcaccacacttgacggcgtcagcggtgaacttcggtttgccaacaatcttgggtttaagaagaaggttgctcttcctcagtgtactcaagttcttcaagagataggctattatgagcttagccaagaagctggagacattgccccttggtcagaactataatatgtattttcacttcaac

SEQ ID NO: 195486 - DNA, 409 bp, Gossypium hirsutum
  unsure (1)..(409): unsure at all n locations
accacgcgtgcgcccagcgtccgcccacccctccgaatccattcaactcgttgctgaacatgctgctgcaaagaacggcgttttcatgatgaatctttctgctccattcatctgtgagttctttacggatgtgcacgagaaagctctaccgttcatggattatgtcttcggtaatgagactgaggcccgaacattttcaaaggttcatggttgggagaccgataatgttgaggaggttgctctaaagatttctcaatggcccaaggcttccggaacacataagagaattactgttatcactcagggagctgaccctgttgtggtcgctgaggatggaaaagtgaaaaaattcccggttatcttgttaccgaaagagaagttggttgataccaatggagcangggatgca

SEQ ID NO: 195487 - DNA, 406 bp, Gossypium hirsutum
ttctcgtctctgcatcaggctagggttcaacgaataaccgagaaggcggcatcaagtttccttttatcctatcgccatgagagccaagtggaagaagaagcgcatgagaagactgaagcggaagcgccgaaagatgagacagagatccaagtagacagaaccaccagcccctctgttatacgaggtttctcaatgtcttagctaatatcggtgtacttttagggtccacttagttatctgccatttttatttcagttttaagttttttttttctcttgggtttctattgtctttcaagttggtgctaacccggcagtgggatgatgtatcatcgttgagaacagtgaattgcaaaaaaaaaaaaagcagattttaagattggagtttaatttgatttttctttttt

SEQ ID NO: 195488 - DNA, 480 bp, Gossypium hirsutum
acgcgtccgcccacgcgtcctagtgtacagcccgtcactcctactgaagtgaccatggaagaaaaaggctccaatgagaatatattagaaaaagatgctcacccgtcgccattggcagataaggagcactcggagaaggcaaataggtgtgaatttgtacaagggctattattatccaccatctttgatgggggcttataatcaagacagaaaagagtagacggttggtgacttccaaatttctagcgcacatgccgttgcccgtcagccatgttcttgcattgaacattctgattcttcaatatagaagctaggatagattcaagaatgtaatgtaatttatttaactggttgatgcttatcaattaggccacaacagagttcagactcttgtatttttcccgtttaaagcatcggttcataaatgccaatagcagctttagttaaaccttacatttgctagtgaatgtaaagcttcat

SEQ ID NO: 195489 - DNA, 570 bp, Gossypium hirsutum
gaacttgtattcctactacaactcatactctttggttggttgattccattatttagatctgaatgcataatcagctttgttggaattttcaacgcttcttgatcaatctcgatcccctggttgaaacggtaaatgcagctgcaaatttgtaaaagttgaagtgggtattagcccaaggagaaaaaacaaaaattattcgtccagaatttgtttggtttagtggatttgggattgacagaaaagtagaagtaaatggtgttttgggaaggatatgtgagtgatgaaccaatggggacagttgccccggttgttgtatattggttgtatgctgggttttatcaactcttaccacctttggataagtaccgtttacatactagaaaagaggaggaagagaagaatgccgtgcctttcgtttcagttgttaggggtgttctatttcaacagcttgttcaagcaactgttgctaaattgctctttctgttgacatcaacggcagatgcatctgggaccacaatccagccttcagttcctgttcaacttgcgcaatttattgttgcaatgcttgtc

SEQ ID NO: 195490 - DNA, 537 bp, Gossypium hirsutum
agaaaatggaggacggtgaatgcattgtaacagaagcacccaaggcaccggtgactaaggaaagaaagatcggaacggacttggaaaaatatatagcaaagccatatgtggcaagagcactgcaagctgcagatgtgggaaatccagatgggacaaaaggatatccggacaatggaatgactgttcttcaacaacatgttgcctttttcgatcaaaacaacgatggagttgtttatccttgggagactttcaaaggtattcgagatcttgggttcggtccatgttcctcttttgtcataacttttgtaattaatgcagcatttagttatcgcactctcccggggtgggtgccaaatccgttacttcccatatacatagagagaatacacagagataagcatgggagtgattcagcaacatatgataccgaaggaaggttcatgccagtgaacctgtagaacatgttcaccaagtatgcactcacaaagccccgacaattatcactcaaggattgtggcaatgactgaggaaaatcgg

SEQ ID NO: 195491 - DNA, 739 bp, Gossypium hirsutum
cggacgcgtgggcggacgcgtgggcggacgcctgggcttgctcgatacttttggtggggccagctctttcctagtctctggaatgactgcacgaacagctgtaattttcttctgttttgctgtgattaaaactgtggatgatcattgtgggctatggttgcctggtaatattttccatatatttttctggaataactctgcttatcatgacatccatcatcaactccaaggcacaaagtataactactctcagccgttcttcgccaactgggataagctacttggaactcatatggcttatgatcttttgaagcgaccggaggggggttttgaggtaaggctaaagaaagactagtcacattctgttgatttgtcttgtgtagttagaggctctcgcttcacactgtaacagttttttccttgaggttgtgccattcttgagaagttgaatttgttttgtttgaggctttaagttctagggatccggcatgtcattgggttatttatttatttatagttgcttgaccatgttctgtattgcaattgtttcaccaactaatatttgctttatgttacccggtatttaaatcttcatgttgtgtaatttgtattggactagctgatgagctgttcaagagggctagaattggtgtataagattatttttaagtactgatttcaggttgctcttagaccttttgtttaaaaaaaaaaaaaaaaaaaaaaattctgcgccgcg

SEQ ID NO: 195492 - DNA, 1110 bp, Gossypium hirsutum
cccacgcgtccgggaaaagaacataacttaccgtgattccgctctttcctctcaggtcatcttcctcagttctgttcgagggtgcagtaattctttttcttctcttttcttccaagagctatcacattgaactgcagggatggctgaggagggtcaaaaagttatcttgaatgtgtatgacttgagccaaggacttgctcggcagctttcaatgaccttattagggaagcctattgagggaatatggcacactggagttgtggtttatggcaatgaatactattttggcggaggaatccaacattctcctgctgggacgacaccatatgggacaccaattagagtgatcgatttaggagtcactcatgtgcctaaggatgtgtttgagatgtatttgcaggagattagtccccgctacactgctgagacctatagtttgctcacccacaattgcaacaacttcagtaatgaggttgcgcaatttttagttggttccaacattccggactatattttgcagctacctaatgaagttatgagcagtccgatgggtgcacttttaatgcccatgatacagaatctggagacaactttgagggctggtgctgttcctcaagtaccccaattcaggccttctgtatctgctcagtcatcccagtccacaaccatcagtgtgaacgggtcctccattagtagtcagccaaaagaggtagataataaggtgaaagatggggagcaaccaaaatctgaagaagtcgagacatcagaaaagacagtaccaccttctaaaccaaccggcacaaaggaaaaatcaaaaagcaatggagctgcagcagaccctcttggagatgctcgagccaaggtccaagaggagataacccgtgaatttgccgcagtcatggcgagtggaacattgcgagctagtgaggcagcagcactagcaactaggaaagtgatgcagaaatatggacacttgaatgttgctatgcaacaaagttagaagcaggaaaaagaaaaaaacgatttttttttttgtaagtactgcgtttacctttgggaatctggatctggacaaaaatgaaatcattgtatgataactattcaacttat

SEQ ID NO: 195493 - DNA, 467 bp, Gossypium hirsutum
ccggattccggccggacccagcgtcgggaccgtgggcggaccgtggcggcgcgtggcagccatggaatattaacatggatgaaagacgaatggtggattttcccggttggactggtaatgtgtaagcttttccaatcacaacttataaactggcatatagcgaatctagagatacaagaccgctcattgtatagtaatgattttgagctattttggcagtcataaagcaccattgttaaaagacatatatagacttacgcattaacaaggttctttcttttactttttactgtttttgtatgtaacttggttaacaacattaacaaggttctttcttttactttttactgtttttgtatgtaacttggttaacaaatccagttcttgacaagtagaaatagaaacagagggttaaaaaaaaaaaaaaattattaaaatatatatttaaaaatttaaataatttataa

SEQ ID NO: 195494 - DNA, 333 bp, Gossypium hirsutum
taaaattataaaaccatcaaggtctagtgttttagagtctctgaacgaatcgctggtcccaatccttttttaagcttgtaaagtgcattgtttcttgaactctcatcgtgtgtgtgttttgtatgttgaaagacccccgacattatctgtaaacccctgactttgattgtattaatcctgtgtgctgctgctttgcgtgttctaaaaaaaaaaataaaaaaaaataaaatataaaaaaaaataaaaaaaaaaaaaaaaaattattaaaaatacaattcaaacataaacaaataataaaagtaagtaatttaaattaaaggggcggccgtttta

SEQ ID NO: 195495 - DNA, 490 bp, Gossypium hirsutum
cccacgcgtccgcccacgcgtccgattatcttttatttcttcttttgttggccaaatcatgaccactctcgtgaccggtgtgtttctcctcctactatccgtcgccggcgtcgtatccgccgctagatatatcaccggtgatgttctccggttaccttcggaagcttcaaggttcttccgatggaggagcgatgatgatgaagttggtggcacaagatgggcggtcctgattgctggatctaatggatattggaattacaggcatcaggctgatgtttgtcatgcttatcaactcctaaggaacggtggtttgagagaggaaaatatcattgtctttatgtacgatgatatcgctttcaatgtagaaaaccctaggcctggtgttatcattaacaatcctcatggcgatgatgtttataagggagtcccgaaggactatactggagaagatgttaatgttcacaacttttttgcggctctcctcggaaac

SEQ ID NO: 195496 - DNA, 464 bp, Gossypium hirsutum
  unsure (1)..(464): unsure at all n locations
gggcgagccacgcgttcgcgcaataaagctgtttcttgtgaagctaactgttgaactctgttgcaggactctgtctgtccgggcctccaagtggtttcctcaatcccatcttgtaaactcatcaaggaaacttgtgaaaggaattttgcaatgcactctgactaccgcactactgcaagccccgatttcatctctttagacgagacaacttttaggaatattattcaccatccggatctaactgtaatatctgaagaaagagttctcgatgccattttgatgtggtacatgaaatcacagaaaattgtgtggatgggaagtggtgaatgagctaattacaaattcaactttagaaagtgtgttcaaggacaggcttcaactggtgaatgacttgcttgcatcagtacggttctctttattgccatacccnctgctaaagaagttagaanataccagtctaagca

SEQ ID NO: 195497 - DNA, 387 bp, Gossypium hirsutum
cccacgcgtccgcccacgcgtacggttgaacctgctggcgaggcttgtctcctcttgtccgagtcctgtttgcaaatcattcatacagtttgcaggacgtcggccttgaaaaaaaccattcattttaatattcttttttctccaacagaatcgaataggatatccgcacacagaaagaagcttaaagaaacaatggccggagtgggaaatagaagttttagcttgattttgtatttcctgtgcttgggggtcataatccctagcctcgaggctcacatcgcacaatatgatgactattggagggaaagggagttgcaagctaaagaaaacctggagaaggcttacaatcctaacccagaggaagtcacccagcatttcaacgaccat

SEQ ID NO: 195498 - DNA, 934 bp, Gossypium hirsutum
cggacgcgtgggcccgtccgttcggcccgactggggttccaacctcggagctcaccatctccggcaacctcctctactcccccttttgaggctcgtatcgtacggatgaagtagaaaaaagaaattaagaaaaaaaaaacatcatcaacaaggagaagcatattcactctctttctctccctttcgttttcatagttctgtgtcaagtgcttgtctttgagccaaaaaaaaaaaaaaagctaactcagaagaaggcacgagggccaccagctttctttacttaactactacctatttcttacaactgttgcctgcaatccttccaaaaacccaacttctccttcactcccctcttatctatatatctccttttcttcttcttcttcctctcctcaccaaggaaatcacaatttagcttctaactttgcctcttttttttttcttttcatctgcaaatctggtcctttttttctgatgctggagagtttgggtattagatttaaattagtttgaagggctttcgagttctgggttttccattttggggtaacacccaggttagtcaaattgtggacatcacggctatacacagagtttaccggcctcttcttattcatgcccgatctgtacgacgtaagagttgtgtgatcgagaggaaccctgcgccgcacggcgggcgtggagctttgccttctgaaggcggtagtccttccgatctcctcttccttgctggcggcggtgttgtcttttagagtttcagtagttggtataggtagcttttagtataaaaaaaaaaaaaaaaaggaaaaaaaaaaaaaaaaaaaaaaaaaaaaaaaaaaaaaaaaaaaaaaaacagccaaccaaaaaaaaagaaaacaaaacaaacaaacccttgggggggccccccttttttttttttttttttttttggctt

SEQ ID NO: 195499 - DNA, 444 bp, Gossypium hirsutum
cccacgcgtccgcccacgcgtccgaagagaagccccttcactcctgctaagagtgatggcactagaagctacctaagtggttactcagaccatccaaattacatgtcttacactgaatcgtcaaaagctaaggtaaggtctttcagtgctccaaaacaaaggcctcattatgaaagatctagttcaacaaagaggtactccattcatggttttggtgaattgaaatcaactacacaaaggtctgccatgcatgcaaacttcgccagcaaagcttaccccggttcgggtaggttggacaggctaggaatgccccttgggtatagatactaaataatggttttaccatttggctaaggaatgttatgtagtttatgtttagatgttaacgatgatgactctcgcctaccctaatgtatccatcctttaatgttttagtgcatgtga

SEQ ID NO: 195500 - DNA, 684 bp, Gossypium hirsutum
ctcacgcgtccgcgtctctccactctctaatgggcagtttgaagttaagcgggggatgcagatcctctcctccttacctttcctgttttctctgcttttttttctctctcaaatgcggatagaagctaatagaaactagctttttcactcatgggctctgtcactgtaaaaccctcattaaatactttctgtttcattcccgagagccccaaaattcgttgtcattcgcctcacttctcattcctcaaactcagaccttcccctgtttctttcccctttaaatctccttctgatccaataaactcatctcccaaatgtaaaattcgaagctttatggttaaccctttattggttttagtcccagttttgagaagcatcagaggcttggctttttcgcattcccaaaaatgggcttcacgtttgcacgattgcattacagaatcggaagaaattttagaccaatacaatggcaattatttgcaaagtggaggtcttgggatggctttattgagtgtaacagctagcgctaaagttcggattagtccattcgtggcgacattggcggcgaatcccacgtttgtttctggtttgtgtgcatggttcattgctcaatcgatgaagatttttttaaatttctttatagagcggaaatgggatttccggatattgtttgcttctggtggg

SEQ ID NO: 195501 - DNA, 480 bp, Gossypium hirsutum
aactgatcgaaaactctatctctttaacaatgataacccatataaaaccatataaggccattcgggggtcaattttttcgtgatactggggaaagtgatttaacaattttttaaaaaatttgtgtttaggttatctgagcctggcttgtgcaagtcagggagcaaggacagcagaaaggcgaagcaagccctattctttctgaactgctacgtcttgaggaacaggccaaacaacaatatgtgggtcgatggagcaaggtgcctggtgctactgaggcttctatctgggatttaccttcatctgctattagtgaccctaataacttggatgtgatgggtcttctggctacaaataagggtaagccaatggaaggtattatggagcaagttcgtgatggtagtactattcgagtctatctactcccagattttcagttcgtgcaagtgtttgttggtggtatccagtccccttcaatgggt

SEQ ID NO: 195502 - DNA, 472 bp, Gossypium hirsutum
ctttgccagatctactagttttttcatgtattctcttgttcctgtcctcccaaatggcccacggagcgcaatagaaagtcttacactggagtgaagatatctgttcgaaaacccaaggcattcacgaaaaatgtggttcatggtttctgctacttctccacagcgagggcaatgtgtgtcatttgaaagcttacgaagctgcatgttaattcgtgtgggaagataattccacgatattttccaagctgtcatttttatcttagatggtagattgagtagccagaagttttttgtagaattttctgtagtcattttgtagtcagtttataggcactgcgtaccgcatattctcccgatggcttccccctccaggctagaatgtctcgtggggttctcttattatcggaatacgcaaaatcttcatagttatatcttccgggaaaggtgaaaaaaacaaaaaaaaaagataaaa

SEQ ID NO: 195503 - DNA, 661 bp, Gossypium hirsutum
ggaactttcgagctcctctggtcatcagattcgggaaaagagagagaaaaaagaagtccctttgactgttgtctctcaatcaaatgggccttcacatcctcaaaacgacgcctttttcgtcttcctactccaaagctttactcctcgccaccgccgcaaaaccctccgctttagctgctgctgttcttccttgtaatccccgcttgagatttccattttcttcgccaaaggccattacttcatctgggtatgggagtttccttcatctgaggaagcgtgggtttcgtgggagtgtcgtcttaaccatggctgcttctggttcggtccacaagtctgaggaagagtggagtgctattctttccccagagcaagttccgaattttgagacaaaagggcaccgagtatccaggcaccggagaatatgataagttcttcgaagaaggtatctataaatgtgcaggatgtgggacttctctttacaagtccactacaaaatttaattcaggttgtgggtggccagctttctatgagggtctccctggagccataaatcgccatccggacccggatgggatgaggactgaaatcacttgtgcaggcttgtggtggccatttgggccatgtattttaaaggtgaagggtttccaacacccaccgatga

SEQ ID NO: 195504 - DNA, 660 bp, Gossypium hirsutum
cccacgcgtccggtcgataagagtggaaaataatgttcagaatattagctgtacaggttgctctctttcctttgtgttcctcgtcaattattactcaattaattagatcggagaacaatcaatcaaatggagttaggggaactgtgggcgatcttctgtcccggcgtcgctggcgcagtgttcggtgctggctggtggctttggatcgacgccgtcgtatgcagctccgtcaatgtctctttcatccactatttacctggtacatcgtgtttcaccttttttttcttgcattaatttatcagctgcctttctaatctcttattatcaatgtttatatggctcatcattattattatctatttatttaggaatatttgcttctatcgcggctttgatgttcaattgcgggaggagagaggatattgactactctccttatgatgaaggcgagtggagggtgaagctctggctcttctttgctcatgttgtatcctttggctcactagctgcttcagttggcctcttgatacaagactcactagagaaatctggtccttcattgtggactggtactgcaagcatcttacagagtgtgtttgtctcaatcagggggctgatatattggacttgtcactcacaataacacatatatatccaacc

SEQ ID NO: 195505 - DNA, 592 bp, Gossypium hirsutum
gctgttactgcacaattccaagagataaacgaagcttacaacgtgttaatcgatcctgataagcgcttcgggtctgatttaaccggaatatatgaaatcgataactatactttgagggaataatcttgccagatttaagggaatgattcttacctgcaatgggcttggttttagtcatacatcaacatggacagaacaactaacagacagaaatgaatttgctgaggaaggttagctcttgtttacaatttacaaagactgccatgcttatttctgagcgactcaggccctgcgagtgacagggccactgtatgagtaacgatatggatctttttttctacttgtcgaacctgaaaatgtatctcatcttctcagtattattacatctgtaatcgaaatgagtattcctcaagtaaggagatatgtaatggtgatggtgatgttgagatgtgttccaatgaggcatcatttatagcttgtatgagtttgatagcgtaaccaaatgtataattgatataatatagacatgagagctgtaattatagagaatattattcataatttattaggtccgcatgcgaagtatactatc

SEQ ID NO: 195506 - DNA, 561 bp, Gossypium hirsutum
gtggtttactaggaggcaggggtttgcggaggcttttcactgttatctgggttccaaacagcaaagaaatggcagctacaattgcatcgagatcttcttttcttcgtccaattctccgaacagcaacaacatcgacaaaagcaagaaccaaaatcccattttcagctccaagttcttcacttcgatccaatttcagtcttcatcagacccggatttctcctccctctctttctcggttcgttcgacgagaactcagcactcttcaaccacttcacagtgcggttgcatcggcttgccttgtttccaagcttccttccgatgctaatagttgtgctgaaggtcgatttgctaactatatcagtcccatctagtagcaagcgcttgtagaggttgagtttacttctttcagagtggcagtgatgcttacttcattctataattcagaactcagcttttcagggaatcaattggctgaatgtgttttattgacctacatttaattaggtggtgggtgtaagtgactcttgtaatcttctcagtttttaatgattttaatttaca

SEQ ID NO: 195507 - DNA, 740 bp, Gossypium hirsutum
cccacgcgtccgcatacccaaaaaccaatctaaaatggcttcctctaagcttagaagctccttttccttcctaaatcttctcctgtcatccttgaacttcatcctctttatcctctctgcagcctctcttgctcccattatcctcctcaaaatgccaccaacttcactgggtgtagccttcctcatggtctcctccatctcccttctttcctccttcctgggcttctactctcagctcacccacttctgcttcataacccatgtttcactcctcatcgcctccttgatcggccaagttttaagcgtactatcattgtttacaagagagaaagctagtctctcgatgctgaaatctccgcgggacattaaagagggaaaggtgctggtgagattggaatgtgggattttgatggcggtgttggtgatgcaattgatggtgttagcggtgagctgcacggtccatcactgttgggtgaaggaatatgaggggttagaagctgagagagaggcgactgcgaagaaaaggagcaggaggttagcgagggtgcaagaggaattcatggcgaatgcggccaggattgcggagattaaagccaacgagttgtatgagaagacgaagagcaagtaccgtcagtgggtgaaaactgatttttatggctaaggcatgaggaaaacaacctacttgtgggtttctttgtggggtcactgctgtggtggccattggatttgtctcactttta

SEQ ID NO: 195508 - DNA, 768 bp, Gossypium hirsutum
cagctttgggatcaaagttggcaaactgcagtggtgatggagaatcctagtttcactcttttacttgtctgtgccttgtgcatgtcctcagtggtacaatgcaaatacaactgccccgaaaagtacgatccccatgatatgcaagaacgataccaacgatgggtggcccgacatggccgaaagtacaagagcaagaacgaatgggcattgcggttcgggatatacaaatccaattctcagttcattgattgtgtcaattcacagaacctatcattcaagttgaccgataacgaattcgcagacatgacaaatgatgagttcagagctatgtatttgggttaccaaagcataagatctccatgtgagagcaacagcaaaggcttcgcatatgacaaatatcacaatttgccaaaaagcatagattggagaaagaaaggtgctgtcgctccaatcaagaatcaaggccaatgtgggagttgttgggcattctcagcagtggcagccatagaagggatcaatcaaattaaaacagggaacttgacatctctttcggaacaagagctcatcgattgcgacaccgactctatcgaccaaggctgcaacggtggacacatggtccaagcgtatgaatttattataaagaacggtggaatcaccactgagaaagactatccatacacgggaagagatgacacctgcaagcggacacaagctaaaaaccatgcagtaacaattagtgggtataagagattacctaccaacaatgag

SEQ ID NO: 195509 - DNA, 672 bp, Gossypium hirsutum
cggacgcgtgggcgattttctgtccgattggataaggtgaatgtgccggattctgttcctccggttgtgacggtggcacaggaagttgttgcgaaggatgtaacggcgggatcagactgtggatcggaggaccagcatttgatcacggacccaatggtatctccagcagagatccagaggcaaatccatgaattacagaggatgcatattgctgctacacaagaacaaggcattttgcagagaaaaatcgatgaatcaaatgctagagcttacaatactcaagattattcaaaaatgttggataaaattgccacggcaccggcaccagtatcaactccgctgcaaatgccaattcaaacggcgtatttaacctctgctgcttattcgacatctgcgaccgcagcccccgcaaaccaaccagtttacctcatttcgactcctgcagccggagtttatcaacagtctccgacaatacaacaggtaaccgtaccagctggtcaaccttactacggggtacagcgggtggtttaagatgttaaccgagagcagtcggtttacaatgcggtttcatccacgaagtttggggcatatactgagggaatccaagttatgcatccgactggtgggatgcctgaatcaagatatgttcaaggtggtttatgatggggcatg

SEQ ID NO: 195510 - DNA, 404 bp, Gossypium hirsutum
agttgaaatgactactggagcaactatccacacaacgcaggggctgaagatgactacaggaagaatgaagcctccgattatccctgaaataaacatggagggattgaagatggaaggaactgcccggattttggaagcagagacccaagttggagagaaaggtgaagtttctcaagctcattcataggtggaatagcttgccacatttagcttcattacacgatgcatatgcatgggggggaagtaatgttgatagacataagcatagggaggaagtcgttaaatcctatagcatatgcttcccttccaacctagccggttaatgcaattaattaaattctaaaaaaaaagaagtataagaaagcctcgcgtacgcgtacgcgtgggtcgaaactgcgattcgg

SEQ ID NO: 195511 - DNA, 347 bp, Gossypium hirsutum
  unsure (1)..(347): unsure at all n locations
cacagatagtggaaattggtaagacctcattcggattctagaagaggttaaagctggtgagacacggtgaaggagtctcagcgacgcacatgtatggtaagcctgatattttcgacgttcccatgatcttttgcgccatggaactgttttaacaaacggtaatttcatgtattaactcttaaaatcaactgtgaagataggaagttttatggtaaataatgttgaattggctttcttgttggtgtgatctcattatatatatctaattataatctttattttnaaaaaaaacaacacaatcaaaaaaaaagataacttgaacttacccctgaacactacattctaaa

SEQ ID NO: 195512 - DNA, 754 bp, Gossypium hirsutum
  unsure (1)..(754): unsure at all n locations
catttaccaaatcaaaaaccaaaatcccaaacttctttttccttcttcttttataccctttgttttgattgatcgtgggatgggggggtctgatttgagatgatggttccaaatccttctttgcaaaatagtctaacaaaaagtgatccactattgtgttgagaaagcaaataggaggagtgggttggggtttgtctcngcttggttgtattcagtgattgtttaaatgagatggtttggagggttttttggatgacatganggatgttatcaaggttgatgaacttattgaaggcctgttttcggccgagatcagatcgattcattcacaaaaatgcagataccggaggccatcaaaatgggctattgtggtacaaaaacacaggacagcatgttaacggtgagttctcgatggcggtggttcaagccaacaatttacttgaagatcaaagccagctcgagtccggttgtttgagtacacacgagtcaggtccctatggcactttcgttggcgtatatgaccgtcttgggggaccggagacttcacgctacgtcaacgatcatctctttcaacatctcaagcggttcacttatgagcaacagtcaatgtcggttgatgtaatacgaaaagcatatcaagcaacagaagagggtttttcgtctctcgttgctagacaatggcctatgacaccacaactcgcggctgttggatcatgttgcctggtcggtgttgtctggtgcacgaacctttatg

SEQ ID NO: 195513 - DNA, 1012 bp, Gossypium hirsutum
  unsure (1)..(1012): unsure at all n locations
caaaattttccggaaccagatcggaaattccctttcgttttcccccaaaaagtttccaatttctcctccttcaggatcgacgctagactatccatcgccaccgttcatcatcgtctcagccgcctctcttaaaaccagggatacgaaaagatgggagctttcatatcgaagttctggttcatgttatttcccgcaaaggaatataagattgtggtggttgggttagataatgctggcaaaacgacgacgctttacaagcttcaccttggtgaggttgttactacccatcctactgttggcagcaacgttgaagagcttgtttataaaaacatccgtttcgaggtatgggaccttggtgggcaagaccgactacggacatcgtgggcaacatactatcgtggaactcatgctgttatcgtggtgatagacagtgtggatagggccagaatcaccattatgaaagaggagctcttcaggttgctcgcacacgaagacctacaacattctgttattctcgtttttgcnaataaacaagacctaaaggatgcaatgaccccagctgagatcaccgatgccctttcgcttcacagcataaaaaatcacgattggcacatccaagcctgctccgcacttacaggagatggactgtacgatggtcttgggtggatcgcccagcacgttaccggaaaagcaccaagctgaaaaggatctgatcaatgaaagaacgacccattcattctccatatatatatatattatggattctgctgatttatcaccgagaaaaacagagtaaacttttgtgtaccattttctgtatgaactttttttagattgtttttaaacatttcaatttccctttcaagaaattgtcatttttatgcacaatgaaatttttttcatttaaaaatatgagaatgatgaaaacgttgctataaaaaaaaaaaaaaaaaaaaaaaaaaaaaaaaaaaaaaaaaaaaaaaaaaaaaattctgcggcgtcgacgcgaccg

SEQ ID NO: 195514 - DNA, 442 bp, Gossypium hirsutum
acaactttgaataagaaatggcccgacttctcccccctcagcttttctttctactgaccttggtggtcatcatccatccctcatacggacttaagcatttgaaaggtacagccctcgttgacgaggtttgccgccacacatcccacaatgaatattgcgtcaataccatagtcccaaagccgccattatccggggaaaggatcgccagtaccactttgggttgggcacagataaaagctctggaagccggaaccatcatagctagtctacttaatgattcttcttccatcttaccagtagcaaagaaccctctacaggccaaagagcttctccaaatatgttgggattctaacatgaacaccatggaggacctttggattgctagcagtttgctttacaataagatcatcaatcccatgattgctcgtctgtatcatgctgc

SEQ ID NO: 195515 - DNA, 591 bp, Gossypium hirsutum
gaaactcaaacagcagccctacgaaatgagttggttgagcctcgtagttccgaaggagaggggctgcctcgtcttgagagcctgcaaagaattcttcaaggccgagctgcagttgaagtgaatagtggtgttctgagtgtgtgcacagccttcttgtctggtgaacctgccacacggttgcgttctcaggagctacagcaacttattgctgcactccttgaatttatggctgcttgcaagcgggcaattcgtgtacacttcagactaataggagaagaagaccaagatttccacacacaactagtgaatggatttcaatctctcacagcagagctatctcattacatccctgcaattctatcagagctctgataatgttgtaagcattacttgctccgatatatctttctggtgcacgctgctcataaagatcgtgacacattctttttgtagatctgtgctcatatgatgattgttgatgtatgtaataaccaatttgcttgcgtgcaatggtggattacttattgtcgaatgatgttaaaaccaccaatcctactgtacgcggcaaccaacaagagctcgtctataaaa

SEQ ID NO: 195516 - DNA, 463 bp, Gossypium hirsutum
cccacgcgtccgatcacccccaaatgaccatcaagctgatggcagcgcacacaatactcacaatgtttgctcttctaatggcagcacacttcaaatcaatatcttcaacgaaccttccaccaaaggacgaccaagatctccgtctcgccatggaagagatgcaaaaagccaattacttcacctttgtaatgttgctcaacatgttgcccctcgacccaaagttccttgctaacgtaacttttttaatgcccaatgatcggatgttgtcaaaaacggtaatcccagagaacgcggtttccagcttcttgcatcgtcattcaatcccttcaccgctgattttcgagcatcttttatatatcccgacgggttcggttcttcccagtttaatgccggagtacttgatgaatgtctcgaatggcggtggtcgaagaagtttcgtcctcaataatggtaaaatcattag

SEQ ID NO: 195517 - DNA, 419 bp, Gossypium hirsutum
gggaattaattggtcgacccacgcatgcgtggactcagactaagtcgcttaacaaaaaaaatgcaaatccaaaagtacaaagcatgcaaggtgagtggctaccaggtgacataaatacatacatgactaggatttgtgtgcctttaaacgaacaggctgtcaaatggacacatcttgaggcacccttgacacttcatagaaatgcgcatgcaataaattttctcccacttcattttgcttaaattgagttggggaatattggtttttgcagttctgttaatgtttgggaaaacaaaatgacaatatctatgaagattgtgtatcatatcttttaaaaaaaaaattgttgcaatcttactcttacactcctgctattgatatgtgggctggtggtgctatattagcggagctttttactt

SEQ ID NO: 195518 - DNA, 654 bp, Gossypium hirsutum
caaaattggtccgtcagtcgggtcagttcatgttagtgttgttcagtcgggtccgatagtgatttgcaaaaccacttgcagtttagaaagagctccgatcgatctcactcaacagttaggtcaatagccgcttttgcaaatcgcctaaaccaagccaaaaaagcccccaaaactcgacaaggccatggtagttgctagttccaacccccacaacaaggagatgcaaatccgtagaagaataagcaacatattcaataaaagagaagaggattttccatcactgagagaatacaatgattacttggaagaagtggaagacatgatttttaaattgattgaaggaatagatgttcaagctattgagggagaaaattaccaattatcagcaagaaaatgctgagcagattatgatcaatcaagctcgtaaggctgaagatttagctgctgcaatggcagcaagcaaggggatcccagtacaggccgatactgatgggaactcacaagcagggtttgtagctggtacccaaggtcaatatgcaccgacagttgctggaggacagccacgaccaacaggcatggcaccacaaccggtaccacttgctggtgggctggacatgcatggctatgctcttgatgatgaggaaatgatgaggc

SEQ ID NO: 195519 - DNA, 464 bp, Gossypium hirsutum
aaagagcatatcttgttggctaaacaggtcggttttcctaacgtggttgtgttcttgaacgaacgggaccaggtagatgatgaagagcttttgcaattagtcgaattggaggtgcgtgaattgctctctagttacgaatttcccggtgatgatgtccctattatttctggctccgcacttttagctttagaagctttgatggctaagcccagtattcctaggggtgaaaaccaatgggtggataagatttatgaacttatggatgctgttgatagttacattcctgttcctcaaagacaaacagatttgcctttcttgttagctgttgaggatgtgttttccatcacgggtcgtggtactgttgccactggtcgtatcgagagaggtactgttaaggttggagagactgttgacattgttggattgaaggatacaaggaacgtcacagttactggtgtggaaat

SEQ ID NO: 195520 - DNA, 921 bp, Gossypium hirsutum
aaaattttaagatttaattttaatatgttcattttaatagctagttgatctaataagaacaagagtatagtattcaagtggtggtatgtcggttagattttgtttcaaaaatagtggtccaattaacatgcaagtcctctatgatgctatccatatacaatttggccacttcaacttttacctatcacatttttatggtttctcaactaagtcctttccagtaaaattcccattcggtactcgttttatttgtcttcacatatcccagcttaaataacccaaaaaatgctaatggcttagtagagcaattaggcaatatctgtttttaaatgtattcaatggtatgtccatttgaatcagctgaaaatttcaccaattccctttgcaaagtgcttactaaaatactggattccatttctggattacatttaggcggacacggtaaggatttccccgataaagtagatatcttaatacaatgatcaatttaccagtatcaatcttggttccatttaattgcctatgctaatttttcattttatcattattattttcctttaaatggattatcctcatatctgtttttctccgaactgcgtattttgagaatatttttagtacgtgtacatatcttgtattgcttctgaattgttcaagcttttgcatgggcccttggtaatcattgcgttgaaggttgtagttcatttactagctgttgaagatattgccggaagttgtttcagcagtgagaagaggtttttggtgttttgggagtttgcatatgtcggctttgattagcatcgggaatcaatgtatttgagcttgggccattttcaagatttatggatttttaaaagcgtgagcttgggacgcttcagatgaaaagcttgtggttttgccgtttttattggagaaggcttc

SEQ ID NO: 195521 - DNA, 651 bp, Gossypium hirsutum
ccttctcgtccgctttcctcctcctcccgtgcttgtccttcttcaatttgtgcaaccagttcacttcgcaaatctccaggtaagttatttatctccttcttcaagctttatttgttatgattctgatgatctgggtttttcagtgagtggattatttgttgagaaaaaagacgagattttttataatcccctgtttgtttgttttttttgaacggtgcatcctggttttgctttatttttgacaatccgaccaaactttttagtcatttatggggaattctttgcttctgttctttcatggaggaccagtgttttgcttttgttctttcatggaggaccagtgttctttcatggaggaccaaacttttaagggatccttcagatcggctatttggtacctttgggagcaggggtgctaagcagaattcaaagaagaaatctttggatgcattgataaaaagactccgggatgtgagctaatttggcctggaggaggtgtatgtatgtctatgttcttctgcctgttgcctttgttgattgcaattggctatatttcttaccttatggttggtcaattggttcattaaaattaaaagggtggctggcctttttacttggtggattaaaataattaggggccagtgaaaaatt

SEQ ID NO: 195522 - DNA, 862 bp, Gossypium hirsutum
  unsure (1)..(862): unsure at all n locations
tgctcaaattattttgcctggaaacccaattcaaaggcaacggaaaattagggttttactaccaaaattctttatttatttttcttttcaattttcctcaggtgatttctcttttggggttttccccctttctatttttcgtttttcccagattgcttttattgcttattggtatatatatttttctgtgttttgcgtcaatttttaattatgtttgtcgtgaattaggtaacaaacgtttaaattcttgttgttttaactcaatttagaaagttccttctccggccgagaatttgaattagatttgttcattattcttcccccccccccaattttagctacaattcattaaatgctaggataattcaggtttagactttaatttccttgaaggaattgtttgatttctctttagaactaaaaccttctcttttagtcaaaagaacccttttaagaatcagagaaattttttgttttttaattatggtaactctattgatgtattatttgctatcataatatgctgttntaattntacttgggttctcttggttaacagagagtaaaattatgataagaccatgttgaatcanctgctgttaactttnattgattacggcaaactgcgacatgaatcacttggcacttaactgtgttccagacaacgcttcatttttcccatggacttaaccagagaatggaacatctcttttgaagacggataacttgaaaaaaccttgccaatcatgtcttctaaaactgatgacttaggctcattcataagtcaatgttggcatttatgcttctccaaaatgtcctgtatgttttatgttaatatcttgtattcactattttgttagta

SEQ ID NO: 195523 - DNA, 1563 bp, Gossypium hirsutum
  unsure (1)..(1563): unsure at all n locations
cgggntggaatggangggtcgacgcacgcgtacgcccacgcgtccgaaaactttgaattattcatacaaaacaatgaaaacccacttttttcccctggtttttctcctcatttttttcttagcccaaggtctgaaccccaaatgtgccatccaagaccatggctcaaacctgcaagtgttccatgtttacagtccatgctcacccttcaaaccctcaaaaccactctcatgggaagaggatgtgctgcaaacgctagccaaggaccaagccagggtgcagtttttgtccagcctggtggctaagaaatctgtggtgcctatagcttcaggcaggcagattgtgcaaagcccaacttacattgtgaaggccaatattggaaccccacctcagcccatgcttatggccatggatacaagcagtgatgctgcttgggtgccttgcactggctgcattggctgctcttctactgcttttgactttgctaaatccaccactttcaagacccttggctgccaagctgctcaatgcaagcaggtaccaaaccccacttgcggcggaagcgcgtgcgcattcaacatgacctacggtggctcaaccatagccggtaacctatcacaggacaccataaccttagccaccgacccaatcccaaactacactttcggttgcctccaaaagacagcaggcagctcagtgccaccacaaggtgtattgggcttgggccggggcccattatccctcctttcccaatcccaaaatttgtaccaatcaacattttcatattgcttgcctagcattaggtcacctaacttttctgggtcattgagacttggaccaagtgggcaacccgtgaggatcaaatacaccccgttgctcaagaaccctaggagaccctcactttattacgtcaatttgattggaattagggttggaagaaggattgttgatatcccaccaagtgccattgctttcaatccttccactggtgctggcaccattattgattctggtactgtcttcacccggctagttgaaccagcctatgtagctgtccgggacgcattccggagacgagtaagggtggcgaacgtgacatctctgggtgggttcgacacatgttactcggtcccaatcaatgcaccgaccataacatttatgttttcgggcatgaacgtgacattgccacaagagaacctactgctccacagcacagcaggcagcatcacatgtcttgcgatggcatcggcaccagcgctgaatgtgatcgccaatatgcagcagcagaaccatagggtggttttcgatgtgccaaattcgaggatgggggtcgcccgtgagcgatgttcgtaaaaagtgtggggtctttttcttctaacttttgggaaacagtgttggtgttgattaaaagcagaatatatctgattaataatgaaagtcaaatttttgtagttatatattactttgtactggaggctggtcctagtcacgggctttcccttacttttattatgtcttgtttttaggttttaatatccaaattttcgaattctgtttctattatt

SEQ ID NO: 195524 - DNA, 512 bp, Gossypium hirsutum
gcattttctcaacatacagtgttgtcagttttattcttagagcacctgatctctgtccttaatcagactcgtgtcactaaaagtagtgatccaggaaaaggagaaaattctagtcttgtttctgaaactcaattggagaatgaaattctgcaagctgctatttttgctcttacttccttctttaggcatgttgaccaattgcatttattgaaatttatcttatttttatggtcttcataattttatgatgtttcatcttaatttcaaaggtggaggtaaagttggaaagcgagctgttgaacatggttactcttcagttcttgctgcacttgtactgcaacttggcagttgtcatggtctggctacctctggtcgacatgaaccactactgcacttttaactgcatttaaggcattttgtgaatgtgttggagatcttgaaatgggcaaggtacatgaactttttgataatatgaacacctgctactgctaggacaacgggaaacacttcac

SEQ ID NO: 195525 - DNA, 617 bp, Gossypium hirsutum
cttttatcttgtcgattcgatttttctcttcttttaagtttctgtgttctttaagagactctgtgtgtcagaatctttgttagagcgagaaaatggaaaatgggatcgacaaagtaagtgggtcgatgttctttagcgatgaggtgttgatagaggtgagtggattgaagaaaggaggggattttgtagaagtcacatgcgggtgtaccagccataggtatggtgacgccgttggcaagcttagggttttctctaatggcgaccttgaaatcacctgtgaatgcacccctggttgcaatgaagacaagttgactcctgctgcatttgagatgcattctggaagagagacgccttgaaagtggaagaatattgttggcttgtatttaaatggtttaaggttccttttaataactgatttttaatttctccattcttctttttaatggctatggttttaccaggccattatgcataattttcatcatgtaagtttgtcctttgtcatgggtataggatatattattctttgcggtcattaagatgtagattcctttgtgtttatctgatgtacctgtatcttctatatctttgactatttctgttctcttttataattg

SEQ ID NO: 195526 - DNA, 446 bp, Gossypium hirsutum
tccgccaacccttccgccaacccttccgcccacgctttcggaactttccattgtcaggtgcatatgatatcatcttttccccttggtcctagttccttttcattttcctaaccaatgtagaagctttattttttgttcctttttcctgttctcattgtgtgaatgttaatttcaatggctagacaagttgactcctgctgcatttgagaagcattctggaagagagacggccagaaagtggaagaataatgtttgggtgatagttaatgggggagaaggtttctttatcaaagactgcattgctgaaatactacaaccaagcgtctaaaaatgccaatggtactaacagatcccataatgcaagagtttgtcaccgtgacgagtttgttcgctgtagcaggtgtaacaaggagagaagatttcgattgcggacaaaagaggaatgt

SEQ ID NO: 195527 - DNA, 421 bp, Gossypium hirsutum
gcgtactcgttgtatttacccgttcatgcaaaagtgggttccttgaatgccacagtgtccataagccataacaaaaatgcctgcattgttcatttgttcctcgggggaagatcacggtgagccactcccagaaatcttgatgcgcaaaagttgtgatccaagatagatttaaaagttgccaaacctctatacttgtggaatattgccgaaaaatatgatgacagtcttcattttcatcaccgtaccggggacatctggcatttgtcactaaccttctttgttgtagattgctcaatataggaatgtaattccatgatatgcgtcagattatgattgtgatcttaggtggtaattgtagtttccatagtttactgaaaaattccttagcttcagcctgtaacaaataattactaggattcag

SEQ ID NO: 195528 - DNA, 877 bp, Gossypium hirsutum
tttacgcgtccgcccacgcgtccgaagaaatttcatgtacatttctttatttttctcagatttttctcactctctgcctcctttttctctccaatgttagttgaatcgatccaggaggaaaaaccattcttatcagggatggtggatggaagcaccaatttgccagtcaacctttcttgctttgagctgattaaaccaagcttggatgagaccaaccagcattgttctcttgatgtcttgcctattctactagaggaaacttcattttcagcaagagaaaaatgcagcttaaacacttcacaaggccaggatgtctatagcatttctgtcttgcctgaggaaggaaacatgaatccaaaatgcacaccacagttaacttttttgagcctcttagaagttccttttttatcaaaaaaccagatgtgcttggatgagcaattgagttgccagaactgcatcgatttgaaagtggatagtgaagatgcttattcatcgtgcattctggatataaacattgagaaagagactcccgacctactgaaatctaatgatgaaactgttggtaattcaaaaagtgaaggcgtggttacacatttgcagaaggtgttacagagacaagcaagcttaaacgtagaaagcagctgataacaatctcagcaaccagtgtggagctggaaaagaagaaagaaaatttctttgtcacacaatctggatggtgccattacctacaaaaaggtcattgatgcaaaagtttgatacattgacaggagagaaatcatcgaacgagagggttcatgatgcaccaagcaacagatggagaagatacaaaagagctgcatcatttgattcgaagaaaattgtcctccttttctcaatc

SEQ ID NO: 195529 - DNA, 918 bp, Gossypium hirsutum
tgtagtcatgcatctcattcagccaaagatcggcagactcacaattcttccatgcctcaaaccatggccctccacgagtataatgtatggctttaggaaacgtttatgagtcattctcgacaaccttgttatgcccttcaaggaaattccaaatagacgggatcgatccgatttcatcatcttcgagccactggaacctatgaagaaaagcgcccgtttgattgtttacaacttctggagtcagacccttgttcttcggatgaccgcaattgtacaacaccatcgaggaccaattctttcgaggatacaaagtctgcactgcaccatccattttcgtggtctctttcggggtataatcatgatgaacgcacatgatcgcatatttatcatcaatcaactccattaattcctttatatcagctaagtaaaggaaatcacagtcgataaacagcgcccaaccatcataattcgccaagtagggagtcaggaaccgggaaaacgagaactcggtactctcgagcttgttccgctcgcgccagtaaaggcctttttcccggagatctgattgaacaatgggagtgatctcgacaggaaccgatgaacgtttcaagatagaatggcggcagacctcataggctagatcttcacgcggatcgtaaccgacaaagattttgaagggtttgcttaaatcgccattgttagtcacttgatgagcttcgccattagccaaagtcattgttagcagcagttttttcttctataacaaagatctgagaaaatgaagaaaacgcgggatctcgaaattcttgacagtgaagaaagaagaaagagaactaaaagtttcttaagaataaagggcaagccgtagactcttggaagactacttatagaaatgagaactcaaagaatagaaaatta

SEQ ID NO: 195530 - DNA, 480 bp, Gossypium hirsutum
aacaccatacttagcgaattacgatggctgggcaatgtgttaggaaccgtgtaaaggagaactccgtgctctcgaactgatccctgctgcgccaataaaggccttttgccctaagatccgactgaacaatgggtgtaatctcaacaggtatagaagtgcgtttcaagatagaatggcggcagacctcatacgcttgatcttcacgcggatcgtaaccaataaagattttgaagggtttccttacatcgccattgttggtcacttgtgaagcattgccattagccgaagtcattgtttgccagcagttttcttcaacaataaagatctggaaaaaaaagggaaacgtgaaggttggaagtgggtaaagaaagaaagggaggagtggcatttacatggtgatgttggatgattcagagaaggagaatttatagaaatggggtttcaaagaaaaggaaattgaacaaaattgatgggagcgag

SEQ ID NO: 195531 - DNA, 454 bp, Gossypium hirsutum
cccacgcgtccgattattatctgttgtagctcttcttcttgagagtattatttgggcaggaccgtcctaaaatgaactgagtgtaaaaggtctgctccaattcttcaacaaagtcgcgccaaaaatctacaggagaattagaagccacaatgacgaaacgccgaatctctaattctgaatcagaagaaagtggaagtgaagagatgttaagcgaagaagaagaagatgatgataatgaagtaatcctcaagcaagaacagcaaggtatatccgaatacgagaagcagaggctagcgagaattgcagagaacaagagccagaatggaggctttgggtctgcccaaaattgcctcttctttgatgggttcgtcgccaaatacaagtcggacttcgagcaagattaaagggaaacgcaaggtcattgatgacgatgaagattacaggcccaatgata

SEQ ID NO: 195532 - DNA, 471 bp, Gossypium hirsutum
gggccgaccacgcgtccggtgaaataaaaaacctatatcaccggggtctattgcagcagaaccatctctatctatggggctctatctcacagggtttgatgtcattaaccctgtactgcatgatgaaaccaaaagtaattctgatcaaaagaatcaggtaaaattgcaaaacgcaatgcagctcaaaccattgcctccacctcccccccctgcacaatggcgggtttcaaaaccctgcttcaacgaggcagaagaaagacaacatgctgtatcagagtcactgagacatgagcttgatctgaaacttcttagttctttcgtctctcagaagcctgagccagctttagttaatcaacagaaaataaaggataaggcaaatgcattgaaaccagagaagaaggtggacgaagagataaataatggacagaaaggcgtaagcctgctcagtggtggccgagggatggatgaaaa

SEQ ID NO: 195533 - DNA, 426 bp, Gossypium hirsutum
cggaggcagcgcgaagaaaaggcatgggttgaagctcaaatccgggctgctgaatatgctgccaaaatgaaggcggaatctgaaattgaaaaagcaacgggaaagagaaagagaagccgctcgacttgcactgcaaaagatggaaaaaacagcagagattgaacagaatctggagattctaaaggaactggaaacgttgttaggatgttgtctgtacagtaatcaattttatggtcgaaaaagtggagcatgtgaaagggtaattgaaggaggagcttatgggatgataaaaggtgagaatccactccataaactgggtttattcttcaaagacgagtacttttgaagacgaggaggatgaggacgcttttcttaatgaagacattgtttgtgaagaaggagaaatacttgtataaaaaacatgat

SEQ ID NO: 195534 - DNA, 708 bp, Gossypium hirsutum
  unsure (1)..(708): unsure at all n locations
aattttcaccataaaaaactcttactttattgacctgacctctcttaatgttaaatagcaaaggaagtaagagaacttgagtattaaatcccaaagtttcattattgatttctctggtcacaaatggcaaaacttagagttaccatcaccggggatggctcaagcaaggtggtgaagatgggagatgatgccatgggtggccatagaagaatgaatggaaacaaaagattcttacaagacaaaccctggagaaatgttggtaacagaaggcatcaaatcaatggtgtccagtggagatctaatggctttaaaggacaaggttctcggattgctggaaaagaccttcgatttaaactgatgcgcaaacgtggaccttttcagtttcgggatacttttgaagatcatagaaggaacatggaaaaaccgtcaaatctatttagccaccacaaaatcgtaacaagcatattgtctgaaccaggacctaacggaataaccattctgaatcaaattcttacaataacataacggaatttttgcaaatttactccttgcaaactttagaatggatctagaggtttcctgaatgcccgaaataattccgactttaattccagggatgacctgtttccaacaattggattttcaatctttcaggggatccgtcctaagccttgtaaaggaaacgcttacttcaatgccatccccatn

SEQ ID NO: 195535 - DNA, 496 bp, Gossypium hirsutum
cgctggcatacatagtcagatagtaaaagacgaagtgtttaatgacttttttcagttgtggcctgagaaatttcgaaataaaacaaatggggtcacaccaagaagatggatccgtttctgcaatccagagttgagtaacattataacgagctggacaggctcagaagactgggttttaaatactgaaaagttgtctgaacttagaaagtttgcagataacgaggatcttcagatccaatggagggccgcaaaaaggagcaacaagttaaaagttgcatccctcattaaagaaaggacaggctatatagtaagccctgattcaatgttcgacatccaggtgaagcgcatccatgaatacaagcgtcagctgctgaatattttgggtattggttaccgttacaagaagatgaaagaaatgagtgcttcagaaagaaagaaaaaagttcgtccacgtgtttgtatattggggggaaaagcatttgccacttatgttcaa

SEQ ID NO: 195536 - DNA, 425 bp, Gossypium hirsutum
atgcgatgatatctaccacaatctgcggtaatgcctaccaaatccttgtggaagctcttgctccggcgcccatctattggtcagccaccctcttagtaactgttgcatgcaatctcccctacatggcccatatatctttccaaagatgtttccacccattggaccatcatatcatccaagagatcaagttctacaagaaagatgtcgaggaccaaggcatgtggtctcgggagcgatccaaggcaagacaagaaaccaagatcggcttcacagcacgtgtagatgcaaagatcacgcaactgaaagggaagttgcaaagaaagcaaccgtctatggaaatacagagtccacatcgtcaatcatagcattgctcatgaatttagtttcttttggaagttttttagggtctttcttgccgtttatag

SEQ ID NO: 195537 - DNA, 533 bp, Gossypium hirsutum
aaacatatgagcctgctccatcgtcttcgtcgttttcatttgccagattttggaaactgatcatggctggaggaggaaatttcatgcacagagttatatcttatgtcgtcaatgagcttgtcgttgacagacttgcaaacagtcctgcattccaaagatttgctgtgaggacatcaaagaggatagaagatatctccagtatggctgagaagaagaggcaagaacttgctgaacaaatgaaagaaatctcctaaaacatggagtctaaaaaccaatgatcgtattcgtacgactgctctgaccctctcgtacttgtggtcatccctaccttatgtatcgctatctgaatacattccatgaaatagaggggtgaaatcagtcacctctcatccactggttatggtactgctgcatgtatatcaacggcgacttatttttttccaactggataatgtaggacaagttatctatttgaatatgctcagatacatatatatatatcccatttataatgaaagatattgacacgctgg

SEQ ID NO: 195538 - DNA, 866 bp, Gossypium hirsutum
cccacgcgtccgcaactttccctgaaaaactagagataaaatcaatcatggctcgagggaagatccagatcaagctgatagagaactcgaccaacaggcaagtcacgtattcgaagagaagaaacggtcttttcaagaaagctaatgaacttacagttctttgcgatgctagagtttcgatcatcatgttttccactactggtaaactccatgagtttatcagcccttccaccacaacgaagcaagtaattgatcagtaccagaaaaccttggggatcgatatctggaacacccactatgagaaaatgcaagagcagttgaagcagctgaaagaggttaacaggaacctgcgcaaagagattaggagaaggatgggcgactgtttgaatgatttgagcattgaagatcttggtgctttggaacaagagatggagagctctgtcactcttattcgtgatagaaagtatcgtgttctctccaaccagatcgatacttccaggaaaaaggtgaggaatgtggaagagatacacaaaaatctcttacatgaactggaatccctgaaagaagatccatatggattagttgataatggaggggattatgataccctgatcgggtatcaaaatggaggtcctcgtatatttgctttacgcctgcagccaaaccatcctagccttcacagtggcggaggctccgatctcaccacctatcccttgcttgattaaaatatctatctcgtgatgatttccgtatccataagctaagttcatgctgttaatcatataatattgctgtgaaagcaaaattggtgtgtactgttacttttacttttaaaattatcgtcacttctattatgtgcctatgtt

SEQ ID NO: 195539 - DNA, 816 bp, Gossypium hirsutum
aacgaagagggcttaaagcgaggcgctaggcgagagcgagagtgagaggcggaaaagggaggaatgggagcctgggctatcgctgttcatggtggcgctggtgtcgaccctaatctccctaaggaaagacaagacgaggctaagagactcctcactcgttgccttgatattggcatctctgctctccgctctaatgtccccgccattgacgtcgttgaacttgttgtgagagaactggaaacagacccgctgttcaactccgggcgtgggtctgctcttacggagaaaggaacagtagaaatggaagccagcattatggacgggcctaaaaggagatgcggtgccgtttctggcttaaccacggttaagaacccaatctccctcgcccgtctcgtcatggagaaatcaccgcattcttatttgaccaccccgggagccgaagagtttgccaagaaacagggcgtggagatggtggacaatgattacttcatcacagaagataacgtggggatgcttaagttggctaaagaagcaaactcaatcctgtttgattaccgtatcccgacagttggcacctgcggtgcagctgtggacagccatttgcagatgaacgggctcccgatcagcgtctacgcaccggagacagttgggtgtgtggtggttgacaaggagggtcggtgcgctgcatgcactttaactggtgggctcatgaacaagatgtcaggaaggatcggtgactcgcccattataggtgcaggaacctactcatgtgagttgtgcggtgtattgtgcacacggggaaggagaagcaatcat

SEQ ID NO: 195540 - DNA, 706 bp, Gossypium hirsutum
  unsure (1)..(706): unsure at all n locations
cggggacttanttactggtcttaagcagctcggtgctgatgttgattgcattcttggcacgaattgtccccctgttcgtatagaaggaaagggtggtcttcccgggggaaaggtgaaactctctgggtctattantagtcaatacttgacagctttactcatggcggctccgttggctcttggggatgtggaaattgagataattgataaacttatttccatcccatatgtggaaatgactatgaagttgatggaacggtttggggtcaccgtggagcacactgatagctgggatcgattctttatccgaggaggtcaaaagtatatgtctccctggaaatgcttatgttgaaggtgatgcttcgagtgccagttacttccttgcgggtgcagcagtcacgggtgggactgtcacggtagaaggatgcggaacaagtagtttacagggtgatgtaaaatttgccgaggttcttgagatgatgggtgctaaagtcacctggaccaagaatagtgtaactgtcaccggacccccaagaaatccctcagggaggaaacacttgcgtgctattgatgtcaacatgaacaaaatgccagacgttgctatgactctcgctgttgttgccctttacgccgatggtccaactgccataaaagatgtggcaagttggagagtgaaagagaccgaaaggatgattgctatatgcac

SEQ ID NO: 195541 - DNA, 584 bp, Gossypium hirsutum
tatcactagatgaagcttttgacaagttctaccatggaatctctgcgcatggaccattttttgatcatgtattgggatattggaaggcaagccaagaaaaccccaacaaaatattgtttttgaactttgaagatctcaaggaagatatggattcccacttgaaaattttggccatgttcttaggagttcctttcacagatgatgaagagaaacaaggagttgttgaaaaaatagcgaaaatttgtagctttgagaacttgaaagaattggaagtgaacatgaaggacgtacatacttctggagttccacacacacatttttttaggaaaggagaagtgggagattggagcaattatctcacacccttcatgattgaatgtttggagaagcttattcaagagaaattgaatggctcgggtttaacatttaaactgctctccgaaactgctaacaatattgcttctacatgatcgcggggatgtcttctagcttttttgggaatgaaatctcttgtattcccattgtctgtataaataatcctgactagaatcctcttgtgatcatgatcagaataaattgctttg

SEQ ID NO: 195542 - DNA, 625 bp, Gossypium hirsutum
ctcctcccataaccctactctcctctcttccagaccaaatttctgacgcaatgagcagatccggccaacctccagatctcaaaaagtacatggacaaacaactccagatcaagctgaatgctaatcggatggttgttggtacacttcgtgggtttgatcagtttatgaatctagtggttgacaacaccgtggaggttatcagaggaaatagcgttgttactgttgaagcacttgaacctgtaggcagaatgcagggacttcggttttttctactggaaattccggaatcacttgatggtatctcttccattctctggtggttggataacatagatgctggcctcctagtttgtgatggactattaaatttagttaagaactcataggaactttagactgtttttggtggattctgctccttttccttatctgtaccggattgattgcccttgagcattccgaataggtttaattgaatgtagagaagggtagtaacagggatacttaccatcttaaatgctcaggtctagagtgaaacttatggtgcttatgtaaagcttgttctatccttgagggttaatgctcaatgcgaattgattaaaaaaaaaaaaaactcgagggggcc

SEQ ID NO: 195543 - DNA, 431 bp, Gossypium hirsutum
tgtttcatgagtaacgagaaaccctattcccctctttctcgctctcccgctccgctgtagaccaacctcccgtcactatgagcagatcaggccagcctccagatctcaaaaagtacatggacaagaaactccagatcaagctgaatgcaaatcggatggttgttggtacgcttcgcgggtttgatcagtttatgaatctagtggttgacaacacagtagaggtgaatggcaatgagaaaactgacataggcatggtggtgatcagaggaaattgcgttgttactgttgaagcccttgaacctgttggcagaatgcagtgattctggcttttctattgatttatcactttgatgtatctcttcgctttgttgtttcaatggcatccctgctagtttgggattgggattgggatattttatgtaattgagaat

SEQ ID NO: 195544 - DNA, 475 bp, Gossypium hirsutum
cccatttcacttcctttctctttttagatcaacacccaagaaaaaaaaacacagttcgaatttacaaaaatcatggtgaagtctcaaaggccgccatctggccgtacaaatctggcatcatgtattgtagcaaccattttcttgatctttcttgtaatcattgttctcattgtttatttcaccgtttttaaacccaaagaccctaagatttacgttaattccatccagctcccttctttttccgtcggcaacaactccgtcagcttcactttctctcaatacgtcaccgttaacaaccctaacagagccgctttttcccactacgacagcactattcagctcctttactccggatctcaagtcgggttcatgttcatacccgccgggaagatcgagtcgggtcagactcaatacatggcggccacttttgcagttcagtcatttcccttggcgcaaccgaatcaaagcgcggcgg

SEQ ID NO: 195545 - DNA, 473 bp, Gossypium hirsutum
atttcgttcgttgtacttagtagacgttgataaggaaacaattggcagagctctgaaattgaattctgtaaggaatggaaatctatggaaagaaattgatgttttgatattcaacacttggcattggtggcaccgtagaggactgaagcaacaatgggattatgtgcaatttgatggaaagattcgtaaggacattgatcgcacggttgcttttcgtacagctttgagaacatgggctaaatgggttgattcagatgtggataccaataggactaaagttatatttcaaggaatttccccttctcactacaatggcagagattggaatgagccaggagtaaggaattgctcaaagcagacaacaccatctaagggatcgagttatccaaaccggttgcctctggcagagtacgtagttaaagaggtcataaggaacatcaagaaaccctgtcatttgcttgatattacaatgc

SEQ ID NO: 195546 - DNA, 734 bp, Gossypium hirsutum
gctcagcacagcacttctccaagcatttaagcacccccacatcttcccctctttctcctcaatttctttctccctcctacgattccttccacccgcctgctttgttccacctctttctttctttttctccaaagccatcatgaatctcattaataggctcagccccaagcgtctctttcgatctaataaaaaagatagatccatcgtctccaagttcgacccctcctcctatagttccggttccgccgtttcctcctcttcctcctccgaatccgtctcttccaccctcaaagaacatcagtacccttccacggctaccgctggcttcgtaacgcccaccagtgttttgccccaaacatcaggtgactggtccgattttcccgctaatttttatctagaactttgccaggcgtttaaaatgttagacaaagataacgacggggttatatcgagaagcgagctcgaggctttgcttggcaaggtcgcaaggcagccgcccagccgggacgaggtttccttgatgttgagcgaagtggacggtgacggcgacggctacatcaacctggaaacgttgatgaaccaggtggttggaccggcttgcgacgaacccgcctgcgaaccggaactgagggagacttttgatatatttgacacagatcatgacgggaagatcacggcggaggagttgatggcgttttttaaggacaaaataggggatgagcggtgcacgttag

SEQ ID NO: 195547 - DNA, 440 bp, Gossypium hirsutum
cccacgcgtccgagcagatgcctgtaacggctagcaagttgcgccgattgttgaaatctgaacacccatatgtggagcgaaatattggtacagttgttagcatcatcaggcaatctatgcagaattctgttgtgttctgaagctgctgcccaacaacttagaatggggcacctgctaaatgcatctggagaacatgtagcagctaatgagggagcggaagccttacctcctgagactcctaccgactcaaaaattgcaatcgatacgacagaaatcatagatggtggcatgtgggggccggataagagaactgcacatcctgcttctactcaacatagagctgaattgttaaaaattggaagcagtatttctggaccggacatagttaaaaaccaaacaagattgtcttttgagccacacatcatgttgatgtccgcaag

SEQ ID NO: 195548 - DNA, 448 bp, Gossypium hirsutum
tttagattctcccaaattttaactcttttgagttttttttgagagttctcaaagaacaaaaaaggctccctgtgtattctttcggttatgatttagccctgttagccttgagtatcacttctcattatgaacaaccaatatggtgaagatggagatgaagccactgttatggggtttgaagtgcccagatcacctgattcaagttataataatgtgtaccccgtatatgaagacgatgcacgtgacccgcctgttgtccctcctcacctacatcgtaccatgcttagctgccctgcaagcataaatgcttccgggagtcttcctttacccggcaatgtgattttaaaccatctttacattgaaaaccgagaggcaccaagatcggtagtggcacttggattcactcaacgattccgttcgaagtatgttaccgtcatactatacaaac

SEQ ID NO: 195549 - DNA, 768 bp, Gossypium hirsutum
gaagcagaagaatatcttcatgtctcagcctctgtaactgcggccggatggaagcagtgaaggttgaaggttttggccctgattcaggggtggaggatttagggcgatgcgttgatgaaatttccaccactgtcagtcggctcgagcaaagagttaacgatgtcgagcagttctacttgactacagataatatggagttgactattaccaaatctgcttcagcttttaaggaaaaagtcaaggaaaaacagcttactggccttgaaaagcagcagcaagaagcatcacaaagagaagctgctgctctgaagagaatgcaggaacttatgcgccaatttgccacaattttacgtcagatcactcagcacaaatgggcacatccctttatgcatccggttgatgttgaaggtcttggtttgcatgactattatgagattgttcagaagcctatggactttggtacaataaaaagcaagatggaagctaaggatggtactgggtacaagaatgtacgcgaaatttattctgatgttaggttggtttttaagaatgccatgaaatacaatgatgaaagacatgatgtccatataatggccaaaactttattggaaaaatttgaggagaagtggctgcaacttttgcctaaagttgctgaagaggagaaaagacagcttgaggaggaagcaaaagcagagctagatgtgaagctggcacaagaggcagttcatgctaacatggccaaagagttgagcaatgaactgtgtgacg

SEQ ID NO: 195550 - DNA, 464 bp, Gossypium hirsutum
aaaacccttttttttttccattttcaagacttcatttaaaaaaaaaagagagcttctgcttttctctccctcccattttcctcttagcctcccccatggccgaccatgggctcatcgggggcgtctcctcgcccatgcctcgaacggcagtcggtgttgagtgaaacgggcccttttggtcctcttccgaactggttcgaaggcggagccttcatagcccatcgcgacggaagagaaaagggaaaaccccctttttggttcgttgttcccttccacggccattggctgaacccccaggggttcaacgaccttcaaatcggcgagggaacgccggagcacccccaaacagtgaatcggaggtacgtctttacaattgttatctttgtattattatttcatatgtaaaaagaaatgaaaagaaaaaaaaaacaaaacaaagtaaaatacaaagattagaaactgaa

SEQ ID NO: 195551 - DNA, 441 bp, Gossypium hirsutum
actgcattcaggcttcttactataaggcccgatgaacgtgttgatgtaatgtttggaaacatcaagcatgccttcttccagccagcagagcgagaaatgatcactctggtgcactttcatttacataatcacatcatggttggtaataagaaaaccaaggatgtgcagttttatatagaggtgatggatatagttcagacattgggcggtgggaagagatctgcctatgaccctgatgagattgaggaagagcaacgcgagcgtgaccgaaagaataaaattaacacggacttccagaactttgtgaatcgggttaatgatttgtggggacagcctcaatttaaagcatttgaccttgaatttgatcagcccatgagagagcttggcttccatgggggttccccataaagcctctgctttcattgtgccaacatcaaactg

SEQ ID NO: 195552 - DNA, 421 bp, Gossypium hirsutum
  unsure (1)..(421): unsure at all n locations
ggagaattaaggtccatttaaacgcattgaagaagtacacttacgggaagcatattgttgcgcgtgtagagaaacttgttgctgctggagagaggagaattgctgctcagtctgtgcacccttcttaaatcggtgtaggaaagagacatgtttgtacagctaacagaatctatgtgaagctttcccttcttccccccatatgtagggtcatggttcttctacctatcttcttagacaggtaagtaagaactgtatgaaaatataagttgttgcttgccttgtaccaggaaaaaaaactgtacattgtgtagcttaagggtttatacatagaaatggagccaaagctgagagtttcagctgttgcaatccaaaataaagaacactcatagtatgagtaacataaaataaannnnnnnnnnnn

SEQ ID NO: 195553 - DNA, 673 bp, Gossypium hirsutum
gcaagtagttgataaggtatataagctatccccttttaacaaatcactgcatcaccttccaattcaataaattccaattttccttattatttcataatcaaggctatcttctgcttttctcacattaaactttgtgtccaatccgagccgaggatctgctgcatagccttctttcctcgaacaacagcatgacagtcatcagatgatgaacatagagttttgttagtagtaatagaggcttattaaggccctgagcccctgactgctgtgctgggtcatgtcttgcaatgggatggcttttttcccagcaaatttcatgctccaatctcctcatgaagaagatcatcaaccctcaacttctatcaatcaaatgcttccttcttgcccgccccaagacttccatggtgtggcatcatttcttgggaagagatcaatgtcattttcagggatagatgtgtgcgaagaagcaaatggggaggatgatttatcagatgatggctcacaggcaggagaaaagaagagaagacttaacatggagcaggtaaagactcttgagaagaactttgagttgggtaataagcttgaacctgagagaaaaatgcagctggctagggctcttggtttgcaaccaaggcagattgctatttggtttcaaaacagaagagctagatgg

SEQ ID NO: 195554 - DNA, 378 bp, Gossypium hirsutum
aagcttttatctttaaaaaaaccctaaaatttttgagatgttctctcaacctccagcctaatgtctaatgtccaggcctccaattgcccgcttgtaaccggcgaagcatggccctccaacggtgcgggctcgatgcccggtaagcctcttctcctctctccaatccttcgtatgtgttgtggatccaaatggaaaaaggaaaaaaaaaggaaaaatagaacaaaattacaataaataatcaccttagaaatattcttggttgcctctcttctgatttttgtgtgtattttcttttattattttgcccaaaaaaaacccctttacagtgaaaaaatcgaaggctttatagccaaaagacaagcaggttttgcctatttc

SEQ ID NO: 195555 - DNA, 438 bp, Gossypium hirsutum
cttcaaagaatttttgagggaggttgcaataatgaaacgtctacgtcatccaaacattgttctttttatgggagcggtcacacagcccccaaacttgtctatagtgacagaatacttatcaagaggtagcttgtttaggcttttgcataagcctggtgtgagggaggtgttggatgagaggcggcggttaagtatggcttatgatgtggcaaagggaatgaattatcttcatagacacaatccccctattgttcatagagatttgaagtctcccaatctgttagttgataaaaaatatacagtcaaggtttgtgattttgggctttctcggttgaaggcaaacacatttctgtcatccaagtcagcagctggaactcctgagtggatggctccagaagttcttcgcgatgagccatcaaatgagaagtccgatgtata

SEQ ID NO: 195556 - DNA, 412 bp, Gossypium hirsutum
tttagttccagttcgtgaggtgaatttcttaaggttttgcaagcggcatgctgaaggggtttgggcagtggtggatgtgtccatcgacaccctccgagaaacttcaggtgcacccacaacatatgtcaaatgtaggaggcttccttctggttgtgttgtgcaagatatgcctaatggatactccaaggtaacatgggttgaacatgtagaatacgacgagagtcaagttcaccatctctaccgccctttactaagctccggcattggctttggtgctcaacgttgggtcgccaccctccaacgccaatgcgaatgtcttgctatcctcatgtcctccactgttcccactggagaccatactgctataacggcaagtgggaggcgaagcatgttaaagctagcgcagcggatg

SEQ ID NO: 195557 - DNA, 704 bp, Gossypium hirsutum
acttcccacaagaatctttctcagattccatttctggttttccttttggtattagtttcacttcaacagaagagagcaaaagctttttatgcctctttgattaaactacttgagctatccttgaaaaaaaaaaccagaaaggaaaaatgggtgttttgagctctgtaatgggtgtttttggattcggaattggaacttcggttgggatcgtcattgggtattacatgttcatctacttccttcccactgatgttaaggatcctaaaatccgtcctttggttgaggaagactctaaaactttgcagcagttgcttccagagatccctttgtgggtcaaaaatccagattttgaccgtgttgactggcttaacaaatttatcgagaccatgtggccttatctagatacggcgatttgcacaactgctaagaatatagcaaagcccattattggtgagcaaattccaaaatacaaaattcaatcagttgaatttgaaacacttactttgggtaccctgccaccaacttttcaaggaatgaaagtctatgtcactgatgagaaggaaattattatggaaccatcacttaagtgggcaggcaatcctaacatcattatcgcagttaaagctttgggattaaaagccactgttcaggttgtcgatttgcaagtttttgccgttcctcgaattactctgaagcctttgctc

SEQ ID NO: 195558 - DNA, 855 bp, Gossypium hirsutum
ggcaagtcagagaatgacatgttgcaatgtttcattgaatctaagtataaagatggtcgcccaactaccgaggctgaagtaactggcttactgattgctgcgctctttgccggacagcataccagttctatcacctctacttggactggtgcctatctccttcgtcacaaggagttcctatctgctgtgattgaggagcagaagcaaataatgcaaaagcatggaagcaaggttgatcatgatatcttatctgagatggacaccttgtatcggtgcattaaggaagctctgagacttcaccctccactgattatgcttctacgtagttcacacagtgattttagtgtaaaaacgcgagatgggaaagaatatgacatcccaaagggtcacatcgttgcaacatctccagcatttgccaacaggcttccttacatttacaaggatccagacacatatgatcctgatagattctctgttgggagggaagaagacaaggcagctggggctttctcgtatatttcctttggaggcggcaggcatggttgccttggtgaaccgtttgcttaccttcagataaaggctatatggagccatttgttgaggaacttcgagtttgagcttgtgtcacctttccctgagattgactggaatgctatggtggttggcgtgaaagggaaggtgatggttcgttacaagcggcgacagctctctgttgattagcaaacataatgtacctgggttcgttagcagttttaatttatcttttttaaaatgttggcctattttgatctgttttggaacttttgattttatttgtgagcattctctggattttattttctagttaatataata

SEQ ID NO: 195559 - DNA, 400 bp, Gossypium hirsutum
cacaaaaccgcaccaaaacaaaactcatttgcctctttatctcccaaaccaaacccctatctctcgaggattcaccatgaaaggcggtcaaacaaagtccgattcgatgcaggctggaaacaaactgaaaggcaacggcgcaggcgccgggaaacgtgcgaagaaagccgccatggatccaaacaagccgaagaggcctgccagtgctttcttcgctttcatggaggagttcaggaaacagtacaaagaggcgaatcctgataacagatccgtgtctgctgttggcaaagctggtggagaaaaatggaaaagcatgacagatgctgagaaagctccttttgtacagaaggcagagaagcgcaaaagtgaatacaataagaagatgcaggcatatagtctg

SEQ ID NO: 195560 - DNA, 613 bp, Gossypium hirsutum
gcgactccacagcagtccgctttagtcatagtaatctatgagctcttttatcttagatttataggttaaacagggtgtttttttaggtctttatagagtttagaaagagaagattgcaaaaaatatggtctgaacgaacatagtatgtcatagcaccacagttatggtgccaacaacgtgagattttgtcggaaagcccgacaacatcaaaagtctctgtgtctaaatagttatcgcgatcttcaacttaaagaacaacaatcttcctctgccaaacaagcctttaatcacactttcgttccttcgtcgtcttcattgccatcgtcatcatcggcccgatcttcgttttcggcatccttgccggtggaggatgaaccatcggcgggaacgaaggaaacgaaggtggtggagggggtggaagttcaggttacgccaaacagatgcttgagttgcaagaaacgcgtggggctcacggggttcaagtgcaggtgcgggatggttttttgtgggatccataggtaccctgaacaacatgcttgtacttttgatttcaaagggatgggaaaacaacaaatcgccaaagctaatcctcttgttaagggtgagaagcttc

SEQ ID NO: 195561 - DNA, 432 bp, Gossypium hirsutum
aaaataaagaagccccaagagaaaagaaaaaggaggtgtgtggaatcttcaaagaagaccaggaggaagaatccttcccttttttctttttttccccagaaagagcgattcctttcccttcccttctagttcctcgtttactttttcttcttctttcccttctgattataataagatttgggtttcgttatcctctgaaactctcgtctctggtttgaaaggagattgaaaaaatatggctgaagaacatagatgtcaagcaccacagttatgtgccaacaactgtggatttttcggaagcccgacgactcaaaatctctgctctaaatgttatcgcgatcttcaacttaaagaacaacaatcttcctctgccaaacaagcctttaatcacactttcgttccttcgtcgtcttcattgccatcgtcatcatc

SEQ ID NO: 195562 - DNA, 539 bp, Gossypium hirsutum
cggacgcgtgggcagcaattgttcatatggtctaatgtatatcaaacaatcatggaaaccattatcatttgtcgccccatctttgaagaagaacatggtttgtgaagctctgtccttaaccatccctttctttacaaatccgccctcccgcgcggctaaactggctactaaccgctggaatttatgtcgttcaactccaagaattcgatgctcaagttccagtgcagaagggcctgtaactgctgataaacttgaaaatgattatgccttgactggttctgcttatgattttgaaagaggtaccatatcgattactcgtgagtccttatcttctccaaagaaggtaattcttgtaaggcatggccttagcacttggaatgaagagggtagagttcaaggcagctcatacttatttgtgctaacagaagccggagtgaaacaagctgaaaggtgtaggcatgcccttgcaaatatgcactttgatcagcgttttttaagtccgatatccgtgctaagactactgctgaagtgttatggca

SEQ ID NO: 195563 - DNA, 529 bp, Gossypium hirsutum
gttagtgaactcaattgttgcctctttcacctttatattatctttaatgtttttcttttccttattcagttattaatttgtatcagctcttttccttgcttacttacggtttttggcaagaattccatgaattttctttgtattgggtattaaattctctttttttagtgctttgctctgcatgctttagtcgttttcttagagttttggagtgcaccccaagtagaaaagatgctgtcaacgaagtcggaatcggatatcacaagccttgctccatcatcaccgtcgaggtctcccaaacgtcccgtatactatgttcagagtccatcacgagactctcatgatggagacaagtcatccaccatgcaaccgagtcccatggagtcgccttcacacccttcctccgttggccgccattccaggaactcttcggctagtcggttttcggggatattccgctcgtcctccggtaggaaaggggggaggaagaggaatgataaagggtggcctgagtgtggggtaattatgg

SEQ ID NO: 195564 - DNA, 511 bp, Gossypium hirsutum
tccacgcgtgcgcccacgcgtccgcccacgcgtccgctatccccaaaatcttttaactttcattttgctatctactttcattactcatctgcacattgctccttcattctggttctttaagccaagtttctgccgaggcgaaggcgtgaccttccagatcttctcccatcagctttcaggcacgcataagcctctgctgcagaaggggaggggacatctctgtggataaccgtctttaacaccattaagtttcccctcaaatcccaccctaccaaacctggcgctgaactgaaagttctactgtcgaacgctacattaaaataaagtctcgtactcgagcgttgcataaaagtagacattgaccgttgtcgcttctcttgaagacccaaagggcattcgcgataaacatggacactttgttcaaccgacgaatagcatccatgacatctatcattgacagtaaccctcctgtatctaagattcgcataattgagaaataaataccatgaaa

SEQ ID NO: 195565 - DNA, 677 bp, Gossypium hirsutum
ctttcaggcacgcataagcctctgctgcaaaaggtgaggggacatctctgtggataaccgtctgtaacaccattaaggttcccctcaaatcccaccctaccaaacctgtcgctgaactgaaagttctactgtcgaacgctgcattaaaatagattctcgtactcggtatgccttcttgtgttttataacttctgtttatactttcgctctttttcaagttttttaaaccttcaaattctgccagatgtctttgaatattatgtgctaaatctctacctggtgtatttcttctctcgtgtactaattgaggtctggagtaccataacatccatagagcgtagcagaaaagtagacattgactcgttgtcgcttctcttgaagacccagagggcattcgcgataaacatggacactttcttcaaccgtcgaatagcatcgaggacatctatcattgacagtaaccctcctgtatctaagattagcaaaattaagaataaaatcccatgaaatgcgccagattgtaaatgtaatttttgagggcaactgtaagctccaaagtttcttggaaaattcttttaattcggtctgcaataaataatcattggggacctgaaaaaaaaaaaaaaacaacaaaaacagaaactaataaaagcaacaaaaatcaacaaacaaaacca

SEQ ID NO: 195566 - DNA, 550 bp, Gossypium hirsutum
ctcagagtcctttcggaatatcccatcgtcaagcattggcacaggttacagctcaagctgccctagcacaatctcaagttcatccacaaaccgaatatcaagcgttgacggtatcagctccgtcggagtcattgatccgtcatccatccttcactcctgaagaaacttcacagttgatgcctcctttggcctcagaacctcagggttctgcaatagaatactcgggagcttcccaatctgataggaaaaaccagcttcctattgctgtggataaacctgctgaagatggctacaactggcgtaagtatggacagaagcctattaaaggctgtgagtatccacgaagctactacaagtgtacctatcttaattgccctgtgaaaaagaaggtggaacgatctgcttatggccaaataaccgaaattatatacaaaggcgctcacaatcatgaaatgcctcagcaaaataaacaagcaaagggtggtagtgatggaaatgcaaattcacaggcatatcctgaatttggttctcaggttgcagctttaaattc

SEQ ID NO: 195567 - DNA, 408 bp, Gossypium hirsutum
aaaaaaaactgcaatcccgagtggtgtgatgaagtgagtctttcaatcaaagatcttagtgatccaatcgagtgagtaagtaatatatctgattctgcaatttgtatgcatgtatatacatgaatgaatgtgaataccattcaccactactacttgcatggaattccatttgtgttttgcagacggtgtacgacaaagacacgttgggtgcggatgatcctatgggaactgcagagattgacttaaaaccatacttacaagcagcgaggttaaggaaagagttgcaagaactcccaaatggctgtgcactcaagaaagtacagccaagcgggacaaatgacctcgctgatgaaaagccgcattctttgggaaaatggcaggatcacccaagacatgcgtctcatactc

SEQ ID NO: 195568 - DNA, 573 bp, Gossypium hirsutum
  unsure (1)..(573): unsure at all n locations
ctccttctcttcaaattttcctgctcgttgctttgcaagcttggtttattagattacataaaatgccaaggacaagggaagagattgaagagcaggtggaccttgatggagacaatgatcctgaggagactatagaggaagaggttgaatatgaagaaatagaggaagaggaggaagtggaagttgaggaagaggtacaagaggaagtggaagttgaagaagaagaagaagaggacgaggatgaggatgctgagcttgttgatttccagaaaggctctgatgctaatgaggggatggatgattgtgaaacacaggaagaaatgataaagaagcatgcagagcttcttgcacttcctcctcatgggtcagagagtctaccttggtggcattcctcatgatgcttctgatgaggacttgaggagatcttgcgaatctataggagaagtcatagaggttaggataatgaaggagaaagattcaggggtggccaagggttatgcttttgtgaccttcaggtccaaaaagttggcttccanagctattgaaaatctgaatggttctgaattcaaggcc

SEQ ID NO: 195569 - DNA, 671 bp, Gossypium hirsutum
ttcattcgtccgcccacgcgtccggcagaccaggaaaacctatgaacaaaaatgttctcaaatgagaaaccgcaacactaaacgagatggcctctattctggtgacaaaactcgagctgaagtaaaagacttgcatagcagaatcttggttgcaatacgaagtgcagaaacaatctccgaaagaattgaaaaactgagggatgaaggggtgcagccacaacttactgagctgctacacggactaatgaggaactggcagataatgttggaatcacacgaaactcaaaaccgaatcatgtttgaagtaaagtctttcaactgtcccacttacggaaagttttgcaacgactctcaccgtcttgccactcttcagctcgtggcagaacttcataattggcgttcttgctttgttgcgtatttatgttcacaaaagtcatacattgaagctcttagtggatggcttgcgaagttcgttgcacccgaagtagaattatgctccaagaagaggtcttcggcccctacgctaagagtcaatggaccaccgttattggcaacttgtcatgaatggttggctaccttagagaagttgccaaaagaagctgtaagttgtgcattaaaaagctttggaaaggatatgcgtgcgctttgggttcaacaaggtgaagagcaaa

SEQ ID NO: 195570 - DNA, 806 bp, Gossypium hirsutum
ggatctgggtaactctcgatttcacgttttggttaatgggttagtagctttaaccaattttagcggtggggattttgtaaatcctaaagttatagaatatttgctttacgttaattcagaaaaggttgaaattcgtttcgttccagctaaaaaatcgaattttgctttcgttaatgcaatcgaagtgatatctgcaccaaaagatttggtactagaaactgcacagtatgttaatggtgataaaattgaggaatttcagggtttaaataaacaagcatttgaaactatgtatagggtaactgtcggaggtcctaaagttactccgttcaatgattctttgtggagaacttggatccctgatgatgagtatttgaaatcgagtgagggttccaataaggtgtacttcggtggtcggattaagtaccaagatggtggggcgagtcgtgaggttggtcctgataatgtgtacgattcagctcggttgattcgaagcaagaatgcttccatccctaatgtgaacctcacttgggaatttccagtgagtgaggattataagtatcttgttaggatgcatttttgtgatattgctagtatatccctgggattgtggtatttcaatgtttatgtcaatgaacatttggcatataaagatttggatctctcggttgttacgaattacatgctggcttctccgttttatgctgattttgtggttgatgctggtcgttccggggtcattaccgtaagcgttggaccttctagcaagagcatggggtatacggttgatgcgattctaaacggagtgg

SEQ ID NO: 195571 - DNA, 597 bp, Gossypium hirsutum
cgtaagcggcatcatcttccaacgatccaccgacctcactgtgtctgtctttacctggggtggagtcatgtgaggtggtgtcaacccacccaatatcggagtcaacttaaaatcgcattgaagaaaggggaagtggggtgatggttttcactagcgtgttttatggcggtgatgcaagagatgataatggtggaggtgaggaattacatgacgcagatgctgcaacagccgcagcagccaaacggcgcagttccgggagagagcgggaatggggatgtgtttggatggggggttcaggaatctcatggctgtgaaccgagtcgggatgactatgatcgagtgaaaggctaaaaatgagagtaaaagatgagaaaaaactgggctgtgttctttcttgctatgggaattaggcggtgaataattttgttcattttacggagagagagatgggtgaaaaagctaaaaaatgacaagtaaaagaaaaaaagggcgacttttctaattaaaatttacctgtctcttagccttgtttttagtagatattagtgaaagaagaaaacggaaaaagaaaggaaaaaatttcctttagaaatttcc

SEQ ID NO: 195572 - DNA, 913 bp, Gossypium hirsutum
  unsure (1)..(913): unsure at all n locations
gtttgggattgcattgtccgcaagatgagatattcctatagacctgagtgggtgtagtagtcttggtgttatattagttcgtactaagacaataaaattagaaataggtagcatcaaaacttttattttagggaaaaggctaaaaagtaaaaaagagaaaagctttatagggaaatgtatacgagttagaggaacctgttaaagcaaaaactgaaaactgggttttaaagcattttaagtattcatggataacaaggcatgtaacaaaatgcaaacagtagtgagtaaagcgaaaaagaagcaggtgaaggatgagttggaacgtattaaacaagctgagaagaaaaaagaggcggttggagaaaagcccttgctacatccgcagccatccgttctgagctagaaaaaaagaaacagaaaaagaaggaagaacagcagaggcttgatgaggaaggtgctgcaattgctgaagccgtcgctttgcacgtcctacttggtgaagactctgacgactccgctaacattatgctaaacaaggaagaggggttcaactgctggggttatggtatatatatggatggaggaagggcctatcttccccatcaacttcacccaaactgtcaaggctgggtctcaaatgcatatagaactggggacggtgactggtccttctcatatggaagggaggtgcaagcaccatttttggagaatggaaggttaggaagtggcggacttccagttggtctgattgcagcacaagctatttcagcactccaaatcacagaggatgcaaaggtcctccactgaggctagacaaagcgttttgttgtttggtcataattctgaataataatgactctctggnatatgtatatgtatatgtatatgtatatgtatatgtatatggatatgg

SEQ ID NO: 195573 - DNA, 1175 bp, Gossypium hirsutum
gtagaatagatacccaaaaatcccatctccaaacccaaaatctccgcccaacacttcaaaccctccacgtttgatccaagcataatatttttttatttccattgctttgatttgattcgcgattatgggaatcgaaataagcggcggcacgatcattccaggaggttggggggccgccgccatggctgtcgcggctaagacatgcgacgcatgtaaatcatcggcggcagctatcttttgtcgtactgattgggtctttttatgcttgaattgtgattccaatttccattccggtcacgaaagggtgtctatgtgtgaagtttgcgaacaagctccggcggctgtcacttgtaaagccgacgcggcggctctttgtgtcacttgcgacgccgatatccattcagcgaacccactggctcgccgtcacgaacgtgtacccatcgaacctttctacgactccgctgattccatcgtcaaatcttccccttttagcttccttgtgccgacgacggatcataatggtactaattgtaaacaagaaattgaagctaacaaaggggattcgtttttcacagaaatggatcggtttatcgatttcgggtacccgaattcatctcaacatcttcatgatgccgccatggatagcgttgttccagttcaaactccaaaaccagtcattccactgatcaacgatggaagctgtttcgatactttcagctatcaaactcaatcatctctcagtcatagcgtttcatcatcgtcgcttgaagtaggaacagttccagatgggaattaccacgcaacacaagtgggtggttcaatcgatcgagaagctagggtttttagggtcatagagaagagaaagaacaggaaattcgagaagacaatacgatacgcttcaagaaaggcttacgctgaatcaagaccaagaatcaaaggtcgattcgctaaaagaacagaaacccacaacgatgatgtcgatcacatgttcaataactcgtcttcttttgctgttggtcctgctggtttcatggcggaaacagactatggtgtcgttccatcgttttgaatgttgatgttttatgtttggtttaattctgtaatgtattaaattatttaatccaatttccagcaaagtagaaataaccttatggccattgaaaatcaaggaagat

SEQ ID NO: 195574 - DNA, 632 bp, Gossypium hirsutum
gaaacccagaagaaatgaagagagtccaacaggagctggcggaggtggtggggctcgacagccgtgtggaagaatccgatttcgataaactaacctacatgaagtgcaccctgaaagaaaccctaaggctccaccctccgatccccctcttgctccatgaaacggcggaggacgccgcggtggcggggtaccaaatcccggcgaagtcgcgcgtgatgatcaacgcttgggccattggcagggacagaaactcatgggaggatcctgatagtttcaagccatccagattcttgagggaaggagtcccggacttcaaaggcagcaacttcgagttcatcccgttcgggtcgggccgcaggtcgtgtccgggtatgcaactcgggttatatgctcttgatatggcggtggctcatttgctccactgttttacgtgggaattgcctgatggaatgaaaccgagtgaattggacatgagcgatattttcggactcactacacctcgggcgaaccgactgtatgcggtgccaaagaaacgcctcgtttgtccactcttttaatggaaaactctaaaaaaatcaaaacaattccattgagtcttgaattgcaacttatgcagagtaatcccgaggaat

SEQ ID NO: 195575 - DNA, 1092 bp, Gossypium hirsutum
atttgttttttttttctctcactaaggaaaaaaacaccttttttctctttcaaaaggacagtttttttttcttacacacacaacaaaattccaataaattcccttaatttctcttagtttttgcttacgaaaatactttatacgtattcaccaatgcatgatctttcgatccaatgtaatttcgacccataaaacacgcttgatttgactcactgagttggagaaaaaattatgatagaagcaatggagagttccgtcgtcaatggcagtggtttcactcagttacaacagagctatggagatagtagtgaagaagagctatcggtgttgccacgtcacactaaagtggttgtcactgggaataaccgtaccaaatcggttcttgttggtcttcaaggtgtggttaagaaagctgttggacttggcggatggcattggctggttcttaccaatggcattgaattaaagctacaacgaaatgccctcagcgtaatcgaagctcccaccggtaacgaagaagatgacgaccttgagttcgggaacatgcagtggaacggatcagacttggcatcggatgacactcaaaagtcccataggtcgagacataagtcgcataaatcgacggggtcttctcacaaaactacgagcaggtctttttcctgtgactcacagtctaagagttctgtttcgacaccccaggggtccacgaaagttgacctcagcaaacttgagatggctgctttgtggagatattggcgacacttcaatcttgtggatgccattcccaatccatcaaaagagcaactagtcgatgttgtccaaaggcattttgtgtcacagcaaatggatgagcttcaggtcattgtgggatttgttcaggctgcaaagagattgaagaccgtctgcaaatgaccccgataagaatgttcagacgggttttgagttgggttgtcaatgctaacagaaacttggtatcctaatgtccttgtcccctagtagctatatctgtaatatatatatatatgtatgtatgtacttgtggcttgtttatctttgcactccctctgttgagtaggttaatatttacttgaa

SEQ ID NO: 195576 - DNA, 444 bp, Gossypium hirsutum
caagaacacactgcaaggctacttttacagtgcatttcaccaaaatgtgaagtcaaggtgttttcagtgtaaaaaactgtgagtatttagcttcaatttattgcttatttatgaatttaaaatgatgaaatcatggtgaaaaatggtatctatggattaaatgatgaaaacccagaatgaacatgtaaatcaccaggtgaataattgtgatgatttgttatcttttgcagcttgaaatatattttgtcctgtgtttttgttctttgtctctgttctttagtggatgaatggactccttttagatgtgatgctgagaaactgttggattgattgattgatgaaaaaaggtataccaaaaaagaggcagacatgagattcccagttccacttttgaacttggtccatttttttagcttttgctttgagttggtggatggtggatcc

SEQ ID NO: 195577 - DNA, 1720 bp, Gossypium hirsutum
tggtcatcattttccgatccgataatgaacctttcaagaaacacatgaaaaggtttgtgaccttgattgttgacaaactgaagcaagagaagttgtttgctccacaaggaggacctattattttagcacagatagagaatgaatacaacactattcaaagagcattcagggaaaaaggggatagttatgttcaatgggccggtaaactggcccttagcttgaatgccaatgtcccatggatcatgtgcaagcagagggatgccccagatcccattatcaatacatgcaatggaaggcactgtggagatactttctatggtccaaataagcgcaacaagccggcattgtggactgagaactggactgcacagtatagagtattcggtgatccaccatcccaaaggtcagctgaagatttggcatactcagttgctcgattcttctccaaaaatggaagcatggtcaactactatatgtactatggtggcaccaattttggcaggacaagtgcctcatttacaacaactcgttactatgacgaagcccctcttgatgaatttggtcttcaaagggaaccaaagtggggtcatcttaaggacgtccacagggccttgagtttgtgcaaaagggctctattttggggggttcctactactctaaagctgggtccagatcagcaggctatagtctggcaacaacctggaacttcagcctgtgcggctttcttggccaacaataacacccgtctggcacaacatgtgaatttcaggggccaggacattcgcctgccggctcgttccattagcgtcctccctgattgcaagaccgtggttttcaacactcaactggtcacaactcaacataactcaagaaactttgtaagatcagaaattgcaaacaagaactttaactgggagatgtacagggaagtccctcctgtcggactgggatttaagtttgacgtgccaagggagctttttcatttgaccaaagatacaaccgactatgcttggtacacaactagccttttgttgggtcggcgagatttaccaatgaagaaaaatgtccgcccagctttacgggttgctagtcttggccatggaatccatgcctatgtaaatggtgaatacgccgggtctgcacatgggagcaaagttgagaagagctttgttttccagagagctgtaagcttgaaggaaggggaaaaccatattgctctcttgggctacttagtgggactccctgatagcggagcctacatggagaaaaggttcgctgggcctcgttctatcaccatccttggtttgaacactggaacactggacatatcacaaaatggttggggccaccaggttggaattgatggagaaaagaagaaattgtttactgaggaaggctcaaagtctgttcagtggacaaagcctgaccaaggaggaccattaacatggtacaagggatattttgatgcaccagaaggggacaacccagttgccattgttatgactggtatggggaagggtatggtttgggtcaatggtagaagcattggccgatattggaacaattaccttagtcctcttaagaagccaacacaatccgagtaccacatcccacgggcatacttgaagccaaagaacctgattgtcctccttgaggaagaaggaggcaatcctaaagatgtccatatagtaacagtcaacagggatacaatctgcagtgc

SEQ ID NO: 195578 - DNA, 516 bp, Gossypium hirsutum
ccgggccggccaagccgtccgcccacccttccgaacaaaactaaatgtccagaattagggtttcgataaccctaaccccagcatagcccctacaactccgacatcatttgggtccctttgtccttcaattagatcacagcttttcgttcaaaaatatattctcttgttattgttcttaatttcaagcaacaatggcggagcacttggcctcaatctttggtacggagaaggaccgcgtgaattgccccttctatttcaagattggagcatgccggcacggggacaggtgttcacggctccacaaccggccgacgatctctccgactctcctcctttccaacatgtaccagcgcccggacatgatcactcccggagtggatgcccagggccagcccatcgatccccgcaagatccaggagcacttcgaggacttctacgaggacatcttcgaggagctgagcaagtttggtgagatcgagagcctcaacgtttgtgacaacctcgccgaccacatga

SEQ ID NO: 195579 - DNA, 607 bp, Gossypium hirsutum
aagcagtatcgttgtatacactcgtctagttgtcaatgcacaaagggtcatctaagtgaagatgtgatcttcttagtgtttcaacaactcaactggaatccgaagttgattgcgactctttcatgcgtatgcaaatggtttgatgatcttgccaagagagtactatggaaagaattctgcataacaagggccccaaagatgatgcttgatctgcaatctagtggaagtcacagtgttgatgggaactggagagcccttggaaaactgcttatctattgttcaggttgtagcggtggtcgcttgttcaatagtgttcagatccctggtcattttgtttacaggaccaggttctctaggacctcagggaagagcttccttttaccacaatgccggactgatattttatatgtgtctgacccttgtgaacatctggaccaaggggacgagggtgatgtgggatttttccgaggagttttcaagtcattcttggtgtccaaggttcggaagatgttgattgacagggcagccaagcttcatccaacagcagtttgcccttattgtaaggcaaagttgtgggacatgctgcaagctaagatgataccgcaaa

SEQ ID NO: 195580 - DNA, 609 bp, Gossypium hirsutum
gtttcaggatacctgatcacaagtctggctagttggatgtccaatatcttcatcctcatgctgccattgattctaccattggcctgaatccaactcccctattggagctttcagcaacaattggcagcaaggagcttgctttgggtggtgaaattggatttgatacagcttctgcttcttttaccgagtacactgctgggatcaacttgaacaagccagatttctctgttgctcttttgctgactgataaaggtcaggcattgaaggcatcttatatccattctgtcaaccccttcacttgtgttgccgctgaaatggctcatagattttccacctacgaaaacactttcaccattggaagttctcatgctgtggatccttttaccgtggtaaaaacacggttctctgacaatggaaaggttggaatgctgtgccaacgtgaatggaggcccaagtcacttgtaacattttcggcagagtatgattcaaaggccataaatgcatcccctaagatggggcttgcccttgctctcgagccttgacgggaaggtctcattttggattccatatttttaaattttgatttgaccttttccccgaacccttggg

SEQ ID NO: 195581 - DNA, 330 bp, Gossypium hirsutum
aaaagggtaaaactgatcaagctctatctatgcaggctgagcaactagaccctgagaactctgaggcttttcaaggtcagcattcatcatctaaagcacctacttcatcatcgtcggactgtgaagagagaggagatgcaaaagtgaatactggagtgaacgctaccgatgatgagacggctgctcgagtaattgagcctcaggatgcaaataagacatagaacaaaaaacaagttgaccggtcctcatgtggctccaacactccttcaagcagtgaggtagagacagatgcgttagaaaaacatgaaaaagacaaggaagattcaaaag

SEQ ID NO: 195582 - DNA, 412 bp, Gossypium hirsutum
cccacgcgtccgtgggagtctcaaacatgaaaacatggtttatttgtttggctctaatgggcatagtgccgatggaagaggtgatccaaattgatgcagcaatgacaatccaccatccagaggtctccggtcttgtttcctaccgtcgccttctccaagaagctgttaatccttggaatcgtggctgctcaagactcactaggtgtcgaagttaatgtatattttgataatatgtgacggtatctttcgtttataaatgtataaacctctgcatattaaggcaacacgattaatacattttatctctttcttttacctaacttggttcgccttaaccatgatctatgatctagctttgcattgtcatgaacccaaaggttttgtgtctttgctcgatcctagatctagtaac

SEQ ID NO: 195583 - DNA, 712 bp, Gossypium hirsutum
cttctatctccaatgttattaacattggacaactcttgcaatcggtaatctcttgtaattttctgcaattacatgccatgaatctttgtatgatcatatgtttgtttaaattaccgtattttttaggcactcgaggtggctggtcaagttgcagcaacatccgtctctacatcacctctcccgtacgataccatggctagccaatgtgaagcattcggcacaggtacaaggaagaagctctccaactggttggcccatgaaaatcatcaaaatgaagctgccgataaaactatactgacaaccgctgctgctgacagacacgcgatgatgctgaagaagagttcaaacgggaatgcttttaacggtgctgtcttgcagctcgacccatgcttatcaatgaggtggcctcctgctagcccgttcgacaattgccttaaagcagccagacattaaacaaggatattgtagttgcttttacggtgcaaagttgaaggaagtaactagattgtagtaacccttatgtttcgaacgctagtgataatttgagggcatacattccctactattactaatccttcttgtggacagtgtgtatcttcttcttcaaagttgaatgaactaatttgaagccaacttttagtcagttaaatgtaatcatgccattctgacaggctttcgtgctccgggcaacaaaataacagagaaaacaaag

SEQ ID NO: 195584 - DNA, 443 bp, Gossypium hirsutum
cccacgcgtccggctatttttaccattcctcctgagctggcatatggtgaatctggctcaccgccaaccattcctcctaatgcgaccctccaattcgatgttgaattgctctcttggacaagtgtcaaggacatttgtaaagacggtgggctatttaagaagatactgactggaggagagaagtgggagaatcccaaggaccctgatgaagtgttagttaactatgaagctaagcttgaggatggaacagtggttgcaaaagctgatggcaaggagttcactgttatggagggtcatttctgtcctgctttggctaaggctgttaagacattgaagaaaggggaagaaagtccttcttacagggaagccgcaatatggctttggtgagaaggggaagccagcagctggtgctgaaggtgcagtgcctccaaatgccacactcc

SEQ ID NO: 195585 - DNA, 978 bp, Gossypium hirsutum
  unsure (1)..(978): unsure at all n locations
aaaaagatcgaaaagcaatgagctccctgtgatgaaaaatgaatctactaagttggacgcgatcaactgcaactcagcagggggatgaaatgattgtgaccaaggaagaaactaccacagatcaagttgaggagccaaagatggccaatgaagaaactaatgttgatcatgttgaggagccaaagataaaagatgaaatagaggaagaagatccagaggaagatcctgaagaatatgaagaaatggaggatgcaagtcaacccaattcctctattgagaaaaatgaagaagagaaggcacaaacggatgctaagcctgaaaaggggtctgaaaaggaggctgagaagattgaagctatggcgtctaccaaatctgaaataaccacaaaagctgctagtacagatcctgggcctgagggagaaatgtcaagaaaggagcagaanagtgatcctaataagaaggtgcctgctattgataaggatttgttgcaggctttcaagttttttgaccggaatcgagttggctacgttagggtcgaagatatgaggttgatgattcatagcttgggaaagtttctatctcatagggatgtcaaagaactagtgcaaagtgcattgttagagagcaacacaggaagggacgatcacattctttacgataagctggttcgtatgtctgacatataaaagcctttggggtccaataagatgctataatctgttttgcatctaatgaggcatgcccattcaaggtgcgactcctaggagctaaacttgagtcactgacgttcaaatagagggttttagcttctcttagtgtataagctattggtatatgcaagggattgtttgctcatggcatatatcatgtcaagagattagtccaatgtggtctgtggtcttaggccttagtgaatgttcttaatctatttgttttcattttccttatttgaattgagatcaactgtattttagccca

SEQ ID NO: 195586 - DNA, 795 bp, Gossypium hirsutum
ctactctttccaggtctcaagccagatccattaaaaatccttcaaaatacgaaaccgttaaagactttccgttagatctgaaaaaaagttccctccacggtggcgccgtcggggccgcaagccctctctcgcagaaaaccaccaccttcttcaagtccaggtgcgagcagagaagatcgaacagaaccttctagaaagagtccgacggttgattatccattttggcaacagaattggtttatcggattactattcctgatggcgatgggattcttaggtttcgctctcttcctctttatatctctcgatctcgatcaaggttccacttcctccgcatccgccgcctcctcctcctccacctcccaaaacgtcgagattacttatgggacggttctaaagctaatgcacgagaaaacgaaatttaggctgcattcacacgatgtgccgtacggttctggaagtggacagcaatctgttaccggctttcctaatgtagatgattccaacagctactggattgttaggcctgaacctgatacatctgctaaacaaggagacaccattcctagtggaacaattattatgttgcaacacatgagaactagaaaatggctgcatagccatttgcatgcttctccaatttcaggaactatatgttagctgctttggagagaccagaatcaatccggtgatactggagctattatggggaagggaagacttgagcagataaagatccgttaacatgtgacctgtggtacctctagctgatagaatttccaatatgtggcagat

SEQ ID NO: 195587 - DNA, 990 bp, Gossypium hirsutum
aaggtcgattatccattttggcaacataattggttcatcggattgctgttcttgatggcgatagggttctgtggtggtgcgggcttcctcttcctcactttcaatttcgatcaaggttctccttcctccacctccgcctccgcctccgccgcctcctcctcctcctcccaaaacgtccaggttacttatgggacggttttaaagctgatgcacgagaaaacaaaatttaggcttcattcacacaaagtgccgtatggttctggaagtggacagcaatctgtcaccggctttcctaatgtagatgactccaacagctactggatagttaggcctccacccgatacatctgctaaacaaggagacaccatccccggtggggcaattattaggttgcaacacatgaggacccgaaaatggctgcatagccacttgcatgcatccccaatatccggaaacctcgaggtcagctgctttggaggagaatcagaatcaaataccggcgattactggaggctcattattgagggaagtgggaagacttggaagcaagatcaaaagatccggcttcaacatgtggacactggtggttacctccatagtcatgataagaaatatgccagaatagctggtggacaacaggaggtttgtggtgttcgagaaaaacgtgttgacaatgtatggttggctgcagaaggtgtttatctccccattaccgaaagtaagtagtatatatgtttaacggatcactacttcagaaaagcaggtacatgggttttttggatttgtaggtggttggtgcctgtttatttagtacctataaccatcttatgaaatcaagtagtatatttgcaggacaattctctgctaagtactttataatgcatgcttatgtaacttgagagttgagactatgtattcatgagtttaattttttcactaaaaagcagctttttctcaaaaaaaataatatataattaaaataatttaatt

SEQ ID NO: 195588 - DNA, 617 bp, Gossypium hirsutum
ttcgtttcctctcctaatcaaataacttacgaattcacagataagagagaagaaagggaaaagaaaatgtcttcacttcgttcagatccggttcacagaattcatcctgagccgatcgatcacttcgaccgtcttcccgattctcttctccctttagtcttcaacaagatcggtgacgttaaagctctcggccgatgctgtgtcgtttcgcgtcgtttccgttccctcgttcctcaagtcgaaaacgtcgtcgttcgtgtcgattgtgttatctctgacgacgattgttccccttcttcgtcttcctacgataagtcacgcgccgccggtccgatttctaacctcttacgtatccttcttggaggcattgtcaaaccttttcaagctttggttcagtttcttggtccaaaacggcccgttatcaatgaaacccttaacacccaccctgtctcttcctctttatcaggcggtcccggtgccgatgttaatgatggggaaatggagcaaggtggggtgacccatcattcaccgacgcaagtacttagaaatttcaacgagattcgtttcctccggatcgaattacccagcggtgagttagggatcgatgaatgggttct

SEQ ID NO: 195589 - DNA, 969 bp, Gossypium hirsutum
taccaagggttggaaggcgagttgaaaaatttccacaacggatgggatgtacttttgacaaagatgatgaaagagcatgaggaaacagcttatgaacgcaaggggaagccggattttcttgatataattatggagaacagagaaaactctgcaggggaaaggcttagtttgaccaatgtcaaggcgcttctgttgaatctattcactgctggcaccgacacatcctcaagcataatcgaatgggcattagctgaaatcctgaagaacccaaaaatactgaacaaagctcacgaggagatggataaggtgattggcagaaaccgaaggcttgaagaatccgacatacccaagcttccctatcttcaagccatttgcaaagagaccttccgaaagcatccatctactcccttgaacttgcctagagtgtccacccagccttgcgagatcaatggctactacatccccaaaaacaccaggctgagtgtcaatatttgggccattggccgagaccctgacgtgtggggcaacccactggatttcacccctgaaaggtttctgagtgggagatttgccaaaatcgacccaagagggaacgactttgagttgattccatttggtgctgggcgaagaatctgtgctggaaccaggatggggatcgtgctggttgagtacatcttaggcactttgttgcactctttcgactggatgcttcctcccggtactggggaattaaacatggatgaggcctttgggcttgctttgcaaaaggccgtgcctctttctgccatggttcgcccacgcctcgcaccaactgcttatgtttcctaagcacatcccctgccttatcactgctcatttttcctacttctgccgcttgcgttatctgatattcaagcttgatgtgatgtgtatcaattgatgcatcttttagtttcaattctactctaaaaacaatcttgcatgcctttc

SEQ ID NO: 195590 - DNA, 1716 bp, Gossypium hirsutum
ttcacgcgtccgctttcgagagaaagtcgtttccgtacgaccaaaatcacctttcagattctctccttctctccctgtcttctttttttctccgagatgcttttgggggcaaacgaaaaataaagggtattatctcttcttcttgattgattgttttttcattgataagctcatcaacaagaagaagaatctgctaaaaagaagaataagaagaaacagaggagagaagagaagagaggatttttttttttttacttttatttttttgagaggcaaaaaaaccccaacaatattcccatggatttgacttcaacaacgacgacaacgacgacggcagccgccttgtccggacctgttaacgaaaaagagttagctgtcgatcctttcttggttgaggctcttcaaaatcctcgtcatcgtctcaccatcttgcggatggaacttgatatccagaggtttgtgcaaaattcagagcagcagcaatttgagttccaacattttcccacttcttatcttcggcttgctgcacatcgtgttgctcaacattatgggctggtaactatggtttatgataatggtttagatggcctaggaaacagaatcgtggcgaagaaagcaggggaaatcaaatggcctggtgtttgtttgtctgaaattcctgccaaaaactcggaaaatgataaaccagagcaggttaaaattgctattaagcctaggccaaataatggatctgtaaatgaagctaatcaaatcggcatcaaaagaagtcctgtgagaagtgtcttgaagagaggaaggaagagtatgacagagcacgggcacgtattttcagtagccctagtactcctgattctgacgattcttctcctcagaactctgttgatggaaaaaatgaatctcttatcgagaggggagtttgaaaattaccggagctccatggcttgatccagagaaaaatatgactgtccgagatggtacatctcgagtagccattttcagagacagagagaaggatcgtactgacccggattatgataggaattatcaaaggtacgtcagaagcattccatgtaaccagagcgtcggtgtggctccttacaatatgcagaagattcaacttccattcatgcagtatgattctgcttttcctcagttgggtcagattgcaaatacacaagctcccctcggttatggtgttccttcgaggccagctgtgagtccgttttgtgagctgggattgaatccaacttctagggatggtgcttacatgcagtggccaagtgctaatatgatgttttcccattcatatgatcagtttatgcatgctgtatttcaggctccgtttgtccaccaaccacctctgagctacgattattcgatgaacggttaaaaaacggtaagatttgtatttctgcaaaaaattatcaaaatctgttagggcttagtgtgggtgaattgctagggtcatgtcattgtttaaaaaatacatttggttagaccattcattccttggtttctaatttttgatggatcatattggtaggtaaggagactgtaacaatgatgtttgaaaactttgatgttgtttgaaaacttagttatatactctttcttttattaaaaaaaaacaaaaataaaaaaaaatgataaaacaatagataaatataataaaaatatacaaaaataaaagagcaaacagctcaaataaaaaggaac

SEQ ID NO: 195591 - DNA, 855 bp, Gossypium hirsutum
  unsure (1)..(855): unsure at all n locations
cattcttccaatcatttctaggatgccacttaattgcctattntgtgactgggttttagctatgtttgagaaccttggattgatggtcacagtaatacatgacttgaaacgcatactttttggcaaagataacagtttgctgcctctggtgccatcttgaaattctctaggtagaagtgaagcaggaataataatggattgggaggaattttgaaagggactnnggttgtttttatctagttattcggatgtaaattgacatctattatgcaatctttcatggcatttgcgagtgttgaatcttcttcacaagttggggttgggaggttactcaatggaagtttactgtttgtctgacattctgggaaatctacccttgtgacttcccccagttccgctattgcattggagggttttctggggttttattggtagcgcagcattcccagattgagctctaccggaaatttgatgagtacttgcaagcagatggtttgatttgtcttattttattgctggttggaaataattgcattcttcctctgatgaaaagctcctcaagtttcaccggattgatcctggttgctggacttgttgggtgaaagctgttctctggttggacctgctctctttgggttttttactgtttcagatatccattcatggttttcattttcttggtgtaggactggtgtaccacctgttcagaggagggctaagaatggaggttttgcagcaaagccacgccagcaccagccgcaacggcaacaagaagggaatgtagttacaaagcaaaggcctcatacactggattcgttgtttgccaatatgaaaaaagagcgaatgaatggtcct

SEQ ID NO: 195592 - DNA, 1138 bp, Gossypium hirsutum
  unsure (1)..(1138): unsure at all n locations
gttttgccgaattctgaatccagaattagctattcagcacattcttccttgtgtcaaggaactatcaacagattcatcccagcatgttcgatctgctttggcctcagttataatgggaatggcacctgttttagggaaggatgcgaccatagagcaattgcttccaatatttctttctcttctgaaagatgaatttccagatgtccgactgaatatcattagcaagcttgatcaagtcaaccaggtaattggaattgatttgctgtcccagtccctattgcctgcaattgtggagctcgcagaggatagacactggagggttcggcttgcgataatagaatacatccctttattggcaagccagttgggtgttggctttttcgatgacaaacttggtgcactctgcatgcaatggttgaaagataaggtttattccattcgtgatgctgctgctaataacgtgaagcgcctggctgaagaatttggaccagattgggcaatgcagcatatagttccacaggttttggacatgataaacaacccgcattatctatatcggatgaccattctacatgcagtttctctacttgcccccgttatgggctcagatattacttgctcaaaacttctccctgtggttatcaatgcttcaaaagatagggtccccaacataaagttaattgtggccaaggtgctgcagtcacttattcctattgttgatcaatctgtggtggagaagacattccgtcattccttagttgaattgagtgaggatcctgatgttgatgtcaggtatttcgccacccaagctctacaatcaagtgatcagcaaatgatgatgtctagctagaaccctacattacttctatcacacttctacatcctttcctttttcctttttgaatttattttaccttaaagcttttgttttgtttttccccttattttaattgtatatcttttttccagattgaaacactcctttgctatataaatatgtaatttgtctaaaattgagttgttgaagttcttttgtctaacaattttaggtctaattatggtctagtctcgtattattctaanaaannaaaaanaaactcgaggggggcccgtacccatncgcctatatgagtcgatt

SEQ ID NO: 195593 - DNA, 369 bp, Gossypium hirsutum
gacaattcggccatgcctagttgaacttagtgtggatccacatgttgatgtcaggggttgcgccacccaagctctacaatcaactgatcagcaaatgatgatgtctagctagaaccctacattacttgtatcacacttctacatcctttcctttttcctttttaaatttattttaccttaaagctttcgttttgtttttttccttattttaattgtatatctttttttcacattgaaacactcctttgctatatatgtaacttttctaaaattggcgaaaaaataaaacattaaattaagataaataaatatatttaaaaaaataaaacaaacactaaaaaatttctattggggcgccccttttaaaga

SEQ ID NO: 195594 - DNA, 1105 bp, Gossypium hirsutum
  unsure (1)..(1105): unsure at all n locations
ctgtctctagacggggacaacattattgctgtgtgtagcagcccgatagatgttcctcaaatcaaatatggctgccttgtggacaaagtgactaatacaaccgcttggcattggttaaatgtctcaagccccatttttaaatgttcagagaaggttatgtctctgctttcacatcttcagtttggtatcacgcaaattccagtgaaagatgtttctgattgcttgacaaaaggagctgctaagtcttttgaggcaatatttgtatcttccaaggtaaacaatgcacctgatccgctaatagtggtccttcatggagggcctcattccgtctctttgtcaagcttctcaaagtcattggcatttctttcttcacttggtttcagcctattaattgtaaattatagaggttcactgggatttggcgaggaagcattgcaatctcttcctgggaaaattgggtctcaggatgtcaatgatgtactcacagctatagatcatgtcattgagaaaggacttgtcaacccatctaaaataactgttcttggtggttcacatggtggctttctaactacgcacttgattggtcaggtaccgaataagtttgttgcagctgccgcacggaatccagtttgtaatctttcatccatggttgccacaacagatattcctgattggtgttacgtggaatcttacggaagcaaaggaaaaactatctttactgaagcaccttcagctgaacacttgactcacttttacagcaagtctcctatattgcatatttctaaggttaaagctccaaccatctttcttctaggtgctcaggatcttcgcgtcccggtttctgggggattgcaatatgcacgggcattaaaggagcgaagagttgagacaaaaatcatcctgtttcctaatgacatccatgcaattgaaaggccgcaatccgatttcgagagctttcttaacattggtgtttggttcanaaagtattgcaaatgaaaaggtaaaaggttcatgtcntctanggccaaacatgtttgtaattaaggacttaatcatcataataatctctgaaatggttaatttgttccttgcactacatgcaatc

SEQ ID NO: 195595 - DNA, 536 bp, Gossypium hirsutum
  unsure (1)..(536): unsure at all n locations
gtatcttgatgagatagcaagcaagttgtcacgaaattgcagtggaagtgagactatccgcatggcacgatcacttataaccgcacgccatgctggtgagcggctcctcagatgctggggaggtggaactggctgggctgtagaagatgcaaaggacaagataatgaagctccttgaggaatacgaaagtggaggtgttgtagctgaagcttgccaatgtatccgtgaccttggaatgccattctttaaccacgaagtggttaaaaaagcactagtgatggccatggagaagaaaaacgataggatgctaaatctgttacaggtatgtttcgacgaagggctaattaccattaatcaaatgagcaaaggcttcacccgagtaaaggacggccttgatgatctagctcttgatattccaaatgcaaaagataaattcagtttctatatggagtatgcccagaagaaagggtggcttattacatccttcgggtcatctgcaatggaagctccaccaatcgccacagnctcctgagata

SEQ ID NO: 195596 - DNA, 1205 bp, Gossypium hirsutum
  unsure (1)..(1205): unsure at all n locations
gaatgttaacttcaagaatcatgtcattcagtggttcgaagtgcttgatgggttattgggtccatattggaaggcattaggacttgccttcaattgtactttcctcttatttggatctgtcatacaacttataggctgtgcaagtaatatatactacgttaatgacaaattggacacgaggacatggacctacatatttggagcttgttgtgcaacaacagttttcataccatcttttcacaactaccgtatttggtcttttcttggccttgggatgaccacttatacagcttggtacttggctattgccgccctcgttcacggccaggctgagggcgtgacgcatagcggtccgacgaagcttgtgctttatttcaccggagccaccaacattctctacactttcggcggacatgccgtcaccgtggaaattatgcatgcaatgtggaagcctcaaaaattcaagtacatatatttattggccacactttacgtttttacccttacacttccgtcagctgctgccgtttactgggccttcggtgacgaactcctcaaccattccaatgccttctctctcctccctaagaatggcttccgtgacgccgccgttatcttaatgcttattcaccagttcataacatttgggtttgcttgcacaccgctgtacttcgtgtgggagaaagtaatagggatgcatgacactaaaagcatttgtttgagggcattggcacggctgccggtggtgattccgatatggttcttggccatcatcttcccattcttcggccccataaactccgcagtcggtgctcttttggttagcttcaccgtctacatcatcccagctttagcccatatgctcacctacagaaaagcctctgctcgacagaatgctgcagaaaagcctccgttcttcttgccaagctggactgcaatgtatgccttcaatgccttcatagtggtgtgggttttggtggttggatttgggttcggtggatgggctagcatgaccaatttcatcaggcaaatcgacactttcggcttgttcgctaagtgctatcaatgcaagccacctccaccaaccggagcagcagcagctgctgcaaaccaccactgagtngactcgacccaaaaacttatatagcaagaaacaaaaaccaaagaaagaaacantntgaattccctggtttccttccatatct

SEQ ID NO: 195597 - DNA, 1222 bp, Gossypium hirsutum
cggacgcgtgggattaaaccagcgatttttttgaattcgaacgtgtaataatggtggtatgtaatagcaaaactaacagtgggatattgatgaaatgttttggcagtttataacatttggttttgcttgtactccattgtacttcgtgtgggagaaagtgatagggatgcatgacacgagaagcatttgtttgagggcgctggctaggctgccagtggtgattccgatatggttcttggccatcatcttcccattcttcggacccataaactcagcagttggtgctcttttggttagcttcaccgtctacatcatcccagctgtagcccatatgctcacctacagaacagcctctgcccggcagaatgctgcagaaaagcctccattcttcttgccaagctggactgcaatgtatgcattaaacgcctttattgtggtgtgggttctagtgatcgggttcgggttcgggggatgggctagcatgaccaatttcattaggcaaattgactcttttggcttgtttgccaagtgttatcaatgcaagcctccaacaccaacatcaccagctgctgctatgcaccattaagctcactctcaaccatctcaaacctcaaatttcaactattccccgtttttctccggtcaaatttcgattttggtctctctattatgctcaaatttaaaatttcgtctctataatttgaaataatttgatctctctttcataaattcattagttagcccgtaataggtaatagcatccagttatttatgctaacgtgaatttttcctaaaaacacccattccaacaccagaagaaaacatatcagcatgatgaatgagaagggttgtttttaagaaaaagttcaatgttagctttttaattggaaagatacagatgttaactacggtggactagctcatggcattataaaaataaaaggacaaatcatgtcaaattaaaatacagagaccaaattccaaatttaaacataatagaaggaccaaaccgaaatttgaccatttcctccctatctcaaagagagagaaaaaaaaaacccgccaatgatttccatgttttcctccatatgttgtatcatatattgggggagatagcaatattctcccctacatgcttagtgtgctggatttttgccctttgcttttcctatttttttctttttttttccttcaaatttctccattaaattagttgataagt

SEQ ID NO: 195598 - DNA, 522 bp, Gossypium hirsutum
  unsure (1)..(522): unsure at all n locations
attttggaaccaagaagaagaacagaaagacaggcatgaagttcttgtttcagtgtccttgctgttcttgtttctgcttcatgaagcctaagaaagggaaaccaaagatgaaggatgacaaggctgagacaaaaaaggaagtgaaggctgaaaaagagaaggaagcgaaggctgagtgaaaatgatgatttacttacattatattcttcactgctgctcaagtaaattgtatgtaacttttgtttgaatgaaaaatgctgccttgccttggttattgtagtattatttgcttgtactgataataaacttgacatttctattatgttttgtctttgtattttgatgtcatttatgttctgcaaatgttgcttgatggtatagatatcgacggctctggtttgttctgattttatgagatgtacttgaaagaacagccagatctgcttgtatacctatatttactgaggaatttgatgataaaattcattgngggcttaaaaaaaaaaaaaaaaaagggcggcc

SEQ ID NO: 195599 - DNA, 459 bp, Gossypium hirsutum
gaggaccctcaagacaggggcagattgataagaaagaaactcctcaagagcggctaaaaaggattatgaacagacagttaaacaagctaattaagaaagacactgctgcggaaatggctaagaagcgagagcaggagcgccaaagactggaaaaacttgcagaaacaagccgattaagtcgtcaaaggcatcgcagccgcagtaggagttacagtcgctctcctccaagaagatatcgacggagtagaagtccaagtaggagtaggagttctagaagatattattctcggtcacgatcacgatctaggtcccactcttactctcattcacgttcacgctcaaattcccgttcacccagggtaagaagccgttcaaggtactgagaaggtgattgacataaatgttgcaggcaaagctatttgatatattatgtaaagcgatgctagttttgggtagctt

SEQ ID NO: 195600 - DNA, 788 bp, Gossypium hirsutum
cttgttttttcatttctcctacaaaagaaaaagcttgtaatcggccatggatttgtccaaagaacgtgaaagattcgtttacatcgccaagctcgctgagcaagcagaacgctttgatgagcggccgacttccatgaaaaagctagcggagcttgatgtggaactgaccgtagaagagcggaacctgctctctgttgggtacaaaaacgtgatcggtgctcgaagagcatcgtggaggatcctgtcttcgattgagcaaaaggaagagagcaaagggaatgagcaaaatgttaagaaaatcaaaacgtctaggcagaaagtagaatcggagttgtccaatatttgtaaagatattatgggtgtcattaatgagcatctcattccttcttgctcgggtggagagtctactgggttttattataaaatgaaaggagattattataggtacttggcggagtttaagatgggtgatgagaggaaagaggccgctgatcagtccatgaaagcatatcagtctgcaacaactacagcagaagctgagttgcctcctacgcatccaatccggttgggtttggccttgaacttctctgtcttttattatgaaattatgaactctcctgaaagggcctgtcaccttgctaaacaagcttttgatgaagctatctctgagttagatactttaagcgaggagtcatacaaagatagcacattgattatgcagcttttaaaggacaaccttactttatggacttctgacatcccagaggatggagaagaagccgcaaagc

SEQ ID NO: 195601 - DNA, 567 bp, Gossypium hirsutum
ccaacgcgccagccatccgaaagaatctgtagctgttaaaattcagcatttaattagtaagtgtccgcccacgcgtccgcagtttcaacaatcttcatcctctattgggctcctcttgccagtggatgggaatggaacaaagacaacatttgagtgagttgctataaccaggcttcaactttaatttcaggaagccactcgattgtaagttgttattcgtgcgtagcagtaatatatattgatttgatcgcctattgctagtaatttcatatggacttcccattactgtatatgaggcctgtaagcaagttgaatttatagtgtgtacccaaaaaacaattctaatatcaacttgttatggtgttccgtagaagatatgtaaggtagtgttaccctttagcttgtatgttgcttgcttgatttacagttcaaaggtgatgaatggaaccataatataatgtttaaaaaaaaaaaaaaaaaaaaaaaaaaaaaaaaaaatataaaaataaaaaccaaattaaaaatcatattcataattacaattttctcccttttttaaaaacaaaa

SEQ ID NO: 195602 - DNA, 758 bp, Gossypium hirsutum
cgaacttccaattaaacatcccgaattgtttgaaagccttggaatagcccagccaaagggtgtcctgctttatggaccacctggtacaggaaaaacactattggctagagctgtggcccatcatactgattgtacctttatcagggtttctggttctgaattagttcagaaatatatcggggagggttctcgaatggttagagaacttttcgttatggccagagagcatgctccatcaattatatttatggatgagatagacagtattggatctgctcgaatggaatctggaagtggcaatggtgacagcgaggtgcagcggaccatgttggagcttctcaaccagcttgatggatttgaagcatctaacaagatcaaggttctgatggccacaaatcggattgatatcttggatcaagctcttcttaggccaggacgaattgacaggaagattgaatttccaaatcccaatgaggagtctcgtctggacatcttaaaaatacattctagaagaatgaatttgatgcgagggattgatctaaagaagattgctgagaagatgaacggtgcttctggtgcagagcttaaggctgtgtgcacagaatcaggaatgtttgctttgagggaaaggagagtccacgtaacacaagaagattttgagatggcggtggcgaaagtaatgaagaaggagagcgagaagaacatgtccttacggaagctatggaagtgattatgttttattatttattgggctttcg

SEQ ID NO: 195603 - DNA, 604 bp, Gossypium hirsutum
  unsure (1)..(604): unsure at all n locations
ttccaacgaccactgctatggaagtagatgatcctccaagggcccagcagcctactgccattggctctcttgaaaggattgaagcatttaaagctatatttggtcagcatatgcgtgtgaaccataaggataccatatctatttctgaagtagagaatgttgtcaatgccggagctgatggccattactcaagggcagagatctttgctatattagagaagctgcaagatgataatatattgatgatagctggtgaaacagtgcatatgatagtatgagatgtaaggaaagacctggatggcttctttcatgcaatcactttacagcattgtgggattggggatggatctattggcatgaaattcttggtttgtacagctccatgatttatcctaaaattgtcttaaaagtgactgttggctgtactctgtagcagatgaaaggtgaactggggatggatcccctcttgctctgcaagtgaagatgcataaatttggatgacatatgataattcactaatgctntaattatttacttggaaagtattgttttttttggactttatgttttcaatggttaatatactgtggatctaattctaagc

SEQ ID NO: 195604 - DNA, 711 bp, Gossypium hirsutum
gctgatatgaatgcattttataattttgtcaagaaatcgattcatactgatgttaccaaagcacaaatgatggataagattagaaggttaaagaagaaattcgaaaacaatgctggtaagggtaaaaagggcgaggatcgaactttctctaaagcccatgagcagaatgcttttgagttgtcgaaaatgatttggggcaaagaagggattagtggaaaagttgagtcttcagctgctaagtcgaatgggaaagccaaggggaataacaaggcagtggttgcattgaaagcagagttttcttcacccgataagaaaacatacgatgcagtgccaatagaggccgataaggtggtgtctaagagttctcgtagtttgtttgataagagatttggtgtctctgacatggaagaggcagttgtaaagctcgggttggatatggttgatggtgaaaagaaggcggctttggaggcgaaatggaggaaattgcaaattgcgcacttggagctgtttgtggagcgaaatgaattggtcactgaccaagctaacttggtgctggaatattacaagtctgaagacaaatacagtgctactactccaactaatgatatttttatatgcctttcaaacaaatgtttaaacttttgtgcttattacataagtaacctgtctatattttcccatcccggggggtctctgtaactcataatatta

SEQ ID NO: 195605 - DNA, 598 bp, Gossypium hirsutum
cctgaaacgagaacaaaacccagaaacccatcaaaaaaatctttcctccaatttttcttcaaattttcattgttaaagaccaaaacccggaaatccttacgttggaaagtggaataaagagcaatgggaagcgcgcccgcacagattccgacgagtttcggacacgagctccgggcttgcctccgttgccgcctcgtcaaaacctacgatcagtttagcgtaccgggatgtgagaactgccctttctttaaaatggatgaggctaatgaacgcgtcgtcgattgggccacgcctaacttcaatggggttatcgctgtgatggatccgtctagaagttgggctgctcgttggctgcgaattggaagatttgtccccggttgttacactcttgctgtttcagaggcgcttccagaagtcttgcagaatttatgcgatgaagtgcatgtgcagtttgtgccacctaaacgggtatgtgacatgagtcctggtaacattgtttgttaccatcgtaaaactgaattgctttttacgagttgtgatcgttttttgatgcttttgtaaaagtttttgctccgttgtcttggccatcaatgaaata

SEQ ID NO: 195606 - DNA, 626 bp, Gossypium hirsutum
cggccgcgtcgaccgaatttcattacccaggaaaaagaaaagaagaaagtttccccttttttttttataaaaaaaaatggcgtattcgggtgttctgaaaaccctaatcaggtcatcgcatttgggatctacgactcgtaatttcagccttgttagcagccaaatcagcaatcacactgcgaaatggatgcaggattcaagcaagaaatctcctatggagttgatcaatgaagtccctccaatcaaggttgaaggccggattgtagcttgtgaaggagataataatcctgctttgggacacccaattgaattcatatgccttgacttgaaagagcctgctgtatgcaagtattgcggcctacgctacgttcaagagcaccatcactagaaactacttgttatgttcttctcaggctgttgggacaattgttattttgctgtacccatggggcactttcctctgtttcagcttgttggtaacaaatttgatgaacccattttagtgtgatgttttttttttcttttacacataataagtgtttgaagttctcatttgagaagatatttcgaaagtaaatttgaacacctatggtctaatcctccatttgcataattgagttaatatt

SEQ ID NO: 195607 - DNA, 435 bp, Gossypium hirsutum
tcgcctcacgcgtccgatttcgaatagcctcgaatattcccgaaattacctaatttccatttaagaaccttctcccttgactctcatcaatctactcttttgattcccaggaggtatctcaggaatggcgagtggttttggtgaatcaacaagcatgcctccaccaagtccatcttgctcgagcagtaataatgctaacgatgctggtgattttgaatgcaatatttgctttgaattggctcaagatccaatcgtcacactttgtggtcatctcttctgctggccatgtctctatagatggttgcaccatcactcgcattctcaagaatgtccggtttgcaaggccctaatacaagaggaaaaacttgttcccctttatggcaggggcaaaaacaagactgacccgcgctctaaatcgtatacgggcatggaaat

SEQ ID NO: 195608 - DNA, 625 bp, Gossypium hirsutum
cccacgcgtccgtccacttcgtccgctcacgtttccggaagaaaataaacaaattactctttttattaaaaggaaagaaggaggaggaggaaatggatggaaaaagaatcgagggcaatgaagtttatgctctagcaatgtgtgtaagtattctcctctttgctccgattgttgtgtcacaaccaataccggcagataaatcccaagtggaagcttggtttaatggcattatcaagccggtgaaggaaaggggtacaattttagaccctgaattggttcaagccgagacagaacctagaatcataaaggtgatgcaaggtgggggtggagaattcgataccataaccaaagccatcgagagcgttccatcagggaacgccaaacgcgtgattatatccatcggacctggatcttacaaagagaaaattagaattgaaagaaataagcctttcattacattgttaggagatcctaaaaacatgccaaatttgacatttgacggcaccgccaagcaatatggaaccgtagatagtgccactcttattactgagagtaattactttgtgggtgctaatctcaatatagtgaactccgctccaaggccagacgggaaaatggtaggagc

SEQ ID NO: 195609 - DNA, 543 bp, Gossypium hirsutum
ctcctttttctggctgctaggcaaggcaaaaaggggggctttataaccttttccgcccacgcgtccgcaagcttccactgaatcatgaaatactgtaccatttacaggatgtgttcaacttgctgccaaacctaaacgtaaatgacctaatcaaggcttttgcagtaaaaaccaatgatatgatgttggttatatatctgtcatctctcatccgaagtgtcattgcgctccataatttgatcaataacaagatgttaaacaaagaacatgagaaggctgaagatgctaagccaacaactgtccaggctacgagttgaatccgaacataaagtcctaatcatgtcaaaaacttgagcatagggtgctattaacttccataggatcctctattcttgagattttgtattcttcatagctcaatcagaagatatcagtaggcttaaaaaatttgagagtttttctctttgttttccatacactatagactgtattaatgaagtgcatctccattaagcatcatgttatgctgaattaatcatttga

SEQ ID NO: 195610 - DNA, 1115 bp, Gossypium hirsutum
  unsure (1)..(1115): unsure at all n locations
cccacgcgtccggtttgctagacatatgtctccgcaaggcttgcataaaaaggtgatttctacattgcttaggccccgtaactggaaagctccggtaaataggaggtttttcttggattcttatgaagtgggggagctctgctatgctgccgaacagctatttatgcaagaacccaccgtccttcagttgaaagctccggtcaaagtatttggtgatcttcatggacagtttggtgatttaatgcggctatttgacgagtatggatttccttcaaccgcaggagatattacgtacatcgattatctgtttctaggagattatgtcgatcgaggacagcacagcttggagacaattacattgctccttgctcttaagattgagtatcctgaaaacgttcacttgattcgtggaaatcatgaggctgctgacataaatgcactcttcggttttcgtattgaatgcatcgagcgaatgggggagaacgatggtatatgggcatggacacggttcaatcaattattcaattatcttccacttgctgctcttatcgaaaagaaaattatctgcatgcacggtggcataggaagatctatacattcggtcgaacaaatagagaaactcgagcgaccgataacaatggatgcaggatctattattttaatggacctgttatggtccgatccaacagaaaacgatagcatagaaggtttgagacctaatgctcgaggtcccggtcttgtcacttttgggccggatcgtgtgacggacttctgtaagaataacaagctacagcttattataagggcacacgaatgtgtaatggcggtntcgaacgattcgctcagggtcattgattacttcttttcttgcacatactattgtgtactgaaactatgcttgagctctatagtcgttgtagaggactggtattcgtccgaagtatacatccgtacacactccatcagttncagaacatgtccgacngtagatagaccttgatgcggatctacttcaagacccaacccaattggacgctaaaccgctctatcggtcctttatattaacaggttacattgggataaatatttattagcaataagtgtcgtgttggttg

SEQ ID NO: 195611 - DNA, 446 bp, Gossypium hirsutum
cccacgctttcgcccacgcgtccgctctctccccatcttgaagccaaacttattaaaagtttaacacctctttcattctcatatctttaattgtttgaccagatggctcttctaattaacgaagtccacttcccttactaaccagatcttctccatccttgaaaacaaatttcttttcggtgatcacgagaacaatgctgctgcaaaaacccatgaagaagatcacttgaaatctggaaatcagatttccgggaaagtaagaatcctatccattgacagtgggagcttttccgatggtatattggccgcccaatccctccttaccctccagacttttctccgtcaaaagtcggggaatcccaatgctgtcattgcccagtatttcgacgttgttgcaggctctggtgctggtgcgattctcgccgcattgttgtttactcgcgctg

SEQ ID NO: 195612 - DNA, 700 bp, Gossypium hirsutum
  unsure (1)..(700): unsure at all n locations
gtgataaacaataagaagccccacaacttcaaataaggttttcttctttcttgctttcttttcttttcttcagggggaaagaaagagagaagaagatcctttttttgaaacanataanaagttgtttaaaaatggcgaataatgctattattggtatttgtgcggtgttcttggtggccttggtggtagccgtggtggtgggtgttacgcacataaaaaataagagcgatggtgaagagatatcgagttcgaacaaagctgtgcaagccctatgtcaacccacgaattataaagagacgtgccagaaaagcttggcgtcgtcaaattctagcgacgttaaggagctgataaggacaggtttccaagccgggctagtcgagataaagaacgtgttggcccattcagtgactgtccaagagttgatcaaggatgagaacaacaaagcggcacttggtgtttgccaagaggtgttggacttagccattgatgactttcaaaagtcattcgacatgctaggggaatacgacatgagcaagatcggaaaataccttttggaactgaagacctggctaagcggtgcattcacgagtcaacagacatgtatagactcattcgcgcaatcaagtaacgaatcatcgcagaagatgcaatcaatcttgaaaactagcatggagattactagcaatgctttagcgatgct

SEQ ID NO: 195613 - DNA, 562 bp, Gossypium hirsutum
cccacgcgtccgcccacgcgtccgcccacgcgtccgcccacgcgtccgcccacgcgtcccacccaattgaccaccatgtttaaattaatcaacatcctaaccatccttgtgctacttacatttagttcggaaattgcagatgccgcacctccgtgccaggaggttatcgtgtcgattaccccttgcttgagcttcataaaaggccaacccgatccggcaccaggatgttgttcgggtgctaaagggcttgctaagcaagctaacaccaaactagataggcaaggaatatgcgagtgccttaaaggtgtattgccaaaaataggaccatatgaccctaaaagattccctcttattgcccagaaatgtggtatcaatactttaattcctccaatttctgccactactgattgcaccaaggtgtgaagagtgaagtggggggaatgtgaaaatgaagagcatgccaaatgaataaaaaaatgggcagaacttttcataaattgatctgtaatcaaccccttgtattgcacttaagttatgattaattaaataataattacaattt

SEQ ID NO: 195614 - DNA, 662 bp, Gossypium hirsutum
aagagcattttattactccaaagatgaaaaattgctcgtttccgacttcatgcgcgacggtagcttgtctgccctgcttcacggtagtagaggctcaggccgaactccgttaggttgggacaacaggatgagaatagcgttgagcacggctaggggtttagcccatctccatgtttccgggaaggtggtgcacggcaacatcaaggcctccaacgtccttctccgaccagaccaagatgcttgcatctctgacttcggtctcaatcctttgttcggcaactccaccccacctagtcgtgttgcaggctaccgagcacctgaagtgcttgaaacccaaaaagttactttcaagtctgatgtgtatagctttggagtgttgttgctagagtcattaaccggcaaagcacctaatcaagcatcgttaggcgaagaagggatcgatcggccgcgtgggtccaatccggacgttcgggaagaatggacggcaagttttcgacgtggaattgatgagatatcacagcatcgaagaggaaatggtgcaactattacaaatcgcgatgacttgtgtgtcaacggtgccagatcaaagaccctccatgcaagaagtggtacgcatgattgaagaaatgaatagagtggaaacagacgacggattacgacaa

SEQ ID NO: 195615 - DNA, 575 bp, Gossypium hirsutum
tgcaaatgtcaaaattctccttgtattctgatgatcgtcagaagtctggtctggatgccatttctgatatatattcaatattacgagatgaagctgcaagggctaacaagatggacgtgagctatgcccatgcattgaattggatatctagaaagggatatagcgaagctcagttgaaagaatgtttagaggaatatgctgccttaaacgtgtggcagatacatccccacacttttgatatccgatttatagatgcttgaagttgctataaaaccacttggaagattaagctgcatccatttgccaagttcgaaattaagagatagttgtccgctgtacccttttaagttagtagttaatatttgcagagttgagtttgaaccttgtttgactgtaagattgcaagtgattatgttcttcacatgcagcaagataaaaaacgtttctgtttcaacttttactttctactaatagcgaaagagatgatgattgttcaacttactgcattattgtactgaattcaccatctcatgtttagcttgttggaattgaatattaatgtaatggaatattta

SEQ ID NO: 195616 - DNA, 409 bp, Gossypium hirsutum
ccaatatatcatctaaacactttcgacattctctggcgttttctcaaaaaaaaaaaattctgacaaaattttttctttaattttcagctttcttccttttacattcttcgtaattccaatctatcatcacataaacaaagaaaaaaaaattctgggtttcttatcgaatctccaaatctttctctttcattgaagaaaaaaattgaaaaacatgtgtcctatgaggttcttgttggtgtttttctcggcgattttagctgggtatttcgcttggagaacggcggtgggttcatcggttgatgccgatgatggggtttctgaagtttcaaggacaattgttgccaaaaatgaacaagatttcagtttcaaaatgatggttaagaatggattctgggtattggttgatatg

SEQ ID NO: 195617 - DNA, 422 bp, Gossypium hirsutum
cggacgcgtgggcggacgcgtgggcaaaacaacacattgcaaagagaaagggaatattatcaaaagaacccaaccatggcatttgcaggaacaacccagaaatgtatggcttgtgacaaaactgtgtatttggtcgataaattaacagctgataacagggtttatcacaaggcttgttttaggtgccatcactgcaaaggtactttgaagcttggcaactacaattcctttgaaggagtcttgtattgcaggcctcattttgatcaacttttcaaaagaactggtagtcttgagaaaagttttgaaggtacaccaaagattgcaaagccagaaaaaccagttgatggtgagaaaccaatagctactaaagtatcaggcatgtttggtggaacaagagataaatgtttttgtttgtaaaacac

SEQ ID NO: 195618 - DNA, 709 bp, Gossypium hirsutum
  unsure (1)..(709): unsure at all n locations
tcttgtttcaggggaaaaaaactgaaaggaacaaacttgtttcggcgaaaaggaaaacgaagaggctttgtacttatttctttattgttagttaggccccccgatggagaccggaccaaccggcggtggcctaggtggtgacgatctatcccaatcgtctcctgcgaccgctatatcgcggtggagcttcgaggtgtcgcggcggtaccagcacgttctggacaagactgtcccgcacattctgtaccgttggatagcatgtctggtgctggtgctgatctacgccgtacgcgtctactttgtgcagggtttctacatcatcacctacggcctcggcatctacttgctgaatctcctgatggggttcctttctcctcaagtggaccccgagatgcaggatggcccctcgctccccacccgcggatccgatgagtttcgccctttcgttcgccgactccccgagttcaaattctggtactctattacaaaggccttctgcattgctttcgtgatgacgttcctccgtctgtttgatgtgcctgtcctttggcctatactccctttctactgggttatggtattccatcttacaatgaggatacaatattgcccatgatcaagttacaatatgtgcctttctctttgggtaaacaccgatttgatggccagaaggggcccaccgaanattgtaaccctcctcctagggaat

SEQ ID NO: 195619 - DNA, 391 bp, Gossypium hirsutum
tggatccgatgagtttcgccctttcgttcgtcgcctccccccacgcgtccgctggtactcgatcacaaaggccttttgcattgctttcgtgatgacattcttcagtgtgtttgatgtgcctgtcttttggccaatactccttttctattggataatgttattcatcctgactatgaggaagcagattctgcacatgatcaagtacaaatacgtccctttctcgttcgggaaacagcgatacgacagcaagaaggcatctccaacggaaaacacaaaccttcccagggattaagttcctcaggtgcatctgggaaagtttagcctagataagaaaaccaaagtttccagacaaagaacagtttgtattgatggaacatgcaacatttaccgt

SEQ ID NO: 195620 - DNA, 648 bp, Gossypium hirsutum
cttagacaagacaccatgaagctacctgctctgttcaagcctaaagaacccacctccaagcaaccatggcaatggccttcatgcaagcaccccaagaccctttctttccgagcaggtgacgacgttttcaagaccgttaactccatgttcttcgaccctaacagcaacaatgacagtggtgttgaaaccccacagtcatggttcaccaactcttccgactcacccagtttatccaccaccaccaccaccgactcagatcatcaaggctttgatggtgagtctttagagacagtcgtccgtggagctcgttccgagaggctgttcttcgagccaggcggtgacacgagttccatcctcgaagaagccaaagcagccggtggtggtggtgatgggttgttcccgttcaaagaaagcgtgattctagctatggaatctgatgatccgtacgtggactttcgtaagtcgatggaagagatggtggagacacatgggatgaaagattgggaatggttagaacaactgttgggatggtatttgaaggtgaatgggaagaacaaccatggatttataatcggagctttcattgatctgcttgtagctatcacttcttcctcttgatccactttcttattctctgctctctcttct

SEQ ID NO: 195621 - DNA, 868 bp, Gossypium hirsutum
ctacatagtgttttctcagaatggaacaagggggagcttttgagcttcttgattgaaatcactgctgatatatttggaattaaggatgacaaggcagatggttatttagttgataaggttttggacaaaactggcatgaagggtactggtaaatggactgtacagcaagctgctgatttgtccattgcagctccaacaattgcagcttctctggattcaaggttccttagtgggttgaaagaggaaagagttgaagctgctaaagtcttcaaatcaggaggatttggtgatgtcttgaccgaccaagttgtggacaaggcaagattaattgatgatgtaaggcaagcactttatgcatccaagatttgcagttatgctcagggcatgaatctcattcgtgcaaaaagcatcgagaagggttgggacttgaagttgggggaactggctaggatatggaagggaggctgcattatccgcgctattttcctggacagaatcaagaaggcttatgatagaaattctgaccttgcaaaccttcttgtcgacccagaatttgcaaaggaaatcattgacaggcaatctgcttggagaagagttgtttgtcttgctatcaactccggtattagcactccaggcatgtcagccagtcttgcctatttcgaacacttataggagggaacgagtaccggctaatttggttcaagctcaacgagattattttggtgcccatacttatgaaagggttgacatggacggatctttccacactgaatggttcaagatcgccaaaaaactaaaagattaatattattctagcagtactcttcagaacactcccaataagtgtaataaaatctgctctggactc

SEQ ID NO: 195622 - DNA, 417 bp, Gossypium hirsutum
cccacgcgtccgcaaccctaatttcaaacctaaaatcgatttgctgaaacccattccagtgactgccaatccaccattttatttggtggccgacaatgctcgagcagcaacccgatcccaccggcgaacgcgccaagcgaggaaacctggtatgccactttattttcccttttaaaaaaaaacctagatctaatgttgtttaatcaagaaagatgaaaccgaatataagaagaacacttagtatcatccgaccctcgtccctatctcaatatttttgagatattcgggacttcattggtatcgtctccaatatttctttctaaaatcgcaaggtaatgagaagaagaaaaaaaattagatagacttgaaaataaccttttctgatttgtgatttcttggttttttcttctttttttt

SEQ ID NO: 195623 - DNA, 830 bp, Gossypium hirsutum
gttttgtctccttgaggtcatggcggaatttccttcagccaagcctccacttggtgtgctctgcgcagctgttgcttccaagggttgcattgcctatgatatttatttcgccatatcatcctcacgcgaaggttggcatccatcaaggaggtcatgtaacttgtgcattggtttatgagaaaacgccaacaggtcgtattcacaaaggtgtttgttcaacttggatgaagaatgctgtgtcctcgggcaatagcgatgactgcagctgggcacccatttttgtcaggcaatcaaactttaaacttccttcagatgctaaagtgcccatcataatgattggccctggtactggattggctcctttcaggggattccttcaggaaaggcttgcactgaaagaagctggtgctgagttgggtccatctgtattgttctttggctgcagaaaccggaaaatggatttcatatatgaagatgagctcaacaactttgtcaacagtggtgcactttctgagcttgtggttgctttttcacgcgagggacctaccaaggaatatgtgcaacataaaatgatggagaaggccttggacatctggaacatgatttctgaaggaggttacctatatgtgtgtggtgatgccaagggcatggctaaagacgtgcatcgaaccctactcactattttgcaagagcagggatgtctagacagctcaaaggctgagagcatggtgaaaaatctgcatacgaccggcaggtatctgcgtgatgtatggttactgactacaccatgaaaatgcagaaagaaaagaaatggctttatatattatata

SEQ ID NO: 195624 - DNA, 812 bp, Gossypium hirsutum
cccggtccggtattccgggcgggccgaccctcgcgtccaactggattggctcctttcatgggattccttcaggaaaggcttgcactgaaagaagctggtgctgagttgggtccatctgtattgttctttggctgcagaaaccggaaaatggatttcatatatgaagatgagctcaacaactttgtcaacagtggtgcactatctgagcttgtggttgccttttcacgtgagggacctaccaaggaatatgtgcaacataaaatgatggagaaggccaaggacatatgggacatgatttctcagggaggttacctgtatgtgtgtggtgatgccaagggcatggctagagatgttcatcgagctcttcacactattttccaagagcagggatcactagacagctcaaaggctgagagcatggtgaaaaatctgcaaatgagcggcaggtacctacgcgatgtatggtgatgattacgatgaaagaaactttataaaaatatacggcggtcaaaaagaaacttgcgagaagggttaaatgggtggaattgaatttattttgtatcaaagttaagaagtgttgcgattcttttatatatatattagtgtcgggataattttggatgatatgatgtaatattttaatatagaagacaatgtaatataatggagaaggtagagtaatggtattggaatttgtcttttataagaaagaaccggcaaatcggttcaaatgacaagcagcaagtgttgcttgctactccgaaatgttactcaactcttcctatctactgggaatatatgtttaagtttgg

SEQ ID NO: 195625 - DNA, 402 bp, Gossypium hirsutum
  unsure (1)..(402): unsure at all n locations
agattatccaaagtccacaacaaaaaatgcgactctgttcgtttgtcccttgactgaatacgccagctatggaatacatggggacagtcatcctcctcctgtttacaccgtggacaacgagcatcagaaacaactcttctttgcttcagattaaaaaaagttgggatgtaattccaagctatccttcatattgtaattttaacttttgagggcatctgtaaattccatagctttttgaaaaaacttttagtttcggtctgtataataatagcatttatcgtagcctactgtaatagtttataggcgcttcgaatagaaaaattaccagaaggctctcctttccagaannnnnnnnnnnnnnnnnnnnnnnnnnnnnnnnnnnnnnnnnnnnnnnnnnnnnnn

SEQ ID NO: 195626 - DNA, 490 bp, Gossypium hirsutum
gtgggtgttcctttccagaaggaggctttcctggatgtaaaaacaattggagaagaattgctcccacaatcagtggctgataagattgaaactatgcttctagatctaaaggtcccatcagaatttcacaaaagatcatttgaatgctcagttgactctatccgggctatcgcagctagtcatctttggcagcttgtggctgcgcgtgctgacttggatggccacttaaaaagctctaaaggactattttcttttggccaagggagactttttccagtgcttccttgaggagagccggcagttaatgcgcctaccgcctcgccagtcaactgctgaagctgatcttatggttccatttcagctggcagccataaagaccattggggaggaagacaagcactcgtctagagtatctttgcagatgccttcatttgggatcacagtgaaatcctctcaaagagatataccgaagacaaaagcatacactgat

SEQ ID NO: 195627 - DNA, 779 bp, Gossypium hirsutum
agcaaatcttgtttctccatcatcaacaacagcaagagcaacagttgtatgcaagactggaaactcaagtactacgagagcagcaagggcaacaacaacagcaagagtacccacaaccacccaagaaacgctcttatctgccgtcggcttctacttcaacttttggttccaaatcaacccaacatgcaagaagaatgggagatagccaccaccaagctgcaacatcgtcaagattggggttaaggcactctggaggcgagatcgttgaggtccaaggaggtcacattgttcggtcaactggaaggaaagaccgtcacagcaaagtttgcaccgccaaaggtcctcgagaccgtcgtgttcgtctctccgctcacaccgccatccagttctacgacgttcaggaccgccttggttacgaccgtcctagcaaagctgtggattggcttatcaaaaaagccaaatccgccattgacgagctcgctgaactacctccttggaacccacaaaccttgaaaacaacgacttcaaccacgaaacagaataatcaacaagatcaaaacataatcacagcagtagacaatgaaaagcccagaagaacggctacattaatgggaaatcaagttcaaattcttcagcaacaaggaacgggagataacccgaatagtaattcgggttttcttccatcttctttagtttctgatgagattgcagatactatgaagtcttcttttccattgggagcttccaatgaaggaccgtcttcttctattcagtttcat

SEQ ID NO: 195628 - DNA, 312 bp, Gossypium hirsutum
  unsure (1)..(312): unsure at all n locations
cccacgcgttcgggacactgctgtggatttagactccgtaagcctcactttcggcttcatcttccgggaggagtaatgatagtttcagagtttcacatgttgacagcggtgactctcgagcacatagaaggagacgactgaactaggaccatgtttagttcacaaagaattcagctatagcctggatgcgaatcaaaatgttaccatcatttccgtggagaaacaaatttgttgggatctagaaagctcgacccatctttagttttttactctccatgtacantaaacaatgtatgtgataatcttgtttta

SEQ ID NO: 195629 - DNA, 293 bp, Gossypium hirsutum
cctaaattaacttactcgtgaggttgagttgtctgctctctgcctcttcatcactctgctatgtgttgattctgttttggatcctaccgctatttgaaaccctaggcgaagccattagaatgggcggaaaaagaaagacgaacgaaaacgaagggatggaaggagaggaggatagcaaacacaacattaaaaagatgaagaaggagaagagtgagatacttccttcctccatttaaaacaaggagaagagatctgctgtacacgccaaactcaagcaccaaaagaagctcgac

SEQ ID NO: 195630 - DNA, 561 bp, Gossypium hirsutum
gcctgacggttgttttcgaacttttgtttgggctttgcgtagtttttcttctttctacttttaacgagctctggacagttcatcgccatttggcaatcggaaattgttacttacctataaaatttaaaaagcagtttgaaatttggtgagagaaatcataaccaaaaatggattcatcgaaattgggttcagtccctgaagaagagcagcatcgagaagagagtaacaagccggttgtttctgcctttgcctcgcttcccgatcgccgtccaactaagagttctgagaaatactcacctttagattggtccggcttttttgatggagaggaagatgtctgcataccagactcaaatgatgtctttcatttatatatggcaggaacagaaggaccagttgttttttgtctacatgggggcggctactctgggctctcatttgctctgtcggctagtaaaattaaagagaaagctagagtggttgccatggaccttagagggcatggaaaatcatccacagaaaatgatcttgatctatctattgagactatgtgcaatgatg

SEQ ID NO: 195631 - DNA, 447 bp, Gossypium hirsutum
ggccacgcgtacgctctgaagcttttattttcttcctataaacagttctaaagcacgttgttcttctttttcttttcgttggagatctcggcggagatggggaaacgacgctgtgttgtggcggcattagcagcgataatgttgatgatggagttagcggcgttgacagtagcagaacacagaagaagtatgttgagtaatggtcttggaatgactcctcccatgggttggaacagctggaatcactttggatgcaatattgatgaaaaaatgatcaaagaaactgctgatgctctagtttcaaccgggctctccaagcttggatatgaatatgttaatatagatgattgctgggctgaaatttcccgtgatgacaagggtaatctagtgcctaagaagtcaacatttccatctggaataaaggctcttgcagattatgttaacaag

SEQ ID NO: 195632 - DNA, 426 bp, Gossypium hirsutum
cccacgcgttcgcccaacaacccaaacaagccaaaaaaaaaaggaatcgcctctacttctactttttacataatcctcactttcaattccctcactctgatcaagccgccatgtgtggaggtgctataatctctgattttattgctccggtgcggtcgcgtcggctgacggctgactacttgtggcccgatctgagaaaatcgcaatcgaaaaaggcttccagtaataggtactcgaagccggcgatcgatttcaccgataacttcgaggccgactttcaagacttcaaggatgataaatccgatatcgaagactatgatgttgatgatgttttggctgatgccaagccctttgcgttctctgccgcaaagaaagcatcttctactgtttctcatgctcaagcttgagagtcttgcaaaagaaaga

SEQ ID NO: 195633 - DNA, 437 bp, Gossypium hirsutum
aaaaaaatcttgaaaatatttcacaaacccttcttcctctcagtccattcgcaggcttcatcggcgccgaatgcgcctccaccatcaacgcgattttaattagatcctaaaggatctaataacccttggaccggagaagtgaacaatgaataaattgaccccaaatccattattatgtttagctaaccgagaagaagaggctcaagtgataaggaaaagctaagcaggtgtaatcagtactagctctcacgtattttgttgaggttcgaccggattgtacgaagaatgtatacgcatgatattggttttgcaaaggttcacgtggattgtatggagaatatatataaacatgacatttggttttatggaggttcgattggattgtacggagatacttgtgcatatttatatgataaccctacatgggttctttcaag

SEQ ID NO: 195634 - DNA, 514 bp, Gossypium hirsutum
  unsure (1)..(514): unsure at all n locations
cccacccgtccgaccgctgggtttttccttcttcctaagccttacggtttctgttggcggatgaaatttatactccgatgtctttccttccgaggattctgtcctcagatctgctcgcatcggttcaacatatccctctttgatttctgatgttgtactgtgaaaggagtagcgtcgttggatctatggttttaaaggcctttgctgggcaaggaagcaaagattggcaggattcaagttcttgctgctttttaaggatggtctcaccaggggctgagatttatacgctcttcagatgtaagttgaaaataaacaaggcatctgattgtgtgagacggcgacgtgagattgaatcggctggtttgcttatgaaaggatgtgtaagatgtccgggcaaaaagtcctactgataatatttttttgaaggggaccgtgtcctgatctatctttgtcgtccgagacctttgccatgacaggtgcgcttgcatggcangtcaccaaacttaataaaaat

SEQ ID NO: 195635 - DNA, 658 bp, Gossypium hirsutum
gaaagattgtaagtgtaaggatcagaaggaattttgcatttgtacaatatgattgccaagatgatgccaccagggctttggaggctacaaatatgagcaagctgatggatagagttatttcagttgaatatgcagtacgagatgatgatgatcgtcgaaatggatatagccctgagagaggtcgtgataggtcacctgagagaggtcgtgacaggagacgatctccaagtcccttccgaagagagaggggtagccccgattatggtcgtggctctagtcgtagcccttataggaaggagagggggagccctgattatggtcgtggccacggtccaagtctttataagagagatagaggtagccctgagtatggccagatcaccagccgtagtcctcagagaagagagaggaccagctttgaccatgctcgtggctccagccgaagtcctttcaggaaagagagggctagccctgagaatatccaaggctctagccgcagtccttataggaaagagaagcgtagtgctgaaaatgatcgtagccccagtcgcagtccatatagaagagaaaggcccacttctgacaatggtcgtgcacccagccatagcccatatggaagagagagaattagcccagagaatggccgtggtagcagccc

SEQ ID NO: 195636 - DNA, 714 bp, Gossypium hirsutum
tcgttcaaattcagtttggaagtttccatgtaaaagaaatgaatttcatgtggtttgatagggaatcgagttcaaagacagcggtttttaagaagaagagttcttaaacatacagactacctgtctttgcttggaaactcaagtttatctctttgtccgaaagaagaaagaggcatggagaagactgatgcatcatctgctgctgctgctgttgctgatgctaagatatcatcaatctttatctatcccgtaaaatcatgccgtggaatttctgttccacatgcacccctcactcctactgggtttcgatgggatcggcaatggcttgttgtgaatcaaaaaggcagggcatatactcaaagggttgaaccaaagcttgctctatttgaggtgaaccggcctgctctggccctttcagagggctgggaacctaccaagacctcctatttggaaaataaaagcacccggaatggatttactcaagatttctctttgcaaaccaccaaaagtgtctgatggtgtttcagtttgggagtggtccggctctgcattagatgagggtgatgaggcttcaaaatggtttacaaattatctcgggaaacccactaggatggttcgttttaatgcagcatcagaaactaggcctgtggatcctgtgtatgctcaagggtattccataatgttttctgacatgttccctttcatgtaagcctt

SEQ ID NO: 195637 - DNA, 426 bp, Gossypium hirsutum
cccacgcgtccggaacaataacatataaacatataaagaaaacaaaattaataaattttgttttccatctcgcagaaggtctctcgactctcactaagcctattcttcaataccatggacatgaagaagatctcctgcgccgtcattgtcgctgccgcctctatgagcgcggtcctggctgctggctccgctccagctccagctccagcttcagctccaggtgcagcttcagcttcagcttcagcagctgccccaggcccagactccaacgtcgcaacctcaacaatgcctgttcttgggtccttggttggagccacccttggttctttcttttcctactatttgcagtaagccagcaaaaatctacgaaaccatgaagtattgaagaatcaaaaaaggtgaatgaataaatgtaaaatattactc

SEQ ID NO: 195638 - DNA, 632 bp, Gossypium hirsutum
cccacgcgtccggtgaaagctatggaacttatggtgccccccagattggtgttagtaacagtgcttatggagcttatggaggttattcatcaggacgcagtggtccctctgggttatccagccataactctgtttcccggcgcaaaaactatggttactaaattctttttgattgttggataacagagcctctccgatctccatatttagggttctgatgcacttgttttccctttgttgcctatccattcccattaaaacagctgagatttacgaagcctgaagcccgcctagtgcctactttgatgaagcctgcctaaaccggaagaccagatgaaccagggcccaccttgatgctactacctagaaggaccaaatatatgtggagatattactattctctttgaaatttgccatgtccatgccaccaaaataccaagctctataatatgtgctcccaagaaccttgctagccggaaatgcctgttgctgccttacagttccttttttgtttgatgtcgtttctgcttagtagttttgcatttgtttagtcgttcaaaaccttgttgctttcttccatcttctgactggtgtaccaagtgcctggtttataatttggcttctgctttctc

SEQ ID NO: 195639 - DNA, 1074 bp, Gossypium hirsutum
cactcttttatcacacaagataaaacagtactttagttttgatctcacaaaactgaaaaaactctccattttttatcaaatgttctagacaacgatgggatctgaatctcaagttgtttgtgttactggtgcctctgggttcattggttcatggctggtcatgaggctactcgaacacggttacactgtccgcgccaccgtccgtgatcccgataatcaaaagaaggtaaagcacttgcttgatctaccaaaagccaacacccatttgacattgtggaaagctgatttatctgaagaaggaagctttgatgcagccattaatggctgttgtggtgtcttccatgttgccactccaatggattttgagtccaaggaccctgagaatgaagtgataaagccaacaatcaatggagtactggatataatgaaagcatgcatcaaagcaaagacagtaaaaaaattgattttcacatcatcagctggaactgtcaatgttgaagaacaccaaagaactgtttatgatgaaagtaattggagtgatttggactttgtctatgccaagaaaatgactgggtggatgtattttgtctccaagacattggctgagcaagctgcctggaagtttgcaaaggagaataacttggatctcatcactataatttcaactcttggcattgggccatttcttatgccttcaatgccacctagtctaattactggcctttcaccccttactgggaatgaagctcattatggtatcattaggcaagggcagttcgtgcacttggatgatctctgcatgtctcacatattcttgtttgaaaaccctaaagctgaaggcagatacatttgctcctcccatgaggccaccattgttgagcttgccaaaatgctaagagaaaaatacccagactacaatattcctactgagttcaaagatgcagatgaaaacttgggaaatgtggtcttcaattccaagaagctgttggatttagggtttcaatttaagtacagcttggaagacatgtttgtcggagctgtggagacatgtcatgaaaaagggttaattgcacc

SEQ ID NO: 195640 - DNA, 748 bp, Gossypium hirsutum
  unsure (1)..(748): unsure at all n locations
tgcctacaacgctgccaccttttttagtccaaatttccatgaggaacaacatgattgaaggcacaatccctccaagtcttaaatatttgaaccttctgcaagtattagacctgagtcacaacaaactcaccggctcagtcccttatttcctctttaaccacccatctcttcaacaactcactctcgcattcaactcctttgattctccgcaagctccctctaatctaggcacccaaagtgagcttattgctgttgacttgagcaataacgagctacaaggctggttacctcctttcttgccattaatgccaaacctgtcagctttatccatggaaaacaacaagttttcgggtatgatccctatccaatacgcattgagagccgctctgcctgcctccggaattgccccgtttgcaagactgttgcttggggggaactacttgttcggaccaattccagggccattgctggtactcaaaccagacactgcaaatgtcagccttgctgacaactgcttgatcaggtgcccatcgcgtttctttttctgccaaggtgctgaccagaaatctttaatggaatgcaagagttttggttctgtaatcccttgaatcatgttatttcagcaatgtttttagttgcaacatccatgtgtctttcttgtctaaaattctttctctattgntcttagtttgggcttgttagttttcagtttgttagtgggaaatctaaaaagaaatcttttgttttc

SEQ ID NO: 195641 - DNA, 430 bp, Gossypium hirsutum
agcccagagatttaacgctagcggtattagatatcgcttctctatttccgaactatgatagtagaacgcatccaattcgtgcagttggccaattatcatgagaaatttatacaaacccagttttagaaaattttgatggtagttttcgaggctcggctcagggcatagaaggaagtattaggagtccacatttgatggatatacttaacagtataaccatctatacggatgctcatagaggagaatattattggtcagggcatcaaataatggcttctcctgtagggttttcggggccagaattcacttttccgctatttggaactatgggaaatgcagctccacaacaacgtattgttgctcaactaggtcagggcgtgtttagaacattatccgccactttatatagaagaccttttaatatagggat

SEQ ID NO: 195642 - DNA, 492 bp, Gossypium hirsutum
aaacttttaaagcttaaaactttctcagcttctccacttcccttctcaaccgaaaggctattattctggcctacaaccgccccccaagatctgactgcgacgaatggggcaagacccttcgacagtgtgaacgtgatataactccggtaagtctctcgttctctctatacctcgtatttctgtcgaaatagaaacagaataacagaataaaaaacaaaaaaaatcacctttggaggattcttggctggtctttattgattttaagttggctggtggtactaaaaaaccgaactcggttttcttggaaagaaagtgaaaaacccccctttagtacaatctcttctctccgaaatacaatcgattcctctctaaaatcccccctttcaaaatttttctcttttcggtttttataaccgattacaatcaccataaaaactcccattcctctgttggtgctgcttgttttgttggttgtgtttgcagggtatgagt

SEQ ID NO: 195643 - DNA, 438 bp, Gossypium hirsutum
  unsure (1)..(438): unsure at all n locations
cgcagtaccccattcattacgaaatttagctgctgccactgaaggacgaagcatgctcctcgtacctgagattcgcaatgtcttggatctcatgcgtacgggtgagaactcgcgtttcgaggatgttagcgagtcctcctctatcagcatttttcgcggtagctgatattcatgaccggcatagggatatgcggctcgatgttcattacatgtcattcgaagagttactggctctagaagaacgcattgggaatgtaaacacgggggtgagtgaagaaatgatatcaaaccagttgaaacgaccaaagtactcttgtgtaccaagaactcaattagagacagaaccatgttgtgtttgtcaggaagaatacaaccaccgtgaagatcttggaacactctgatgcggncatgactttcatgctgattgcattaaacaat

SEQ ID NO: 195644 - DNA, 424 bp, Gossypium hirsutum
cccttttattctctttttaacgtcttttttacttctctctgttaatttccccaaaacagtagttgtgatttaaagaaggttttaattaccattaatgttaccgttgcattattcgtaatctgaacttgcttttatgttatttggacatcatgctttcgatttttttgtttagttgtaaagaattttttatccggtacagatttttaacctgaataacttcttcagtagttgctttttttttgtctggataatagttagatagaattatactttgttcctttctttgttgcccgcaataggacgacattttttgggaattaattaactatcccgatttttttttattgtttttaatttttgaggtctgggttttattctgctgtatttttttttgtttcgcagtcacagctcttacattatattt

SEQ ID NO: 195645 - DNA, 717 bp, Gossypium hirsutum
tgcttctctattgttaaatacaataaaccttagagaaaaactgcatttctccatccccaatctttttcctttgcaataaaccccaacaaaccaaaatggcccgccaaattgttgttcttgctttggccatcatggccctctttgccttggtttccaccgctgctggcggcccccgcccccgcacccggtggcagctccttcaggttcacctggagatgctagctcccctcctcctcaggcacagcgctcctagtcctagcagtggtgccgcacttgaggtctcggctattgccgcaggagcagccgccgttgctagctattttatgttctaaatacgatttatctcaagggtgtctagcagtggcttttctaggtttgatatcatcacgaaagctgccttattaattattttgtaatttgctaatttgttttatgaataaagaattggaacggaaaaaaaaaaaaaaaaaaaaaaaaaaaaaaaaaaaataaaaaaaaaaaaaaaaaaaaaaaaaaaaaaaaaaaaaaaaaaaaaaaagaaaataaaaaaactaaatttaattaaaaaaaaattagaaaaatataaaaaaaaaaagggggggccctttaaaaagcccaaattttttttcccgggtgttgcgaagaaaaattttttttttggggcccccaaaattaaattaatgggccggttttttaaaacttggtgattggaaaaac

SEQ ID NO: 195646 - DNA, 468 bp, Gossypium hirsutum
cttttgttttccaaggaaaaaacaaaacaccctctcccccttttgtctttccaacgatcgggctccctcaccgcccaccgtaccaccaccgttttcggtggccggtgacgcgcaacaataggtatttcaaccccgtttttgggaccctttgaaggccgagttttcagccaaacaatgcggaaatgaaagggtctctccctctctaaacgacgcgaccccgacgacggaggagggatctcccgcgacgaagccccgaccgattccggggaggccctctactccctccctttatttattttcgtgcccactttatttaatagatttgcaagtaaggataaaaagaaactaaaagagattagcattgaaatgaaaacaaagagaatagatcggaaatcacccttttttttatcttgtttgctcttgattttaatggctaaatgtcgtgtccaaaaaaactacaatggatgt

SEQ ID NO: 195647 - DNA, 399 bp, Gossypium hirsutum
ccttttgttttccaaggaaaaaacaaaacaccctctcccccttttgtctttccaacgatcgggctccctcaccgcccaccgtaccaccaccgttttcagtggccggtgacgcgcaacaataggtatttcaaccccgtttttgggaccctttgaaggccgagttttcagccaaacaatgcggaattgaaagggtctctccctctctaaacgacgcgaccccgacgaccgaggagggatctccggcgacgaagccccgaccgattcccgtgtcagacgcgtggaaggccggtggttggtgccccaagcggtggtggtggcgcgcgtgatggccaagggcagaggggggagtggcggctgtactttggtggctagggttacggtcgctggtttaagatagtg

SEQ ID NO: 195648 - DNA, 452 bp, Gossypium hirsutum
ccggaccggaagggcccgggccgacccacccgtacggctagcgctaactggttgctgcttattacttgatcaaaaagcaaaagagcgcatgggagacttgcttatgcctagcttggtacttcagcatgagttgggcgatcatgccattgctggctgcattggaaatgaagaggatggtttgtcttttggggacgagagatatggtttcggttgatcaggaaaatgaagaatttcaggactgtgaggttcgtgctgagggacatgaaggaacccctcatgaagctcttattttggcgcttggctatttgggtgtgcgggatctttttcttattgagaatgtttgcacatctctgcgatctgtagttcacaatgatcctcttttatggagggatattcacataaatccgccactgaatgagaagattactgatgatgttcttttacaaataact

SEQ ID NO: 195649 - DNA, 535 bp, Gossypium hirsutum
cattaatggggatcggtactgcaactgttaaaacacgggcaagagatgctgcgctaaatgctatccagtcacctttgttagatcttggtatagaaagggctaccggaattgtttggaacataactggtggaagtgatttaaccttgtttgaggttaatactgcagctgaggttatatatgatcttgtggatccaactgccaatttaatatttggagcagtgatcgatccgtcaattagtggccaagtaagtataaccctaattgtccgcaggatttaagcggcgagatgataccgtaggaaggcaccttcaggcaggtcagctagcacagggagataccggtcttggaatcaatcagcgaccttctttcaaccaaggcagttcatttgacatcccggagttcttgaagaagaaaggacgttcacgctatccgagagcttaaatacttctctgcatagcgtctcggttcctgcttggttcccttgtggttctcttttacgtttcttccgttctgggctattaacgtgtacagaata

SEQ ID NO: 195650 - DNA, 398 bp, Gossypium hirsutum
cccacgcgtccgcccacgcgtccgggaagaacgggacgtgcagggaagactgtgtgtggctacaacatttttgactctgtcacggcgccgatgtcttcttcgatctcaagcagatgcttgttcaaagtggcagccctgtgcctcatgagctggcaaagcatgaggcttctaaattcaaaccaggaacaattcctgatagacctcctagacgcaatgacactgtttttgctcactgagaagctctgtactatggtattttagtttgccaaattttctttcgttgctgcttacaagtgattgcttttgtacttttatcgcagcatttgaaagtggtatttgctgactttgcctttacttgctgctacaattgctgatcatagcaaaagtaacattttgaa

SEQ ID NO: 195651 - DNA, 1082 bp, Gossypium hirsutum
  unsure (1)..(1082): unsure at all n locations
tgtttggcaagattcaagttcattcacaaatatatttgatgtggatcactttatcaatgtccttcaagatgaagtttctatagttaaagagttgcctagagaatattcttggagctcacgggaatattatgctacaggtataagagctactagaatcaaaacagcacctattcatgcttcagctgactggtatctggaaaatgtgttgcctgttatgcgaagttatgggattgctgctatatcgccattctcccatcggctagcgtttgacaagttgcctgtggaaatccaactttacgttgtaaacttcaagcatcaggcactgaggttctacgagagagaacagatgatacagagaaagagagagctggaagtttgttgtattacatcttcgctttgacaaagacatggctgctcattcagcttgtgattttggtggaggcaaagctgagaaactggccctagctaaatatcgccaagttttatggcagggaagggttttaaactctcaattcactgatcatgagctgagaaatcaagggcggtgcccattgactccggaggaaattggattgctgctaactgctttgggcttcaacaataatactcacctctatcttgcttcacacaaagtttatggaggagaggcaaggatctcaacattgcgtgctatgtttcccctcatggaagataagaagagccttgcttcagcgattgagctcgctgaggttgaaggtaaggcttctttgatggctgctgttgattattacgtgagccttaaaagtgacatcttcatctctgcttctcctggaaacatgcacaatgctctgcttggacatcgagcttacttgaacttgaaaaccattcgaccgaacatgttactgctgggcccactattcctgaacaaaaccatagagtggtctgagtttcagcatgcggttattaatggacataaaaataggcaaggccaaacgaggttaagaaaggagaagcaatctatatatacatatccagccccagattgcatgtgtagagcttaaacttcgtaaacattatggtatgaagctantttatgtgtcttt

SEQ ID NO: 195652 - DNA, 936 bp, Gossypium hirsutum
  unsure (1)..(936): unsure at all n locations
gtttggaaacgtgctcgttgattcattatcccttggacctgtggctccgggggatgctgctgtagcaatagcttcggatgaaaaaattgctttgctgggtgcaatacagtctctgttcgaaggttcaatgtacacatttgtgttcctttggacacctgctttgagccccaacgaagaagagatccctcacggtttcattttcgccactttcatgttggcttcgatgttgggaacctcccttgcatctcgtttgatggctcgatcatcacctagggtagaaagctacatgcaaatcgcttttgtgatttcctcagcctctctcacgcttccgattataaccaatttcttggtagcaccttcgaaagtgaaaggcgaaagcatctcattcgcaggttgtcttcaacttcttggtttctgtacttttgaggcttgcgtagggatattctggccatcaattatgaaaatgagatcccaatacatcccggaggaggctcggagcaccatcatgaactttttccgcattcctctcaacatcttcgtctgcattgtgctatacaatgtcgacgcattccccatccaccgttatgttcggtatgtgctcgattttcctccttgttgcatccatcttgcaaagacggctgatggcaatttcagacaaaccaaagatggaaaattggacagcaatgaaggaaagggaccctgaagctgaagcattaaatgattgaaaaaggcaaccaaggattgaattgaaagcaacagcataattcattggggttatnatttatgtttgattcttacagtagtgaaagtaaatgtgggtaaaacatangttactttgagtatttatgattcgtttatggggctgtctggtaatcagcaccaatagttaacccctttttttttcttcctctgttaaagtagggacactattatgaa

SEQ ID NO: 195653 - DNA, 393 bp, Gossypium hirsutum
gtacagcatcaatgcaacagttgaaagaacgacttgagaaagacttgcttgaggaatctcctcaagctgctagagttaaagtactggcaagtggaaatgcaacagaaagaagattcagtggttggataggagggagtatattggcatctcttaggttcattccagcaaatgtggctctccaagtcacagtatgaagaacatggagcttcatatatacaaagaaaatgcccttaagatgaggatgacaggcttttgcatttatcctcatggttcaagatctttttcggatccgaagtatgcccatttgtgctataacaaatttcaaattgacatcgcttggaggtcaatggacgatatattcttattaaaggaaaaggcattattagcttttat

SEQ ID NO: 195654 - DNA, 622 bp, Gossypium hirsutum
  unsure (1)..(622): unsure at all n locations
aaaaaaaaaacaaaaacaaaaaatctgaaaaaaaatcctaacagcgacaacataaactagtgtttctgtttttctcaaaaagaacattggttttttttcctaacctgttgttcctgtttctaagatctcattaaagttatggtttttgtatagtttgtctttttcttaagagctaaaagattttggacggctaagatggaccgggaaggaggatcccacggcggatcttgttactacactattctcgggattcgcaaggacgcctccttctccgatatccgtactgcttaccgtaagcttgctctgaaatggcacccggacagatacgtcacaaatccggcggtagccggcgaagcgaaactcacgtttcagcaaatccaacaagcttattccgttctctcaaacgggtccaagagatcaatgtatgacgccagtctctacgatccctcggcagatgatgaccaagaattctgtgactttatgcnagagatgatatcgatgatgaacaatgtgaaagacgaaggggatagtttcgaagatctgcnnaagatgttcgccgatatggtcggcagtggagattgtatgagcttcaacgtcnacactgatcccacggagaacaaaa

SEQ ID NO: 195655 - DNA, 597 bp, Gossypium hirsutum
  unsure (1)..(597): unsure at all n locations
atatcttccatttcacgcctataaatatcctttcaatcacacctcaataaatcattgctttcactactttcaattctcgattccttctgtcattttgggttttactcttcttcttttttttgtgaaatcaagatggatcttgatctttctccaaagctggcaaagaaagtgtacggtgacgatgctggaagctactacgcatggtgccccgatgaacttcctatgttgcgtcaaggcaacattggtgcagccaagttggcccttgagaagaatggctttgccctccctctttactctgattcttccaaggttgcttatgtccttcaaggggctggtgttgctgggattattctccctgaatcagaggagaaagtgattgcaatcaagaagggtgatgcaattgctcttccatttggtgtcatcacctggtggtccaacaaggaggacactgaattggtggtccttttcatgggggatacctcaaaaggccacaaaccaggccagttcactgatttcttcttgacaggcgccaacggcatctttactggcttcacaaccgattntgtgaagagggcatgggatgtggatgatgacact

SEQ ID NO: 195656 - DNA, 1331 bp, Gossypium hirsutum
gagaagcagtactccttccattccaactcagcgctcactcaatccaactcaccaatgggcgcgcaagacggaaatcagcaatcacagcaactcatccttggtcacaacgtcttgctgctgaagcatacagatgtccctgacatcgagaaggtccgtctcaaggatgaagtcctgaactcggttaaatccaatgaaatggctccgtattatgaaaccctaggtgccgattaagtggttgagctggatcagaacgttttggacgcgatgcgtgccaagaatgaggaggagattaagaagctcgacgagaagattgctgatgctgaagaaaacttgggtgaaagtgaaggtcgagaagcacatttagctaaatccttatattacattcggataggtgatggggagaaagcattggagcaacttaagttgacggaaaccaagacagccgctgttgggcaaaagatggacttggtcttctactcgttgcagattggctttttctacgtggattttgatcttatttccaagagcattgataaagcaaaaaacttgttcgaagaaggcggtgactgggagaggaagaaccgtttgaaggtgtatgaaggcttgtattgcatgtccactcgcaattttaagaaggctgccaatctatttttggattccatttcaaccttcacaacttacgaacttttcccttatgacacattcatattttacaccgtgcttactagcatcatatcattggatagagtttccctgaaacaaaaggtggttgatgctcctgaaatcctgactgtgattggaaaaattccacatctttcggaatttttaaactctctatatgattgccagtacaaatctttcttcttagccttcgctggcctgaccgagcagataaaactggaccgttatttgcatccacatttccggttttacatgagggaggtcagaactgttgtttactctcaatttctggaatcctacaagagtgttacgactgaagccatggcaaaggcttttggggtgacggtggagttcattgatctggagctatcccgtttcattgcagcagggaagcttcattgcaagattgacaaggttgctggtgttctcgaaactaaccgccctgatgcgaagaatgctctttaccaagccaccattaaacaaggtgacttcttattaaaccggatccagaagttgtctcgcgtcattgatctatgaattagttaggtatttcatgggatttagaaattgagaaccaatattttcaagtttgaaagaaatatggaaaatataaaataatgcttttggattcaattttgttctttcgtttc

SEQ ID NO: 195657 - DNA, 412 bp, Gossypium hirsutum
tcggaggtcaaaatcaaccatttttgccggttttggatagctttgtaagaatcaaactgggagaggccaaaatgtaccaagcacaaggctgatgatgcaagaagagatgctgtatagcctcaaaagaattgctatcacaatgggtgaaaagactgtagatgagttcaagagttgaataaaaaaacttcgcttggtcgaggctgaagaaatgcgttaacaaaagtttgaagagtttcaagcatctataaagagctctacagggcatgctatgggatgaagacaagaatggatgctctttttcaagatcttctgttgaaaatggaagccacaaagcgaaaccttgccatgtgatgtgctaaattgaatgggtctttgctttcaattagaattggtattggaaggaatgtcaatt

SEQ ID NO: 195658 - DNA, 610 bp, Gossypium hirsutum
tccatttattgggtgtttggactttggagtctttgatgtagcatgcaatagcttatgtggatgaagaaaagtactatggagcaaaggcaaccattaacgtttgggaacccaaaatacaacagcctaatgagttcagcttgtcccaaatctggatcttgggtggttcttttggtgaagatctcaatagcattgaagcaggctggcaggttagcccagatttatatggagacaaccacactagactcttcacttattggactagtgatgcatatcaagccactggttgctataatctactttgctcaggcttcattcaaatcaacaatgaaatagcaatgggtgcaagcatctaccctgtttctagctatcatgattcccaatatgatataagcttacttgtgtggaaggatcctaaggaggggaactggtggctacaatttggtaatagctatgtgttgggttactggccagctttcctattttcctacctatcagacagtgcctccatgattgagtggggaggtgaggttgtaaactcagaatcagatggacagcatacatccacacaaatggggagtggtcatttccccaaagaagggtttggcaaatc

SEQ ID NO: 195659 - DNA, 403 bp, Gossypium hirsutum
atcttttcaaagcaaaaaaaaagaaaaagaaacaaaagcaaagagataattaagagaggaattcgaggaagaagaagggttttttttttcaaaaaaaaaaaaattgctttttttctcttttgtgtgaagaagctggagctatcaaagatgatgcagattgagcagcaacaacagcagccccagcagcaacaaaaccagttaatggttcaaaactctgggagtttaagctttagcagtcacttgtctaaagaagatgaagagatctctaaatcagctctttctacttttagagctaaagaagaagagattgaaaggaagaagatggaagttagagaaaaagttcagcttcagttaggtcgtgttgaagaagaaactaaacgtctggctgtgattcgtgaggagc

SEQ ID NO: 195660 - DNA, 533 bp, Gossypium hirsutum
caatgaccgtgcaagatatcgacaaccagatagcacagctcaaagcacatcgagccgagctcacgaaactgatagacaagaagaaaagagacaaggatgaattgacatataaccaaaagttggtggcaaactcgataccgaaagtggtgcatgaggttcagctggctaatgctaaaaaaccagaatgggagctaaagaaggaaaatgcattaaagcgtgaaggtgaaatactagctaaatttgctcctttaaaaggggtttccctttgaaagaaattatgtggtatcatatcattggctggtgggaatatcttgaacaccatagggatgggactagttttatatttatttagtgataataaaataacagtggtagctttgctgagactgcaatttggtagtgtattgcttttgaggattgttgtaacttggtaactttggctagtgccccctttgtacttttgaaccgtcaaaactcagtaattactgtttctagttttaactttttgtaataatgtcaaaatttgatatttt

SEQ ID NO: 195661 - DNA, 559 bp, Gossypium hirsutum
atcatttttctcgatccatgcttttttcgatctggaacaaaaccattgcttagtgattggacttccgatcaagggaaagctcgtcaaatcaattcagaattgactgataaatgcgttgtgagtgatgcattgaaaagcacattcacgaggtcaaggattttgtttggtctcatttccgggactgttttcctcttatgtactggtttcttcttccggttatacggatgggaatttctacatgaggcattgctctaccatcttactcgcacggatccaagacataatttttccatctatttctaccatatctatcttaactatgaacgcgagctttcggttcttgaaaagctcgtctcctttttgcctcagtttatagtgcagctagtcctcattttatgtttcgcaaaggatcttgtattctgcttctttgtacagacagtggcatttgtagcattcaataaggtaatcacagcacagtacttcgtctggatcttttgtgtcttgcctcttattttgccatggagcaatatgaagcttaaatggaaaggcctatgttgca

SEQ ID NO: 195662 - DNA, 341 bp, Gossypium hirsutum
cttccacaggatctgtttgaagctttggggttttgctttcgagtctttaaagaaggggggaaagggtcttgaagtaatgaagtcaacctcaatgaatgcaagagtttcttgatcgcagagtccctgctaatgcctacccagttgatggggtcttctcgttctgctgttctcattgatcgaggtacgagcctactgagtcggatttatacgccaactacagctgaagagcctcaaccgaatattgctgaactcgagaaacctgttacagcggccgtggtccctgttattattttctttcatggtggaagctttgcacattcctcagcttatagtgctatata

SEQ ID NO: 195663 - DNA, 630 bp, Gossypium hirsutum
  unsure (1)..(630): unsure at all n locations
cagccaccttattaccagccttatgatcagtatcctagctatgtacctcctccaccagactccaaccccaaccctattccgccagactattcaaccccatataatcaaataggatcatcacaatcctctgtccctcctgcttatgacaacccctacgataattccatgaaattggatcaaagcagtggcagttatttcgacgacaaattcggagcacgttataaccagagcagatacgatatgggacccgatctctatggtaagcgatatgatagctatccacccttcggtgatgatggtggatacggtgatggggtttatgcttatgaaggaggaaaggtggagccttatggggcaagtggcacantccccaaaatatcgacttgggtcaattcgacgattatgggcgggccatcaatttcccttctgggaaggactcgtcaggttcatcttctgggtagattgtgaaggcggggcctaaagcggagaccctggaagccgtaagagtcgggtcagaagttcgggttaagttgtgaatgaagtggagagaaggcccgtgatggaattgccgatggctagatggattcgatgctgcactgcccagcgacttggaatttccatggaactcca

SEQ ID NO: 195664 - DNA, 437 bp, Gossypium hirsutum
gccacatcttctggttggaacaagttaaaggatggaggtgaaaatagcggaaaccaagatccatggggtaaggcatcatcaacaagtacttggggacaagggagtggtggtagcaagggaggatggtaattttaacctttgcttactgaacaaggtttttagtgctgtagatacttctattttgggtctgttctgcagtttctacagtgtagagagccggaatggaacaaggtagtgtttccgggcagactggtagtagtgaagacatttgctgtttagtgtttactagaacagctttatgtttgttaatattcctttccgagttagtaatgctaccatattatgtagggcttcctcattgggcatagtaatgcatagatgttgctcaaaactacatcaactgataatattatgactactgtttcaagctcactgca

SEQ ID NO: 195665 - DNA, 886 bp, Gossypium hirsutum
  unsure (1)..(886): unsure at all n locations
tcaagcttaaagaaatatgcaatgcagcaagctttcaaaactatgatgggccaaatgaatacacaaaataaccaatttgccaatgctgcttttccttcgggatccccgtttccttttccaacacctccgtcaacaggacctgtcacatccccttctccatcttctgctcaaaaaactagcattacggttgatgtacctgcaacaaaagttgaagcagccccggtgattgatccatcaaccaaaggaaaaagtgaaacagaaaaagcagaaccaaagaaatatgcttttgtagatgtttctccagaagaaactgtgcagaagagttcttttgaagatgtggctgagacaagttcatcaaacaatgctcaaattcccaaggatgtctctgataatggagctgcatcaaagcaggataccggtgcttttggtggttatcagtcaactggaaaagcaggtccgggtttatctgtggatgctntagagaanatgttggaagatccaacggtgcagaaaatggtttatccatatttgccagaagaaatgangaaccccgagacatttanatggatgctacaaaatcctcaataccgtcaacaactgcaagacatgctaaataatatgnggtgaagtcgaattgggacatangatgatggatnnnctgaaaaacttgatactcacagtnctgagtgaagcagcattcaaccagatggcctacaccctagaagtatatcaaatatggcaaatctctatgctatgcttcaaatactattagccgtttatggtgtcaaaccctggctgaaatcaataaacgggggggtttacaaaatggatttcggagagggcctcttttgtgtaaaattgatattatatattatataataataat

SEQ ID NO: 195666 - DNA, 430 bp, Gossypium hirsutum
cggacgcgtgggcgggataccagctgcccgggtgacgaagaaagaagatctcaaagcagcaattcagaaaatgttggacactcctggaccttacttgttggatgtgattgtcccacatcaagaacatgtcctgcctatgatccccagtgccggcgctttcaaagatgtgatcacagagggtgatggaagaacacaatattgacctcaatgagcatcaaatggtcttttttttggggtaatgtatgtaatgaatgagggtgggttatgggggcttagtttctgagttctggaacatagtttttctatgcttttaaaagcaaccaattaggttttcagtttggtcttatgcaagtcttgtaggtctttagtctagtaatggtatgtaatgggcgaatctaaacttgtttttggtagaatgatgaatgctttc

SEQ ID NO: 195667 - DNA, 815 bp, Gossypium hirsutum
  unsure (1)..(815): unsure at all n locations
cttaattcccttcccttttctccatttttctactatttttctttttttctcttttcctcctttattgtcctttctaacaaaccgctgccgctgcctccacacactttccggcgtcttacctccgatgaggccagcttccttcccatcattcgaaatttaaatcctcaaatatatctatccaatccattgctccccatttcttcggcgcttctctcttgctctcggtcacttttcaacgttttcctgttattcttttttagctttgggtatccacgggccaaaaaaacacatgctatagaaggaagagagttttcgtgagagagaaaccctaagttttctctggcgtttctggtttttgtgatttttgaaattcgctgcttcaacggagactcatttcagatttgacaaaatcatcaacaaggaaataccactaccgtggtgtatgnagatgataagcttttttgtaaccgacgcccgaaagaattcaaagacacattatactgntgattttctctgcgntttctgttatgggaatgttnntgattcccttgcttcatcaggtatgaatctttgcttcaacattgctttttccgttctctctttgaatttatgaattatgcttttgtacttggtagttccaaaattatggtgcttagaaatcatgaaaatttatttcattcagagtttaacagcttcacaactaggaataataattgcatatgactttaaatcattatcaacttcttaaaatacacgcactgtattactggaccctttgtgttaaaattttaagaagatagcttttatacactttt

SEQ ID NO: 195668 - DNA, 1260 bp, Gossypium hirsutum
gttctgtgtccgcagcacttcggtcatggctctggggtctgttagagaaagggttgtagctcgccttaggcgagatttattcagtcatcttattcatcaggaaatagccttctttgatgttactcgaacaggggaactcctcagcaggctatctgaggacacccagattataaaaaatgcagcaacaactaatctttcagaggcactccggaatctagcaaccgcctctattggtgttgccttcatgttttcttcatcttggaaattaacgttaccggttatttctgttgctatacgaagacttggacgctatctcaaggaactttcacacaaaacacaagcagcagctgcagtagcatcctcaattgctgaggaatcttttggagccattcgaacagttagatcatttgctcaagaaggttttgcaatatcgaattacaccgaaaaagttgacgagacactgcagctcggactaaaacaagctaaactagttggtctattctttggaggagtaaatgctgcattcacattttctgttatggccgtagtgttctatggtgcctacttgacaataacaggatctatgactgtgggttctctcacatccttcatcctctatagcctcacagttggatctgcagtctcctctttgtccgggttatattcaactgccatgaaagctgcaggcgcaagtaggagggttttccagctcttaaatcgcgtgtcaagcatgccgaaatccggggacaagtgtccagaaggaaatcccgatggagatgtagaattgaaagatgtgtggtttgcttatccttctcgaccaagtgatatgatactaaagggaataacattgaaactaaaacctggttcgaaagttgcccttgttggaccaagtggtggtggaaaaaccacgattgcaaacttaattgagagattttacgatcctttgaagggagaggttttgttaaatggagttcctttagtggaaatatctcatgaatatcttcataaaagttaatataaaaaataaaaaaaacttcacctcatggatatcacccctaattatggtacataaaacttttgacttctgtttcctgcttggataagtttgggagctcaagaaacaggcaaggtaagtatagtcagccagtattaaagggattcctccatggtcaaaccgacaagcagctctttaagaaaaatgttcttatagttacttatgaagatgtcaagcctacatagataggattgtagtggggagac

SEQ ID NO: 195669 - DNA, 644 bp, Gossypium hirsutum
cccacgcgtccgcccacgcgtccgctctaatgccagtggcaacatttttcatgggtgtaatgtgtggcactgataaaccaaggtgcgatgtgttcttaaacatggtgctggtcagcgttggagttgtcgtttctcacatggggaaattcatttaatatagttggcacagtttatcaggtcacgggcatcctagctgaagctttgaggctggtcttaactcaagtcctactgcaaaagaagggcttgactctaaatccaatcaccagcttatactacatcgcaccctgcagttttgtgtttcttttttgtgcctgggtgtttactggagaaagcctgggatggaagtttcacagatacaattcaatttctggatctttttctccaatgctctttgtgctttagctctgaacttgtccatattcttagtaattggaagaactggagctgtcaccattagggttgctggtgtcctaaaagactggatactgattgccctttccactgttgttttcccggagtctacaataacagggctcaatataattggttatgcaatcgctctttgcggtgttgtcatgtacaactacataaaggttaaggatggtcgtacacctcagctcccttcggatagtattcctgagaga

SEQ ID NO: 195670 - DNA, 585 bp, Gossypium hirsutum
ataagaagagatttagggggataaccggattctatttgacttacactactaatactaattcatacatggactatatgttcttcttctcctcctgatattgatcctgctcgacctttgacgcaagtcaagaaaaggagtcctttttcatccttctgcccagaatcgcctaatcaaaaatcaatcatggctgtgaccatcaagcgagcggccctcatcgttgccagtcttggcgtcttatcttttatctttggagtcattgccgaaaacaagaagcctgccgctggaactccaatttctggaaaagatgtggttatttgtaagtatccatcggatccttcggtggttctgggctacctatcggttgcatttctgatactatctactctcactggctattggtccctgttttacccctacaaaggaaaatctgttccacaggctgttctcttccgaaacactagtttcttcgtcttcttcaacattgccttgtttacaggtggcttagcagccactctgctcttgtggccgacgatcacagagcacctgcacttgattcgtaatgttcatcacaatctctccacggaa

SEQ ID NO: 195671 - DNA, 354 bp, Gossypium hirsutum
  unsure (1)..(354): unsure at all n locations
aagggccgggccacgccacgcgtnctatactaataaaggttaattaaaattcatgttgcactggtttttctatatagtgaagggcggtatctttgttgttaggttgacattatacatttttctatatctccaattactgtaatttaatgtcttctgtcttggtacaattgttttctgtactactgatactattaaattgacactaattgcatgggtttgagggagagctctttgttgatgcagtaacagattggtttgcaatggcccgacttaacttagtctcgcatcttttactatttggacactcttttagccaacttgcatctatatcttatgctacggntttggggggaa

SEQ ID NO: 195672 - DNA, 673 bp, Gossypium hirsutum
ttcacgcgttcgcccacgcgtccgcccacgttcaatcttttctttcgtttcaaatcttggaaatcaaaattcctatggcaccaaaggccgagaagaagcctgctgagaaaaaaccagcggaagacaaaaaagccgagaaggcaccaaccgagaaaaagcccagagccgagaagaagctccccaaggaagccggcgacaagaagaagaagcgaccaaagaagagcgtcgaaacctacaagatctacatctttaaggttctgaagcaagtgcaccctgatatcgggatttcgagcaaggccatggggattatgaacagtttcattaatgacattttcgagaagcttgctcaggaagcttcgaggctcgctcgttacaacaagaagcccacaattacatcttgggagattcaaacagctgtgaggcttggttctgcccggggagttgcctaagcatgctgtttctgaagggactaaggctgtcactaagtttactagttcataggttttggatattatgaattggttgtaaatattagttcttttaaggattatcaatctgtgggactttgtgttttttgagctcaattgtaggcttttatcttcttttttattattttctattttttaatttcgtttaatattttttatattttattatatttttatattttttt

SEQ ID NO: 195673 - DNA, 484 bp, Gossypium hirsutum
tttgaagtgtttcttcctcaactccttttgtatcccaatccatcagacccattgaatggtgaagctgctgctcttatgatgcgtgatcgtactgcttatgaagaaaaagtgaaagaatatcgtgagaaatatgcaaacctgaagatgttgcaggagcagaagaagtgaagtcaagtgacgaagaactgagtgaagatgaatatgctgcctcggatgatgaggaaatcgccggaaaaccagatctttaggcagatattatgccctgcatactcgctacgaaaatcgtcttgtgttgtacatgatgttcagctccaggaaaattcgaacacgacagaaccggggaacatgtggaaaaattcctacttacccctttttgtcattactttccagggatgtttgtgtaaattaatccattgttgttcaataatttaaatatttatccactgctgagactttaaaaagcaattctcccatatgctcctaa

SEQ ID NO: 195674 - DNA, 460 bp, Gossypium hirsutum
agaggctatctttggaactgacattccttcaatgccaccagctcctgcccctgctcccgatatgagcccagctgcagatgctccatcagcagaaaccaagggaaaaggttcttcatccaaggctgaacctgcaacttcatcatcccataggatcatgaactttgggacatggaatcagctggttttggcattgttcggtgggtgggtgatgttcttctaagttcaaagggactttcatttcgagtctaatttatgttcatgttggagagaaaatcatatttgggtttttcaatttacttttgatttttagaaccattttttcatttatatgttatggagagattattatgtgttgaaaagaatgtgagttcttgttttgcagctactattttttttttttaaattgagcttctcaatttacttgaataaagttagcaaatttcaagttctcaaaaataaa

SEQ ID NO: 195675 - DNA, 594 bp, Gossypium hirsutum
  unsure (1)..(594): unsure at all n locations
gcaacagaaagttgctaggccttctgtttccacaacggaaagtgcgattgacaaagcaggtggattacgagaaccgtttcaatcaaaaccggaaggcgagaagttgccagtctctgccttagaggaaaacatagttctcggtgttgcattagagggctcgaagagaacactacctatcgatgatgagatgactccgcgcacatcagaagcaaaagagttggcttccacaagccgaaatggaaccggatcaagtgctgaagacaagaaaggcggtcagatctggcccacatctggtaaccccgatgatcagtgatatattgaaagctaactactaatccccagagctcacaacttgcatttgatggacacttgacacttccactgaggctttctttcattaagctgcccccatacatgtatatcttcactcttttattattactcttaaaacgtattaaaatgtaccacgttttatcttgaaagttatggctaaatatgtcatttgctccaagttatttatgtaaaaaattatctaacttaatgcatataatatgattagaattgttggnagaaagatatataatgacaccacgt

SEQ ID NO: 195676 - DNA, 994 bp, Gossypium hirsutum
gcctatataaatagatatgttgattccttctttcatgcattctcaaacccagttgaaagcctagagcttagtagcaacccttaggcttcttcttcttcttcttgttcttattattatttttactctctatctcataaaacctaaaaaaaaaaaattaagctttttttgcagcttggaggatagaatagtggcgggtttttcaagcaaaataacaactggagttaagctctctcactgagaaaaaactgataagagtgaagaattggcaatcaacatggagaacggatatatcaacccggcaccaagtccacttaggaaaatcatcacggttgcatccattgctgccggcatccagtttgggtgggctctgcagctgtctctcctgacaccctacgtccagacccttggtgtaccccacgcttgggctgctttcatttggctttgcggtcccatttctggccttctggttcaacccatcgtgggatacaacagtgaccgttgcacctctcggttcggccgacgccgaccctttattgtcattggagctctctctgtctccatagctgtcttcctcatcggtttcgccaaagacattggccaccatgcgggagattccttgaagagaacgaccaaaccgagagctgtagccatctttgtcgtcgggttttggatcctcgacgtggctaacaacatgttgcaaggtccgtgtcgagctctcctcgcggacctctcggctaatgaccactaaaagatgagaaccgctaacgggtggttctcgtttttcatggcggtcggcaacgtgttgggttacgccgccggttcttactcccacctttacaagatcttccctttcaccaaaaccacagcctgcgacatttactgtgcaaatctcaaatcatgcttcaccatagatatcatgatcctcttgttagtaacagtaaccgcggtcacaaccgtgaaggaagatcccttcaccaagcaaatccaagatgat

SEQ ID NO: 195677 - DNA, 540 bp, Gossypium hirsutum
ggaaaaacggaacgacccacgcgtacgcccacgcgttcaacagtattgttcataccatttagatgaacaacttgatagataccgatggacatgtacagaatgattgtgatgagttggaatgtcttaggaagaatcatagaatctataccttgttggctcgagcgtttaaccctttcgtaagaaaagattgtatatcagaggccgttattgcatcgagcacagataattacccagaggaaagcatccataatactttggagccgtttgatagaatagacaccagagcatcgtattggtcgagtgaagggcaaaacaatccttgccgtctccgagactttactttataagttgatgaccaagatgtgtatcgttacagaaatccatgttcagccattccaagcttattttcagtacggcttcccaatatactcgtctaaggctgtcagatttagaatgggtcataaattgcagagcgaaatgacggatagtttgacttctagtaataaattggcagatgacgagttcatttggacatatact

SEQ ID NO: 195678 - DNA, 488 bp, Gossypium hirsutum
gttcgtcttccctaacaatctgtgaaagatgagcagcgatgacagtttggacaaacttataaaaggaacgtttgttgatccctcgccggaaaatagcctggaacttagagaagaccttcgacagtatgggattccggcaactgaagcacaaattggcgcgaacgtaccgccgttgccgggcgatgataatcaggtcaactcgttgagcttgatgtcgagtagtagaatgaaaagaaacctggaatttgttttcgataatttctcgggagataaaggagaagaaaaaaagaagcagcgccgaggaggcttttatatcggtgaatcatcaaatccgcagcaacaacgaggaacggaaagtaaagaagaggatttatctaagctggaaatggtgaaagctttcaaggatcgtattaacagccagataaagatggacgacatggcatatatggaatctgttatcttgattttccatcagatgatagagatga

SEQ ID NO: 195679 - DNA, 696 bp, Gossypium hirsutum
ttttcttatctatcttttcgctttcttctttgccaacaactgcaattattccaaaggctaatatttccctttcggtaccttcatcacaactagtagaaaatttatgcaatggcaaggcagttcaaaatcgcaggttttgtctgaaagcgctttccactcccgaagttattgcggctatggatacaacccaactaggaaccctcattatgaaattaggagcagcaaatgccaaggcaacgttgaatttatataatgaaataattaagaaaccaggttctccccaggctttgaaagctcttaatatatgcgttgaggcttacaaatatgcaatcttatcatttgaaatggtatcttcagaatttgttgaagatccccaaaccgcaaactatgatgtagctgttataggtcctgaaattgctaattgcgaaaaggaactgattaacgcaaaggttcaagcacctcgactccttgctgggaatcgatttgtgaaatattatgtctaaatgggatatgaaataacttcaccttctagccttgaaattccaaatgagttttaggcaaaaaattaagggaatatgtatagatagtaatgtgtgaatttgttatctagattgataaaatataatattgagggcataggtgtgttgccattgttgttgttggagacactataaattaattaaaaataattagttg

SEQ ID NO: 195680 - DNA, 395 bp, Gossypium hirsutum
cggacgcgtgggtctcaacaaagcctgccaatccgtaccacttatatatcgttcacgctgttcccagctttaacctatcactcttttaacaatgcctcgccgaagctctggaggaaggtcagccccaaggcctgctgctcgtgcgccatcgagcaacgttccttcgaaacccgctagttctgcccctcctccagcacctgtgcaaagtggaaatggactcggtgctgccattgtagatggtattggatggggtgccggaactgctatggctcacagggctgttgatgccgtcattggccctcgcgtcatcaaacacgagactgttgcttcatcagaaccagctgcggctgcttctgctcccgcaccaaacacaaatagcatgaacatggatgcat

SEQ ID NO: 195681 - DNA, 485 bp, Gossypium hirsutum
ttcaacactactttttagaaattaaaataacacctctattctcttctgtaacagcttaataaaaaatggcggcttcttctagaaggtctagtggtccggttctccgatctcattccccatcttcccggtttacttctttctacgcttcacagtcacactctccatcttcttcttcctccgcttttgcctattccagttcaggtttctcttcacgttcaactttcttcaatcaaccaagatctacttctccaccacgtgttaacctgcacagaaactcttcatcagcgtcatctgtgcggttctcgctcgacaaccgtccgatctcaccgaaccgttcaatcaccaccgtccggagaaccactgaggcgttgaagaatttacagagcaaacagacgaagcggacttgcatgtgttcacctacaacgcatcggggatcgtttccgttgcagtcttcataagagcttcaatacttcgcatgccgggac

SEQ ID NO: 195682 - DNA, 565 bp, Gossypium hirsutum
tcgtccacgcgtccgaaaaaagttgtggagaaaaaaatattacgtttgggaagcgagaaagtgcgagaaaatgagcggagcaggaaagaaagtagtagatgtggctttcaaagcaggaaagagcattgattgggaagggatggcgaagcttttggtctccgatgaggctcgcaaagagttcgccactcttcgtcgcactttcgatgaagttaactccactttacagaccaagttcagccaggaacctgagcctatcgattgggaatattatagaaaaggaatcggctcgcgattggtggatatgtacaaagaggcttatgagagcgtagagatccccaagtttgttgacacagtcactcctcaattcaaaccgaaatttgatgcattgttggttgaattgaaagaagcagaagagaattctttgaaagagtccgagcgtttggagaaagaaattgccgacgttcaggaactgaagcaaaagatcagcaccatgacagcagatgagtactttgagaaacatcccgaactgaaaaagaaatttgatgatgagatccgcaatgacaat

SEQ ID NO: 195683 - DNA, 368 bp, Gossypium hirsutum
cccacgcgtccgcccacgcgtccggcaataagcatccccacaacttcaaaaagtttttctttctttcttttcctatctctatttgaaatctgtttcaggggaaagaagaaggaaaattttatgattttttgagggcttgctaagaataaatagaaaacaatggcgaacaatgttgctgttattggtatctgttcggtgttcttggtggcagcagtggtggcagcagtggtgggtgttacgcatttaaaaaacaatggtgattcgaaaagcggtgaaatatcgagttcgacgaaagcggtgcaaactgcttggcgcccctcacagttcaaagaggcatgcgagaagagcctggagtcatctaatttcac

SEQ ID NO: 195684 - DNA, 426 bp, Gossypium hirsutum
gatgaagaagagtacaaggttggtggtgtattgatctccatgctgagagatccagtagtgaaagcaatggctgcaaccaaggaatttgatgatcttgaccaaattgaggaggaggaggatgctgagcgagaacttcaagaggccgaaaggaagcgccgtgaagaaattgaaaagcttgaaaaagatggcaatcaatgatggctagccatattttgttcttctttcttgcttttggtcactgaagtttccgaaagtttgcttgaggctttaacaatgccggatattacttgattttatgaggaatgcccttcattatactgattgtggccattgctttttccaaatcaacttccttgtactcaaatgccccagtgaaacaaataaattgtaccattgacatactgtgcataacatgacatggttttc

SEQ ID NO: 195685 - DNA, 627 bp, Gossypium hirsutum
  unsure (1)..(627): unsure at all n locations
aaactgtatgaggatggtgcgttgcattgtatatttttgatgaataatattctgtatatagtgcaaaaggtgaaggattctgagctgggtaagcttttgggagacaattgggttcgtaagcggcgtggccaagtacgacagtatgctacaaattatcttcgggcttgttggatgaaagctctgtattgtctgaaggatgaaggaattggtggtagctctaacaatgccttccaagtgtgtccttgaaggagagatttaagaccttcaatgcttgttttgaggacatatataggattcagacaggttggaaggtcccagatcctcaacttcgtgaagagcttcgaatttccatatcagagaaagtaattccagcttatcgctccttcatggggaggttcgggagtcagctagagagtggaaggcatgctggaaaatacattaaggatacaccagaggatttacaagactatctattggatgtgtttgaaggctcacctcttgggctgcaccatatgagaagaaagagtccataggacgcaaagtcgctcaatgcaggtatggcccttccgctcatcgaggactaatcagagcaagagttntacctatatatgtattttttttaatcag

SEQ ID NO: 195686 - DNA, 590 bp, Gossypium hirsutum
gattaatattttgttgcagatgcgtgcttgatcctggggacaagattgttgactgtcctccaaccttcacaatgtatgaatttgatgctggtgttaacggggcacaagttatcaaagttccaaggaagccagacttcagcttgaacatagaagcaattgctgaggctgttgagcatgaaaagccaaaatgcatatttcttacttctccaaataatcctgatggaagtataattagtgatgaagttctcttgaagatccttgacatgcccattttggtggttctagatgaagcttacattgagttttcaggaaacgaatctaggatgcagtgggtgaagaagcatgataatttaattgtccttcgaacatttagtaaaagagctggtttagccgggctccgtgttggatatggctcattccctttgagcataattgagtatttgtggagagcaaagcaaccatacaatgtttctgttgctgctgaagttgctgcatgtgctgcattgcagaacccaaagtatctagagttggtgaaagacgctttgatacaagaacgggataggcttttcaaacttctcaaggaaatacca

SEQ ID NO: 195687 - DNA, 947 bp, Gossypium hirsutum
atttcccactttttattccgtccaaagaaaatggcatttaattcacttcctttcttttaatcccaccttctctactccaaattttctctagaaccatacttcgagatggcttttctcatgccttcacctgaaatttccaccgcctctgcaaaatttttctctaaccctaccccccgccctaaatttctcaagagctgcgcgatttcgaagaacgacgacgagaaagtttggtcaaggaccaacgctagggtcggtgttaaagatgccggcagtacggtttcgtgtttgagccaaaacttgaggttgtacgtacaattttcggctccggtgaagcgaggatcgaagcccagcaaagaggaagaggagaagcaggattattacgtgaatatgggttacgctattcggaccttgagagaggagttcccggacatcttttacagggagctcagttttgatatttacagggatgacattgtattcaaagatcctctcaatactttcatcggaatcgacaattataagtcaatcttccgggcgctgcgattccatgggaggatttttttcaaagctctctggctcgacattgtcagtgtatggcagccaatggagaatgtcataatggttcgctggaccatccatggcattccacgagtcccatgggaaagtcgtggtcgatttgatggcacttctgaatacaaactcgacaagaagggaaaaatatatgagcaccgagtcgacaacaccgcactgaattcaccccctaagtttcacgttctagctgtggaagatctaatccgatccataggttgcccctcaaccccaaggccaacttacttcgagatttcatcggcttcacctccagaaaaaccatattaaacccaccttaggttctttataatttttggtaaataatgggtctaatggttggtggggctatatatagcatg

SEQ ID NO: 195688 - DNA, 465 bp, Gossypium hirsutum
  unsure (1)..(465): unsure at all n locations
agccttccggttttattttacaccttaacagttcttaattgtattgcaaaggatgctgtttttggtccccatacaaggcttttgataagagagacctagcagaatttggtgcatatatcaatatgggtaattgctggggatctgggtcttccgatagagatgctactagtcatgtttacagctccaccaatcttcctactaccccaggttcatcaaattactgcagcaacaacatggaatcttcagtaaccagtagtattagcaacagcaggagtcaattctcggtatcagtaagtgaaatagtggaggaggaagtaccagatgggcaaatcctggaaacatcaaacttgaaagtcttcacttttgcagagctaaaggctgcaactaagagcttcaatacactgttgggcgaagggggatttggtaaagtttacaaaggttggttggatgagagaactntaacac

SEQ ID NO: 195689 - DNA, 530 bp, Gossypium hirsutum
  unsure (1)..(530): unsure at all n locations
aagtattctctcaaaaacctacgaccccaagattctctctttcgaaaactccttcaaatttggctaccaagaaaaacaatggaaataatcgaaaatcaagcagctgtttcgaatttcgacctccagtcaaagtctccgttttataacatttcctccaccgacattacgaacgtnggcttacttggggaattcgaatttgtatctgtggatagtccgaaccaagctagcgaatcggatttcccgacggtggttaatggtggtggtttgaaaatgctgctggagccgttatccgacggccgagattctccgggttcgaatcagacgcgcagtggcggttcttctcattccaacgccgccgttaaggtccagaaggtgtataggagttaccggacacggcgtatgttagcagacaccgctgttgtcgctgaagaacttctgtggctggctntaaattatgcaaggcttaatcacagcacaatttcccttttaattatttgaaaccagaaactgctgcttcaaggtggaatcgc

SEQ ID NO: 195690 - DNA, 311 bp, Gossypium hirsutum
tttggagttgtttctcagatagttgatagagaagtcacacttgaagccgcccacgcgtccgcctatacattcggtattcccgaagcaattgtttccccttggttgcagtttcagactctattagcttttatgtagtacaatattaataccaatgtccatcgtcttaggttttttatttgttcacttttgcacattgagttgaatgctgttgctatacatttcgactaaatgttagtgtattttgattgttggattgattttttgtagtgaatattcaacctttattttaattttatatttttagttttatc

SEQ ID NO: 195691 - DNA, 418 bp, Gossypium hirsutum
cttacatcgaagtggtttggagacgctgaaaagctcaccaaggcccttttctcttttgctagcaagctggcgccagtcattatttttgttgacgaggttgatagtttgctgggtgctcgtggtggtggttttgagcatgaggcaactaggagaatgagaaacgagttcatggcagcttgggatggattaaggtcaaaagatagccaaagaatcctcatccttggtgccacaaataggccctttgatcttgatgatgctgttattcgtcgcttaccaagaaggatatatgttgacttaccagatgctggaaaccgcatgaagatactgaaaatatttcttgcacaagagaatataggctgtaatttttcatttgaagaacttgcaaatgcaactgaggggtattctggcagtgatttga

SEQ ID NO: 195692 - DNA, 828 bp, Gossypium hirsutum
ttttggtttagctaaagagagtttgctagatgccattctcttcataaatgaatgctcgcaatcaaatgaccccgatctctcgttgaggcaaaataaggttcctgattatgcggaacgattagtcaagaagcagatgcgtgcagcttggttatttagagaggcagctatcaaactcgggggtgtgcactgtgagggtgatgcaggtgacatgtatggccaagataccgatgactccgagtgggaaacagctagcgaaagtgatataggaaatgatggaagggatgaaatgggtgatgaggacgacgatgatagtgaatggaagaatgaagatgaaaggaaagctaaattcaagaaaccatcaatgaaagacataaagcatggattcaacgtacaagtcaccgaagatgaaccgtgaactgttgaaggaccaacagcattgatgtagacagtgtagcgaaccaaagcaaccgtgatatatgtttcggatttattatttcgtgttgcagagctatagcctagtcacgtttagaagttggtgtcacatctagctcagtgaagaagcaagttagaggtggtgaagctttggttttggtcattttcatttagagatgaaagaactttgttttgcaagcatttcttaatttgttttggttttttttttcttaattctcctaattgattttggggtagtgttaatttcaactgtagaaagcgagagtttggagtgtagagaaccattttgtttgcagggtgtgatgaaccttttgtgagaaatcttatgctccttgtgtatataaaaacccttgaagtgggggtttttgacattgg

SEQ ID NO: 195693 - DNA, 764 bp, Gossypium hirsutum
  unsure (1)..(764): unsure at all n locations
ggggattggaggctcgagttccattcttagacaaagaattcatcaatgtcgccagggctatagaccctgaatcaaagatgattaataaggatgaaggacgcattgagaaatgggttcttagacgagcctttgatgatgaaaaccatccctatttgccgaagcatatcttatacaggcagaaagaacaattcagtgatggcgttggctatagttggatcgatggtctcaaagctcatgctgttgcacatgtgaccgataagatgatgcttaatgcttcaaacatcttccctcacaacactccgaccacgaaagaagcatactattataggatgatcttcgaaaggttcttccctcagaactcagcacgattgaccgtcccgggaggagcaagtgtagcatgcagcacggccaaagctgtcgaatgggatgccacttggaagaacaaccttgacccgtcgggcagagcagcacttggagtgcatctctcagcttacgacgcggagacacctttcgataacaagccgtccaagattgttgagtcaataccgttgatgatggagattcctggagttgccatacatggttaagtgccatgaaaattgaagcaaaatgtgtgaaatttaatgattgattagtataatttgtgccatattatccatggaacttcagtatgctataatgtataatatgggtaatatataaaaccactatatatatatatatgtatgcatgnatgtatggaaggatggatggatggatgtata

SEQ ID NO: 195694 - DNA, 467 bp, Gossypium hirsutum
gaccaacaccatcatcaacgacaaggacgaccaagaaactgttcccaagatcataactttcttgtcttctttgctgcaaagagtggcagagtcgaatgatcattgccggttgtttcagtcgcagaagatctcagtttttcatggtcttaccagacctactatttccatcaaaagctatctcgagaggatctttaagtatgcaaattgcagcccatcatgtttcgtggttgcctatgtttatctcgatcgcttcgtgcagatgcaaccgtctttgcctatcaattcttacaatgtgcataggttgctaataaccagtgttttggtttctgccaaattcatggatgacatgtattacaacaatgcctactatgccaaagtgggaggaatcagcacggtagagatgaaccttcttgaagtggattttttatttggcttggggttccaattaaatgtggcacctacaactt

SEQ ID NO: 195695 - DNA, 358 bp, Gossypium hirsutum
cccacgcgtccgattttacatgaacccgcaacgtgccaccaccatctggtatgtcccccgcaagaagagtattttcagccagcaagatgacattctaactgctgccgagaactacattgaagagcatggcactcacgaatttgaaaggcttataaccaaggctgagaaagaagaaagaatccgacgcagcaacaactacatgatctttgatgacgattatatatattgacttgttttgtaaactagcaactttctttgttgtaagaaatgctatttaatgatgtatcatcttggcttaattatcacattttcctttttttgttcaaacatttcggagcactatttaaagttaatattt

SEQ ID NO: 195696 - DNA, 421 bp, Gossypium hirsutum
gaaacttgggagtcatcacttaattctctcctaccccaaccatgaccggcaaagaagcccaacaacccgaagagctacctgtagtcttcgttcatcgtccaccctcattcatccttccttttggggaccatttacgttctcaattccatgtcctggacccttatgagtcgcctgagccgtacgactcctttctggcccgtcatgctccctccataagagctctcatgactatgggccccaccctagtttccgccgagtttctcgaccgtctgcctgttttggagctgatagtggctacaagtgctggccttgatcatatagacctccccgcttgtcgaagccgaggcatcgttgttactaacgctagctctgccttcgcagaggatgcagcggattgtgcttgttgggtgttgatcgatgt

SEQ ID NO: 195697 - DNA, 407 bp, Gossypium hirsutum
tctatgcgtccgcccacgcgtacggggagctcgggggttctgcgccgttcggccttcatttcatcacggcgacgatgaaagatgacttttggtgacccccccttttgctcctccgtttactccaacacggtgtttatcgatttaagccctgaagtcccatctccgatttcgatttttagcgaaggagatgtggtctccgacagttcattcgcgaaggtaaatcctttcctcttcgctttattcactttcgaggagaaaaaacaaaaaccgagtacaatcgaaagaaaaaaagaacgcccactagtttgaatcggaaaattaccttcgaatataggggggcttttctttggattagaaatctgaatctttggttttgaggtgcgtaaaaaaaataccaagacttaaaa

SEQ ID NO: 195698 - DNA, 429 bp, Gossypium hirsutum
ctaaccctaatcttagccttggcctttgcctctgctgcagccaatccacagccgtttaacttctccttttcttcaaccctcgcctccgcctggtttctcccatcttcttctcctctctttgaatatcaaggttttgcagattgttccactgttcttttcctaaatgagcggcaggagttatactccatctccgcccagaggctacggccggagaggacggggccctagccccagaggcccctaccgcggtcgcgctcgagatcttcctaccagccttttggttcgcaacctccgccatgactgcaggccagaagaccttcgcaggccattccaaagatttggccctcttaaagatatatatctgcccaaggattattatactggggaacctcgggggtttggttttgtccaatatgttgatcctgctga

SEQ ID NO: 195699 - DNA, 515 bp, Gossypium hirsutum
aaaaaggaaacgaaaagaaaaagtgattggccaccatgttgcgctcaatcaactctatagccatgctggtgttccttaattttagtcgggatattacagaaactgcagcagcatcaccattgtgcgatgtggttatctttttcttaagcccctgcgagggcttcataaaaggcggagccgatccggcagccggaatgttgtgttggtgctaaacgtcttattgaccaactaaaggccaaagaagataggatagaactatgcctgtgcttgaaagcattattgccactacttgggccatttgaccctaatcgagtgcctcttcttggccagaaatgtggtatcaagaatttctttcctcccatcacccccgctactgattgttccaaggtatgaagagagagctgggaaatgtgaaaagcaagagtacggtgaatgaaataaagaacccggatttcaaaaaattatgtataaatcaaccccttgtaatttgattccactaaataaaatatcaactt

SEQ ID NO: 195700 - DNA, 725 bp, Gossypium hirsutum
atatccgcaaccattagcgacactctcacagtacagtgaagctgagctcactatatttatactcaacttcccttagctcttcatgattccaccttgtcggcggttctttggagcttaagaggaagaggcattctttcactcccaaaatgtcagatcttcaagcaccccttcgcccaaagaggaagaagggcttggtggactttttggtccagtttcgttgggtttttgttatattttttgtccttcctttttcggctctgtattactttctcatatatcttggagatgtcagatccgagatgaagtcctacaagcagcgtcagaaggaacatgatgaaaatgttaagaaagtagtgaagcgtctcaaacagaggaatccaaaaaaggatggtcttgtatgcacagcccgcaaaccatggattgcggtggggatgcggaatgtagactataagagagctcgccattatgaagttgatttgtctgctttccgtaacattcttgaaattgatagagagagaatgattgcaagggttgagccacttgtaaacatggggcagattacacgtgtcacagttccaatgaatctttcccttgctgtggttgcagagcttgacgatcttacagtaggtggtctcatcaatggctacgggattgaaggaagctcacacatctatggcctgttttctgatactgttgtagcttatgagatagttttggctgatggt

SEQ ID NO: 195701 - DNA, 478 bp, Gossypium hirsutum
  unsure (1)..(478): unsure at all n locations
ggcgactgaactggaagagctaataggcttcctctttgccccctctcctcctgtgaagaaggctggtgttgatattgtgcgtgatttaacaggctctgaggacggcttgcactctctttcaaactatgccaacaccgtgcttccatcgttatctaggcttttgagtgatgataaggaagtttcagaaccagctgccgaagctcttgtaaatctgtcccaaaatgcgggactggctgctaagatggttggaatggggttgattaaaatagccttggatatgttgcttaagccaggctctagtattactcgattgctggctatgctcctggttaatctaacacagttggatgatggtatttcttccttgcttcagattggagatgataagatgccaggactttatgtaatgaggctngtaagatcattctgtagatccagtgaaaccagtgatgccccttttgatcatgttggtccatac

SEQ ID NO: 195702 - DNA, 817 bp, Gossypium hirsutum
  unsure (1)..(817): unsure at all n locations
ctagaagaggctgatcttcactccatttcgaacactttagacaggctagttggggaaaatcgacgccaatggccatcagagacaccgtgaaaagggcggagcagctggtggagacgtcgatgaaagggaacgacgcctcccatgatgcctcgcacgtgtggagggtcagagaccttgccctctccctcgcacgagaggaaggcctctcctccaaccctgactccatggaaatcgtggagctagctgcacttcttcatgatgtaggtgattacaaatacttgagggatccgtccgaggagaagctagttgagaattttctagaggaagaaggcatagctgagagcaaaaagataaaaatattaagcatcataaagggaatgggttttaaagatgaacttgctggtgtgggaaaccaggaatttccccctgaatttggggttgtgcaagatgctgatcgtctcgatgcaattggtgccataggaatcgctcgctgctttacatttggtggaaacagaaacagagtgcttcacgatcctgctatccagtcacgattggacttatccaaggaacattacttgaagaaagaggagcagactactgtgaaccatttccatgagaagcttcttaagttaaaggatttgatgaaaactaaggctggactaaggaaggccgaaaaaaggcataaggtcatggangaattccttaaacanttttaccccgattgggatggggaaggctgaaataaggtgattttccttccactaaatatatactaagcaatcaccgttcaaactctggttctgattatgaaacaatt

SEQ ID NO: 195703 - DNA, 425 bp, Gossypium hirsutum
aaaaaaaagagcagagaatcattatttccttttcttctcgttatacgaatttggttgtaccatgcaaaacctggattcatgagcttctcaattctaaagagattacctttattttctccaccatttgtcaacgtaatggcttcatcatctttctactgtggagttcaatcaaagagattcttagtgttagcccagcagctgcgtcattataagcctccaccttgttcctgggatgacaacgaggaacgaatcatcgaggaagccgccgggaaatttgtttcccaagtgggttttcaagaatccgttacccgagtggctcaaaacccagaaaagtttagatccaaaagagctgctgttttgatctgcctctttgaaggggatgctggggatttgcgtgtcattttgaccaaaaggtcttccagatt

SEQ ID NO: 195704 - DNA, 1254 bp, Gossypium hirsutum
aaccaacagccaccaccacatacccttctgaaacctcacccacaccaaactccagaaccagcctccgttatcaatggcgatgatatctacatattgcccacatttcaacggacttcgccgatcatctcccaagctcgacagttctcaatctcaatctttccttcaacacatcaactctcagcttcgccttgcttcgtctcgtaaaccttgcagagctgttactgccatggccggttccggaaagttctttgttgggggtaactggaaatgtaatggaacaaaagactccatcacaaagcttgtttctgacttgaacagcgcaaagttggagactgatgttgatgttgttgtggcacctccctttgtctatctcgatcaggtgacttcttcattaactgatcggattgaggtatctgctcagaactcttggattggaaaaggtggggctttcacgggagaaatcagtgtggagcaactgaaagatattggctgcaagtgggtcattctcgggcattctgaacgcagacatgttattggtgaagatgatcagtttataggaaagaaagctgcttatgctctaaatgagggtctcggagtgatagcttgtattggtgaattactagaagaaagagaagcaggcaaaactttcgatgtatgcttccagcaactgaaggcttttgctgatgttgtacccagttgggacaatatagttattgcttatgaacctgtatgggccatcgggaccggcaaagttgctacaccccaacaagctcaggaagtgcatgtagctgtccgtgattggcttaaaaagaatgtgtccgaggaagtggcatctaaaacgcgtatcatatatggagggtccgttaatggaagcaactgtggtgagcttgcaaaagaagaagatattgatggatttcttgttggtggtgcttctttgaaggggcctgagtttgctacaattgtcaactctgtaacaaccaaaaaggttgctgcttaaatatatataaggtggattcaggtaaatgaataaaaggacgaagagaagctgtttcaggttgaagcttcatggtgattatgagttacagtgttatccaatggggttttgattgcttattgagttccttttccccaaaataacaggaaaaaatatgttcgttctcatgtgctatagttcaatttctttaaactgcttgtgggaaatatagctagctcactcacattgaggaaaaaaaaaaaaaacttaaacaggggctc

SEQ ID NO: 195705 - DNA, 345 bp, Gossypium hirsutum
aaaacacgtatcatatatggagggtccgttaatggaagcaactgtgctgagcttgcaaagcaggaagatatcgacgggtttctcgtaggtggcgcttccttgaaggggccggagtttgctacaattgtcaactccgtaacatccaaaaaggtggctgcctaaatatatatgaagctgattgaaagtaagaaataaaggacctaaatgaagaagctatttgaggttgaagcttcacgtgacatatttagtgttatataccccatggagttttttgattacttattgagttccattttcccggaaaatgataggaaaaaaagaattgtggtgttgtgaaataagttg

SEQ ID NO: 195706 - DNA, 827 bp, Gossypium hirsutum
cttacgcttccgcccacgcgtccgcggacgcgtgggtcaaattaaagctcatccttggttcaatgacgttgtatgggataaactctatgagatggaggcagcatttaaacctgaagtgaatggggaattagatactcaaaattttatgaagtttgatgaattggatgctccagcaccagcaagaactagctcgggaccttcacggaagatgcttttaacacccaaagatttaaattttgttggttatacatacaagaactttgatgcggtcaaagggctacgccatacttttgatttcaagaatccatcaatggaacagcaatcccatggttctatatatggtgattcaggggtaggttattctactaagcgatccgctgaggaaacagagatgcaaatgcttgcatcggcaggtgatcccatgttgccataaagttactgaagggaaaacttgttacagtgatatatggatatttctgcttgttttaaagtaggcaatcctacaagatcttcagatcttgtgcagtggctgccatctgatttatggaaccactttgttaagtgtacagaagtatttaaagaaaaatctaaaaacccagttcctagttgactggtagaacaagctgagacccttttttttcagccaaataggctgtgtattagaagttagatcagggttctgaaacttgctgatgcactggcactggctgcccaggttggctttagtaaaatttgccttctctagtggcagtttctggtcaaaatttttaagtgatatcaaactcctgagaaactctattaagccattttgggaacagtgattcccc

SEQ ID NO: 195707 - DNA, 488 bp, Gossypium hirsutum
ggaggctgcagtgcttaagaagtttaagtctctgaaacacgtgccaatttggaagcaggagaggcccaaaagcataagagggggggatgaactgaagatatacagagtatatcctgttggcttgacacaaagacaggctttatataccttcaagttcaaaggggatgctgatctcaggagccacattgaaaacaacccttgtccaaagtttgaagtcattgtccgctagattgaaggtcacattatctcaactttacgaataggtgacagattccccatctcagtgctgtttgctgaaaatagttcctgaaagatcaaggcaacctcatgcgggtgttaagaatatcatatatatgtatcattgatggggatggttataattttactgatggctctgttagttttagctcactttgcatctgaccctttgagatttagcttcagaattcttcaaagcattaataaaaagattggataatttaattttt

SEQ ID NO: 195708 - DNA, 390 bp, Gossypium hirsutum
acggttttgtataatggattgtggtaaattaccagatcctaagaccatacaaaggctgattttatttgttggatgagatgataggtgaggtgaagatgttgtacgtacagccacaaggcttgaatgaatattgctactgctaaaattttgggatggaagtgaggaagtggaaagacagtgttggcagagaagatgtaagctatctgagaatgaatagaaattaagggcatgggtaatgtgctttgtattgtatgtttcactttaatttgattccttgagtattttagagaagttattatggtttgtgttagtttcattatctatcattgtaaagttgatgaaacagcctgtagcattgattatagtataccatgttgtaccattacctgt

SEQ ID NO: 195709 - DNA, 722 bp, Gossypium hirsutum
caacagaatccggatcacttgatactgttggtacagtagggattttggagctttacccgggagcaatcaatagcatccctagtaaagctcaccttgaaattgatgtacgagatatcgaggaaagctttaggaatgctgttattaataaaatccataaagctgcaaaatcaattgccaaaaagcgcaaggtcaccttatcagaattcaagatcataaatcaggacccaccagctcattctaacggatcagtaatcaaagcagtggtagacgcctcggatgagctgaacctaacgtataagtatatgatcagcagagcttaccatgactcactgtttatggcaaggatagctccaatgggcatgatatttattccatgttacaaaggatatagtcataagccagaagaatatgcgtcacctcaggatttagaaaatggggtgaaggtattagcgctaaccttggccaagttgtctttgcgttgatgtgttgttgtatattgtagtttttattaggctggttaatgccactctttgtcaatattttcaataataacaactttggcatttatgaaaactttgtatcatgtttgagaatccaatctcaaagataatggaactcctacaatttggctttcttctttttcttggtgcagtggaagatactgtaagatgcttgaggtgaaagttgagataataagtgttgaatttagctcccaacctttc

SEQ ID NO: 195710 - DNA, 1015 bp, Gossypium hirsutum
cccacgcgtccggcagataaattcaatggagttccttcagaatatggcttccggagatgactcagttcgtcaaatggttgttagagaaggaggggttcgtccattagtacgcgttttggatccgaaatcatcgacctcttcaaagacgagagaagtagcattgagggcaattgagaatctatgtttctcttcgcagagttgcataaacatgttgatgaatttcgggtttatcaatcaactgttcttcttgctacgcaacggtgaggcttcggttcaagaattggcactgaaagtaacgtttaagttgtgtagcgcgccggcgcgggcgaaaaaggcaataggagatgccggtttcatgcctgaacttctcaaattgctcgatgcaaagtcatatgaagtgcgtgaaatggcaaccgaggcactctctagcttggtctcggtcccaaaaaatcgaaaacgattcgttcaagatgatcggaacgtaggctttcttctccagttgcttgatcaagaggatggcatatcaggtaacaaaaagctcttactatctatattaatgtcattgacaaattgcaacagtggaagaagaaaaattgccagtccggatatctaaagaacatagaaaagctggctgaacctgaagtttatgatgccaaaaaacttgtcaggaagttgtctaccaacagatttcgtagtattctgagtggattttggcattcttgaataaatggtggaaagcaattgaggtgcttgcacatgggaaaggcatgaaaatccagaataggcatgttagcagtggcaatcaaggttttgtcagctgccatcatgggacagaagggatagtgattgatgaaagttccttctctatctgtttgtgttgttgccagcattatcttcttcatcttatcatgatttttctaattcatgaaaaccacttaatattctgatataaaagcataggcttagatcgccaggcatcagtttattattagcttgaggattgagatataggata

SEQ ID NO: 195711 - DNA, 670 bp, Gossypium hirsutum
  unsure (1)..(670): unsure at all n locations
cccacgcgtccgtcaataagtagcgtaggttataatctaagttcaagattcgaagatgtcgggaagaggaaagggaggcaagggactgggcaagggaggagcaaagcgccatcgtaaggttctccgtgataatatccagggtatcacaaagccggcaattcggcgtttggctcgtagaggaggcgtcaagcgtatcagcggtttaatctacgaggaaacccgtggggttttgaagatcttcttggagaacgtgattcgtgatgcagtaacctacaccgaacatgcgaggaggaagactgtgactgctatggatgtggtttatgcactgaagaggcagggcaggacattgtatgggtttggtggttagatgatttagggattagatctttctgcgatgttggcggatctggacttgttctcatgctagcaagaatgtttgagtttaggattagggatagggcttgtaattaaggggtgctattgggattactggaaattataatttggtcgtgtggttttctttggtgatttgtaattcgtgccatgaattgcagattttaatgaaatttggaatttaatttcggccnanaaaaaaacaaataaaaaaaagaataaaatttaatattaataataatgacaatcattttgaacactagaaaaaataaaattg

SEQ ID NO: 195712 - DNA, 808 bp, Gossypium hirsutum
cgaccgatttacgactcattttgtgacatttttctggctcgttcgatttactgacatttttctccaaaattctcgagcaatagtaattgacatttacagcctagtctataaattacagcagatggcaccatcctttttcatttttctctagctcgctcgcgcagaagccatgactagctcctcagctcattcacgcaaggctttaagcaagatcgcatgtaatagactccagaaagaattagtggaatggcaagttaatccacccactggattcaagcataaagtcactgataatctccaaagatggataatcgaagtcaacggagcccctggaacgctttatgctaacgaaacttatcagcttcaggttgattttcctgagcattatcctatggaggcaccccaggtgattttcattcctcctgcgccattacatcctcacatttatagcaatggacatatttgtttagatattctgtatgatagctggtccccagccatgactgtaagttctatctgcatcagcattctctccatgttatcaagctcaactgccaagcaaaggccagctgataacgatcgatatgttaagaactgtcgcaatggcaggtctcccaaggagacgagatggtggttccatgacgataaagtataataatatgaacttattatctataatctgtgtataaaaactgaggctacagggataggtaatcgtttacatttgtcatgcttgtgtatgaaattatgaattaaacgtagatttatttttgatattgttacctaatgcaagaagcagactgaacaa

SEQ ID NO: 195713 - DNA, 611 bp, Gossypium hirsutum
ttgatatacatggtggagggatggaccttgtgtttcctcaccatgaaaatgaaattgctcaaagttgtgctgcatgtaaacagagcaatgtaagctactggatacacaatggctttgtcactgttgactctgagaaaatgtccaaatcgctaggaaacttcttcacaattagggaggttatggatctttatcatccattggctttgagacttttcttaacgggaaccgcactatcgatctccaatcaactactctgatgtgctacttgaaagtgcttcagaacgtattttctacatttatcagacactacacgattgtgaaaatgttctgagccagcatgacaaagggcttcaggagtccattccgcctgagactttgaatgtcatcaacaagttccataatgacttttcgacttccatgtctgatgatctccatactccagttgttttggcagcattatctgacccattgaaaaccatcaatgatctactacatactcgtaaggggaagaaacaggcaatgcggatagaatcggtggctgctttagaaaagataattaggaatgttctaagtgtgctggggctgatgccaacaagttactctgaggcact

SEQ ID NO: 195714 - DNA, 564 bp, Gossypium hirsutum
cccatgtctaggaactggggccagaactggcagagcaacacctacctcaacggacaaagcctctcatttaaggtcacaacaagcgacggccgtactgtggtttccagcaatgttgccccagctgggtggtcctttgggcagaccttcactggccgccaattccgctagaggaacacattattatcttaggctttttaagttttaattaataattactatataaatataccaggcatccaaagtagtatttaactagcttgacttttagtatagctagcatattatatatctatagggccctgtagtgggactttcgggtcactcaaaaatgtgaagggcttattttaaagtagcccatttatcattttgggtttttagttttattatggggtaggtgtcctaattaagttacctttttaaaaaaaacccaaaaagtttaaaggtcacttttccttctggtgtttgttaaaacaagaagagatggcaaaggtgggacttttaccacccgccagcagtgttaacctaataaggcctttggtttttttttcttcttcgtttgggatg

SEQ ID NO: 195715 - DNA, 456 bp, Gossypium hirsutum
gttgtgatggggaacataggcaaaataaagaggacagcaaaggaattggattttgcaataggaagctgggtaaacgagcatcgcgaacggaggctcgacaaaggcatcgaagggaaccaagatttcattgatgccatgttgtctatcatggatgaaaacaatgtaccaattcaagaggctgatgttaccattaaagctaattgcctgactcttgccttgggtggcatcgatacaaacgtgtccacactttcatgggcgatctccttgctattgaataaccgccatgttctaaagacggctcaagaagaacttgacatccatgtcgggaagcaacgacaagtggaagaatcagacatagctaacttggtatacctacaagccattatcaaggaaactttgcggttatacccagcgacgccagtatcggtagcaagagaagctatggatgactgcacc

SEQ ID NO: 195716 - DNA, 1150 bp, Gossypium hirsutum
atcgttctcaactcgtctctccggcttcatttcctttttgctcagatctcctcatctccactttttttccttcttcaaatacccaatggccgtcactttctcaaatctccacaccgagtctggtcttaaagctcttaatgacttcctctctggaaaatcttacatctctgggaataagctgaccaaggatgacataaaagtttatgccgctgttctgaagaaccctggtgattctttccccaatgttagccagtggtataattctgtttcttctcaacttgccgccagcttccctggtaaagctgttggcgttgggtttggtggcaaagctgctccagctgagtctgctaaagctgaggctgctgatgatgaggacgacttggatctatttggtgatgagacagaggaggataagaaggctgcagaggagagggaagctgcaaagaagtcagctaagaagaaagaaagtggaaagtcctctgttctcatggatgttaaaccatgggatgatgagactgatatgaagaagttggaagaagctgttcgatccgttgagatgcctggacttttgtggggagcatcaaagctggttgctgttggttatggcatcaagaagctacagatcatgcttaccatagtggatgatcttgtttcagttgatacccttatagaggagtgcctcacgacagagccacgcaatgaatacattcaaagctgtgacattgttgcattcaacaagatttagaggacacagtttttttccacggctgttgagagtgccattggccatgttatcaccttttgccccttgctttcccctcgaatatatatatttttgcttgaaccgtgctttgctagcgcttctgctctatagtgagcatagatgaaaaggattttcaagtatttaaggatgttctatgttttttatttacttaaagcttgcccaaagtagttttagtgacattgcagattgcataagcggaaatggaagtcatgactgttttgaatattatattaaatgatttgatgcaagttttagtaacttaattatcagtggtggatcacgcttgtggtgattgatagttcattaataagaaaaatatttcaggaataccactactcttaacgttattttacttattccgagaat

SEQ ID NO: 195717 - DNA, 631 bp, Gossypium hirsutum
ctcaaagccataggctctaaatcgtccttcacaaatgactgtaaatccccagctgcctcctcgatttatgttgaatccttcatgggtagtcaatccgacagcggagaacggctgcatgtggtggacactgatacccaaaagatgagtggcttggaggcaaacaaaggagaacctagttgttccgactcatgggcgtcagccttaattgctgaacttgatcaattcaaaaacgaaaaggtcatcaacagaaatgtccctagttcttctattgagattgatctcatggatgattttcttgagatggagcaacttgctgcattacctgataccaagaatgaaaatcaatgtcttgaatcaaaagctactgtcaaacaatccaatgatggtgatagctctttgaaggctgagcttgaagccatgattcatcgaacaacagaacttgaagaaaagttggagaagatagaagccgagaaagctgaactagaaattgctcttgccaaaagtcaagaaagtctagaagcatcggaactagagttgagggacagtgaattataattggaggagttgcaaagagagctcatcaagggcaatgaagcatagcaaccatctcgagttttaacttcagtttcat

SEQ ID NO: 195718 - DNA, 554 bp, Gossypium hirsutum
tctgtaaagagttaattggagaacggtttcttcttcactgctgcggaattttctttctccttttccacctcagaaacaaaatatccgcagtagcgtttaagaagttttctctttaagcttatattattaaaaaaaaaacaaaaaaaaaagagagaagaaaaatggctcgctgtttctcgaacgtgagggttttctctacattcgttgtcgatggaatctctaacgcaatctcaagacggggatacgctgcaacatcacaaggagtagcgtcgaacggagtaaaggaagcagcaagaaacgctgcggagttgaagaaaacaggggaagacatggcaacagcaactaaagacaaggctaactgggttccggaccctgttaccggattctatagacccgaaaacactgtgaatgagatctgccccgctgaactcagagccacgctcttgaagaagaactaaatatacatgcatgcatatgttacgagatgagattggtttcaaatgttatgtggtgcaagcacagggaagattttggtttttggtttttttgttcaa

SEQ ID NO: 195719 - DNA, 382 bp, Gossypium hirsutum
tttttctttttttaaaaacataaacagaggggaaaagggagaagtttgtctgctagggttggcaaccctagccttcatggcgccattgactgccatggaaccaccgcgaacggtgctcggatccggttctcaaaaccaggtgcgatgcgcaaggcatggcgctcgtggaggagcggcgcacgtggaggcgcaaattgctcggagggaggcttctggccccgagtcgtgcggcggttggggttgcttggctacgacgctaggagttgtgctgaaggttctagggttttttagtgttgggctggtttgtttattgtttgggtaattgggcttgagttttaattttgttgggcctgtattggtttaggcctgggcaataactggg

SEQ ID NO: 195720 - DNA, 412 bp, Gossypium hirsutum
gaaaggattacgcccgggaaggagaccttcaagaatggtttaatgccgccgttgcggagaaggaagtacctgctcaacaaatagcttctcatgtgtacacaattagagaattatcgaatcagcatacaaaggctgtagaacatcgagagcaagccgaatcccgaattgtggaagcagaagcacgtttacatgaagctattgagaaatacaccaagaaagaatcagaagccaatgacctgattgaaaagttgaatgtgcttgaaaaccaaattaaaacttatggagaacaaactcgcgaagcttccgaaattgctgtatctcgagaagttgaggcggaagagactcttgtaaaactaaagcagctggaaagccttgttgaggagctgcaaaccaagtcatctcactttgaaag

SEQ ID NO: 195721 - DNA, 550 bp, Gossypium hirsutum
ttttcgcgtccgcgctctctctctctctctctctttctctacctgtgctttctttctgctttctctctctttttaacctttgtttctggcggatgagccggggtctttgcagatccacccgaaaaaaatcccaacttctgtgcaactcagttagtaatgttaattaggacaaaatgatgggatgttcttggtttttcccgtctgatctatatttctgagcataagacctccttcggggaagcagggattagatgggggagaatattgatttcagacgctgggatgaattgataccggatgccttagggatgattttcaagaatcttccgctccaggaaatacttactgttgttccgagggtctgcaagtcgtggcggaaagcggttgctggaccgtactgctggcaggacattgacattgaacaatggagccaacaatgccggcctgaaacccttgatcgaatgcttcaaatgctgataactagaagctcaggttcactccgaaagctttgtgttactggtctcgctaatgaccagagctttttactcat

SEQ ID NO: 195722 - DNA, 518 bp, Gossypium hirsutum
cacgtttgggatcaattgtccacaagaaaattttcctattcctgaattcccatcaaatgaagaggtagtcggtgttattaccatggaggatgttatcgaagaacttcttcaagaggagatattagatgagacggatgagtatgttaatatccacaacaggataaagatcaacatgcatgcaccttacgaaaatgctagcatcccaacccctgcatcttcgtcacccttggccgctccaggtcctacaccaaccctttcggtgtccaccagtacttcaaatacaggttcacctgccgcaacccttttcccgatatgatgtgatagtcaaatacggacaaagaaaaatatgttaatagtccgttacttggtaagaatcaatgactgaccctacttagttttaggtcggaattgccggtaagatgcatgcttttatagagaaccggtacttgttgaaaaactcatatatggacctcatcctatatagaattaaagatggatcatggttgttttgcctctct

SEQ ID NO: 195723 - DNA, 389 bp, Gossypium hirsutum
agaaatgcctctacatcatttcatatttgccttcctaacactcgcattctgcgccacttctgcagtggccgccgccgccgcttcaaaggagcaaactttaaacacccaagatgctgaattctttaacccaaagcttcccccacgaacccttgcatcctccaaaaggttcgaaggctcgtcgaatcttgtcgaccttcgttaccatatgggtccggtcctttcttcttcgccgataaacatttacctcatttggtacggtcgttggtccctttcccaaaaactcctcatcaaagactttattacctgtatatccccttccgccactccttcgccgtccccttgcgtttccgagtggtggaaaaccgtttctgtttacaccgaccagaccg

SEQ ID NO: 195724 - DNA, 610 bp, Gossypium hirsutum
cccacgcgtccgcttttatattgccaagctcttttggggtttccccgcttgttcttctcttaattgcgttctatattgaggatggcttgtactaagagaactctggctttccttttgatgctggcttttgtgggagtctctcttggtgcagttcacaaagtgggcgattccaccggctggactagtcttgggaatattgactacctcaagtgggcttccaccaagaatttccatgttggcgactctcttctttttcagtacaaccctcaattccacaacgtgatgcaagtgacccacgacgatttccagtcatgcaacggaacatctgccatcgcctcctacacctctggatccgactccgtaaccctcaaaaggcctggccacttttatttcctttgcggtgttccaggccactgccaagccggtcagaaagtcgacgtattggtcaaatcatcgtccaaagccccaattgcaagtcctagcccatccactttaggttcatcgcctgcaaacccaccgtcagaaatgttgggtgctcctggcccagctcagagcagtgccctgtctctcttctcctccaagaattccctggcatggagtcttgtcgcgg

SEQ ID NO: 195725 - DNA, 447 bp, Gossypium hirsutum
cccactcgtccgcccacgcgtccggtttacttggttcagagtaaccgaatgccacaggtctcaggttcgagggccgtgagagagagaggagatcgatcaaagcaatggccactggagcagcaccgaccgagatgatgctccggtgcgtcctggacggaagcctagtgatgcgagaaatcgaggtggagcgccgcccctatcatcgcaactgcagctgcgctttacacagcttaaaaggtagcgtcctctgctcatccgcttgttctcgctcaaggaataatatagcttttcctaagaaaaagacctggaatgttgattgttccttatcaatggctgcgaccgatcctcaatcgatctcttctcggtcttctcttctcggtggattatctgttagaaaacatggattcgaagacatcaatgacgtttgattatgtgctgcagaaagca

SEQ ID NO: 195726 - DNA, 370 bp, Gossypium hirsutum
tattttttactatatctatgtaatgtactgattattatattaaatgaaaaatctctctttctccgcaaaagtcctttgtctctctacaaatgtaatcacctaaagtgctgtagattgcaaagacggcaggtctaatggaggtttcttcatacgagggcttggcttttggtttctctgctctgcaacactgagtagggcctgtcttcgattagtggcacttctcatgtattcctccaaaggtgggagagctggttgttctttgttatttgttgcttgtcctcgaataagctgtgaaaaccatgaatgaatgtaaataatagaacgtggtatttatagatcattttttattttttttttttttaaataattt

SEQ ID NO: 195727 - DNA, 588 bp, Gossypium hirsutum
gcatcatcccaatcaactatctgaagaaatggtcttacgcatgagagatattttcattttcttagcagattcatccaagctttcttcttcatcgtcttcttcttcggtgtcacccgcttcacctcactgcccccttgccaattttttggcatcatcctcggactcacccgttgtaacttcctttgtaagtagtccctcaggaggtggtgcatatgacccttatggaatctctgacaaagttgactggacatttagtattgggacctatagtaaagcgagtgaagtctcgtggttgtctgttgggaagaaagaacttgaatatgccgctatggctctaaaaagattcagattgcttgttgagcagctgttgagggtggatccttctcaaatgagttccaatgagaaactggcattttgggttaacttgtataatgcattgattatgcatgcatatttagcatatggagttccaagaaacgatatcaaactattttcctttatgcagaatgctgcgtacaccattggaagactctccgtgagtgcagctgacatagaatgcacccgtctaaagatgaatcctgctactta

SEQ ID NO: 195728 - DNA, 333 bp, Gossypium hirsutum
gcttatgattcatcaatagcagcagtgagcaaaagggaggttagagtttctttatgttggatggatttgtaacttctcctgggacttatccggatttctgctttggcctgagttaaaatgagtttgtataattttgcttttcaagaataaacagtttgattcccccacaaataaaataatttatatataattaaacaaaaaaaaaaaaaaaataaaaaaaaaaaaaaaaaaaataaaggaaaaaaataaataattatataaaaaattatgggggggcccctttaaaaaaaccaaaattttttaccgctggttgccaagtaatatttttttttt

SEQ ID NO: 195729 - DNA, 742 bp, Gossypium hirsutum
cagacgggtctaatcttcttcttttgctgcaaatgctccactctgccccggcttgcagagaaggggcacttcatgttctctatgctttggcaagcacgcctgaacttgcttgggcagctgccaagcatggtggtattgtttacattcttgcacttctcttgcctttacaagaagaaatacccttgcagcaaagagcggcggcagcctctttattgggtaagcttgttgcgcagccaatgcatggacctagagttgccataacattagcaaggttttttccggatggcctagtatcaatcataagggatgggcctggtgaagctgttgtgtctgcccttgagcggaatacagaaacaccagaactcgtatggacacctgcaatggcagcttctttgtctgcacaaattgctactatggtatcaaatctataccatgaacaaacaaaaggccgtgtcattgactgggatgtacctgagcaaccttcttcgcagcaggagatgagagatgaaccacaggttggtgggatctatgtcaggttattccttaaagatcccaaattccctcttagaaatcccaagagattcctggaagggcttctggaccagtacttgtcttctattgctgccacgcattatgagtcacaatctgtggactctgggcttcctttgcttctttctgctgctttggtttcattattgcgagtgcaccctgcacttgcagaccatgttggttatcttgggta

SEQ ID NO: 195730 - DNA, 629 bp, Gossypium hirsutum
gaccgacgcgtccgcccacgcgtccggttttgatcatctcataccataacttgcatatttttactgctcacggggtcgaattaagtcatctttcatacccagatctctatttttaaggttttggaagggaattggagttggctatggagaacaaccagcaatcattttggcatttcagtgatcaacttaggatccaaaattccaattccgctaatctttcgctcaacgattccatatggagcaacagttatgtctctaaaaggcctgatgaaaggaggaattttgatatcagagtcggtggtgaagttaattctgttaacaacttgaagcccaaagtctctgatttcaattctttcaacaatgatggatggaaaattggagccaccaccaacaacatagggttcggccccatcgctccgaagaataccggaatcaacggaggattcaacaaaggggtttattcgaagccggcgaataacaataatttcaatgttaatttgaaggggaataagaatagaggagaggatgatcatggtagcaaaagcgggaagaagaatagtaacaagaagaagaacaataacagcgacaataacaacaacgaaactaaagatggggggagtgctgctgac

SEQ ID NO: 195731 - DNA, 589 bp, Gossypium hirsutum
gcagatgttaatgctttttttgcttcgtttgtttggaagatccctgcaactttggaacctcctgccaaagtgacaccagtagcggttggaatcgaggatgctaaaaaagaaagtaatttggaggatgctaaaattgaaagtaacaaaatgactccccgtagcagccagaggaggagggatcccccgcctaagcttctcactcccagaaatggtcaaaagaagcagaagacaagtagaggatcaggatcagcgtcagccaaaggatcagcatcagccacacctaagcgacaaccaactcggcagcgtgttaaaactcctgccccacccccactggaaaccgaagatagaaatggcggtcttgaactatctttcttagatgatgaaacaacaagagcggaattcgacaactatctcaatgcattggatgacatgctcactcagcctttgcctgaagaaccgtattcccatcccgtgttgtataactactttgctgcagaaagcgaaatggctgaagctcgaatgaaactgtcttcatttcttgacatggatttcccttcgttgatttgcttcaaagacctcgatgaactca

SEQ ID NO: 195732 - DNA, 508 bp, Gossypium hirsutum
gaaaagcaaaataaaaacacaataaattttgtttttttcatcacattaggtctctttactctcactaacctttattcttcaataccatggacatgaagaagatctcatgcgccgtcattgtcgccgccgcctctatgagcgcggtcctggctgctggcgcttctccagctccatctccagcttcagctccagctgcagctgcagcttcagcttcagcatctggcccaggcccagattccagcatcgcaatctcaacaatgcctgttattgagtccttggttggagccacacttgtttctttctttgcctactttttacagtaagccacagcaaaaaatggatgaaaccatgaagtattgaagaatcaaaaaaagaaatggtggattaataaatgtaaaaatactacttggcgtgctttccttcgttgtgttcattgttgaagatggctttcttcactttacttgtttgtacgtttatgatatatgtttgaattccaagtgatactttg

SEQ ID NO: 195733 - DNA, 844 bp, Gossypium hirsutum
ggatttggtggtcacagtggccgttttccactaccatcttcaagcccttcagcttcctcacaggagacagtggggccatcagaatctaacagccaggggaataatcaaccatgcccaaggttagcattaatattggagagacatgatgatgatgttcttgggatggcccattcattacgagcattggctgctgatattgaagggagacaccgactaatttctgagattcgccaagtcttaaatgccgtccacaggggggagaacttacaaattgaggattatatgccgtttgatccattcatctatcatggtatggctgctatgcatgacagacatagagacatgcgtcttgatgttgataacatgtcttatgaggaactgttggcattaaaagaacgcataggagatgtgagcactggactgagcgaggaaatgattctgaagttgatggaacaacggaagcattcatctacttcaacagaatcccaacaagatctggaaccgtgttgtatctgtcaggaagaatatgcaaatggagatgacactgggatactagattgtggacatgacttccactctaactgcattaaacaatggttaatgctaaagaacttgtgccctatttgtaagacaacaggcttgcttaaatgatagcaaaagctgatgttagagctgggaaatttcgttatcttttgatcgtcattaagatcctataataagggtttaggtgcgcatgaaccatacaaaatttgaagatgctgctgctaattttatgtactgcaggatgagttgtttgtcgaataacttggcataaaagcatcaatgacaatgataacatatttga

SEQ ID NO: 195734 - DNA, 760 bp, Gossypium hirsutum
  unsure (1)..(760): unsure at all n locations
cggccgcgtcgacccaaatctatggtgatggcgctgtcaaagcatactttgtggcgggttccgatattggaaagttcactgtcatgtccactgatgatgatcgaacactaaacaaaaccgtccattttcaacctccaagtaacctattaaacatgaacgaaatggcttcactatgggagacaaagatcggccgcgtgctgcctagggtaactatcacagaacaagatctgctccancgggctcaagagatgcggatcccgcagagtgtggttgctgcaataactcatgacattttcataaatggctgtcaaataaacttcagcttggacaaaactactgatgttgaaatctgctctctctatccgaacacttcatttcggaccattgcggagtgcttcgacgattttgccaagaagatatcagataatgaaaaagcagtgagcaagccagtgactgcaagcaacactgacatttttgtgcccactgctaaaccagaagcattggctatcaccgcgatatgcacatgagaaacatctcaccctatttgatattctaaacaataattcaatggcttcttattgttgaacggtaaagagactattggttactagtgatttgtggaccaactatctattatctaagggtgagatatattagtagttacatcatgtatctagggaatttagaataattttactacagttaataagattattagacctatcaatttgntttnntgaagngncacctaaattcaatt

SEQ ID NO: 195735 - DNA, 483 bp, Gossypium hirsutum
agaaacttgccaataaccccaaatcccacagctgagaattgcgaacccaacagatccagatgtcccagattaaccctaaatccacccgtctctgttagctagttcctttcttcggccggtggcccaaatcctctgcgtttcgaatcagagttatactcaaaggacaagccaagcccccgaaacaatgccattcaaaacaatgatagaggttgaaccaccgagtccgttaagatatatcatcggagcagcggtcatgatgatcggagttgtattgcccgtcggatacatgatgttccgtaacaaacgcgtcccttcctcttcttcttattccaaacagacgaacaaagttttaatatagagattttggtggaagagagacttgtctttccgcgaaattggtgatttaaatttgaagaaagatgagggaagcattgaaagaaggccttgaatggcctgcagatacaaaaaatgtaaatgaattat

SEQ ID NO: 195736 - DNA, 403 bp, Gossypium hirsutum
cgattttcatgcaaagttatccacattacaagcgttttccatttgtgttgcagttctacgtggtacagaaacctctgctgctgctactggggagacagaaggcaaacattcatcacaatacaattccttaaaaatgcttatcgaggaggaagtgaaatcgttaataaaagcggtcacggaggtagagacgaagaataagaagaaaaagaaagtcagcaagaaggtggaagctatcccaccatcctatgtgattaaccctcctttctcaccaatcgctcgtgtctaagcccgaaacaatgccttgttgaatcgaaactggcctattgatccttctccaggcattctgccatgttctgactaagaacagcattgatccacggttaatacaaaatgtcttatcttg

SEQ ID NO: 195737 - DNA, 986 bp, Gossypium hirsutum
cccacgcgtgcgctttctttcataccttctctactttgccttttggttctctgtttagttgcggctataccattcagctaatgatagcttactgtgatcggaaactcgagagccgtcgctctgtccccgctctcggtttccctcggtttaggtttttccgccaccggcgattgcggtaacccttgtctcactctccaacctaaaaaagcagcgaagagaagttttatttatttatttatttatttaagatttgaatcactgtataatataccacggtcgatcatttcaatccgatgaggaattcaaaaaataaccgtaaggaaccggaaaagagccggagggtaaggttatctgaaagggcgtcgtcgtttcacgggagaatccagacgatggaaccggtggagctgaggcggccgaagacgcttcccgacctgcttccagagaggtctacttcactctcatccgatgcgaggccgccgaagttgacgaagctgctattgaacgtgacgattcaagggagcctcggagccgtgcaagtggtgatgtcaccggaaaacactgtcggtgacgtaataacggtctccgtcaggcagtactcgaaggaaggtcggcgaccgatgctgccgccaacggacgccgcgctattcgatctccattattctcaattcagcttagaaagtttgggaagggaagagaagctgatcgcgttgggatcaagaaatttcttcttgtgcacaaaaacggcggcatcgaaggacggccagaataaaacggcgtcgtgctcaaatgaagcggaaagtgttacaaaaagctcgaaaccttggttcaaattcatggatttcttgttttagaagcattttttatgggtattgtattttgtaaaaaaaattaataatttttttaaaaaaattagattatggaacatgcaaatttatgaaaaattgcatgtagggtattttagaatggttagggaaggaaagagagag

SEQ ID NO: 195738 - DNA, 441 bp, Gossypium hirsutum
cggacgcgtgggttcgagggttataggattggctaccgcagaaccaaattgatcaatcgaagtttcatctctctctttcttctatcctgcaggcccggtagaaatttcctcaaggtgtgcagtgattttacgagaatgtctcgggtctatgttgggaatttggatcctcgggtcactgagagggatctcgaagacgagtttaggattttcggcgttctccgcagtgtatgggtagctcgaaggcctcctgggtatgcgtttattgagtttgatgatcgcagggatgctattgatgcaattcgtgaactggatggaaaaaatggttggcgtgtggaactttctcataattcaaaaggtggtggaggccgtggtgggcgccgtggtgggggtgaggatttaaagtgttatgagtgtggtgaacctggtcactttgctcgcgaa

SEQ ID NO: 195739 - DNA, 1019 bp, Gossypium hirsutum
tttgcttggggaaaagaagttccggaccttctcaaagacgattacaagaatgacttgggtgaagaagatgaggaagatctcgatgacgatggagataagtcacaacatgctttagcaccggaatataaacgtttaattgctattcatgccggaaagccaaagggaggattagaagagtgtctaagggtggatcccgataaagtaagacgtcttagcatgagtgagcaacaacttgaaaatgctgcgattactcacggaaaagaaattgtcaggtttacacagcggaatattcttagggtatatccgaggggtacacgtgtcgactcttccaattacaacccattaatcggatggatgcatggagctcaaatggtcgcatttaatatgcagggttatggaagatctttatggttgatgcatggaatgttcaaagccaacgggggatgcggatacttgaaaaaacccgatttcctattgaatcctaacaaagtctttgatccaaatgtcaagttaccggttaaaaaaattttgaaggtaactatgtatatgggcgaagggtggtattatgattttcatcacactcattttgatgcgtattctcctccggacttttatgcaagggtggggattgctggagttccgttcgattcagtgatgaagaaaacaaagacattagaagacaattgggtgccttgttggaacgaggaattcgaattccatctaactgtcccagaactggctctacttcgggtagaagtgcatgaatacgacatgtctgaaaaggatgactttggaggccaaacatgcctaccaatttcggagctaagaagtggtatccgagcagttcccctcaacagccgcaagggcgagaagtacagctctgtaaagctcctcatgcgcttcgaattcatcgatccataggcacccaaagttgagttctggtccatacttccaaaccaaccttcaatctgtttgacgggatgtgagcttgtgtgcagttttaccttatacattacatg

SEQ ID NO: 195740 - DNA, 871 bp, Gossypium hirsutum
tcattttcaattcccaatggatctccactaatagatgggacaagacaaatgacaccttcccccctccctcataactcaggaaacgacgtcgcttttcttacaagacacaacatttaaccgtccgatcttcagtcctctcatttcaaatctacttcaactcattatttcctttcttcgagttttctctgtttgcttccgtcacaactccaaaaccgtacacaaaatgggcaaggatctaagcgacgagcaagtctcatcaatgaaggaggctttcactctcttcgacaccgacggtgacggcaagatcgctccatcggagctagggatcctaatgaggtctctcggcggtaaccccacccaagcccaactcaaagctattatcgctgaagagaagctcacggcgccctttgacttccctcgctttttagatctcatgtccaagcatatgaaacctgagcccttcgataggcagctacgcgatgctttcaaggttctggataaggacaatactggctttgtctccgttgcagatctgagacatatactgactagcatcggagagaagctggagccctcggagttcgatgagtggatcagggaagtggatgtcgggccagatgggaagatccgttacgaggaattcattgccaggatggttgctaagtgagaaagcttattaacgtttgttttccttgcttgttgttttctttttgggggaaccaggctttgatccggcggaagatattgtgttttcaattttttgttctctttggtttgtttctatggaacctttggaactaatggtaacactctttcttaaagaatttgattggtggggggtacttatgtattctcatattaatattcttgg

SEQ ID NO: 195741 - DNA, 470 bp, Gossypium hirsutum
cccacgcgtccgccgacgttgcgtttcgatacggggggtggagaggacggcgtaggatacttagggtttggtgtgacgacgtggcgcttactggttcctccggaaagatgaccggcggttccaaaaaatgcagtgttgattgatttactgagcagatgaatggcattcatggttaaaaggggaagaatagagaagaaaagaggcaaggaaagaatgaataggctacaaatgggaggaattgtttgagtagtttcgagggatgttaacctgcccccaacaatctctatttatctttcatcctgtgttaaatatgaatgtaaatttgatggttctcttttaggtgttctatttatatataaatataattatagtttcggccaagaagtgatatttatttgagtctagagtgaataaattgctaattttcgatttatgaataaatctagttctcaaaaatatagaggtttatt

SEQ ID NO: 195742 - DNA, 614 bp, Gossypium hirsutum
gcttcctcaaaggtggagcaagacatctcaaagacggccaattccaagcaggaaacccccaaaatttcgtcccaatctaagggtgagtctcttaagagtgggggcaaatccaattctaatggcactggtaagtcaaagtctggttcgtcaaaggtgggaggagggagaaagcgtgaaggagagctcaactgattcagcaaaagttgtgggaagtgtgaagcggaaagcaccaagtttgttgaaggcgcagggaagtgattcgaagtctggaaaaaagaggcaaagatgagttgaaagtcgcacctactgcattgtcatttgccaagggttggttcttctccaatgtggaacttgggtgaattgtagtatttattgtagcatttggggatttgacgtagttcttaggtttgtggctagcaaatattcgtagttaatgcagtttatagtggttgtactttgtagggttaagataccttttttatatagatatagttttttttccatttcctttattattgatgcaggcaataggatcacattgggtttagagtttctgcctttgtactaaagagttgcttctatagattaacgtaatagattcgattcgagaaaaa

SEQ ID NO: 195743 - DNA, 420 bp, Gossypium hirsutum
gaaaaagaaaaagtgggttttatttttcgatgaaaatgagtaaagcatcaattgttttactctattttggcttcatattcatccattgtgaagctaaatcgatcagagaaaagcctcaagcttttgagtccttcaatgtcagttatatacagaatttagggagctgttcttactcggtggtttttacaacgagctgttcatcaactagttacactcgggatcaaatcagtattgctttcggtgatgcctatggtaaccagatatatgtgccgaggttggatgatccagcgtctagggcatttgaacaatgttcctcagataagtttgagattaacggaccatgtgcgtatcagatctgctatgtttatctctaccgaactggaccagatggttcgaagccggagcatgtgaagatttatg

SEQ ID NO: 195744 - DNA, 471 bp, Gossypium hirsutum
aacccacttcagttgcctcctccgttgccatccccaaccatgctgcaccctcatcataagtgttcaattcatacaagtccgtccagtgcaatagttgcatcgatgaataacatggcgttcggaagcggcgggggcggtgggaacgagtcttcaagcgaggatcttaacgtgttccaatctaacgccgacggagtgcccccgcctccgccttatgtgttgtcaaagaagaggttccgcacaaaatttacgcaggagcagaaggataagatgttggagttagccgagaaagtgggttggaggatcaataaacaagacgaagaggaagtacagaaattttgtgctgagtatggggtgaaaaggcaggtattcaaggtttggatgcataataacaagaacgtgaagaagccgccaccggaataagagttggtaattttcatggttgctaaacgagtagaatgacatgtgagacat

SEQ ID NO: 195745 - DNA, 862 bp, Gossypium hirsutum
cacagtgttcgccgatcgcttcgcctctctctccatctttgactttaatttctataatgtcggggaatgcattaagagatctcaatactttacctacacctgagaggaagaatgacagctccagtaaagggaatttttctaagccttgcaatgggaagacaattgataatgttgaagagcggctgaagaaaagcctgtcttctgttcaaataaatggaggtgaaactttaaatgtgcagcacaataagagctccgcttctgttcaaataaatggaggtgaaactgtaaatgttggagtggaggtagctaattcggaagtagaatacattgaatctgagaacttgagtgatctagaagatgttgatacatgtcttaagaagctcttacctggacttgactctaaagattggattctggttgttgaaacactcaataatgtccgtcgattatcagtattccataaggaaagaatgcatagtatgctgggtgatttgatccctcttgtagttaagtccttgaagaaccctaggagtgctgtttgtaaaactgcaattgtgacatctgctaatattttcagtgcgtataatgatgatttgattgattctttggatcccctgcttgtacagcttcttcttaaggcttcacaagacaaaagattcgtatgtgaggcagctgagagggccttagaggctatgactacttcagtttcccctatgttgttgttgcccaagttgcaaccctatctgaagaacagaaacccacgaattcgagcaagggcatcaatgtgctttagtcatagtgttccacgtctgggtgttgagggaattaaagaatatggaattgacaaattgatacaagtagc

SEQ ID NO: 195746 - DNA, 481 bp, Gossypium hirsutum
aaaacgcaagaaaaaaaaaagagaaataaagggaaacccccctttctctgctagggttccaagattgaaaccccgccgccgctatgcctccgtcgtccgatgatcggagccgtgcgaggacgccccccaacggcgccttgaagtgcgctcataagtcgaggccgcgaacaccgagacgagggggaagagaagagcttcggcccctccttgaacccacatccggcgacgatgaagttccatcggcggtgggcctaagggccgactcaggtggtctgatgcacgaccgacatgcgaggccggtgattggagagcaacggcggtggcgtgagcaggaggcgtgcggcgctggaagcctgggcgtgcggcgcttaggcctagggtttctgtcttgtccctaatctgctggcgtagggttttttttttatacttttgggcttgtttttattattctatttttatatttctttttttgttatatttt

SEQ ID NO: 195747 - DNA, 1606 bp, Gossypium hirsutum
acctccaacttctttatatcctctttgaagtagggtttttggtgcttcttttgctgatattcagccgctgtttcttatatctctcttttaatcccataaaaatcataagtcagttttgaaaatctctttaactcttcttaaactatgggaaaatcaagcaagaaatcaacccccaaagttgaagcagctcctgctgtagctcctcctaagtctggaaagaaaggtaagagagatgctgaagaaactcctgaaaaacaagtggctgcaaagaagcagaagaaaaacgattgagtggcacaggctattgtgaagaaagaggttgaagctaagactcagaagaagaaggaggaaactagtagttcttccgatgactcttcagaatccgaagatgaacctgcaccagtgaagaaacaggctgctgtcgtgaagaatggatctgtacctgcaaagaaagcaaaacaagctagcagttctgattcttctgactcgagtagcgaggatgaagaagctcctgccaagaatacaaagcctgtagttgctaaaaaggctgctgttccagcggctaagacagtgaaagccgatagcagttcggattcttcttctgacgatgattctgatgaggatgatgaacctgctgcaaaaaaagaagtagcagctgctaaaaatggtgcagcacctgttaagaaagcagagtcttcagattcttcagatgcagatagcagctcggatgaagatgatgaaaaatcaaagcctgctcctaagaaagcaccaactgctgttaataaaaaggagtctagtgatagttcagaaagtgacagctcttcggatgaagatgttaaacctcctccaaagaacgtaccttcagcgactgcaaaggctaaaactgaatctagcgacagcagctctgaggaggattctgatgtataggatgtacagaaagcacctgctgtgaggaaagcttctgctcctccccccaagaaggttgaggattccagcagtgactcctctgatgacagtgagtctgaggatgaagagactcctaacaaagaggctaaagttgctaaaaaagcaagcactagtgaagaggaagaatctgaggaatcagatgatgacgaagaaagtgacgaaaaagaagctccaaagaaaaaagacacagatgtggaaatggtccatgctacaacacctgctaagcacgacttgcagtctgcaaagaaagctccccaaacacctgtaactcctcaaacccaatccacaggatcgaagacactgtttgttggaaacttatcctttcaaattgaagatgctgatgtaaggaatttctttaaaggtgctggtgaagtcgtcgaagttcgtttttcctctgatgctgaggggaactttaagggctatggacatgttgaatttgccactgcagaggctgcacagaaagccctggagttgaatggggaatatttgatgaaccgtgctgttagacttgatttggctcgtgaaaggggtgcatatacaccatacagtggcaatgggaacaattcattccagaaaggtggaaaaggtcaatctcgaacaatattcgtcaaaggacttgatgcatcactcgatgaggata

SEQ ID NO: 195748 - DNA, 469 bp, Gossypium hirsutum
cccacgcgtccgcccctatatttgatgagcaagttctctacatgttgtttccttcctctcgtgaatgagctgatttctggaaaaccagattagccataaagtaatacagaaaaggcgacattgttccgcagttcctctcttgaaaacccacggcattgacggaaaatatgaggacgatctgcaacccaagaacggcaacggggacatctgtcacttgcagaaactcttctgtatctgagattagctagatgagggatgaaatcccaagagattcgccaaataattatagtgatttttgaaggaagctgtaaaccccataattttttgtagaaatctgtagtttcggtttgtattaagaaattactaggatccggattagccccttgtaatagtttataggcgctgcgaactgaaaattccctggacagttctcctttccagacttgaatatcttcatgacccgtctctg

SEQ ID NO: 195749 - DNA, 581 bp, Gossypium hirsutum
aacggctacgccgagttcaccgaaccaaaggtcgtgagcgcaaatgcaaaattcgaagtggagtttgctaaagatgggctggtgcacataaggagttgtaccaacaacaagtacttgaagcgaactcataatccttatatcaccgaaaaaccaaatgaggagtattggattactgtaaccgccgataagccggaagaagaccaatccaaggagtcatgcacattgttcaagcctatcttggtccgccctcgcgtccgaaattttcgatttgtccatgctcaatctggatgctatttatgcttatggccattggctacatcggaactcggtcgtggcgtgctggcaaacaacaatcatgttgcggctaatcgcgatgatatcttcaaagttattgattgggagtcgttggtgattctgcctcggtacgttgctttcaaaggaaacaatgatatgttcctgcgtcttagccatttcgagggtcacccatatttagaattctcgagtacggatgtcggtgctggatctgtgccaatggaggttttttatatgaagaatggagacatccggatcaagccggtttc

SEQ ID NO: 195750 - DNA, 843 bp, Gossypium hirsutum
  unsure (1)..(843): unsure at all n locations
gtggagcggaggatgttgctttgattgagtatgcaaaattgactggtaggccatttagggtgttcagccttgatactggcaggctgaacccagaaacctaccgattctttgatgaggttgagaagcattatgggattcgtattgagtacatgtttcctgatgctgttgaagttcaggccttggtgaggagcaaagggttgttttcattttacgaggatgggcaccaagagtgctgccgggttaggaaagtgaggcctttgaggagagcactcaaggggttgcgtgcctggattaccggtcagaggaaagatcagtctccagggactaggtcggaggttcctgttgttcaagtggatcctgttttcgaaggtttggatggtgggtatggtagcttgctgaagtggaacccggtcgccaatgttgatggtaaggacatttggaatttcctccgggcgatgaatgtgcccgtcaattctttgcatgcccaaggatttgtgtccattggctgcgagccgtgcacgaggccggttctaccgggacaacatgagagggaaggtaggtggtggtgggaggatnccaangccaaggagtgtggtcttcataaagggaacctgaaagaagacggtgcagctcaagttaatggaaatggggctaccactgaaagtgacattttcaatagccagagcttggtcacactgagtangactggaattgaaaatttggcaaaattggagagtcggaaagaatcatggattgttgtgctctatgctccatggtgccctttttgccaagcaatggaagcatcgtatgttgaattggctgaaaaactggcaggttctggtc

SEQ ID NO: 195751 - DNA, 451 bp, Gossypium hirsutum
ttctcgcgtccgggcattcggtttttctccttctcagccttcaaataaaggatggagaggaacatatccctggtttccctgttatgcttcattcttttcaatgggtgtttggtgtttgaggcggatgctgtgaaaagccaacgcagcgaaaagctcaagctgattcacaggcattcacctgagctaggacacaatcctggaacgacccttggacccccaaaaaattcagaggaacgattaaaacagctggtgcagagcgacaaggctagacttcatgccattaaacggaggctaggcgtagtggggaaggcgaacgattgggtggagttcccattccgatcggcggcagatatggggatcgggcaatactttgtttccttgaggatggggacccctgcccacacctttactctgctggtggatacgggtagctgtcttacatggcttaaat

SEQ ID NO: 195752 - DNA, 614 bp, Gossypium hirsutum
cgcattttctttattgtttttcacactatccaaacaatatcttaaaatagtagattaaagtgtaaaagttcttcaatggcgatggaggataataaaggaaacaagagaactcgagtagagtttgaggattttgaaacggagggtaacttggagtcggtccataattcaaagctcgctcgagttgactcggagaatacgggctcgaactcttctgaggttacttacgtggaacctgatcctgacgatgagggaattcagtcgccggatgtgaagcgtatccaggaagatttgcttgatatcttggacgattcggatccggttattggacttgatccggagattcagggtctcgacttggttatcaaaagcttcgaagaagagatctcggtccccgctcaggatccggtacaggaattagattccggcgagtcccggcgggagctagggtttggtttagaagcttctggataccagttggatttaccgccggattttgaggagaaacttgcgacccttgatgtcgaggaaggtggagggacaggagcagttggattagcggatatgatggggtatgaatttccgattccgagttacgaatcggtcgagttttgagt

SEQ ID NO: 195753 - DNA, 534 bp, Gossypium hirsutum
cccacgcgttcgcaagcttcttcgtattctagtcctgctgcagcacctgcaccatacccaagccaatcgacaattccttatgcatcaattgctgcaaagaaggatccacaaggaatcccaccaactacccccatgggaatgagcgggtacccatattatattgggaaataataataaagtcccagctcattcatggtgatttgtgaagcgtccattgacgagtactttcttaatgcaactactagttttatactcacagttcaccaacatgtttggtctttgcagttaggtcacatgatgaccaacatgtttggtcttttgcaattagttgtcatgatcggttgtatcttgaaccaactttgcgagaccaggtgttgcacatcagaacaaaaagatcattgggtttgatgtaggagagcttaatgttagcattccataaatttccctggtttcttgtagttaagtctaatatactttgtcttattgatattatttagtgtggtttttttctttggtggggtcaaatgatccttt

SEQ ID NO: 195754 - DNA, 367 bp, Gossypium hirsutum
tttccacgcgtccgaatccttttcaaagaatggaaaaccacacggtgacgaatctttccaaagggagaaggcaatctttgcggtgatcttggtgtgcacctttgtcatgggctttgcctggtcatgggggcctcttggttggttaattcctagtgagattttccctctggagaccagatcggctggttttgcctttgcagtcagcaccaacatgctcttcactttcatcattggtcaagctttcctctcaatgctatgccagatgcaagctggaatctttttcttctttgctgcctgggttatcataatgggagccttcacatggttcttgttgcctgagaccaaaggtgtccctgttgatgctatg

SEQ ID NO: 195755 - DNA, 801 bp, Gossypium hirsutum
ccacgcgtccgaacaaaaccaaccccaacctcccttctcccccaccaaataaagcagaagaaaaagaaaaaaaaaccccagagtctccgtttcgagttggattttttaatatttgtttcactttttcagtttcgtccttgtgtctcccatcctttcggtttctctccgcctcccccaaaaaaaacgaaattcagggaattaaattccctataaaatcgtttctcgtaaatttccttttcgtttttaatcaaacccgatttcctggtttctttttcttcatcgatcgtcgccggcgtaaaaacaagaaaaatcaaaagcaaaaagcttgccgaattagaaaaagaaattatgggttctgaacagaatgaaggaacaagctttccaccatcggagccaaagctttgtgccaacggttgtgggtttttcgggacggcagcgaatatgaatttatgttcaaagtgttaccgggacctccgtgttggggaggagcaagcggcgaaggcgaaagctgttatggagaaatctctcagtatcaaaacgaagcatgaacctgtcgttgtggagacttttaagcctcatgtgggttcttcgtctacatcgattgagcaacaacaaccggctgttgttgccgttaatcaacaaccggaaccaaaggcggcgaacaggtgttttatttgttggaaaaaggttgggttaactgggtttaagtgcaggtgcgagaatacattctgtggggagcatcggttcccagaaaaacacgagtgttcatttgatttcaagggtattggacgtgatgccatt

SEQ ID NO: 195756 - DNA, 650 bp, Gossypium hirsutum
cccacgcgtccggatgactcaaactattcaggaagctaaaggggagcttacattagaatcaaacattgtgtgctctctttcgatgacatgaaatcgcactgatgactgccttcttaaatcatggacttgaaggaaactatgtacatgttatatgaaactttactatatcaagtcctcagcggttagtgtctgttcagttgttgtctttaagctagtgtcttccttaagcgtctgatacaatgtatataactgtagtttgtagattcacctctaaattgcttaccccaaatccttaggtttcttttcttattctttttcccattatccttctttccttggtctagactttagtgtcctttgtttctaattgtctaacttggattagcccctttgtttctttttacaacctagtctaaattagccttcctagatgttctttctttgtcttgcaactcttttcctctctccagcattgccttcaattggctgcttaacaatcaaatatcctcaatatactccgttcttttacttgggatttctcttcctcgccatctttttctggttttttatgaacgaaaaggtaggaagggaaaaaagtaaagtggttatttgtcacctctgaagcttgttaggttaatcagttccatgtc

SEQ ID NO: 195757 - DNA, 672 bp, Gossypium hirsutum
cggacgcgtgggcggacgcgtgggtgggcattcaattcttgaaagctactcgagggtgatggagagtttggctttcaacattatggcagggatagatgatgttctttacgttgatgatgctataaagcaacgtgctgcggcagaaacagtttctcttttcagcaggagcggtttcagtggtcgtccaatccaaaggcgattgtctcctagtcccttctcaattcaacagactccttatgcctctcctttcgcaacacccaccttttgttctccaaccccactcaccggaagtccacgacgagcagcttcctctttgaagagaaatgatattaaggaagaacctgaccggaaatttgaaaaaccgttcgcgagtgaatttgagaaggtgtggtcgtatacagatagcctgagcgcgagaagggtttcagaaaatgctccggagagagactgaaatcaaagattcatgatcccatgtaagataaagttctataaatggaagtaactcagtttagttgggtgtctgactggttaagaaatattggtatatctaggatttgaatatgtctttgcattaggaagattagtcctatttttcgagtggagtcgaagctagtatcgatcggtttgacatgtctctctatcccgaacctaaaagtttgattcaattaactt

SEQ ID NO: 195758 - DNA, 485 bp, Gossypium hirsutum
aaggttgtcataaccaacctcgaatctggttctgttttggatcttgatgcaaagaaatgggctgatgctcgaacagatgacggatgtgccttttacaaggtgcccttttcaaatgttgtatatattgagcgctcagatttccgcatgaaagattctaaagattactatgggttggctcctggcaagtcagcactgctaagatatgcattccctataaagtgtacagatgtaatattggcagatgataaagaaactgtgcttgagattcgagctgaatacgatccttccaaaaaaagcaagccgaagggggttctccactgggttgctgaaccgtccccgggttctgatccattgaagattgaagtccgattgtttgacaaactctttaattctgagaatcctgctgaacttgataattggctcactgatctcagcccgaattccaaagtggtggtacctaatgcatatgcagtgccatcacttgg

SEQ ID NO: 195759 - DNA, 845 bp, Gossypium hirsutum
cccacgcgtccgcccacgcgtccgcagcttccaattatcttaaagcctgccatataatcatataaccaggctccgtcgtggtactcttcggccaccacaatgccgaaaatcgccttgggaacaagccaagaggctgctcagcctgactgcatcaaagcccttgtggtcgagtttatcaccactttcctcttcgtattcgttggagtaggagctgccatggccgccgatgagtcgggggcaaatgcgctggtgggattgtttgctgtggcggtggctcatgcccttgtcgtcggcgttatgatatcggccggacacatatcaggcggccatcttaacccagccgtcacgcttgggttgctattcggtggtcacatcacggtggtccgtgcgatcctctactggatcgatcagttgttggcatcttcagctgcttgtatacttctcaagtatctcaccggaggattgaacactccggttcacacattagcaagtggaatggggttccttcaaggtgttatatgggagattattctcacattcgcattgctgttcacagtgtatgccaccatagtagaccccaagaaaggttccatcgatgggctaggtccaatgctcactggcttcgtcgttggggccaacatcttagccggtggagctttctcgggtgcttcaatgaatccggctcggtcattcggaccggctctagtgagctggaactggaccgatcactgggtttactgggtgggacccctaatcggaggtggccttgctggctacatatatgagaacttcttcatcgacagaacccatgttctccttccccagaatgaagccttttaagcttt

SEQ ID NO: 195760 - DNA, 433 bp, Gossypium hirsutum
aaaaaaggggggaggacgcgtacgggagataataggtggtgccgtggtccattgtagcaaatacacctccgccggcgcctgcggcttctagtagcgatgattgggctggtggtgaaagagaggtctctagatcaacaaatttgttttcattaaaaaggtcgagagggaatgcttcagatcttcactctgaggacgatccggatcgtttatcttcaaaacggaggtacggctaccatactgttgtggcgacgcggtgcagagcagagggtggaggcgtttcggttgactccaggactatgaggctatcgaaggaccaacagatcaaaccggagggcacggttcagttgcagtccaattcgagaggcgcgacgagtacggagtcattaggcaaaaattagagtttgagaaaatccaagtaaaatatcttaaaatt

SEQ ID NO: 195761 - DNA, 543 bp, Gossypium hirsutum
cggacgcgtgggcaacaccaaaattacatcagggaattaattcataggccaccatgactcgctcgttcaactttctacccatgctcctcttgcttactttatcagccctgactgtccaagaaatttcagctgcaccttcctgcactgaagttgccatagaattactcccatgcctcagcttcctgtctggcaacggtgctgcagatgttccatcgcgggcatgttgtttgggtgctcaaactattgcttacgaagcacagaccaaagatgaccgacgggctatctgcgagtgccttgttaatgcattagcaaatattggcacatctgactccttcactgcgcggatacctttaattgctacccaatgcggtgttgatgtttctcttccgccaattaccagcgacaaagattattgttccaagctcttcccttgacttcgtttgatataccatcgtgttgtgccacactagggaagatattaattatatctagctcaatccatcatcctttaaatttctttaagtaatttacattgtacttagt

SEQ ID NO: 195762 - DNA, 524 bp, Gossypium hirsutum
cccacgcgtccgagcaaatttcacaaaaacaaattcaaacccaaaacctgaaatcccaatattcgcccacccatttgcaacgatcaccttgaaaatcacatatccatggagtttaattgctcatctcctaccaccatccccgtggtttcaacttttgcatctccctttgacacttctgccgctggcaatggctcagactccgcctcaaccaggaagcccatcagcctatggccaggaatgtaccattcaccagtaaccaatgctttatgggaagccaagtcccagatctttgagagactccttgacccaccaaaagatgccccccctcagagcgagttgctcaccaaaaccccttctcaaagcaggaccagcattcctttataatttatcatcagactacattttgagagaacagtacaggggatccctggaatgaagttagaattgggaagttgcttgaagaccttgatgctttagctgggactatctctgtcaagcattgttcagatgatgatagcacaaca

SEQ ID NO: 195763 - DNA, 586 bp, Gossypium hirsutum
agccttccggaaggccagtttgcaacttttttctattccctctcgaaccgtggaaaagggacccctgccttgttaaaaatcactggtttggctgttaatgggggggataaaaggttgaagccggtgggttttaagctgagtctagttgctgaaccggtcggagttcgtttaaaaatttaatgtggtaccgagtcttatccgcagcgatctgagtcgagagtcactcggctgcgaactcgacgagcctttggctgtcaagctcgcgttcaagctttatcgaatgccggacgagagcgtatcagtggaaaatccgagagacgagcttctccgtcgcgtgaaaagattggcgccgtgcgtggtaacgttagtggaacaagagattaacaccaatacggcgccgtttgcctcaagggtgggagaagcagttggatattacggagctttgtttgagtcgattgagtcgacctttgggagggagaactcagaacgagtgaaagtggaggaaggtctgttgcgcaaaattgccaactccgttgcgtgtgaagggagggaccgcgttgaaagatgcgaggtttttgggaagtgg

SEQ ID NO: 195764 - DNA, 398 bp, Gossypium hirsutum
caggacttgcatcttgattggccaacacgctttaatatttgcctatcaaccgcaagagggctagcttatcttcacgaggagtctatgccaaggattgttcatagggatgtcaaggcaagcaatattttgcttgatgcagagctttgcccaaagatatctgattttggattggcaaagcttgatgatgacaagaaaacgcacatcaccactcgcgctgctggaacaattggctacctggcaccagagtatgcgatgcgtgggcatcttacagagaaagtagatgtttttggctttggtgttcttgctttggagattataagtggtagaccaaactcatataattccgtagaaaatgacagaatttatcttctttgaatgggcgtggaccctgcatgaaa

SEQ ID NO: 195765 - DNA, 670 bp, Gossypium hirsutum
  unsure (1)..(670): unsure at all n locations
ggacactgagtatgaaggaaatgttgaggcaactggggatgacttcactgttgaaccagcagagagcaggatctttccgtgctctccttgatgtcggtcttgtccgaacgaccaccggtaaccatgttttaggtgttctcaagggagctttggatggtggagttgatattccgcacagtgagaagagatttgctggatttaacaaggacagtaagcaacttgaccccgaagttcaccggaaatacacttatggtggtcatgttgccgcatacatgaagaatttgatggaagatgagccagagaagtaccagtctcacttcagcgagtacataaagagaggcattgagcctggcagcattgagggaatgtacaaaaaggttcatgctgctattcgtgcagatcctgaagcaaagaaatccaagaaggaacctccaaaggagcataagaggtacaatctgaagaagctgtctcatgaagaaaggaaggctgagttgatcgataggttgaaagctctgaattcanctgctggagttgacaatgattccgatgaggatgatgattaggttgctgaagtaaatgaagtgaactctccaccttacgattttgggagttgtcttgccccctttcctttggtttttggtgctgaaatttgccttgaaaacccnaattg

SEQ ID NO: 195766 - DNA, 750 bp, Gossypium hirsutum
gaaggtcaaaaaaatttctgaaatgaatttggaccctccaaaagctgtaggaaatggccgtgtggctagttcaagtaattctaatagtcccacactttgtcttgcaaatggaggttcctctggcaatgatttttctttcccaccaggaggcctgccatcattgcgtttgcctgtggtaacaagtcaggaaaccaacctagtagctagatgtcgaagagtatatgcccatgctcatgattatcacatcaattccatttcaaataacagtgacggcgaaacttttatatcagccgatgatctgcgtataaatctttggaacttggaaatcagcaatcaaagtttcaatattgtcgatgtaaagcctgcaaacatggaggatctaaccgaggttataacatcagcagagtttcaccctacccactgtaatatgctagcatatagtagttcaaagggctcaattcgcctcattgatttgcggcaatcagctttgtgtgattctcatgccaaattgtttgaagaaccggaggcacctggttctagatcattttttacggagataattgcctcaatctcagacattaaatttgcaaaggacggaagatatattcttagccgtgattatatgactcttaagttgtgggatatcaatatggattctggtccagttgcaacattccaggttcatgaatatttacgacctaagctttgtgatttgtatgaaaatgattcgatctttgacaaatttgaatc

SEQ ID NO: 195767 - DNA, 656 bp, Gossypium hirsutum
gctgaaatcaaggggcatcgtcgaacctatattggtgctatgcctggaaagatggggcagtgcctgaaaaatgtggggacagcaaaccctcttgttctaattgatgagatcgacaagctggggaggggacatgctggcgatcccgcaagtgcgttgcttgaactccttgatcctgagcaaaatgctaactttttggaccactatcttgatgtgccaattgacctatcaaaggttttgtttgtttgtactgctaatgttgtggacaacataccaaaccctctcttggacagaatggaggtcattgctattgctggttacatcgctgatgagaaaatgcacattgctagagattaccttgagaaaactgcacaagaaacatgcggtgtcaaacctgaacaggttgaggtaactgatgcagctcttcttggcttaatagaaaattactgccgagaagcaggagttaggaaccttcaaaagcacatagagaagatctatcgtaagattgctcttcgacttgtgagagaaggatcatccaatgaatttgtcattagtggagaggtagtccaacctgctgaagccaaagcagaagttgatgaaactgatcagcatgcagctccaaatgagactgctactgaatcctcagttcagacaagtga

SEQ ID NO: 195768 - DNA, 401 bp, Gossypium hirsutum
gtaaaagccaaaccaacaaatctgcgaccagccgcctgatcgtcagacccccagacctaccgccggccgaggagctcatcttgagtgtcgcttcttctcctccgacgtctttggaactggaacttgttaacctttaacaataaagacgaagagagagatgccaaacttgtctaaggaaatagaaaaacatgacactaactctgggcatcatccgagagaagatagtgaatacgttaggctggttatttctaatgaacctactgcagctggagtggacatcttacaacctcaaccacccacaaggagtgaaacttttagctggtggatcaaagccttcatcttctgcatttttgcaggtatattgattcttgtttttttgaaatggggagttccggttcttt

SEQ ID NO: 195769 - DNA, 558 bp, Gossypium hirsutum
tatatacacatagagagtgaaaaaacacaagaacaaagggcatcatcatcatgaagaaggcatcctatacggcggcattctcagcggcagcagtggtggtcctcctcctactggccgaagcaaaggtgtcaatggctgtaacatgtagcccaacacagctaagctcatgtgtgagtgccataacatcatcatccccaccatcaaagttatgttgcagtaagatcaaagagcaaaagccttgcctttgccaatatctgaagaaccctaatctcaagaaattcattaataccccaaatgcaaggaaagttgctagcacttgtggtactcccttccctaaatgctaaaagaaaagactcaagttgtgttgtgctataatatctctgttttggtgtttgtagtgaaaaaaaaactgtggtttagtcatatgttggggggttaaagtgatggggcaccaatgtgtgtcactggtgttttatgtgtgtgtgaaatctatatcatgtactactagttgttgaagaagtaatttatttaatggaaatcagtgttggattattagat

SEQ ID NO: 195770 - DNA, 1315 bp, Gossypium hirsutum
cccacgcgtccggagctaccaaggacaatgaatattctgatcttttctatgctatcccatggtctgaaggaactcttggatttcttgttgctgccgaaatcaagcttatacctgttaaagaatacatgagactgacatacacgcctgtagtggggaatttgcaggaccttgctcaaggttatatggactcttttgcacccagagatggtgatcaggataatccacagaaagttcccgattttgtagaaggcatggtctactcacccactgaaggtgtgttcatgactgggagatatgcctctaaagaagaggccaagaagaaggggaataaaattaacaatgtaggttggtggtttaaaccctggttctaccaacatgcgcaaacggccttaaagaagggagagtttgtagagtacattcctacaagagaatattaccacaggcacacaagatgtttgtattgggaggggaagcttatacttccattcggagatcaatggtggtttaggtttcttttgggctggttgatgccacccaaggtttccttgctcaaggctactcaaggtgaatctataagaaactattaccatgagatgcatgtcattcaagacatgcttgttcctctttacaaggttggggatgcccttgagtgggtccaccatgagatggagatctatcccatttggctctgcccgcaccgactgttcaagcttcctgtcaagacaatggtgtatcctgaaccaggctttgagcagcatcgcagacaaggcgacacaccatacgctcagatgttcaccgatgttggggtgtattatgctccaggccctgtattgaggggtgaagtatttgatggtgctgaggcagttcgtaaaatggagcaatggctgatcaaaaaccatagttttcagccacagtatgcagtgtcggagctgaacgagaaggatttctggaggatgttcgatgctgacctgtatgagcatgtgcgtaggaagtacggagctgtgggaacattcatgagtgtgtactacaaatccaagaaaggaaggaagaccgaaaaagaggtccaagaagcggagcaagcccaccttgaaactgcctatgcagaggctgattagtgagcatgggggagtttggtagattttatgtgagaggaatctttgcattctctttgttgtctctttaatttagtatttgctttcagcgatggtattatggggggtcggaactgatgttatgggataggtttaagcagtgaatgttgtgggatgatttatggctttagtttagctattatggatagacttatgataacgag

SEQ ID NO: 195771 - DNA, 510 bp, Gossypium hirsutum
  unsure (1)..(510): unsure at all n locations
gaccggccggaancccggggcgacnacgcgtccgtgctgccatctgggatgaaggatttgtttatcttgtttcgttggagagtgatgttgttattcctacgtgtgagggagacatggctaaggttgttgaaggccatcgcagatttctggggtacaagcagacaatattattggaccgaaggcttttggttgatctgatagaccagtacaatagtggatccctaagttggaatgagttctcaaatgccgggaaggaatctcacaaatatcgcaaggggcaaccaacacaaagatcggtgttccccgaccggcctaaagaagaggattacttctatgccaacccagaagaatgcttgaaaccatcatcatatggtcaagtgagtagcacgtgatctttctatctggggattgtcacgaatattggtgtttttnctttttctagcgtgctaggcatcatacctaaaaccttaagtagtttccctgcacaagtatgactacaatgaaggtttt

SEQ ID NO: 195772 - DNA, 746 bp, Gossypium hirsutum
cttttaaacccctccctattttctctgctagggttttgacctagccttggggcgtcgttgccatcccgccgctcctccgccgtggacgatggtcggagcggcacagaacgggcttttcagccctgttacatgtttaaaggctaagccttctcagcccacggatcgagagaaaaatgtctctctcttccctcttttgggttcgattttagggacggtgagaaggactcggacgacacaaccacggaggattttaggtaagttgtccgcttcatcctcttcgtatggggcgcccctttttttattaagtagatttataataaaaaataaaaagaaactggaaaacgaaaagaaaacaagtaaagaaaatcaaaatcaatattttcaaacttctgttttgcttttttgaattactagtgtgtgtaaaaaattatagagggatttatttcggcttttatagccgagttacacagatccatttttttcttttgcttgttgtctgctactgtttgcgtgtgggttcttatttgcaagtgtcagagggatcagatacacgtgaaggccggtgatagcgtgagggaaaagccctgctgacgtgcggcgcgcatggggcagagtggcggctgaaggcagaggtggctagggttcttttgctctctgaaaatgttaagagtgggctagggttgatttgttttgggctttgtaattgggttttaattgggtttgggtagttttgatttgggctatgc

SEQ ID NO: 195773 - DNA, 757 bp, Gossypium hirsutum
ccgagagagacggatagatgttttatttttcttattgcaatgcgacggaccgtagggcaagccttgggtgaggggagattcgcggggtcatttggtccactctcttctcgccggcgtagcccacgcgccgtcgtctcctgctctcgctccaacctgacgcctattcaagctgttctgtcgtgtcagcaacaggtcgggtcagatccggtggaatctgaattggagagtttacgctgaccaactcctgttttgacgcttgactcttaatggggggtgggatttactttacgcttttagttggcacgggggctcgggattaacaaaactgccactattgaaaccattgctaatctcttgcaggaggttggaggtaaccatgctcaaaatgttggattttcaagagatgggtttgctaccagtcccactatgcgaaaattgcatctcatatgggtgaccgcacgcatgcagagtcgaagtatacaagtaccctgcttggagtgacgtgatcgaaatagaaacgtggtgccaaaacgagggaagaatcggaaccagaagggattggatcctgaaggatgtcgctactggtgaagttataggaagagctacaagcaagtgggtgatgatgaacgaggacacgagacggttgcagaaagttagcgatgatgtcaaagaagaatatctggccttctgtcaacaagaacctcaattaccgtttccggaggagaacattagaagttggaaaaaaatttttaaataa

SEQ ID NO: 195774 - DNA, 538 bp, Gossypium hirsutum
  unsure (1)..(538): unsure at all n locations
cccacgcgtccggtttaatcagtattatagattgttcatccagagatctaagcttattagcttaagctataaaaatggtgaaaagatcgttgggctttttctttcttctcctcattgtcttagcctcccaatggggggtgcagccaactgaggcaagggtttgccagtcacaaagccataagttccacggtgcatgtgtgagtagccacaactgtgcgatggtgtgcagggacgaaggtttctccggcggcagatgtcgaggattccgtcgccgctgcttctgcactaagctttgctaatgcaagcttgcccttagctcatattttaaggatttttcttgagtaaaagacctttatgtttttcgtgcatgcatgtcaatgtttcaataaggtatctcctaattacttctgttttgggagatcattttcgtctctttttcatgcctttaagggggttctctttgtgttctttgctgtactcgaactgcatttgcagctactttttcatctataagctccatcaaaatctgtttatcana

SEQ ID NO: 195775 - DNA, 633 bp, Gossypium hirsutum
gtttggtttttccttacttttgtactcttttttttttttgttttttttttgttgggagaagggtttcttggatgctcagtttttgcagcttcaacagcttcaagatgagagcaacccagattttgttgttgaagttgtgtctcttttctttgatgattcagaggaacgttcttaatgatctcaccgatggctttagatcagccaaatgtagatttcaaaaaagttgatgctcatgttcatcaattgaagggtagcagttccagcattggtgcacagagagttaaaaatgcttgcattgcttttcgtagcttctgcgaggagcagaacatcgatgcgacactgagatgtcttcaacaagtgaaacaagagtattaccttgtgaagaacaagcttgaaactatgctcaggttagagcagcaaatcgtggcggctggtgggtcgattcccatgattgaactgggtttttgaagaccataaacatgaaggggggaaaagcatgattttgggggtggtttatacaataggaacatatggtgtttaaggtttctcttttttatttaatcttaccagtgagtttgtggttgtttgatgttcatgaaagaagagatttcatactagtttcactccccataa

SEQ ID NO: 195776 - DNA, 493 bp, Gossypium hirsutum
cccacgcgtccgatttcatttcatccctaaacatctaaatttaagccacaagctttgaggttttgaccttttgttgggtcattagctttgattagtgggaaaagttccttgtatgtgcagtgagaacaaaggctaaagagaatggaagtgggtcagatgcagagaagattggtggactacacaaaatccttgtttatggagggtttcttggatgctcagtttttgcagcttcaacagcttcaagatgagagcaacccagattttgttgttgaagttgtgtctcttttctttgatgattcagagaaacttcttaatgatctcaccatggctttagatcagccaagtgtagatttcaaaaaagttgatgctcatgttcatcaattgaagggtagcagttccagcattggtgcacagagagttaaaaatgcttgcattgcttttcgtagcttctgcgaggagcagaacatcgatgcgacactgagatgtcttcaac

SEQ ID NO: 195777 - DNA, 787 bp, Gossypium hirsutum
gagagctacttgcgggcacccccgcaaaacgtcaggctgtgacctatccaaccaacacagtttttggaaccaagcgtctaatcggtagaagatatgaagatcctcagacgaaaaaggaaatgggaatggttccttttcaagattgtcaaggctcccaatggagatgcgtgggttgaagcaaatgggcagcaatattctcctagtcaaattggggcatttattttgaccaaaatgaaagaggctgctgaggcttggctgggggagggtgtttctaaagcagttatcactgttccagcttatttcaatgatgcccagaggcaagcaactaaggatgctggtagaattgcaggccttgatgttgagagaataatcaatgagcctactgctgctgccctttcatatggaatgaacaacaaggagggtctcattgcagtctttgatcttggtggcggtacatttgatatctcaattttggagatttcaaatggtgtctttgaggtcaaagcaacaaatggtgatactttcttgggaggagaggattttgacaatgcattgctggatttcttggtgagtgaattcaagaggaccgagggaattgatctttcgaaggataggctcgcacttcagaggcttcgggaagctgctgagaaagctaaaattgaactctcatcaacatcgcagactgaaattaatcttccatttataacagctgatgcttctggggcaaaacacttgaatatcacattgaccagatcaaagtttgaatctttagtaaatcacttgattg

SEQ ID NO: 195778 - DNA, 867 bp, Gossypium hirsutum
gcttcatctcctttcccagaatctattacaggagcaaaaagaagaaatcagagaaaggttaaagagaaacagaaacagagaatttgcactaataatttgggcgaacaatacaatacaaaacaaaacctattttttgttcttctctgggatgataccatttcttcactacatggagaaagaagagaggagcctcagaacatgcggaacaagacagccggagttgtttttacagtgggggaatagaaagaggctaagatgtgtgagagttaaagaccctcaaaaaatctctcataaatccaatgctataattcgtagaagaatcacttctcggcttttacataaagaatcctctcctttttctcaattcaatcctcgtctcactaggaattcacaagcatctattctgcggtcgcatcaccggaaagcggcttcaccagagaaggaagacacgtactacgccaccaagacggtctgcagtgggattggtggatgagaatgggaagattgcagtggatagcaataatggagaggataacacacgggtagcgtggccaaagctgtttatcgcattgtccggcccacaaaaggaggaggattttatggcgatgaaaggggtgtaatcccccctcccaggccttacaaagagacccccagattatccgaaggagcttacttctggtgagccctggggcatggttgactgatatgtgccaagaaagatatgaagttagggaaaagaagagttctaagaagagaccaagaggattgaaggccatgggaaatatgaaaagtgattctgattgaagatacatcaatggcagcagcagggcctttttcttttctgatattttttgggggaatattttt

SEQ ID NO: 195779 - DNA, 415 bp, Gossypium hirsutum
cccacgcgtccgcaattgtaggatgggttgctgttcttctcggggttttctcgaggcttccttttgtggtcatggggtttgtgtcgattccaaaattaaagcctgcaagatggcttgtggtaaacatgcatcatgtggattggaatttatatttgaacacgctcttttggaatctaaactattgggactctataagtactcttgctggagaggtagagaacccaaaaaaaactctcccaaaagcattgttttacgctttgatcttagtggtggttgggtatttctttccgcttttagttggcacgggggctcttccccttgatcgtgagctgtggactgatggttatttctcggacatagctaaattgctgggtggagtttggttgagatggtggatccaagcagctgcagcaat

SEQ ID NO: 195780 - DNA, 750 bp, Gossypium hirsutum
  unsure (1)..(750): unsure at all n locations
cctcacaaggattgcctgtacctagaaatgttttaattcctcgtactaagggttttgggtcggccgtaagtcatatgcgttcatttgttccagctatttatgatatgacagtggctattcctaaaagctcaccttcacctacaatgcttagactgttcaagggacaatcttctgtggtgcatgtgcatgtcaagcggcgtcttatgaaggaacttcctgaaacagatgaggatgttgcacaatggtgtaaagatctttttgtggagaaagacaagttgttggacaagcatatagctgaggacactttcagtgaccaaccattgcaggatatcggtcggcctattaaatctcttctggttgttgcttcttgggcatgtcttgtggcttatggagcttataattttctgcaatggtcttcacttttatcatcatggaaagggattgcattgtcagcagttgggttggctattgttaccatactcatgcaaatcatgatcctattctcacagtctgagcgttcaactcctgctaaggttgcacctgggaagcccaagaacaacagtgagagttcagaggcaagacgagacaagcagcagtaggtcgagcttttcctcacaggaaagttggtctggagccatattttcataaccctaaaatgtgtactctgtatcactttcacttancaatcagtatgttttcgttttaaacatactatcaggtttcaatcctatctgcatgcctattggtcac

SEQ ID NO: 195781 - DNA, 463 bp, Gossypium hirsutum
ctgatgttcttgacagttcgcatagttttaagtgtttcttagtagcctctgtgaagaacccaatcaaggaaaaaacaaaaaacccaactccaaatctgttcagagagagaaaacactagagacaaacaaacaagctcttatcaatgggggaggaagagaagaaacctgcagacgagaagaaaacggaagagcaagtatctgaaaaagatggaaagaaaggagatgaagaggaagtaaagcaggctgagaagccagttgaggaaaagaaagctgaagaatccaaggaagaaacgccgccgcctcctccgcaagagattatcttgaaggtttacatgcattgtgaagggtgtgcacggaaagttcgccggtgcctcaagggctttcaaggggtcgaagatgtaatgactgattacaagagtaataaagttgtggtgaaaggagagaaaactgatcctttgaaagg

SEQ ID NO: 195782 - DNA, 642 bp, Gossypium hirsutum
gtttcaattatgaaaattcatttattacttaccctttttctagttctatttgcttctttcctttcttcatctaattgctatactttctatgtggactgggttttgcaccctaaagagaagtacaatgagtgggctggtaaaatgaggtttcaagtgaatgacactatcatttttaaatatgaaaaaggatcagactcggttctcttggttcaaaaagatgattatgataagtgtgaaaggaaggaacccttgatggaaatgaacaatggaagctccgagtttaagtatcctcattccggtccattttatttcattagtgggaaagaggggcattgccaaaagggtcagaaaatgatcactgttgttatggctgtgagacatgggactccatccattcatccacccacagcaccctctcccaagcaccatggccctgttactccagggccggcgcactccccttatcaccatggtccagttgcaaagccacccacaggatcatctccggttcctgctctggctcctggtcctattgcaaagccacccacaggatcatctccggttcctgctctggctcttggtcctattgcaaagcctcctacagcattaactccaggtccagcacagtctccttatcaccat

SEQ ID NO: 195783 - DNA, 399 bp, Gossypium hirsutum
aaacatcttagggtgatcatagagagagaggagagatatggcggctgtttggagagttggggttgctgtggatttctctccaagcagcaagaatgcgttgaaatgggctgtggataacattatgcggaaaggggattatcttatccttgttgccgttcaacctgaaggtcattatgaggaaggcgagatgcagctttgggcaatcagcggtggttcaccacttatccctttaagtgagttttctgatcctgctaccatgaagaaatatggagtaaagcctgacccagaaactctggatattgctaacactgctgctaagcaaaaagaagtcatggtggtgatgaagatatactggggtgatccacgtgagaagttatgcgaggccattgatagcatccc

SEQ ID NO: 195784 - DNA, 383 bp, Gossypium hirsutum
  unsure (1)..(383): unsure at all n locations
cccacgcgtccgcccacgcgtccgttcctctgaaagcccttcttgctttaatctgcttcggtggggggttgggttggtttacacagaaaaagatctacagaagaagagttgaagagtgtggtttttatttccaggacttggatctgatggggatttgcttaggtgccagacttaatgagagtccatgcaacacagggctgagttcgaagtatgtttgcagtgatgggaaagatacgagtagtacaagcagcaaagcttcatcattttcagcacctttgactccccgaagtgagggtgagatcttacagtcccccaatttgaagtgtttcagtttcgcctatctcanaatggccactaggaattttcgtcctgacagtgtgctc

SEQ ID NO: 195785 - DNA, 415 bp, Gossypium hirsutum
aattcatcgtctgtgcctgctcgatattggtcctttgttgacagatccgagactacatccatgttatggacttagctgatggccatactgctgcacttaggaaactttttaccacagagagtataggttgtgttgcctacaacttgggaactggatgtggtacatctgtgctcgaaatggttgcagctttcgaaaaagcttccagaaagaaaatccccattaaactatgcccaagaagacctggagatgctactgccgtttatgcttctaccgagaaagctcaaagggaacttggttggaagtatgcctatgattcgcatctctttcctagtgcattgttttattggaattacatggatcctctgttacatattcctattatatatccttacctatgatagtcgattgatatctg

SEQ ID NO: 195786 - DNA, 448 bp, Gossypium hirsutum
cccacgcgtccgtcatgattatccaaccaaggatggcagcgccatcccagactacatccatgttatggacttagctgatggccatactgcggcacttaggaaactttgtaccacagagagtataggttgtgttgcctacaacttgggaactggatgtggtacatctgtcctcgaaatggttgcagctttcgaaaaagcttccggaaagaaaatccccattaaactatgcccaagaagacctggagatgctactgccgtttatgcttctaccgagaaagctcaaagcgaacttggttggaaggcaaaatatggtgtagctgagatgtgtagggatcaatggaagtgggcgagcagcaatccatggggataccagtcaaaaaagccttaaaagctttgcttaagattttctcatgttacaccaacatcaacagcatgtttaagcaaaagt

SEQ ID NO: 195787 - DNA, 462 bp, Gossypium hirsutum
ctttcttttatatatatatttatcttctccattaatccatctccgttggattcaggagaatcttttgtacgccataatcgaagctctatctctcgagtcttcaatcatgagtttcttcaaaagctaattcacgttattcttatttcattcatttatttttcttctttgaatccgctctctgaggagagaaaagagaggggagggaaatgacatcggggttctccgggggtggcacagagttttacggtagaatagcaggcggatccgtctctaacagtggctccatgagcaacaaccaacccaccgcaccgtacgggacacatggaatcttcatggaccctacgtctcagatcgtgaacagggccgcacccggtttcgtcggcaagcgaacacgagctgacttcaataaccacggcctcaataatctttatccccgtccagttaagcccaaaaattaccagc

SEQ ID NO: 195788 - DNA, 496 bp, Gossypium hirsutum
gtcaaacaaagatatttcgacagtgctggttggcatgaactcggttaaacaggttggggttgatcatttgaactttatgaaatctattttatgcctgataatagaattttgttactaaatcttcatacctgtcaaaacatgtttgcattttttttcacgagcttgctgcttcggctgttaataatgccggggttgtaaataactaggttgaagagaatgttgccgctgcaacagaacttgcactgtgcgggaaagatcatgaaactctagctgaggtggaagcaatcctgaagccagtgaagaatcagacatggccgagcggaattcaacgaagctgagcaacaatatcgacccgtatttttattattgtatgcatatattctcccacatggaatgggggcaaccattctgttgttatgatactagtatttagatgacataaattttcgtccctgtccaagtaaacttgctactgtccgataacgagtatgattga

SEQ ID NO: 195789 - DNA, 469 bp, Gossypium hirsutum
cgacgttctcgataaagggatgtatttttatactccattgtagaaaatgcttgattgtggttataaagctcagtatatgagtgggcggagggagaaatttgtcaggttggatgacttggactctagatgtatcatcatcctctgatacaggattgaaaaaatgtgggtttaacattgatggattaggtcgctctggccatgcaaacaatacaacatcaagatctttcaagagagggatcagaaagggatctgaagggcttaagtcaattggtcgctcccttggatttggggtttcacgagttgtatttccagaggatcttaaagtttcagagaagaagatttctgatcctcaggataaattcctcttgctatgcaacaaattatttttcatatcttgtattctggcagtatcagtggaccctctatttttttatcttccagttattaacgatttgcaaaagtgtctaaa

SEQ ID NO: 195790 - DNA, 520 bp, Gossypium hirsutum
tttccaaagcttccaaatggttttaaacaagactcttaggttaagccttcaggggcgtcgatccaagtcttttagctcctccaccttcacctctcctgcttcatcaccttcctctccttgtgaaagacccaaaaggcctcaccaagtggacgagatgaaacaagggttgcgctatttcgatggcgatgatgatgggaaaatctcggctctcgaacttagggcatgcttcggctccatcggggagtacatgtcacatgaagatgctcaaatggtgatcaacgaactagattccgacggggatagcatgttggactatgaagatttcttggagctaatgaaaatagaaaagcgggatgatgatgatgatgatgatgacctgaagaaagcgttcgagatgttctagttggagaaaggttcgggttgcataactcccaaagggttgcaaaagatgttgaatcgccttggggatgcaaagtcttatgatgaatgtgtcgctatgattcacgtttatgatattgat

SEQ ID NO: 195791 - DNA, 456 bp, Gossypium hirsutum
cccacgcgtccggataattgtgacacgaaccgagatcgatatgcagtatataaaagccgggtgccccgggaaatataaaaagaccttgaacgatgcagttcactcagacacatcgggccactacaggacttttcttctctctcttttgggaccaaacaattagacatcgtaagtgtagttgtgtgtgtaaatatgttataatgatgtttcagtgaatccagttcctttcgtatcggattggtgtattcgtggcagattggtagaatcgaaagtgattgcatagctgattaggtgaaccatgttaaagctctttaaactgcagttgtgtgaatgtgagagagaatgcgagagagaatgcatgtagttgggaggcttttcccctctggtcacaagtaatgtgccattaacataaattatgttaaatttgaaataaataataaatttctccttggtttt

SEQ ID NO: 195792 - DNA, 409 bp, Gossypium hirsutum
cattagcatatggtttggttggagtccaagtctcggagagtgaggaggatgaggtgatccatcatgctgatagcctcggatatgaatatgtactggtaaatgatgacgagatctttcaacttttgatgcactagttagatttaattcccaaggggccagggtgaggctcagttcacatcttacagaaagccatgaagccgatggaaaggggctttccaatcctcttaatcgccagtggaatagccaggtcatgtggttattctcattcattttttgtaatatatgggtttgggtactgctgccttggtagattactaggtttcttgctatgtactatcacacatgcatatatatgtgtttgatgctttgaatcacttaataatctatcttggtaccgttgctccaatat

SEQ ID NO: 195793 - DNA, 784 bp, Gossypium hirsutum
ttgctgagcatgatgtcatagatcttgctacattaacagcatatgtgagctatgctcgcaagaatattcacccaaaattatctgatgaagctgctgaagagctaacccgaggatatgttgaaatgaggaaaagaggaaatttcccaggcagcagtaaaaaggtcatcacagcaacaccaaggcaaattgagagtctgatacgccttagtgaagccttggctcgtattcgattctcggaaacagttgaaatgcgagatgtaactgaggcattccggcttttggaggttgctatgcagcaatcagcaactgatcactccacaggaactattgatatggatcttatcaccactggagtttctgcaagtgaaaggatgaggagggagagtgtgttatcagcaacacgcaacataataatggataagctacaacttgggggaccatcaatgcgattgctagagttactagatgaaatgaagaagcaaaactctggcagtgaaattcaccttcatgatctaagaactgcagttgcaactctagccagtgagggatttgttgttcttcatggtgacagcgtgaagagaatgtgaaaatgtgaaagctacgaaaaagaccgagactatcagagccgagcgaaatagcccgccaacgtgctaaccactggaaatgctgccttgtgacttccgagataccctctgcaaaagacatttactcttaaggtatcccttagcctgtggtggacttaaagaagagaattgagtgttaggtatgtcatttaattagttga

SEQ ID NO: 195794 - DNA, 479 bp, Gossypium hirsutum
tccttgagctagcctggataaacaatatgagtgagtttgcattcccgtatctattacagtttatccgagaatacactggcaaagttgatgaacttatcaaggacaagattgaggctcaaaaggaagtaaaggctaaagagcaggaagagaaggacgtgatcgcacaacagaacatgtatgcacagttgctacctcttgccttgcccgcaccgccagtgccaggcatgggaggttttgctccatcaccaccaccaccacccatgggaggaatgggaatgcctccaatgccagctttcggcatgccaccaatgggcagctattaagtcgtaacaggtctgttcaattgaaacattttaggttacctagtggatcaatggggctctatatagctgcaatttcgaggctttcattctttttcccctctttctttttcatttgtctgatgagtgaagatcaaaatttggaataatgccattttt

SEQ ID NO: 195795 - DNA, 485 bp, Gossypium hirsutum
cttcaactctgagataaaactgtttatttgctttgatatgtctctgcttggtgtggttttcctttcatatattaacttgttacggtttgtctagattaaccacaaccaacagcagaagagccgacattgctcctttgtaccttgactaaacacccaaggcactgtcgaaaaatgtggctgatgttctccccacttggctgacacctccaacatagatcttcaacagcaactcttttcagcttgagattcaaaaaattgggaataaaatccccaataaaatctttcacattgttaatttttatttttcgatggcaatgttcatggtccatagttttttgtaaaaagctgtagtatcggcctgtatatgattactaggattaagagtagactcctgtaataatttataggcactcctcactgagaagttacctgatggttctcccctccaaacttgaaaatcgtcgttgggtggattttgccaaggg

SEQ ID NO: 195796 - DNA, 526 bp, Gossypium hirsutum
  unsure (1)..(526): unsure at all n locations
gtgtatcgtatcctctttttttcttcaaatatggatatacaattctgaagaagtactcttttactgtggctactatctttaccggcatggcagctgctactctgtggggccatactttgaccatgaacttcatcctaggaatttcaactgtgttcatctcaatgcaccagttcttttcgccgctttccaaagtcaaagaagaacaagagaatggaatgctcgaaccggtagattataaggaaaaccacaggtccaaggaatctttcattaatatagcagcaggagcacatgaagaggctagtcatcgtgttggatccgacgagagacaaccacttcttccaacttaaagttttagggaggagggaatttgttttggtagggacccacgtattgttggatagtgacagagataaaccagttttcgctcgagacgttaaatggaattgaaagaaatttgtgaaatgagaaacccttaaagtgtagtcatttgttataattttcgntcatgggtctgaatggatgcttg

SEQ ID NO: 195797 - DNA, 579 bp, Gossypium hirsutum
ccacgatggcttttcatgaagaatgagatagataaagccatagctgtgctttctagaatggatgacattgctcggttagaagatgaagtggatcacctttctgctgcactagaagaagaacagcagagaaagaatactgtcagatatttggatgtttttagaacaaaaaaattagacttgcttttctggctggggcaggactgcaggcttttcagcagttcactggcatcaatacagttatgtactatagcccaacaatcgtccagatggctggcttcaattccaatcagctagcacttctgctgtctctcattgtcgctgccatgaatgcaggaggaactgttgtcggcatttaccttatcgatcatttcggaaggaaaaagctggctctttcaagcttatccggtgtcatcgtgtcccttgtcatccttgctggggctttctttgctgaaacacctggttcttctaatggaatttatggatggctggcagtcattggattagccctctacattgcattcttcgcacctgggatggggcctgttccatggactgtgaactcagagatataccctgagc

SEQ ID NO: 195798 - DNA, 1020 bp, Gossypium hirsutum
  unsure (1)..(1020): unsure at all n locations
gttattgtgatttttgaaattcgctgcttcaacgggggcgtcatttcagttaacaggtgatatacatgatgaagtggagagtcataatcgtatgcttgaccggatgggcaatggcatggatgctacaaggggcataatgtctggcaccatggatcggttcaagaaggtgttcgagaagaagtccaacaggaaaataatggggcaggagtatttgctcatgtattaaaggattgctcgcagcagtggtggtcaacagcttggccgacgaacttaaccactccatccaatcatctcaattttaaggaatggatggcgtggaacttagctccaaaagcctggcatcatgttcacaaagtgccatggaaagtctttttctcctttattatttggcaaatcttgcttgccttaaaatgcaagaatcttcaaaaaccacaatgaccacagtcgagtggtccagccaactccgagcaaggctgtggaatttttgccatgtctggacccatgttaacatttaatcctataccctcgtacataatatttttgttattgttgttctcataaggggtctttacatcctttcagaaagattattatgtatgagaagtggatgtctacattcattcactttgaaaacttctaaacttgtcctaccaatatcttaaaacttattggatttgtttgtattttcagtaaacttttatggttttatcctggaaaatatcattcccaaatattttatcatattaatgttnttgaaccttacataatnntttagatggaccctgagttggttctttgtgctaatgatgcagtaacttacggaagcacaaacttcaaatatcatgtgaattcgtatattaccaaatctcgtgtaattggcatgataatgctccattgtaattcttttttttgaccacgtatatttggcgtacaatttcttggcatgcgattttaattggttgcggtttgaagattgttgaacatgtccaaatttaatgttctaagttggaggagctaatt

SEQ ID NO: 195799 - DNA, 760 bp, Gossypium hirsutum
tcgttcttatctacaatctacatcccgagtactaaagctcaagcaagaagcgagctttgcacctgcaggaaaacagccacaaagataaagctgaattccaagaagcaaagatgttgagcgtctcaattgcgtccccagctaccttaactctccctccaaaacccaaatcctcaattcccaaaacttccttcaccggcgttagaatccagcacttatgtccccaacggttgccttctcaggcgacctgcttttggcaaccgtcaccttcgtcctccgtggtcatgatggctaagagagaagaagaaatgaaggaaataagagccaaaaccactgaggaaatcaacgatgaagtggttgaattaaaaggtgagcttttgatgcttcgtctccagaaatcggttcgtaatgagttcaagtctagcgagtttgggcgaatgcgcaaaaggattgctcgcatgcttactgttaaacgggaaagagagctcgaagagggcatcaacaagcgattgtcaagaaagctcgatcggcaatggaagaaaagcattgttgtgaaaccacctccatctttgatcaagttgagagagcaagaggcagcagaagaagctgagaaatcggctgcttgagtgatccagtgtttgatactttcacattttcatggctttgtgaagtgctcttttaagttgttgcagtttctatttcagacccattttgtgcataatgttttggtgttgaagttaaagctaggattccttcaatgttt

SEQ ID NO: 195800 - DNA, 676 bp, Gossypium hirsutum
  unsure (1)..(676): unsure at all n locations
cggacgcgtgggcggacgcgtgggttgtgtttgttctggcagcaacaaacctcccctgggaattggatgctgccatgctccgtcgtcttgagaagcgaatccttgttcctctcccagagccagaagcaagaaaagcgatgtttgaagagcttctgccccaacagcatggtgaggaggctcttccttatgatatattagtggaaagatcagaaggttactcaggttcagatattcgattactttgcaaagaagcagccatgcagcctttgagacgcctaatggctgtccttgaggataaccaggatgttgtgccggtggctgagctgccgaatgttgggccagttacgtctgatgatatagaaactgctttgaggaacaccagaccgtcggcacatttacatgctcatcgctacgagaagttcaatgcagactatggcagtcaaatactccgatgatggcatgcttctgcaaatatacttttaagttgttagttataacttccccagattttatattcatcagaattctattcagtttttactttgcattgtgtctgtttatggaaacttgtatatctatgttttttttttcaaaaaaaangaaaaattaaaaattattaataattataatttaaaatttttataaattttattttttatatttttttttgggtttt

SEQ ID NO: 195801 - DNA, 514 bp, Gossypium hirsutum
ttttaaaattcaatccgggtgcccgcaccttcttccttctggatcggttgcgctgtggatcctcccttcctttaccaggtatgccccttccctcctctttagtgcttctttcgctaaattaagggcttcaacattctccgctctgtgaataaactggaaactcacctctggaaggctggttcttttgctctgaatatctcgaataattgctccaagaactgatttgtctatttcttgcgattgacatttcttaataactgttttcgagtctcattgtattactactgaggataaacccattgatattactaatttgatagcctctaaccctgcatgagcttctgctacgaacaaagaagagatgttttcatggagagtcgacttttcagctgctacctcgcccctttggtcacaaacaattaaacccgaggccgatctaaaatttcgtttgtcaaggctgtatcaaactggaccgttacacttgttgtctcccctgcttggttatggatacttt

SEQ ID NO: 195802 - DNA, 442 bp, Gossypium hirsutum
ggcgtggcttcgcttctcccctgtttttcacagtcaacgctgcctcccaaaacgaaatcgctgtctcatttcacgatccaaagtttccaaattcctctccgggttttgctcttcaccacttaagtctcaaatggttcgtaggccaaacgacccggaacactcccgtttcgcctctctcgtcctcctcttggtggctctgttctcctgtcttctggtctatgcggttgtttccacactattgaaccccaccgtaaatcctcaggattccagctttgagtctttggaatcggtggcgggtattgattttggggaaaagaagggcgagtgttgcagaggcattgagaatttggagctgtggggtgcagctgtgaagtgggggtctgacttcaagtttaattcctctgtggaatgttgccaggcttgtaaggccatgtgtagtggc

SEQ ID NO: 195803 - DNA, 687 bp, Gossypium hirsutum
ggaaacccggcccgacccacgcgtccgcccacgcgtccgcccactcgtcctttcactcttccgcccacgcgtccgcccacgcgtccgtgagaaaaacatctacaggcagattgaaattagagtaattgagaaaaacgcaatggctcaaaagatgttgatgatggcggtccttgtgatattggggacgaagatagcgacatttacggctgcggatccgacttgtttgcagagcttgatgtcttgtgctccttacttcaacaacgccactctccaactgaaaggcgattgctgtaaccctctcagacaagccgtcgctactgaacttacttgcctttgcagcctcattaataactctactttgcttagttctttcaacatcaacatccccatcgctgcagctcttaggatcactcgtggctgcggtgtcactgatcagatgaacggctgcatccccgctactcccacccctgctccttccccatcagctacttctcccaaggctgctccactcatcaccaggaggtgaaagtggaggtgtcaacaagaaaactttgaccagaatcaccactttgttgttttttttttttaagcatctatagctctgtactatggtgacatgtttcctacatgagttgaggggtgatttcatctcataataaataataaataataaagagagcatttcga

SEQ ID NO: 195804 - DNA, 593 bp, Gossypium hirsutum
ctccgcgtccggggttttggagggtttgaaggaggaggtaaagttgaagcctttgaaggctttgttgacttggctggctgggaattactcatttcaaaacaatgagaagaaaaacgatggggttttgaagaaatgggatttcaaagattgaaacaaagggaaaattttgaggaaatgaagctgtaaagattgaagcaaataaggaaaaaacatctacaggcacagcggaattagattaattgagaaaaacgcaatggctcaaaagatgttgatgatggcggtccttgtgatattggggacgacgatggcgaccgttacggttgcaaatccgacttgtttgcagagcttgatgtcttgtgctccttacttcaacaacaccgatgtccaactgccagacgattgctgtaaccctctccaacaagccgtcgctactgaacttatttgcctttgcagcctcttcaacctgccttctttgcttagttcttttgacatcccctacgttggagctcttaggatcgccaatcagtgcggtgtcgttgatataatcagcgactgcttcagcgcttgttctttcccattaactacttctttca

SEQ ID NO: 195805 - DNA, 463 bp, Gossypium hirsutum
gcttctcacacttcaccttgaaaaagtcaaatttcccagaaaataaaaaactttccagcaaaatgtcaggaagaggaaaaggaggtaaaggtctcggaaaaggaggagccaagaggcatcgtaaggtcctaagggataacatccaaggtatcactaagccggccatccgtcgtttggctcgtcgtggaggagttaagagaatcagtggcttgatctatgaagaaaccagaggagtgttgaagattttcttggagaacgtcattcgcgatgcagtgacttacactgagcacgctagaaggaagaccgtgacggccatggatgttgtttatgctttgaaaaggcaaggccgtactctctatggatttggtggttcaagttttcggtttcttgttcgtgttatattgtactatgtaatctttgattatcatcaatggatttcgttaagaaaaatctattctcgctt

SEQ ID NO: 195806 - DNA, 749 bp, Gossypium hirsutum
  unsure (1)..(749): unsure at all n locations
aagatatccaaatcttgctatcctgaactgctccctactccgtgtcctttcatcttcaatccggaggttctctccatctcccctctggttctgctatactgtggatcatcgtttcccctcccaggtatgtgtctcccttctcactaacgctgcttttgctagattgtgggcttgaatgttctttgttttatgaataaacttgaaaatagcttcttttaccctgaatttcctgctttgtatgtcataaataatcgctccaagaaccgatttatccatttccatcctttggcatttttgaatgactgttttcaaatccccttctatcgttgcttttgttaaccccatttctattactaacttcatggcgtctaatcctgcgagggcttttgctacgaacggggtgggaatatcctcatgtataactggctttgaggctttttaatctcccatctggtctcaaacgactatacctgaggcagatctagcattcttctatcaaaggctgcgtcaaactgagctatgatgcccttcgtcgccccgtataactgattcccctttgggtataaagaatcggtactcatatcaccatacgccagcaaagaaccggcatgtctatgaccccttcagaaccaggcaagacaaaaaatgctactgctccccttagtttgacgagaacccagcgtcttgtatttctaactaattactcgaangatattccgaatttccaccaattttttactggttgaacc

SEQ ID NO: 195807 - DNA, 497 bp, Gossypium hirsutum
cattttcaagtttcaacccgagtacagcgatcagctctcgattccttactttaaacttactgattagctgaaattctacaagtttcgatcttatcttgattgaggctgcgaatagcaagatggtgtatgaaataactgagcaacaaaaggttggcttgggtcttattggcttcggtatctccttcacatttctaggtgtatctctcttctttgacaggggtctgcttgctttaggaaatattttgtggttagcaggggtcgtaatattgatcggttggtattctactttgcagcttttcagaaaaaactacaagggtactgcttgttttattctggggctctttttcttattcgtgcgttggccaatagttggtataatcttggaaatatatggttgctttgtggttttcagtggcttttggccttcggtcagtgggttcctctgtcacattccggttgttggatgggttatacagtatccggtcatgtaccttgat

SEQ ID NO: 195808 - DNA, 630 bp, Gossypium hirsutum
  unsure (1)..(630): unsure at all n locations
cccattcgttcgcaggagaggaacatcgatagatagaaggagatggcggtgagaggtagagcagtagaaacgctgccaaagctgatgaggagcccgaggaaggactcggcttcttcaacagtgactcgaactccagccttgccctcccttagacgcgctttctctctctacgatcagattaatctcatcgacaatgttcccgatgaccagcttcgtttccaacgatatacggaaacaggattcactgtgaacggtgtcaactatgaaggcagcttgctttgtgtgggaaatttggttacttcttggggcccccgtaaattttctgaaattactccccaaagcttatccatctttcaaattatacgacctattccagaaattttgattcttggctgtggaaggtacattgaacctgtagatccggaactcagacgcttcatccgatctactggcatgaaattggaagccttagactcgagaaatgctgcatctacttacaacatactgaacgaagaaggtanaattgtggctgctgcactgctcccatatggagtttcttcatgaaccttggtactcccaatttttacgacttgggtttttgactttgtggatgagaaattatccaatgtt

SEQ ID NO: 195809 - DNA, 937 bp, Gossypium hirsutum
  unsure (1)..(937): unsure at all n locations
cccacgcgtccgcgtcgccttctttaagcgaagatactgccaaggctgttcttcgccaggtagagttttacttcagtgatagcaatattccgagagataactttctcaagaaaaaaattaacgaagacgatgatggcagtatcctttgtcttttttaaaactatttcccgctgtttgtgtaatattttatttacttattttatgctgctgcttcttgttgtttgctcttgaccgtgaattaccaaaaaagtggtcagtttggcattgatttgttcgttttcaaagatgagaagccatttgaatttaagggatgtgaaggcggaagaagtgccagaggctactttgaatgtcgttgctgaaactctcagaacttcctcttccctcagggtttctgaagacgggaagaaagttggtagaagcactgcactattagagcctgaagaattgttagagcaattagacagtagaacaattgctgcatcaccatttgagtttaatgtcaagatggaagctgtagaagccttttttggtcaatatgctaaggtaaatagtggtgaggttaccctcgttcatgtagcaaacaaaaagctatttttgtggcactgctttaattgaattctcagctgaggaagatgccaaaaaggttttggagccaagcttggtttatgccaggcgctgaatgngaactgaaacttaagaagggattttgatgctantagagaagaagaagcagaagatatgaggataatcttccagcancaggttcaatggaataaccgtttgaattcgaggataaatacccaagctggggtgttgctttgattgaagaactttcagtgnggacgctgagagaaatggtctgatgacctgcaagatgtgctctgagagatganagagacgcnanatgcgagatacaagatagtgtgatnacactggt

SEQ ID NO: 195810 - DNA, 471 bp, Gossypium hirsutum
ggaaaatgcaatatcaaattaccttagtttttcattgctttttcctctcttgggggggattttgtaatcccgatttcagtgtttacaacggctttttatagccaaaatacatcaagaatattctggaaaaaataaataaaataaaaaatctttatttttttgttgtattgttgttatctactggttgctgctgtggttgttagttcgttgcaggtacaactgtgcatggagaaactgctcgtgggcgatagtgcgaaggcttccagaagcttcaccgtttgggccctatgagcctgctttgaaatcggctggctggaggctgttgtgaaggccactggtggttgcttgcggcgcgaggggacgttcgtgggagctgcggcgctgtttagctcggatttcaatttttggttctgaaattttgggccatttgggctagttttgggattgggccattttttggacttattttta

SEQ ID NO: 195811 - DNA, 400 bp, Gossypium hirsutum
tttgaatcgtttgtgggagtctaattttactcctcagaagattaggtttaggtccctggggtccaaagattgtacacaagtatacggctactaggtttaattctaaagattcagctgattttgtactggcagaggagcagaataaacttctgacagattatgcataccatatttccgctgccaaagcaagtggagagctgtgcttaaaacatatattctcttttggagcattacctcgggtgcctcttctaaaaaggcttggttacactgcttgatatttattgggtccattgcattggctaatacatgcgtatttatattgatttctgtatagacctttgaaaatactatttctgcaatatcctcacattgacttaaaaacatactctagaatgcaaaa

SEQ ID NO: 195812 - DNA, 401 bp, Gossypium hirsutum
gagcaagcccagagatgataaaatggttgacaaaagcacaaattcttttatatgattggcttgcatgcccctccctaatttagcttgacaatgaaagatgatgccaagatgtagatttttaacatattttgtgagatacattgtctttaaggtaaatggcatagtagtgttttcttatgccctttttttgaagggaaaaattatgtttaaaaggaggaatgattttctgttctattgtagttgtttatcttcatatattacccccttttttcttttttctttttttctcataaatcaagaatgttctttttatgtatcagatttacattttcttctttcagaaaccttttcttcttctctgtcatcaactttaactgatggacatatatacttgtatcttt

SEQ ID NO: 195813 - DNA, 484 bp, Gossypium hirsutum
gtaatcttgacctggcagtttcaaaatgcgtcgctatgatgatcgttattgtcatactcgtctctatgttggccatatctcctcaagaacccgaacacgtgatctagaacgtctctttagccgatacgggagaatacttgatgtggatatgaagcgtgactatgcctttgttgactttagcgatccccgagatgctgatgatgcaaggtatagcttggatggtcgggactttgatggaagccgcattgttgttgagtttgcaaggggggtgccacgaggttctcaggaatatctaggaagaggcccccctcctggatctggtcgctgctttaattgtggtgttgatggccattgggccagagattgtacagctgaggactggaagaacaaatgttatcgttgtggagaaagaggtcacatagaacgaaactgcaggaacagtccccgaaaactgagttctcgttcacctattagatctcgctca

SEQ ID NO: 195814 - DNA, 319 bp, Gossypium hirsutum
tttccttccattttggcttcctccatcatcttcttcttcgtctttcaacctttctcctgcgtgtatggatataaaaaaatcccaagaaagagaaaggtaaaagatcaagaaatcgataatgggtgcttgtgctactaaaccaaaggttttgaaagatgaaaactcaccggccaccgtccccgcaccagaaccggtcaaggaagaatccgttcagccggttgaaacaaaagacgaaccggtggtcgtgatggaagctgatgaaaccaagccgaattctcttggttcattgcttgataatgaagaaaagagcaatgaaact

SEQ ID NO: 195815 - DNA, 615 bp, Gossypium hirsutum
  unsure (1)..(615): unsure at all n locations
tttacgcgtccggttagcggctgccgcacccaagcccaatattgatgttcccaagccaaaagagtttaagggaacaaggtccgcaagagatgtggacaactttttgtggggaatcgagcaatacttctgtgccaaaggcatcacggaggatgtcactaaggtaactactgctgcgatgtatttatctgacgttgctttgttgtggtggcgtcgtaggtccactgatgtgagacgtggtgggtctgaaatcgaaacatgngaggagtttcgatgtgagttcaaagcacagttttacacagagtatgccgaggatgaggctcgggcaaggttgcgtcggcttgcgcaacaaggcactgtgagggagttatgttcagggagtttagcgagcttatgctccaaatctcagatatgggggagaaagaggcatttttttcctttatggacggattaaaaccgtgggcgaagcaagagttgcagcgccgaggagttcaagagctcaccaaggctatgtcagtagcagaatcacttgctgaatttggtgggaggaaagacaattccaattcttctaaacccagattaaagggtaatagtgggggagataaagaaaggcccact

SEQ ID NO: 195816 - DNA, 305 bp, Gossypium hirsutum
cggacgcgtgggcgtgtcgcgtgggcggacgcgtgggcagctctgaaggctgtgatcaagtgcattgaggagcataatattgaggagcaataccctattgatccacttcagaagcgggttctcctattggagaaggttaaagcagacaagaagggatcaactgaagctgcaaagcctcaaacaaagagagctcgtgccaatggtgcaggatatggtccacgagtcactaatgtagctgctgacaaaccattctattctagaaccactgataggtgcgcggcattcttactggatcgccaacttct

SEQ ID NO: 195817 - DNA, 503 bp, Gossypium hirsutum
  unsure (1)..(503): unsure at all n locations
gatagaggatgccctagaaattggccttacctgcatccgagcgaagctgatggttgctctggatatggctaataaaaatacgaaatgcttgggggaggacaataagcaactcactttcattgtgaatcaacagcaactgacttatgaaaatgtgagagagcatatggatcaccacggataccatcaagctgctcgtgctgacttcaactcgcagatgcctttcgcattccgagtgcagccaatgcaaccaaacttacaagagaggatgtgatgaacattgtgagggttatccaatagctaaagctgcctatatgagctataaggtcaaaaatggagggggtgcttagtttctgaatgataataacttttaagttctacgagtattccagtgtttatgacaatcttagtaatatagatatcaactatgaatttgatattatgaacaattattgtatctactttgagcaacttatatgtgtctctatgaaccatagtgtgttntt

SEQ ID NO: 195818 - DNA, 643 bp, Gossypium hirsutum
ggatcaagaccggggttggggtcgggaccgtgagggggatttagatagaagttgggatcgggatcgggatcgggattgggatcgtaatagagaaagaaacagagagagagagagggagagggagcaaagacatgattatgatagaaggtcaaggtacgctgatgaaagtaggcgatacaggagcagaagccgaagtccgagtgtgagcagaaacaggaggagcagaagtcagagtgagcaacgtgggaacagtcattatgatcgacttccaagtccatcaaaagagggaagcaaggcatccagtaatttggcgaagctgaaagatctgtacggtgatgtaagtgatacaaagggagatgatgcgggggttcgaaaggatagcaaagagggacaacagtggtcaagaggtgattagactaggtggttcttcttggaaataatagggtgggtgggtgcattgcagaacaccaaatcaaatcaaatcaaatcagacccaaaaacaaaacaaactttgtcaacattttcattctccctttctggacaatgctggattgctgatggatagatgcagtcgtggtcacgactggcatatcgtgtatactaatgttccattatcttcttaattttaacttcagatgattcc

SEQ ID NO: 195819 - DNA, 485 bp, Gossypium hirsutum
tttccacgcgtccgcccacgcgtccggccatcttttctgataacgtactggcaacatctgtggtcgtcaattctacagtgcttcatgcaaatgagcctgagaaacacgttttccatatagtgaccgataaactgaattttgctgcaatgagaatgtggtttatcttgaatgctcctgaaaaggctacagttcaggttgagaacattgatgattttaagtggttgaattcctcttactgttccgttctacgtcagctcgaatctgccagagttaaagaatattatttcaagaatcatccatcctctctctctgttgggtctgacaatctcaagtacaggaatccaaaatacttgtcgatgctgaatcaccttcgattctatcttcctgaagtggacccaaaactccacaagatcctatttttggatgatgatattgtagttcagaaggatttgacacctctttgggatgttgatctgaatggaatg

SEQ ID NO: 195820 - DNA, 711 bp, Gossypium hirsutum
gtgtaagtaaatattttgactcatactgcagatgttgccttaagtgaggagcagcttactgcaatagaaaaattgaaaatgaaacacaaggcacaggatgcaaaggaaagtttagagagagatagagaagacaagcatccaattaatgaagagcagaaaaggaatcacagatcagaatcgggactcggttaataacatagttgagctcagagctagaaattcaggccactcaaagaacacaggtggtgcgctttgggacattttcagaagggaggatgttcctaaactggaagcttatcttagaaagcattctaaagaattcaggcatatctattgctccccagttgaaaaggtaatccatccaattcatgaccaatcgttttacctcaccatggagcacaaaaggaaattgaaggaggaatttggagttgagccatggacattcgaacaaaaccttggagaggcagtttttattcctgctggatgtccgcaccaagttaggaatctgaagtcatgcaccaaagtcgctgtggactttgtatctccccagagtatcaaggaatgcctccgattaactgaggagttccgccaactaccaaagaaccatagagccagagaagacaaactcgagatcaacaaaatgataatttatggagtagaacgggcaattcgagagttatcagatctaatatcaaccccaaattgagcccc

SEQ ID NO: 195821 - DNA, 410 bp, Gossypium hirsutum
actctttgtgtacaaaaagggccgaaaagaatggcaagcgaggaagagagcgcggtgaaggagcctttggatttgataaggctcagcctcgacgagcgtatttacgtcaagctccgctctgaccgtgagctccgtggcaagctccatgcttatgatcagcatttgaatatgattctgggggatgttgaagaggttgttacaacggttgaaatagatgatgaaacctatgaagagattgttcggactacgaggcgtacagttccattcctctttgttagaggagatggagtcatactggtttctccacctctacgcactgcttgattgggaggacggagtttcaagcacacgaaggaattaccttgtgctaaatttactactaagctattgctcgtttataattgacccta

SEQ ID NO: 195822 - DNA, 468 bp, Gossypium hirsutum
  unsure (1)..(468): unsure at all n locations
gcatttttgatgattgcgagggaatctccttcaagaatcagaaactgccatcccttcccggttcctatttggactgctctccagcaggttattgcttcagcagcaaaggccgatgagatattagaatgaatctctgaacatgagaagaggatatttcgttccgaatctctggccacaatacccgaagccgaccgattctggcttttatcgtaggcaccatcaaagttgatgttgatgaaactctcctgtgggtacgaccatctctggttctctccgcccaaagtgcacaacagaatattcaactttgataaaggctgagctcctctactacccaggtgatccactgtaaaaaatcctcacattgattcatcaaaatgttctggaacgataatgctctccatacctncattgtaacacggcattcgcgaaataaatggttcattgtttcagctncttcttcacatcggg

SEQ ID NO: 195823 - DNA, 579 bp, Gossypium hirsutum
gtcaaatccaaggttcttttgccaatctatcaagcttacttggatgcaacttctcttataatgacttaacagggcccataccttctttaccgcgcctcgacaacatggccgtcagcagctttattgagaacaatggtctctgtggtggacctctcggtggttgtaatccaactccatcttccctctcgcttcagcccaatgcaaaagataaaggtactgggctaggcaaggttgtggccatagttgcagcagccattggtggagtttcccttgttttaatagtagttattttatatttcatgagacgaccagttgaaatagttgctccattgcaagaaaaaccttctactgctcgagtttcggacatttacttttcaccaaaggaagggttcactttccaggacttgcttgaagccactgacaattttgatgagagctttgttgttggcaggggagcatgtggaactgtatataaagctgtcttacctagtggccatgtcattgctgttaagaagcttgcatccaacagggagggaaataacaatgtcgacaacagcttccgtgccgaaattctaacct

SEQ ID NO: 195824 - DNA, 1020 bp, Gossypium hirsutum
gccgcccatgtctcctttggctgttgattcctctccaaagtctggtggcttgtggcacaagcaagttaacctcaccccacctacgttgcagctaccgggtagcctcttgaagacagcttttaatgccagagattttgatttggaaatgcaactacttgcgctcgagaatcatgctagccaattgcagcagcaacaattgatggatgagatatctagtctctcctctccatcttgttggactaaggaatacagtaggcttgaagatttaaagcctaccaaactcgatgatgcttttggatctctcgatccatctctgcaatctccgttgaagggactgtcaatagaatccgtaacacaaactcaatcacaatctcgccaaaacatgaaccaattccgtgcaagctacccaccgaacctttcatcatctccggtgaggaagccctcagcctttggttttgactcatctgctgctgtagctgcagcagtaatgaattccaggtcttcgggatttgcaaaacggagtcagagttttatagaccgtggagcaatgaccggtcgtgctgggcttactacatctgctaactcaaaaactatgatgtcttcaaatatttctgattggagctcccctgatgggaaactggattggggtatccatggtgatgagctgaacaagcttagaaaggcggtggctttcgggtttcgaaacaacaatcccaccactacagaaacaacgaacatgatgccaaccgatgctgatgagccagatgtatcttgggttcattccattgtgaaggatgctgcacctacggaagctcgattgcatcaacaacagcgatacagtctcggtaaaggtgttcgagaaacacttccaccatggatggagcaaatgtacatagagcaggagcagatggtggcataagaaaaagatccctttgctcattgccttattctaacttatattatttcatattgtatcaatcaagaagtaaaacctatatgagcaggaagaattaagtgact

SEQ ID NO: 195825 - DNA, 645 bp, Gossypium hirsutum
ggtgctcgtgctcttgatcttattgaacaagcagaggtagaagtggaacggctggatcagctaaaatcaagcataatgaaagaactggctttcaaaaggcaagtggagcttgaggagatatttgcccatgctcatgtggacatagatccagaggctgctagggagaaaattatggctctgattgattccgggaatgttgagcctgctgagttactagctgacatggataatcagatagcaaaagcgaaagaagaagcccttagcaggaaagaaatattggatagggttgaaaaatggatgtcagcttgtgaagaagaaagttggcttgatgactataatcgggatgataacagatacaatgcaagcaggggggcacatttaaacctcaagcgtgctgagaaagctcgtattctggtaaacaaaattccaggtatggttgacactttggttgccaaaactcgagcttgggaggaagatcgtggcatatcatttaagtacgatggtgttccgctccttgccatgctagatgaatatgctatgctcaggcaagaaagggaagaagagaaaaggaggcttagggatcagaagaagttcggtgagcagcaaaacacagaacaagaacccatattcggttcaaggtcaacc

SEQ ID NO: 195826 - DNA, 793 bp, Gossypium hirsutum
ggagtaacttcgtatgatatcggaaccggtttcgggcattttgcgattgcgacacccgatgtctacaaaatggtcgaggacatccgtgcgaagggcggcaatattactagagagcctggtccggttaaaggcggatcctcggtcattgctttcgtgaaggatcctgatggttatatttttgagctcatccaaagagcttctactcctgatccactctgtcaagtaatgcttcgtgtcggggatttagaccgctctgttaagttctatgaaaaggcgttcgggaatgaagctagtaaagaaggtggataggcctgaatataagtactccatagccatgatggggtatgcagaagaacatgagactactgttcttgagttgacttacaattacggagtgactgaatataccaagggaaatgcatatgcacaggttgctattagcactgatgatgtatacaaaagcggcgaggttgtggaacatgttatacaagagcttgggggaaaggttactcgtaaaccggggccaattcctgggatcaacactaaaattacctctttcctagatcctgatggctggaaaactgttctggttgacaatgaggactttctgaaggaactcaagtaggcactaagaaagagtaatgctactatatgaataaatcagtatcttgttgtgtaagcgagcagatatgtctgttaaatatggtgtttgttatgcgacctgaaccgttttccgcttgtatctgctgtggattctagtatgttgcatagctatcagcaggttatgcttatt

SEQ ID NO: 195827 - DNA, 494 bp, Gossypium hirsutum
cccacgcgtccgcccacgcgtccgcccacttgttcgcccacgcgtccgcccacgcgtccggttttattgatgcagtagccagcattgccaagggattgaggtggagctgccatagagaagacaccgaatatggtgtagccaaggagaagttattagtttgccagaaaaagctctggtattccgctagcggcagttcaagatgacaatatatgtcttgcctggctaagttaaaaaggactatataatataatattattgttcttcccaaccgtaaacgtgggacctgaaaagatggaagctgcattccggtaccagcctatccctagaaatcaaagagcctctaaattcatattcgtccattggaagggttagccctcccccaataataggtggttttatagatatatattctttggaaggcatctatctattctatacacagatttttaaatttttttttctttaatttttttgggggccttaatttccttcct

SEQ ID NO: 195828 - DNA, 613 bp, Gossypium hirsutum
  unsure (1)..(613): unsure at all n locations
ctcatcctttcttattccaaatctgtcattaacagtaaccgattctcctgttccttctgtaaaccaaagactggatatttgtatttccatatatatccccacctctcctgagtttatgaaccttatcagatggaagagcaacttgagtttcgtcactgggacgaactaattcctgatgcacttgggttgatcttaagctacctgtccctacaagaggtcttaacagtcattcccagcgtctgcaaatcctggaggaaggctgtcacagggccctattgttggcaagaggtagacattgaagagtggggcagtcgatgtcagccccaccatcttgatcggatgcttcgaatgctcatcacccgaagctccggatctctccgcaagttatgtgtttcgggcctccacaatgattccattttctccttcatcactgagaagtaagtgtatgataagattataggtgctttgatgttcttgtatgataagattccaaatgagacaattataatattacaagcaacatagtattatactttccctcacctttaagtgatcattgttcaatggacatttttcagtgatacagnatttctttttgtgtttcttgcttttt

SEQ ID NO: 195829 - DNA, 593 bp, Gossypium hirsutum
cgctgtttaagtttgttgttccacttcaccgctccttctctacaggcatccacactacccttatcgggctcccaatcccaccgcgcctgacaaaccctcctcccattcctcacgcctctaaagtcaactgctacttcagttttggtttcatagataaagaatggcaagcgcgtgcttttcgacatcgccctcgtctcttcgattcagttctctcctcttctctccaaactcaagcaccaatgtcgattctaataagttgtctcttcctttccatccccttcgtcccaggaaattgaagaagtttctcagtaatcaaaagaatgcggtgaattatcagccaaaagctgtttacgcaggtgagttttgggctcctccgacaacttctcgacagggaatttggtcaataagggatgatttgcaagtcccggcatcaccttacttacttgcctatgcacaagggcaggggccacctcccatggtgcaagagagatttcaaagtgttgtcagccaactttttcaacatagaatagttcgctgtggtggagccgttgatgatgatatggcaaacattattgtagctcagcttctctatc

SEQ ID NO: 195830 - DNA, 438 bp, Gossypium hirsutum
  unsure (1)..(438): unsure at all n locations
ttttcaactgggagggaaagaagaggaggaaagggctctccagattggtaaagggggggatgatacattcactcatggattatagtgcagctccttatcggcgttttcttgctgtttgcgcgatctgccttacaagcctttggtacacaaattggcttagtgaatgacttttacttatgtttatgtgctatcatatacatatatatagtaacaagttgtgctacatgttttaatataatattttttttctacttaaatgtcacttgaaaaacgtttggagagccttggcttggtgagacacaatcaaaatcatgtacacgtggtctctttgcatctaataacatttgctgaaattattggtttaaacatgtctttggatttttagttgcaaaananaaaaaaataaattattattttttaataatttttataatttat

SEQ ID NO: 195831 - DNA, 529 bp, Gossypium hirsutum
aacagggatacaatctgcagtgctgtgagtgaaattcacccaccatccccgagattgttcgacaccaaaaatggtagtctccaacccaaagtgaatgatttgaaaccaagggctgaattgaaatgtccaggcaagaagcaaatcgtggcagtggagtttgcgagctatggtgatccatttggcgcttgcggagcctactttattggaaattgcacagcgccagaatccaagcaagtcgttgagaagtattgcttggggaagcccagctgccaaatcccactagatagcattcctttcagtaaccaaaatgacgcatgtacccatctcaggaagactttggccgtccaactcaaatgtgcctaaacaaatgcgtgcttcgacacagcttggattaagcttcacattttattttttttaattgagctaagacggtgcatggaggagtgctcgatctatttaatttgtatttcttaaatattaaatgaatatgtgcgaattccagaattacaataaaaaaaaaaaaaaaaaa

SEQ ID NO: 195832 - DNA, 285 bp, Gossypium hirsutum
agagaattggtgcaccaaaaaaaaaagcaaattaaattaagttagacatgtgatagcaaaggctgagtttttttttggctttcagcttttctatcatttgaccattaaactgatttttgagaagggaagatattacttgtatttgattgcagagacattagctttattgtttttgagaaccgaagatattactaatggatcttcgattttagctcacgtgtttaagctttacgtattaagttttcttatagttatgaacagttgagtaatttcaataaacaaaaa

SEQ ID NO: 195833 - DNA, 528 bp, Gossypium hirsutum
ttttcttcttcttcttcgattatttttcgccggaactctcttaaaaagcaatgggaaacaatccctcgcagcttcttccgtcagagttgatagataggtgcatagggtccaaaatatgggtgataatgaaaggggacaaggagctcgtgggtactcttagaggcttcgatgtttacgtcaacatggtcctcgaagatgtcactgaatatgagatcaccactgaaggaagacggatcacaaagcttgatcaaattttgcttaatggaaacaacatcgccattttggtcccaggaggctcacctgatcccgaatgaaagtgttagctcctccatgtttcttttaatgttattaattcctggccatattctcagttttagtgagaaatctggcgcagaacttaattagttaacttggatcactgtaagattctcgaaatttggtggtagggcagagttggcaacatttactgtcatggctaatgattgattatgcttatcataacatttcaaatgcttttaggtctaatgt

SEQ ID NO: 195834 - DNA, 1116 bp, Gossypium hirsutum
  unsure (1)..(1116): unsure at all n locations
accgnccggaancccggtcgaccgcgcgtccgaaagccctaaaattgaaatgccctcgaatatggccgccaccgccacaagcaccgccacattccgtcttggcaatcccctttcctcttcctcttcctcatccgtttactcctccaagaaattgcctgtcaatttcagaaaatttgcgcttcagacgtcgcctgtgaaaagcttttctgtttcttgtactctaactagaaaaccagtcccagctgctccggtttccatggattcggacccgaacggatggcaacgacccgactcgtttggtcggtttggcaaatttggcggcaaatacgttcccgagaccctaatgtctgccctctctgagctggatgcggcttttcattccctctccaaagatgaaaaattccaggaagaattagctgggattttgaaagactatgttggtagggaaagtccactttattttgcagagcggctgtctgaacattacaagcgtcccaatggtgaagggccagatatataccttaagagggaggatcttaaccatactggtgctcataagatcaataatgctgttgctcaggcattgcttgctaaacgtttgggcaagaaacgggttattgctgaaactggagctggtcagcatggagtggcaacagctaccgtgtgtgcacgatttggtttgcagtgcattatttacatgggtgctcaagatatggaaagacaggcgcttaatgttttcagaatgcggcttcttggtgcagaggttagagcagttcactcgggtacggcaacactaaaagatgctacatcggaagctatccgggattgggtgactaacgtggagacaactcattatattatgagatctgttgctggtccacattcatatcctatgatggtgagagagttccatgcaatgattggttaagaaacatgaaaacatgcccctgtaaaatggggagggataccagatgtattggttgcatgtgttggaagaagttcaaatgctttgggatttttcatgagttagtaatgacatgatgttaggtgaatgggtaaaggctgttgtttggtgtgacagtgcaaactgtctgtactttaccaaggagaagtggt

SEQ ID NO: 195835 - DNA, 958 bp, Gossypium hirsutum
  unsure (1)..(958): unsure at all n locations
ggtttttttatctcaatttcaaacatgtttttggaccatcatcttgttcctttttatggttctaaattgtcatgtaaatgaagcagctttggtattgcctaagaatgtaactgtaactgcagtttttgtgtttggtgattcaattgttgatccaggtaacaacaacaatctcccaactatagctaaaggcaatttcttaccttacggtcgagatttcaaggatggaccgactggacggttctcgaatggcagagttccttctgatcttatagctgaagaatttggtgttaagggattggtacctgcttatcttgatccaaaaacacagctacaagatctccttactggtgttagttttgcctctggtgctgcaggatatgatcctctcactgcaaaaaccgcgaatgtaataccgatgtcgggtcagttagagctgttcaaggaatgtataaagaagataaaaggaggagtgggtgaagagagagctgcaactataatttcagaagctatatatatagtgtgtactggcagtaatgatatttcaaatacttatttttctactccgtttaggagacctcattatgatatcaatggttatgcagagttcaacgcccgctatgctaatcagttcttgcaggacttatatggattaggagcaagaagaatanggttgttggggttgccaccaatagggtgtgtgccatctcaaaaaaccataggtggaggcaaaaacanggattgctatgaggctgaaaaacaattggcaattgcctacaatgccaagctctctggtgtgatagattctcttaaagctgtttacactttgcctgacacaaagctcatctttcttgacatttactatcctcttctttccctcatccaaaaccctgcaaaatatggttttgaagtagcaacaaaaggatgctgtggcactggactaataaaaactattattttt

SEQ ID NO: 195836 - DNA, 470 bp, Gossypium hirsutum
gaggaaaagcaaaaaggtaaagtaaaagagaagcttgacaagtacaataaagagaagttattggagttttgtgacgtgcttgacataccagttataaaggctactacaaggaaggaagatatcattataaagctgatggactgtttgatggctcctcatgctacaaccactgttctacttgctgaacaagaaaagtcaagtaagggtaaaaagcgcaaaagggctacgatgtctgggaccacagttaaacgatcaacaaagagtccaagaaagagtgaggatactccaaaatctacgacaaagagtgtgcctgattctgaggatgagtctgaagaagaggaggaggaagaagaagaaaaggaagaagaagagaaggaagaggaacagaatgaagaagagaaaaatgaaaatggagttgcagaaaaatctgaggacgagatgcctgaggattcttgaagtgaagagaaaaa

SEQ ID NO: 195837 - DNA, 360 bp, Gossypium hirsutum
ccgggtgcgacccacgcgtacggcgtactccattgaggcgacctgcctcgcgccgaaactggaagaagtgtacgcggagggggtccgggtgctgaaaccgggatctctatacgtgtcttacgagtgggtgacgactgacaggtacagaggtgataaccctgaacacgtggaggttattcaaggtatcgaaagaggcgatgctttgcccggtctcaggaactacaaggacatatcggaggttgcaaaaaaggttggctttcgaggttgttaaagagaaggatctagccaagccacccgccttaccctgggggaccaagcttaagatggggagaatcgcctactggaggaaccacttttttg

SEQ ID NO: 195838 - DNA, 397 bp, Gossypium hirsutum
cctaaatttgccgttcttttttatatataatagataggagaattgaagacaccagggataccagattcttacctcttttttttttatttcccaatttaagccatatgacggaaacgccgttctcgaagcgccctgaggacgtcgttttaaatatattttcgaagctcgaagaggatctcgctagctgggcaagtcttgcttgtgtctgcaccagattctcttctctgattcgtaatacctgcttgaagcttaaatgttccaaaaccatacccgccgtttccgccgaccttctctcctcttcctccgccccacccggcggttgggcttctctttataagctgtctgtcttgctgtcaagcctccttcacgccggtgtccttcttgacaactctgattt

SEQ ID NO: 195839 - DNA, 1209 bp, Gossypium hirsutum
gtcgtggacaagattaaaagaatcgtgtagctacacctttataaaagccgtcaaatcatgtaagagtcgtttctcttagctaccatcaaatatcaattctaaaaaaaaaaaaaatccaaaaaaagattgttttactgaagaagaaaaaaaatgcccgacgaggagactgcaaccccaacggcatcggcaccggcaactccgggaacgccaggtggaccgctgttcaattccatgagggtggattcactgtcatatgatcggaagtcaatgcctcgatgcaaatgctttccggtgactgccccaacgtggggtcaacctcacacatgcttcaccgacttccctgcacctgacgtatcccttacccgaaagctgggggcagaatttgtgggaacctttatcctaatatttgcggcaacagcgggacctatagtgaaccaaaagtattcgggagccgaaacattgctcggaaacgccacatgcgcaggcctggctgtgatgataataattttatccaccggacacatatctggggctcatcttaacccttccctcaccattgcatttgctgcctgccgtcacttcccctggactcaggttccagcctacatagcagctcaagtttcggcctctatttgcgcttctttcgctctaaagggggtcttccatcccttcatgtctggtggcgttactgtcccctccgtcagccatggacaagctttcgcactcgagttcctcattacttttaatcttctcttcgtcgtcaccgccgttgccaccgacacccgtgccgtgggagagctggctggaatagctgctggggcgactgtaatgctcaacattcttgttgctgggccaagtggggggggttcaatgaatccggggagggcactcgggccggctgtagcagcagggaattatagggcattgtggatttacttgatagcgcccacactgggtgctgtgatcggttctgccacctacactttggtgaagctccgcgaagatgaggtcgacgcaccacggcaggtcaggagttttcgacgctaggtaatatggagcccacgaaattatgacatcgttgaaaatggaaggggcaaaaaaagtgtggttttcttcttctaatgtctctctatgaaatgaaaccatacacatcgctgttcgtttgtttgtttgattgtgtggggtaaagataagatagcttttgggaat

SEQ ID NO: 195840 - DNA, 671 bp, Gossypium hirsutum
gcaccacctaaagagtagccgtttaaagttgccacaattagagcaggagcttcagcgggcacggcagcagggtatattcatatcaagctctggagatcaaagccattcgatgggcggaaacggtgccatggcatttgatgtagaatatgcacgatggttggaagagcaaaaccgacaaattaatgagctgagaacggcagtaaattctcatgcaagcgatgcagaacttcgtattattgttgatggtgtaatggctcactatgatgaaattttcaggttgaagagcaatgcagctaaggctgatgttttccatttgttgtcaggcatgtggaaaacacctgccgagaggtgtttcttatggcttggtggtttccgttcatctgagcttctaaagcttcttgtaaatcaattggagcctttgaccgagcaacagttggtggggataggcaacttgcagcaatcctcccaacaggctgaagacgcattatcccaagggatggaggcattgcagcaatctctggctgaaacattgtcgactggatctttaggctcttctggatcatctgggaatgtggcgaactacatgggtcaaatggccatggccatggggaagctcgggactcttgaggggtttattcgtcaggctgacaacctacggcagcaaactctac

SEQ ID NO: 195841 - DNA, 469 bp, Gossypium hirsutum
cccacgcgtccggctctttccctttgacttggtacatgacctccaaaacctagagaacctcatagttcgtggctttggacaaatagaggaaataataggaccaaaagatgaggaagacaatcacaagggaaatggaacgcaagctccaacaaagttcagccttcccaaattaaaggagttagaattgacgtgcttaccagagctgaagagcatatgcagttcaaatagggaaatggtatgcaactctcttaggaaaattaaagtacggaactgtacgaagctaaaaaggatgcctctgtatcttcctctttttcaagacacacaccaatcagctccttctgctcatcctttcgaaagaatccgcatatgtccaaaggagtggtgggaatcagtagagtgggactatccgaatgctaaggaggttctgcgaccttggttgaacttgtattagcgctgctggaagcctttg

SEQ ID NO: 195842 - DNA, 423 bp, Gossypium hirsutum
tgaagatggaggtgaggaggaagatggatctggcgaagaagatgaagaggaggaagaagaggaagaagatgaggaggaagaagaacttcagccaccagctaaaaagcggaaatgagctcgggtcttttttctcgttcttttattttgccttgctgcgttgtgtagtgggaagttatgtctgtctgtctgtctaaattagagtagaggggattgtgacatttcagcagaacagacttgtttccatatttctgcttccattcttctcattcaaggattacaaagaaaaatttccacttagatgtattgaaatataaataaaattaatgtttagtgattttttaaaaaataaaatattaactgttgtcaattaccatccttgtactgttgcttcccatcttaaatataaaaaccaataactattcc

SEQ ID NO: 195843 - DNA, 602 bp, Gossypium hirsutum
attcagatctttctcttctttttctttttaatttttttcctttttaatcgtgagctctccttaaaccctagctaatttttcacctcaatccatttctaaaatccgtagctttgtacggtaacggaatcgaatttatcaaggtgatcgatcccgtgcttgatcgcttctctatgcaatggtggtctgcaaatgccgcaaggcaacaaagttatattgttttgtgcacaaggttccagtttgtggagaatgcatctgttttcctgagcatcaaatatgtgtgattcgtacctactcggaatgggtaatagatggagagtataactggcctcccaagtgttgcaaatgccaagctgtgcttgaggagggtgctggctctgaaactactcggttgggttgcttacatgttatacacacaaattgcttgatttctcatatcaaaggctttcctccgcacactgcacctgctggctatacatgtccttcatgttctacatctatatggccccccaagaatgtaaaagaattcagcatctcgtcttcattcactgctgaaggaagctatcatgcagactggcatggagaaaaatttgttcgggaatcat

SEQ ID NO: 195844 - DNA, 637 bp, Gossypium hirsutum
  unsure (1)..(637): unsure at all n locations
ggcctcgattttcgagagggagatgaaaggtaaggctaaaggaggagagactgcaatgaggacagagtttgttaggatgtacggttatgaagagttagggcagaggttgaaggaattacggccgccggagaaggagggtgggttttcattgcaggagttgaatgaaaggttgaaaaagttaagggcaatcgaagagaaggaaaccgatgtgcagatcagtggggttaacttcgcggctataagggatggcttgaccgctttgaagacgtctgacgaagaaaaacagaaaaataaattagcccagaaagttgatatattggacctctttggtagaactccagagtttatgttgcaccctccaaaggaacatttagttgaaaagtatttccatccagataacatgtcttctgctgaaaaaatgaaaatcgagcttgcaaaagttagagatgagtttaagatgtcagaatctgattgtggatctgcacgtgttcaagtggcacaactcactaccaagaatcaaacatctatcatcagttctgcataaaaaggataagcactctcgaaaagggcctctagccatgtggccaaaaagaaaaagttgttgnattatctcccgagaaccaacttggattcatcg

SEQ ID NO: 195845 - DNA, 374 bp, Gossypium hirsutum
cccacgcgtccgcccacgcgtccgcgtgtttccggttttagcttcgcaaagcttcttcttctgtctcatctcgcttataccttggaacactaaagcaaaaaacaagcgaatatggaggctggagatggaggcgctgaccgagtcgttgactcaaaggatttacaacaacaaagcaaagccttcgataaactcactgaccgtgtcgaagatcgacagcttgattcttctcgtgcccaatcggccatggcatcgattgcagcctcggctgaagcagaaaagaatgctatgagattgagagagaaagaattagctgctgttaaaatcaacgcggcttgaagttgacatcattgcaaacgaattagagttggacaaaa

SEQ ID NO: 195846 - DNA, 549 bp, Gossypium hirsutum
gacggatgcgtccgggtgtacttttccatctgaagaacggggaagagcaatctttgcgaagaaccaaagatgccgaagaacaaaggaaagggaggaaagaaccgtaagaggggaaagaacgaggccgatgacgagaaacgtgagcttatcttcaaagaagatggccaagaatacgcccaagtctcacgcatgttgggtaacggccgctgcgaagctatgtgcatcgacggcaccaagcgcctctgccacatccgggggaagatgcacaagaaggtctggatcgccgccggcgacatcatcctcgtcggccttagggattatcaagatgacaaggctgacgtcatcttgaaatacatgcccgatgaagctaggcttctcaaagcttatggtgagctacccgagaataccaggttgaatgaagggattgctggcggcattgatgaggaagatgatggtgcaggcgatgactacatcgagttcgaggatgaggacatcgataagattaaaattctcttctcctttttgtcatttttgaattattttaagaat

SEQ ID NO: 195847 - DNA, 410 bp, Gossypium hirsutum
gagtgtgtgtttgggggtattgcaaagataatatttttattggggaaaaaaaagaatggggagaggtagcgctgagtttgaagagaattgagaacaccattaacaggcccgttcacttttgctaagagaaggaatgggcttttcacgaaagcctatgagctttccgttctttgtgatgcagaggttgctctcatcatcttctccaataggggaaaactgtacgagttttgcagtagttcaagcatgatgaaaacattggagaggttccagaagtgcagccatggagcaccagagacaaatgtttcaactagggaggctctggagctaagcagccagcaggaatatctgcagcttaaagcacgttatgaagccttacaaaggtcccaaaggaattttacttggagaagatc

SEQ ID NO: 195848 - DNA, 623 bp, Gossypium hirsutum
cccattcgttcggctgtttcgttaggatcgatgcataaggaaaggaggctgcatcaaatgatgtatgccgatcgtgactatgatatgagtgatgctaacagtggatcaacaagtgataggagtaaaccgctagtaaccgtggaaaattgtgaacataagggttacaccgttgtaaacttgaggtgccccgatcggcctaagctactatttgatacagtttgcacattgacagatatgcagtatgttgtataccatgcgaccgtcatagcagaaggacctgaagcttatcaggaatactatatccggcacatggatggttgccctattagctccaaagccgagcaacaaagggtaatccattgtttagaggcagctatcaaaagacgagcttccgagggcataagattagaactttgcagtgacgaccgagtcggccttctatcggatgtgactcgcatattcagagaaaatggtctttctgtcactcgagcggaggttaaaacaaggggttcccaagccgtaaacatattttacgtgactgatgcatctgggaatccagtaaaaagtgaaacaattgatgcagttcgaaaagaagatggtcttactatactccacgtgaagga

SEQ ID NO: 195849 - DNA, 608 bp, Gossypium hirsutum
gtaaggaccgcaaccctagccacccttccctgatttcatttcttctgtactcacagtaatcacctctccaaaaccctagctctttcactcactgccgccaatttcaaccaattatttgcttataagcgtcgaaaacgatgtcggacgacgagcgagaggagaaggagttggatctcacctcccctgaagttgttactaaatacaagagtgctgctgagatcgttaacaaggctttgcagttagttgtaaaagaatgcaaaccaaaaactaagattgttgacatttgcgagaagggtgatgcatttatcagagagcaaacaggcaatatgtataagaatgctaagaggaagattgagaggggtgttgccttccccacttgtctttctgttaacaacactgtttgtcatttctctccacttgctagtgacacctccgagctgcaagaaggtgatatggtgaagattgacatgggttgccacattgatgggtttattgctgtagttgcgcacacccatgttgtccaggaaggactagtcaatgacaggaaggctgatgttattgctgctgcaaataccgccgcaaaagttgcattgaggcttgttaggcct

SEQ ID NO: 195850 - DNA, 631 bp, Gossypium hirsutum
gcgggtcaccgcatatattctgtaacttatttatctttgaatttgtgcaggatcaggaagcattatctgcttttaaagatggccaggttattggcgttcattccaccagcgagctggaaattaagttaaatgctgctacaagaacatcacggctgatgatattgtacttcaccgcaacgtggtgtggtccctgccgcttcatttctcctctctatacgagtttagctgcaaaatatgcaaaggtagtgttcttaaaagtggatatagacgagggtagggatgtggcagcgcgatggaacattagcagtgttcctaccttcttctttataagaaatggaaaggaagttgataaggtagttggggctgataaaaatacacttgaaagtaagattgcccaatatgcaagctgattttgagcctatgcctatgaatgaaaggaagttagtctccagctacttgtaatgcccctttccttgcatatgcatgtgaaacatatcaataatgaaaagacttggcaatatcttaggaaaactgtaccatatgttttattaaactgacctgctgggggatggggttttttttaattagaaaaaaaagaagaagaaattctggtgctatatccagtcttcta

SEQ ID NO: 195851 - DNA, 620 bp, Gossypium hirsutum
caagagaataactggtgggtaagcaaagttatcaggaaaaaacatgattcctctgtcacaagtgttgcttggcatcctaataatattctacttgctacaacatccacagatggaaaatgccgagtattttctacatttatcaaaggtgttgatacaagggaatcaaaaacaggctcttcttcagatccaaagtttggagagcaaatagttcagcttgatctgtcatcttcatgggcatttggggtgaagtggtcaccaagtggcaatactttggcttatgtaggtcataattctatgatttacttcgttgatgatattggtccttcccctttggcccagaatgttgcattccgtaatttgcctcttcgtgatgtccaatttttttcagagaaaatggtcataggcgtgggatttgactgcaacccaatgatttttgcagcagataaatcaggattatggagctttatcagattcttaggtgaaaggaaagaattcttgtcaggtccaaaatctggttctcagttttctgaagcatttggcaaattatatggtcaagcaaagcatggattgagcaatgattcggttgaaccttcaaaaatacagggagctggtcatgacaa

SEQ ID NO: 195852 - DNA, 483 bp, Gossypium hirsutum
gtgtctattagcggtggccccgtctatgtcagtgaggcgcctgggagacacaactttgagcttctgaagaaactggtgttgcctgatgggtccattcttcgtgctcgtttgcctggacgccccacacgcgactgcttgtttacagatccagctcgtgatggcgttagcttgttgaagatatggaacatgaataagtacaccggagttctaggtgtttacaactgccaaggtgcagcatggaacagcgcggccaggaagaatactttccaccaaaccaagacagactccttatcaggccacgtaaaaggccatgatgtccatctcatttcagaggcctcattggaccctgaatgggccggtgactctgcagtttactgtcaccagactggtgaacttatcacccttccatacaatgctgccatgccagtgtccctcaaggtccttgagcatgaaattttcacaatagcacctatcaagaatttg

SEQ ID NO: 195853 - DNA, 637 bp, Gossypium hirsutum
  unsure (1)..(637): unsure at all n locations
aagggtctaagctctctccttctcctactctctgttctttgagctagcatcgaacatgtatcatcctagtgcaagatccaagaccttgcttgttcttttacccatttcagcacttgtattggtcttgctttcgttcgtagctcttctaacaaacagccccagagccacacaactccagcatttacacgtccacaatcacctccaaattgctcactcagcatgtgaagggaccttataccccgacctttgcgtctccaccatctctgttctcccagatctcgcttccaaatcactgccggagctcatccaagcaactctaaaccaaacaatgtacgaggtccgtctctcctctgccaactgcaccggcattgaaaagcggatcaaaagttacagcaaacgggaagaggcagcgataaacgattgcctagagctttttgatgacaccctggaggagctgaaagttgcccttgctgatctcgcccctaagaaattagcagtctccaggaactaccacgacttgcagacatttctaagcgccgcgatgaccaaccagtatacgtgtcttgatgggttcgcacgtagcaaagggaatgtangaacattatcaaaaagggtcttacaacatcactcatcacgt

SEQ ID NO: 195854 - DNA, 676 bp, Gossypium hirsutum
gttccctccacgcgaccaccactagctgcctttatatatactcagctcagctcaataacaactcaaagtaactccaattgcattttcaagttccacctagagtgaaatgcagacactgcaggaaaaggcttctcaatggagcggtgttgatgctgccgatgcctttgccattgacgacactaatttgttccagaaattgggactccaaactttcattaacctttccaccaatttttacactagggtgtatgatgtccgggaagaagagtggtttcgatcaatattttccaattccaagaaagaagaggccattcagaatcagtatgaattctttgtgcaacgaatgggagggccccctctttattctcagaggaaaggtcatcctgcattaattgcacgtcatagaccatttccagtcacacatcaagctgcagagagatggttatatcatatggagaaggcattagagagcaccccagacattgatgctgattcaagagtcaaaatgatgaactttttgaggcacactgcattttttcttgtggctggagatgagttgaagactcaaaagcaacaaatcccatgcaaacatggggccagcaaatcagctgaatcatagacttattatcaggaatcctcccccctaattactttgttggaagaaaccactcatgtt

SEQ ID NO: 195855 - DNA, 356 bp, Gossypium hirsutum
agacaaccaaagtggggtcacctaagagatgtccataaggctataaagctttgtgaagaagcattgatagccactgatcctaaaatttcctctttgggtccaaacttggaggcggctggatataaaacaggatcgggaggatgttctgcttttcttgccaatatagacaccaaatctgatgcgactgttaatttcaatggcaattcataccatttgcctgcatggtctgtcagcatcttaccagactgcaagaatgtagttatgaataccgccaaggttaactctatgagtgtgattccaagcttcatgcatgaatctttgaatacaaatgctgattcaactgactcaatcgggtc

SEQ ID NO: 195856 - DNA, 492 bp, Gossypium hirsutum
tcttccacgcgtccggacattttttaataacggtccttgaatctccaaatataccacatgcatggaggctcaatgaaatccctaatcttactacttctaatccggcatatgcctccgccgcaaacggtgaggcaacatttgagtgaatgaccaactttaacgccaaaatttcccctcgcctatctctaaccaccagccctgtggcagatttggaagaatactggtcaaaagccgtattgaagtgaatgcttacgtttgtccttcggtcatcgtgattatgaagtctgcctgattcacagatacatagttttccctctaacccatgcacttctgagttatagcttattatttgtcttgaaatgtctctgttgtttgagattttattttcataaataaatttgtttctgtttgaccagagaagctagagccaacagcagaaaaggcgacatactcatttgtcccctgagtaaagacccatgacactgtcgaaaa

SEQ ID NO: 195857 - DNA, 869 bp, Gossypium hirsutum
gtacagcagcatacccagcagcaatacgactctggagaactctcaagggaacttcagaaggatggaggtccgtttcctggtcggttgcatgcttctttcctggaattgtgtttgttatcctcacagtattgaattttattctgtggggcagcaaaagcactggtgcaattcccatttctctgtattttgtactcttggcgctctggttctgcatttctgtgcctctcactctcgtgggaggattcttagggaccagagctgaagctatacaatatcctgtacgaaccaaccagattccaagggagattcctgctcgcaaatatccatcttggcttcttgttcttggtgctgggacccttccatttggaaccctgttcattgaactcttcttcatcctttctagcatctggcttggcaggttctattatgtatttggcttcttgcttatagttcgtctactgcttatcattggttgtgctgaagtttcggtggtccttacctacatgcatctctgcgttgaggactggcgatggtggtggaaggctttctttgcttcgggttcagttgcactctatgtgttcctatactccatcaattacttggtgtttgacctacagagtttgagtggtcctgtgtcagctattctttatcttggctactcaatgatcatggcaattgcaatcatgttgtctacaggcaccattggcttcatcacatcattctattttgtccattatcttttctcatctgttaagatcgattaaaaaggttccattgcgatcttcagctaccatcctgaagaagactttggcctgtaagaggatgatttctctcaagttgcctttggtagccgatcatgcatcactgta

SEQ ID NO: 195858 - DNA, 635 bp, Gossypium hirsutum
  unsure (1)..(635): unsure at all n locations
aagaatttcgagcatcatccctaattttcatgaaaaacgtaaggagctgatggaacttgccgcttcatttaaatcttctcaaggacgacccgttactagacctttgagtgttgcaagaagggtccggaattccttaaggcaggcaaataaacctcagtttgtatcagcattctgtcaaacaaattgcggtgatgtcagcccgaacacactcggtgcattttgcatcgacactggtctgccgtgtgatttcaatcatagtacctgcaatgggaagaatgaactgtgttatggcaggggcccaggctaccctgatgaatttaagagtaccgagattattggaaaaaagcaattcaagaaagcggtcgaactttttgacaaggcaaccgaagagttgaaaggaaaagtcgggtatcaacatgcctatatagatttctcgaatcttcaggtttcagttcctaaagcgggaggaagtaatgaggtggtcaaaacatgccctgctgctatgggatttggttttgctgcaggtacaactgatggccccggagctttcgatttcagacaaggagatgatcaggggaatgccttttggaaattagtgaagaacttactaaacccgccgggttcagatcanatcg

SEQ ID NO: 195859 - DNA, 375 bp, Gossypium hirsutum
ctttcttcttggacacttgcaatcaatgggacttgatttcccaaagaacgttagtgtaattgctgtgtgccccaaaggaatgggtccatctgtaaggagactctatgtccaaggcagggagatcaacggcgctggaatcaattctagttttggagtccatcaggacgctgatggtagagctactgatgttgccttggggtggtcggtggcccttggatcacctttcacctttgctactactttagagcaggagtacaagagtgacatattcggggagcggggcattcttctcggtgctgttcatggaattgtggagtgtttgtttagaagatacaccgaaaacggaatgagcgaggatcttgcttacaaaaacac

SEQ ID NO: 195860 - DNA, 460 bp, Gossypium hirsutum
ggcagagcaaatggcaatatatgacgccaacaacggaggaaaaatgccattaacatgggaacaaacaagaagcatgcctcttacacatagggttgtaatggagagcttgaggatggcaagtattatatctttcacattcagggaagcagtagttgatgttgactacaaaggatacttaatacccaagggttggaaagtgatgccattattcaggaacattcatcataacccagaattttttcccaatcctcaagaattcgatccatctagatttgaggtagctccaaaagccaacaccttcatgccatttggaaacggcgttcatgcttgccccggcaatgaactggcgaagctggaggctctcattttgatccaccacctagtaacaaattttaggtgcgaggttgtgagttcaaaaagtggtattcaatatgggccattcccagtgcctcaacaagga

SEQ ID NO: 195861 - DNA, 624 bp, Gossypium hirsutum
  unsure (1)..(624): unsure at all n locations
ttccactcgtccgcctcttctctcccgaaggaaggaaatcggggaaaaatgaaaatggaaggaatcgaaggcgacgcctcggtgggaggagcagggcgttacattttgaatccgacgcgaataaacagcgaggacataatattttgcgttgatgtggacgcagagtcgcttgttgaaatgaaaacagcaggagtcaccagattggattccataaagcaagctatccttctctttgtcaattccaagctctctatcaaccccgaccaccgcttcgctttcgccactctctccaaaaccgcctcttggcttagaaaagagtttagtagtgatgttgagtctaccattggtgctgttcgagcactctcggctaccactgtctctactgggcaagcagacctcaccaatttattccgcttagctgctcatgaagccaagaaatctcgtgcccagaaccgcattttaagagtgattcttatatactgcagatcatcaatacgaccccatcatcaatggcctgtaaaccagaagctcttcactctggatgtgatgtacctncatgacaagcctggacctgataatngtccccaggcaagttacgatgcactggttgatgcactngaacat

SEQ ID NO: 195862 - DNA, 917 bp, Gossypium hirsutum
  unsure (1)..(917): unsure at all n locations
aagttcacagttcctcagagattcttctctcatttctacatgacgggtaccctgtggacaacccttttgctactcaccacatggctatatgcatgcactgctggctcaacctcatcaaccatctttgcattgcacaaatcccacagggtatggcgtgctgtgttcctgctttggttgatggaagctcaagtcttgagacgcctttacgagtcattatatgtattccattatcggcccttagctcgaatgcacatattcggctatttcattggcatgagttactacatagtagcaccattgtcactttgctgcacttgtgccccggaggtgtttgagtttactttggatctggtgtctgaaggaaggaaacaatggcagccgttggaagtgataggtgggaacagattccctttgtggcttaaatggaagcagtgggttggcagtgctatatttctatggggttggattcatcanctccgttgtcatgcaattcttggttcaatgcgagcangaagtgaaaagtattttatcccnanaagggatgggtntgaaatggtttcatctccacactatttggctgagattgtcatttatgtgggcttgttgattgctagcggaggagcagacatcaccatttggttactcctagcatttgtggtcacaaatctggggtttgcagcagctgaaacacagaagtggtatattggtaaatttgaagattacccaaaacatcgatatgccatgattcccttcatcttttaatgttttagggcgggagtaattattcgtcccacattgaatgccaagtggtgtttgagaaccttacaataattgatgggcttgtcacttgtgtaatactacaaccctacttttgcctttcttgccatcatttgatcctattaattatgccagcatgc

SEQ ID NO: 195863 - DNA, 635 bp, Gossypium hirsutum
cttttggaaattagtgaggaacttactaaagccgccgggtcaggaacagatcgattgtcagaaacctaagcctattttgcttgataccggtgaaatgaaactaccatatgactgggcgccttcgatacttccggtccaaattgtgcggatggggcaacttgtcattctcagcgtacctgcagaattcacaaccatggccggcaggcggctccgagacgctgttaagacggtgcttacttccgggcgcaataagcaattcgacagcaatgtccatattgtcattgcagggttgacaaatacttattcacaatatgttaccacttttgaggagtaccaagtgcagagatacgagggagcctcaactctgtatggaccacacacgcttaacgcatacatacaggagttcaagaaacttgcagcagctcttatcggtggtggatctgttgaaccaggtccgcaaccacctgatcttcttgataagcagattagcttattacagcggttgtccttgatgcaaccccacttggtgtgaatttcggtgatgttaaagacgatatcgctaattccactttcaaacggggcaatacagtctcagtcaccttctggtctgcttgtcctaggaacgacctcatgac

SEQ ID NO: 195864 - DNA, 857 bp, Gossypium hirsutum
aggaaaatccacccgaatcacttatcgttttctcaaatcccaatcaaaacgatagaggtcggagattcgaggaaagacaatccaaataaaaatatttttccctattaaacaaaaagcttaaatcaaaccccaaaatccagaatcccacatcctctaaatccccaaaacgggaaaaaaagaataaagaagacatgaggacacagaagaggccgatgcatgcggtgtcgatgtgggtaagacgacagccgccgaaggtgaaggcttttttggcggtggtatcggggatggcggcattggttcttctccgagtcattgtacatgaccacgacaacctcttcgtcgccgccgaggctgtccattctatcggaatctctgtcctcatctataagctcaccaaggagaagacttgtgctggactatcactcaaatcccaagaactaacagctatctttttagctgttaggctgtactgtagctttgtcatggaatatgacatacacaccttacttgatttagccacattggctacaactttatgggttatttatatgatccgtttcaaactaaagtccagctacatggaagacaaggacaactttgctttatattatgttcttgtcccatgtgctgcacttgccctatttattcacccctctacttctcataatcttgtgaaccggattttctgggcgttctgtgtatatttagaagctgtttcagttctaccccagctgcgagtgatgcaaaataccaagattgttgagcctttcacagctcattatgtatttgcactgggtgttgcaaggttcctcagctgtgctcactgggttctccaggttttagacagtcgaggacac

SEQ ID NO: 195865 - DNA, 1069 bp, Gossypium hirsutum
  unsure (1)..(1069): unsure at all n locations
ccctcgctttcgattttcctaccgaaatttctgtgtcagacaaacaagtccacgagctactcagtcacacactctctctttctagatacagtgaattttcttttttcgcttctcttcatctattgatccctcgattccttagtgtttcttacgatgccgtctcgccgtagaaccctcttgaaggtcatcatcctcggcgatagcggggtaggcaagacgtctttgatgaatcaatatgtgaataagaagtttagcaatcagtataaggcaacgatcggggccgatttcttgacaaaggaactgcagtttgaggataggcttttcaccttacagatctgggatactgccggccaggaacgattccaaagcctaggtgttgctttctaccgtggcgctgattgctgtgttcttgtatacgatgtcaactcaatgaaatcatttgacaaccttaacaactggagagaagagtttcttattcaggcaagcccttcggatccagagaatttcccatttgttgttttggggaacaaaatcgatgtggatggtggaaacagtagagtagtgtctgagaaaaaggttcgagcatggtgtgccttgaaaggaaatatcccctactttgagacatctgccaaggaaggacttaatgtggaagaagcttttcaatgcatagcaaaaaatgccctaaagagtggggaagaggaagacatatacttgcccgacaccatcagacgttgtagcagcagcaaccaanccaaggtcaactgggtgtgaatgttgaaatacatattatgctatatattttttccgtcatggttgctcaataaattatgtttcgagtttcacgaatgatttcaaaccatttttatggaatcatagtggggcgtatacactcgtacattatgtattatgtgtgagaaacacaaagtggtctgcgtaatgcntgtggttggatttagttccagntggggtgccctttgaaaatgtttttaagttccttcatttcgtttaacattcttatgtttgctgattcattttccttgaaaaaaaaaaaaaaaaactcgagactagt

SEQ ID NO: 195866 - DNA, 1099 bp, Gossypium hirsutum
caaactttccctcaattccttcacaaattacaggtcattccagcttttgcataagagagagagagagaaaaaaaaagctagaaaatactttgaaaaacacgctagaaagtttcagccagttttcctgccagacaaacaagtccaccagtcctctcactaggtttcaatatagaaaattttttctcctttttctatcgatctgtacatccgctgattccttagtgctctttacgatgccttctcgccgtagaaccctcttgaaggtcatcatcctcggcgacagcggggtagggaagacgtctttgatgaatcaatatgtaaataagaaatttagcaatcagtataaggcgacgattggagctgattttttgacaaaggaagtgcagtttgaggataggctttttaccttacagatctgggacacagctggccaggaaagattccagagcctaggtgttgctttctatcgcggtgctgattgttgtgttcttgtatatgatgtcaactcaatgaaatcgtttgacaaccttaacaactggagagaagaatttcttattcaggcaagccctccggatcctgagaatttcccgtttgttgttttggggaacaaaattgatgttgatggtggaaacagtagagtggtgtctgaggaaaagccccgagcatggtgtgcctcaaaaggaaatatcccctatttcgagacatctgccaaggaaggagttaacgtggaagaagctttccaatgcatagcggaggatgctctaaagagtggggatgaggaagacatatacttgcccgacaccatagatgttgggagcagcagcagccaaccaaggtcaagcggatgcgaatgttgaaagataccatgcatgttcattattttttcctgttccgccaataagtacggttaaaatgtttcgaatgatttggtgtttcccaaccattttatgggattcatggtgttggtgtgagaaacaaaaaggaaaaaaaagaaagtctgttaatgcttttggtttggctggatttagttctgtaatgttctcatttgtcaacattgttttttgttctgcactgcctacgcattgtttttaaagtacat

SEQ ID NO: 195867 - DNA, 767 bp, Gossypium hirsutum
  unsure (1)..(767): unsure at all n locations
cttaaacgtaaatttgggcgatttgggtttggtcagagatttcgaaatcatcggatgcatggcttgccgtattaattttaatctccggtgtccttcctcccatacgccgcgtttcgtgcccctcaaaaaccctacgctccttattcctccttttaaaccccactcccacacccaccccagccatccctttaagctttctatatccacttctcggtggctgcggaggcgacggatgggctttgtgacagtcaattctcatatggccaccgaggaaaagcctatttccgatgatagaatgctggtgtttgtgcctccacatccgttaattaagcactggatttcggttttgagaaatgagcaaactccttgccccattttcaaaaatgccatggctgagttggggaggctacttatgtatgaagcttcaagggattggctgcctactgtaacaggagagattcaatcgccaatggctattgcttcagttgaatttgtcgacccaagggaacctttggcgattgttccaatcctaagagctggtcttgctttggctgaacacgcatcatccattttgccagctacaaaaacataccattttgggttaagcagagatgaagagacactcttgccaagtgtttatcttaataagttgcctgacaaatttcctgaaggatctcgaatatttgtggtaaatcctatgctancaacaggtggcacaattgtggctgcactcaacctcataaaggaacgtggagttgacaacaact

SEQ ID NO: 195868 - DNA, 1088 bp, Gossypium hirsutum
gttcttatcaacttcgagcagcggtggagggaatcgaccaagtggaaggatttctgtctactttgtgcaggaaaaatgccatcgaatgacgatgctttgattaggatagaacgaatctcttggatactaagtccttccttagctgtaacagaccacggcactacaataattccagaagatgaccccaaattgcatgttcttagtatcgatgatcgtgacaactgggatgttcagattttccgctccattgactcgggatcagtgaaaggatttccaagaccaatgagaaaacccgagaaccagaatcttttagtttcaaaaaatgtggtcatagaataaagcattcaaacagcttatatacaggcaaataagatccgctcagcattacatatatatcgaaaatcagtattttctgggggcttcgtatgcttggccatcgtataaagatgcaggggccgatcatctgatcccaatggagctggcattaaaggttgctagtaaaatccgagcaagagagagatttgcggtatatatcgttattcctttgtggcccgagggtgatacaaaatctcttgctgtgcaggaaattctatactggcagtctcaaacaatgcaaatgatgtatgatatcgtcgcacgagaactcaagagcatgcagattacggactcgcatcctcaagattacctcaatttctattgtcttggtaagagggaagaggtcaccccggaaatgcttggtggaaaaggaacttcggtctctgactctgcaaagttcggtcggttcatgatatacgtgcatgcaaagggaatggtcatagatgatgagtatgtgattgtagggtcagccaatattaaccaaagatccatggctggtacaaaagacagtgagctagctatggctgcatatcaaccacattacacatgggctgaaaagaaaaaacatccacgtggtcaggtatacgggtatagaatgtccctatgggcagagcatcttggtgagctaaataagtgtttcaaggaaccagaaactctagaatgtgtgaagacagtaaacacaattgccgaagataactggaagaaaatttaca

SEQ ID NO: 195869 - DNA, 581 bp, Gossypium hirsutum
tatattacttcagtagctggggcaaatatcgggagttccttggttgttatgtcgaaagggactccttacacccagcaatcctacaaggtgagcgaatcttttccgttcaagtggataaataagaagtggaaagaaggcttttatgtaacatcgatgacaactgctgggactcgctggggtgtggtaatgtcaaggaacgctggattctctgatcaggttgtggagctcgacttcttatatccaagtgaaggaatacaccggcgatgggagagcggttacagaataacatcagtggctgcaactgtggatcaagctgccttcatacttagcattccaaaacgaaaaacaacagatgatactcaggaaacgctccgtacaactgcctttcccagcacccatgtaaaggaaaaatgggcaaaaaacctatacattgcatcgatttgttatggtcggacagttcgctaatcccggtctgtacattctgacttaaaccaaaaaaagaaaaaagaaaatgagttcatggtttgaaagccaccgagtatctttcgtcttcgagttcggttaactcttctatataatct

SEQ ID NO: 195870 - DNA, 474 bp, Gossypium hirsutum
gaagtcaagtgtaaagggatctttttttttacagaaatacaatacggatactaaatgaaatacaagaataattagaaaatcaatattattcgaaggtgatttattatatttcaatttttttcgttgcttttttgctttcattttcgcatctactataaacaaaaaagaagaggataaaggataagggctcaccagaatcgttggaatatcgtcagagtttctcctccgttaaaactgaatccaaccaaggttgagacgttcttttgattctttgtggttgaaggtgttagattcttaaatgtttttctaaatgaggttagaaagggaagatttactcaccgtcggccactgttagaggcgagggtacggcgtctgagggtagagatttgggattgattgaggaagaatcaaggaaagggggctagggttattttagagatggccgattgttttctttggtcttcgaaggaaatg

SEQ ID NO: 195871 - DNA, 693 bp, Gossypium hirsutum
cccacgcgtccgttcattttaagctttaaattccaagaagacaagccatggatggcacaattaaccatcgtggcttgtttatctttggctaccaaggttgaggaaactcaagtgccacttcttttagacctccaagtatgtgtctaatgcaaacaacattgtagtccaagttgtgtttctgaacttgttatcgacttattaaagttgggttttagtgatttatttatttttctttacgtggaggaagcaaggtatgtgtttgattcaaagaccatacaaagaatggagcttttggtgttgtcaaccctgcattggaggatgaatcctgtgacaccaatatctttctttgatcatattacaaggaggcttgggctgaggacccatttgcattgggatttccttcgtaggtgtgagcatttgcttctcttcctcataactgattcaaggttcgtgacttacactccttctatcttagctgctgcaacaatgctgcatgttataaaagaggttgaaccatgccattatcctgaatatcagaaacagcttattgctgtactcaaggcatgtgaggataaagtaaatgcctgttacaagctcatctcagagttattggaaagccagtacaaaggaaaccaaggccacaaaaggaagtataaatcaataccaagcagccctaatggtgtcattgatgca

SEQ ID NO: 195872 - DNA, 460 bp, Gossypium hirsutum
cggacgcgtggggggaaatgtagtctctgtaaggtccaatcaaaggacctcttgattaatgaaaccagccatttcttttccattgctccatatgcttcttcatttccattcgagatatggataattccccgagatcactcttctcattttgatgaactggacaataagaaggcagttgatctcggtggcttgctaaaactcattcttaaaaagatggctttgcagttgaataaccccccattcaattttatgatccatacttcaccaatacagattactgactctgagataccttatagtcactggtttttacagataatacctcagttaactggtgtaggaggttttgaactcggatctggatgttacataaaccctgtttttcctggtgatgctgctaaaattttgagggaacttaatgttcctatatagggattaggagctgattaacatcatacta

SEQ ID NO: 195873 - DNA, 442 bp, Gossypium hirsutum
  unsure (1)..(442): unsure at all n locations
cccacgcgtncgcttctctattggttaatacaacagccttagagatcaactgcatttgtgcgtcccccaggcttttcctttctaataaactcaatggcccgccaaattggtgttcttgctttggtcaccatggccctctttgccttggtttccaccgctgctgcggccaccgcccccgcacccggtggcagcccctcaggttcacctggagatgctagctcccctccttctcaggccagtgctcctagtcccagcagcggtgctgctcttgagctctcggctattgttggagttggagcagccgccgttgctggctactttatgttctaaatacgatatgtaggggccgctttcctagttttgatatcatcacaaatgctgtcttattaattatgttgagatttgcataatttctttacgaataaagaaaaggaatggattg

SEQ ID NO: 195874 - DNA, 605 bp, Gossypium hirsutum
  unsure (1)..(605): unsure at all n locations
acaaaattcagattatgttgttgaatcgggtgcaacaagaaattttgaaccttggcgtgctgaagatgaggaagcggagaaagagaaacagaaaagggaatctgaagaaatgggggatgcgatgaaatctttggagaacagaacgttggattcaaaaagagagatggatatccttgctgcgcttgatgaaatgaagtctatgaagtccagacatgccacggtgagcgtagattcaatgctggaggccttgcaacgcactgccgcagaaaaggaaaagaaaatagaagaagaagacgaagccctcattaaatcgattttccagaagccaaaggaatttgttcgaaggatttcagatgatgttttcgaacgatgatgaggatctgacccgtttattgagtggcaatggtgaaacctcaaatgatggcttaaagaggagaaaggtgtcggaagaatcttcaagtaaccctacagatgctttgacaaaagctagtttgcctgattattccagcagtaaagaaggttcaagtggctcggtgagttgtcaagttaaagctccattcaagtcgtcngtgataatctcggttgtgaagaagaaacctgagaag

SEQ ID NO: 195875 - DNA, 770 bp, Gossypium hirsutum
tccacgcgtccggtataatcaatgggtttgctttgccattgaaggaagaacataagctctttcttgtccgtgcactgataccgcttcataaaccaaagtgtatacccatgtaccaccagcagttatcttactgcattactcaattcgtggagaaggactgcaagcttgccgataccgttatacgggggttgctaaagtattggccaatcacaaatagctcgaaagaagtcatgttcttaggtgaactggaggaagttttagaagccacacaacctgccgagtttcaacgctgcatggtaccattgtgccgtcagataggccgttgcttgagtagttcccattttcaggtggcccggagggctttgttcttatggaacaatgatcatattgagagcctaataagacagaaccggaaagttatacttccaattattttcccatccttggagaagaacgcaagaaaccactggaaccaggcagtgcagagtttgactttaaacgtccgaaagattttctccgccactgaccctgagctctttgaggagtgcttgcacaagtttaaggaagaagaagcacaagagaacgaggttaaatcaaaacgagaagcaacatggaaacgattagaagagattgctgcaatgaaagctgcaagtaatgaaccggtgcttatctcccctaaagcaactacccgtaagccatctggttaggaacaagtgattggcattttagttgcagatgttcgatgtcaagattggtattgcacgccatcg

SEQ ID NO: 195876 - DNA, 627 bp, Gossypium hirsutum
  unsure (1)..(627): unsure at all n locations
cccacgcgtccggtttcagccaaattagcctgtgaccaaagcccaagttggtggggctcttgcaactggtgaggcttttgacctantaaatgaggagcttgcgcgtattgaagcagaatcaatggcagaaaaggcagtatctgctcataatgctttagttgctgaagttgagaaagatgttaatgctagttttgagaaagagcttttaatcgaaaaggaaaagattgatgctgttgaaaaaatggccgaagaggcactgcatgaactggaaaggttaaaagctgagagagaggcagagaatatggccttaatgaaggaccgtgctgccattgattcagaaatggaagctctttcaaggttaaggtgtgaagtggaggagcagttggaaagcctgatgaataacaaggtagagatatcatatgagaaggaagcgattaacaaactacgaaaagaaacagaggatgaaagccaggaggttgtcaggttacagcatgagctggaggtggagagaaaagctttatctatggccagggcgtgggctgaggatgaagcaaaaagagcaagagaacaggcaaaagccttagaggaggctagagaacgctgggagaggcaaggtatcaaagtggt

SEQ ID NO: 195877 - DNA, 727 bp, Gossypium hirsutum
ttaattcgcagagaatttttaggttttgtcactctcacccctttcttcaaccctcttccattacagtcctactatatatatacacatatatatatataataggagctgaataggagcagccaaaagggtcttttgttcaacaccattgttgagctgagagaaaaacagagaaaaattagagaattctctctatatatacatatacatatagagagagacagttcaaacttcaaagatctagtagattggtaataaaaaaaagaatgttgggacaaaagcaaagtgaagaagcaatagtgtcgaattataacgaaagtgaacatcatgttgagaatagagatgaagagaaagaagaagaaaaccagtcattgtttaatgttaagaatctactttggcatggtggttctgcctgggatgcttggttcagctgtgcttctaatcaagtagcacaagtgttgttgactctaccatattcattttctcaattgggcatgctatctgggattctgctacaagttttctatggaattattggaagttctttcaaggttaaggcgtgaagtggaggagcagttggaaagcctgatgaataacaaggtagagatatcatatgagaatgctatgtagtagccagcaatggtattgaagagcaaagagctgaatggtatcatgaaagtgctcgtcatttaagagtaatccttgatcatgaacaggctgtgattccaag

SEQ ID NO: 195878 - DNA, 628 bp, Gossypium hirsutum
cgaagtctagcaacaaggaagccgagaatgggacagggaaaggagaagaccctcaagacggaaggaggtcaaagaagaaaaccggagagcgacaagacgaggaatgcatggaaaacggtctctcagatacggatttcgagcattacgtgaaggtaatcagatggttagaatgcaaaggacatatcgaaaagaacttcagacagaaattcctcacctggtacagcttaagagcaaccccgcaagaagtaaggatcgtgaaagtattcgttgatatcttcatttccgatccagcatctcttgcggagcagctcgtggacacattctccgattgtatctccagcaaaggatcatccgtcgtaccggctggcttttgcatgaagctttggcattgacatgaacggactgttgccgagtagtgagctacatgtttccgagtgcaaaaccggattaaagtcggtgttcggcaataattctttagacccacaacattctggatttagttgcttttgtcattgttatgatcatgtcagaattgccagaatcgtctttttatctttttacaaaaacactgttggttcattcacccaggttgttaaagttattttctaatggtatttacatttcatgt

SEQ ID NO: 195879 - DNA, 620 bp, Gossypium hirsutum
  unsure (1)..(620): unsure at all n locations
gaagaacaaatccttctatcaatacagggatgatgcaaaggcagcaaatgatttggctttgaaaggggacaaagaggcacttcaaaatctgtgtgttaaccaggtggagaaatttatggaattgtggaacaacaatgatgaattctgtaaagagtacatccgatgcaataccagaagcacattaaggaggctgaggacattagatggccgtgcacttggtcctgatgaggagccacctgtaattcctgcaattcctaaagttgtaaacgaacaagtggccaaggatcaaacagtttccagctcaactttggaagagcgaactcaagagaagactgcacctgcaaaagctgaaatagctaaggctaaacctgcagcaaagtccatggaacaaaagaacctgactagtaaatcagaaaagcctgtgaaatctgtccctcctgcaagtggttcaaccactgcttctagcagggataaaattgaagaagcagaagaaaaaccgaagatnacnaaggaagaaaaagatatggctangaaagcaaaagaatcnananaggaaaaagaagcanctanattaagggaacaacgtcggttggangagataactanagctaaggaggcta

SEQ ID NO: 195880 - DNA, 1098 bp, Gossypium hirsutum
  unsure (1)..(1098): unsure at all n locations
ctgattactttttgttaagattaaatgattctcctgaagccaaaggcgcttcatttttctattttttatgttgtttctagcttataattgcctgcagcaagggaggaaccagcattgaagaccttgcagagaaatatcctgatatgattattaaggtacctgttgatgtcttcaagggaattactgatgaagatgctgccagagttgttgatggtttggctcccaaggttgccgatagaaatgattctattgaacaagtgaagaaactatataagcttttctgtgaacgtgattgcacgttgttggaaatcaatcctcttgctgagacttctagcaaccaattagtagctgctgatgcaaagttgaactttgatgataatgctgcctttcgtcaaaaggagatatttgctctccgtgatccatctcaagaggatcctcgggaggttgctgctgccaaagctgatttaaattacattgggttagatggagaaattggttgcatggtgaatggtgcagggttggcgatggctacaatggatataattaaatttcatggaggaactcctgccaattttctggatgtaggtggaaatgcttctgaaggccaggtggttgaggcatttaagattttgacttctgatgataaagtgaaagccattttggtgaatatatttggaggaataatgaaatgtgatgtgatagcaagtgggatcgtcaatgctgccaaacaggtggccctaaaagttcctgtggtggtccgtcttgaaggtaccaatgttgaccaaggaaagcggattttgaaggaaagtggaatgacactaattacagcagaagatttggatgatgctgcagagaaagccgttaaggcagccagcaaatgagaaatttaagatacgagtcctttgttcttattgtttctcatctttcacagcattgatgagtttttcctttatttttcttttcatcaagcccatagaatcttgttaatgataaagcagcagggggttactgtcctgcaaaattgatatatttgccacatttgctccggacagttggcatataattcaaagttgatataacatccttctttgatttgng

SEQ ID NO: 195881 - DNA, 728 bp, Gossypium hirsutum
cccacgcgtccgcttctcttaatggattcacatctagagggacacttctcatctgaagaggcaactgtggtctttgatcttgcctcacaatgtttgcaatatgaaccaagggagaggccaaataccaaagatcttgtgactacacttgccccattgcaaaataaacctgatgttccatcttatgtgatgttgggaattcccaagcatgaggaggggcctcctactccacagcagccgttgtctccaatgggtgatgcctgttcacggatggatctcacagctatccatcaaattttggtaatgacacattacaaagatgatgaaggaacaaatgagctctcctttcaagagtggactcaacaaatgagagatatgttggaggcaagaaagcggggagatgtagcatttcgtgacaaagagtttaaaactgctgtagattgttattctcagttcatagacgttggaaccatggtttctccaactgtttatgcacgaagaagtctttgttatcttctgtgcgatcaaccagatgctgccctccgagatgcaatgcaagcacaatgtgtgtaccccgactggtcaacagcattttacatgcaggctgtatccttggccaagctagacatgcagaaggatgcagctgacatgttgaatgaagctgcggcactacaataaaaaaggcaacggggcggcagatgatcttgacacgttggttcaactttgtggcc

SEQ ID NO: 195882 - DNA, 859 bp, Gossypium hirsutum
cccacgcgtccgaaaatgtctacgatgttttcatgagtcggaaagatatgaaaacattgtggatcttactttagagatatatggttgggttgaatcattggaagatgcactaactcagtttacgacacccgaagatttggatggcgaaaacatgtaccggtgtggaaggtgtgccggttatgctcgggctcggaagcagttgcgcatacacgaggctcctaatatcctgacaattgtcttaaagcggtttcaggagggaaaatatgggaaaataaacaagtgtatcacttttcccgacatgctcgacatggttccttttatgactggaacgggtgacattcccccgctttacatgctttatgctgttgtggtgcatttggatacactgaatgcatctttttcaggacattacgtgtcatatgtaaaagatttgcgaggtaactggttcaggatagatgatactgaggtccatccagcctcaatgagccaagggatgtccgaggatgcatacatcttattttactcgaggtcataccctcgccctcaaagagcagtatctgaaaagatcaagcaagttcctgctagggcacctcgcatcgaaaatggagaagcctacacgaccagcacaaagcaaatccagcagccattctgttggccccaagctttacccagattccaggtccggaactgctgcaggctatatcaaccgtgactctaatggcattcttaggcagagtgcaaatagtaacattcaccgagtggtagagatgtatgctgagccatccaacgtggagttctctgatgctacgtcaagtgattggtccctttttacaagctcaaatgaagcttcttttacaac

SEQ ID NO: 195883 - DNA, 451 bp, Gossypium hirsutum
caattattagggtttcggcatagcagctctctcttatcccattttctttgcagccaaccttttaacaaatatctacagcctaaaatcaacctgctagagcctccttttgcagccgccggacccaccattcaatttgacggtcgacggtgcacgagcagagatccgatcttgcccacaaagatcacccatggaaattaggtaaattaatccctctccttttcttctttttaaaaaaaactcaaatcatgcgttaatctctttaaaaaacaaagcagaaattcaaaagaaacaaacattcgaccctcgcccgaatctctatattttcgagatatttgggtattcatcggtgtcgattcacatactaaaagaggaaatcgagccaaccaaaaggaaaataaatcggccgagaaggaacaaagctgcgtgaaatcatctttactgtttttgattt

SEQ ID NO: 195884 - DNA, 626 bp, Gossypium hirsutum
cccacgcgtccgcccacgcgtccgttccacgcgtccgcccacgcgtccggttgatcatcggcgtcgtcgtcgtcgtcatcgccactcatctctcctttcactttctcgccactttcgtctttctttgatccttccttgtcatcatcaaccttgccatttttattaccaccgaaagaggaagctttagtgcatacaattacaggggtagccaagaacgtgggtttctcttcaccggccattatcaccagaatcttctcctcataaaccttcacctgcttggttgagtcgccctcattttcaccactttcgacatccctttcgacatcacctccttcactgttgttgtccaaacgaccagaaagccgccagtaggaacaagctaagatcaagagagcaaaagcaatgaggcccagcatcgctgctaggccaccaaagaggtaaggcacgggagagtgccatggagagcgtggatgcaccattgctggtggtgacattgagggcatagctgctgtttctactgtgttaacgctgctaattggtctcatttttagtgtttctttatagacctcgatttcttcttgttaacagagaaggtggtagtttggttgaggtagcggacgcgaggg

SEQ ID NO: 195885 - DNA, 644 bp, Gossypium hirsutum
cccacgcgtccgatttctacttcccaaagctatcgtataaaaatgggccacttttagatttcacttttaaaagaaccccctttctttcacttgttttgcatttaagtaatgggaaaagctacaaggtggctaaagagcttatttgggataaagaacaccaaagaatgcccaagttccggtgaccggaaagataagaaacggtgtagcattgggcattcagggcgggaatcaagcggcggattatgtcgcgtccccccacgcgttcgaccaaatatatcaccggcagaggtggtttggctgagatcattctacaatgaaacggagaaagagcagaataagcacgcaattgcggtggcagctgccacggctgctgctgcagatgccgctgtcgccgccgctcaggcagctgtggcggtggtgaggcttacgagtcatggaagaggtaccatgttcggcggtggtggacatggaaagtgggctgccattaagattcaatccgttttcagaggctatctggctaaaaaagcattacgagctttgaaaggattagtggaaattcaagcacttgttagaggatttttagtgagaaaacaagcttcagctacacttcatggcatgcaagcattgataagagcacaagctac

SEQ ID NO: 195886 - DNA, 367 bp, Gossypium hirsutum
ctacaatgaaatggaaggtgtcatgtgaagaacatgggttttgtttttaagcatattatcacaacagctgtttcaaactttttatagcttttgagcatgcatgtacttcccttctagttgcagttgcagtgttgtctgatactgagagtggaagctggattggggaccatgagtgaagacaaagtcagtgagacttaagcttagactaagatttgtatatatgacgttgcaaaattatatatattatcaataatcataatcataatcataatacttaatcattcaatgaataatttctactatgcccgtttggcatgtatgattgcgtattgcaagtggtagcctaaattaatcaaaccttattttg

SEQ ID NO: 195887 - DNA, 651 bp, Gossypium hirsutum
atctcgtctctctctctttcacctctctagaaaaccctgcatttcaccttcttcactcccattttcttatatctcgaaaccccataaaccaaaggatcgaacccatttcagattgtattcaatggcatcatcggacttgaaagaatcagctgccaataaccctgggcttcatactacccctgatgaagctaccaaagactacatcatgcagcaaactatgtttcgaattaaggatccaaaagccagtcttgatttttactctcgtgtgttgggcatgtcgctgcttaagagagtggatgttccagaattgaagtttaccttgtactttatgggctatgaggatgtctccaaagctccaagtgattccatacggtactaacagtttggacctttggatgggcagctaccattgaatttcccatatttcgggcactgtagtgaacccgattacataggtattacacttagaattccatccccgtagctctggtctaatgtattcatgttgtctatgattacagtgctcatatatatctcatacatacatcttattaccctatttatattcatatatcattatgcatacatctatctaaccctctctatcatataattctaccttcttcgtgtgatttaaagtcactttcgccc

SEQ ID NO: 195888 - DNA, 923 bp, Gossypium hirsutum
  unsure (1)..(923): unsure at all n locations
cccacgcgtccgcccacgcgtccgcccacgcgtccggcctagccactgcttcactgccatctcttaaaatttccaaaggatccaacccatttcaggttgttttcaatggcatcatcggacttgaaagaatcagctgccaataaccctgggcttcatactacccctgatgaagctaccaaagactacatcatgcagcaaactatgtatcgaattaaggatccaaaagtcagtcttgatttttactctcgtgtgttgggcatgtcgctgcttaagagagtggatgttccagaattgaagtttaccttgtactttatgggctatgaggatgtttccaaagctccaagtgatccatacggtagaacagtttggacctttggaagggcagctaccattgaattaacacataattggggtactgtaagtgaccctgagttcaaaggatatcacaccgggagttcagaacctcgtggctttggtcatattggcatcacggtggatgatgtgaataaggcatgcgagagatttgaacgcctgggagtagaatttgtcaagaaattagatgcaggcaagatgaaagggattgcattcattaaggatcccgatggttactggattgaaatctttgatttgaaaaccattggagatgttattagccgttgttcctgagttaagcacatcttgaagcttgctcaggaaacaaggatggcatgtgaaggttttatctcattgtcttggtttcagagtatggtctatattggtcgtagtcgagacggaaattaggcatatggagttttagaccaaacaaaaaaaaaggcctgtggagtttttgttaaagcatattgtattgttgtgtgtttcttatgatatttcaaacagagtcatgcggattgttatcattgtaatggacattatcnattatctct

SEQ ID NO: 195889 - DNA, 436 bp, Gossypium hirsutum
ttcacgcgtccggtctctctctctttcacctctctagaaaaccctgcatttcaccttcttcactcccattttcttatttctcgaaaccccataaaccaaacgtttatccattaatattaagacccaattctcacatcattttcctttgaggaatttaaccgaaaagtttggatttcttttttgtaggatccaacccatttcaggttgttttcaatggcatcatcggacttgaaagaatcagctgccaataaccctgggcttcatactacccctgatgaagctaccaaagactacatcatgcagcaaactatgtatcgaattaaggatccaaaagtcagtcttgatttttactctcgtgtattgggcatgtcgctgcttaagagagtggatgttccagaattgaagtttaccttgtactttatgggctatgaggatg

SEQ ID NO: 195890 - DNA, 585 bp, Gossypium hirsutum
ctcccctcgttgttcatcaatcccttcatctaaatctaacccctagttaagttctctgactattgaagaaatttgaattccttaattatcattcaatttatcagttcatattaaatattcttccggataaaaaaaaaagaacaacacttgctatggcttctttgcaaaggtcagcgagttcatccgattcggatccgcagtacgcaaacatcgatgagaggaaaaggaagagaatgctatcaaaccgtgaatcggcaaggcgatcaagaatgaggaagcagaagcggctccaagatttggttcaggaagtgaacgcattacagaaagataacagtcagatctctgaaaagatcggcgtcgccacccaatactacatcgagatgcaatcggccaataatgttttaagagctcaggcgatggaattgaccgagagattacggtctctgaattcggtgctgcaagttgtggaagaagccgacgggtatgccattgatatccccgagattccggagccgtggcagctcccctgttcgatacagccaattatggctttggttgatatgttcgagtatgatggatagactc

SEQ ID NO: 195891 - DNA, 433 bp, Gossypium hirsutum
gcgagtctgatagagatgctgagaatgaaagtgactcaccggttacgccagaacctccagctcctcctttaagaagtgtgaacatgcttcagggatgtagaagtgtagatgaatttgagagattaaataagatagatgaaggtacttatggtgttgtttatagagctagggacaagaagacaggggaaattgtggcattgaagaaggtaaagatggagaaagaaagagaaggttttcctctgacctctttgagggaaataaacattcttctctcatttcatcacccatcggttgtagatgttaaagaagtagttgtagggagtaaccttgatagtatctttatggttatggaatacatggaacatgatctaaaagcgctgatggagacaatgagacaaccattcagccaaagtgagggtaaatgcttgatgct

SEQ ID NO: 195892 - DNA, 518 bp, Gossypium hirsutum
tcgtgcgatgagattcaagaggcatcacaaatactgagttgtttggctgatatggtttactgcacggtctgtgcatgtatgcagacgcaacataaggttgaaatggacaaacgagatggcaagttttgtccacaaccaatggcagtcccccctgttcagcagatgtctcgcattgatcaaccaattcctcctgcagctggctatccaccagcagcatatggacagccttatccagctcaaggttacccgcctgctgcataccctcctcctcagtacccaccatctggttattctaggtaaatatttctctgggttacttgttggttgcaagcactagtttgggctactaaggcatggatagggctttgatttgcaagctgcaaattacatagtgatatatttttatgcgtgatttgcttttcgtgttgctgatttgaacagctaaaggtttaaaaagtagatataccatgaacatgtctgctatcaatagtttatgcaaatttgtaaaggtaagacat

SEQ ID NO: 195893 - DNA, 551 bp, Gossypium hirsutum
ttttggagcttcctttcaacctcgccatggttatagaggatatgaaagaggaagaggaagaggaagaggaagaggaactgggagttcacgtccagtgacaaaatttactgaagactttgatttcgtggcaatgaatgagaaattcaagaaagatgaagtatggggtcatcttggtaacagtagcaaatctcatactaaggataaagaagcagatgccgttgatgaatatggttctcaagatgaagatgatgctgaaatacctaagattcaaacgaagcctgtttacaataaggatgacttttttgatactctctcctgcaatgcacttgataatgactcgcaaaacggaaggccgagattctctgagcaaatgaagttagacacagagacttttggtgatttttcaagacatcgaggtggacgtgggcgtggaactggacgtggacgtggtggtcgttatcgtggtgggtattatggaagagggtatggatatgtggggaggggtcgtgggtaagacatgcatttgcatgccccatagttgtgcttgattt

SEQ ID NO: 195894 - DNA, 728 bp, Gossypium hirsutum
atggaatgtaaaattgatccaaagcttccatatactgatttatcaactatgattcgacgccagaggcaggcaattgatgaaaagattagagagctctcgaactgtcaaatagtttatccgggacttgattttcagaagaaagaagctggtattcctaaaaaagtcgtcaaagttgaggatatccatggcttgaaggaagctggttggactcctgatcaatggggtcatactcgatttagagccttaattgtttttgcagacaacgcgacatatcataaacatttaactggtttcatgcgctcacttttgaagtcaatgcatgaccatgttgatgcttggccattcaaggaaccagttgatgcccgtgatgtccctgattatgatgacattatcaaagaccccatggatctgaagacgatgtcaaaaagagttgaatcagagcaatattatgtcacactcgagatgttcgtagctgatgtcaagaggatgtttgccaatgcacgcacgtataattctcctgataccatatactataaatgtgcaaccagattggaagcacatttccagagcaaagttcaatcaggtcttcaatctaacaccaaaattcagtagggtcttcaatcaggtcttatgatccctgaagatcagatttcagcgattccagctgtcccatttcaacaatatgtaacaggagtcttcatatactgtctataatttgcagatttttc

SEQ ID NO: 195895 - DNA, 388 bp, Gossypium hirsutum
  unsure (1)..(388): unsure at all n locations
agntggtttttcctttccccattgcttgttttcttgtttggtagaaccgactaaagatattaggagctgcttaaatccattcaactccaaaaccatatttgatcgcatgattagcatagaaaagtttataacgaaagaataagtgaaaaatccagggcttttcttatttgttttatcaacaacaaaattagaacccccaaaaagaaattaagcatgaacaactccctccaaacatggaaattattaacagaggcaaagatatggttctgtcataactcaggcagtagtgttgttattttggagcttcaaatccttggtaaaccctattaatgaagtcctccgcagccttatctacgttgccattaccttcatcaacatctcttaaagg

SEQ ID NO: 195896 - DNA, 449 bp, Gossypium hirsutum
ttcctccaaatttgctgcaaaagcttggcacggattgcctagctcaatatcaatttgcaaaaccatcgttatggcatttcgccagagaagcttcaaaatactccaaatctgtccagattcttcaagatcttaacaacaagcacagataaaaataacaaggtatatgtctccactgcgcaagcacatggctatcctgtcactgccttccagtggcatccagagaaaaatgcttttgaatggggcttgcctatgattccacactcagacgacgccattgaagtgacacaacatgttgcaaactttttaatcagggaggctaggagatcgctgaataggccagctgctcaaaaagtgcttgacaaccttatttataattacagccccacgttttgtgggaaagctgggaggggtttcgatgaggtctacatctttacacaacgtcaagctcg

SEQ ID NO: 195897 - DNA, 889 bp, Gossypium hirsutum
aagaattacccaaaactcaatcccatgatcctgtcccaccttcacatgatgagatggatcagttacaggaacgtaattgtagtagctccttttctcctgcttctctagatcctccatcctcaggtcagaagttcgtatctcccatggcaaaagtttgtatttgctgctccaaagaattacccaaaactcaatcccatgatcctgtgccaccttcacatgttgagatggatcagttacgggatcgtaattgtagcagctccctttctcctgcttctctagatcctacatcctcaggtcaaaagtttgtatctcccatagcaaaggaaaatcatgaccaggagagtctgcagagcaaccattctccgttacctagctctcatcaattcgcacatgcacatgattcccctgggaagcaggcagtgcagcactattcatctgatatgagcagtagttcaatcatggagccttcaggaaacaaaaatgagctttatgcattggtgccacatgaagcacctggcacgtttaccaatgttctggatgctcttaaacaagccaggatgtctttacaacagaaaatccatacattgccactaatagagggtgcatctggaggaaaagctattgaaccttctgttcatggaagacaaattggggagagagtagagattcctgttggatgctctggactcttcagggttcctaccgacttttcagcagaggcctctaaagtgaactttcggggttcaggtttgcagttaagtttggcaaactatttccccgaagcagtagttgcaccttcttctagcaaccatcttcttaccacttcttatatgaacactcagtcaagtagttctagtaactatcagccagttagtagtgatcggtttta

SEQ ID NO: 195898 - DNA, 442 bp, Gossypium hirsutum
cccctcttccgcccacgcgtccgcccacgcgtccgatcgtctccgcccaaaaggaaaaattattttcccctttcaccataaattgaacgttgaactcctcaaaaatcttcaaagcttcaacttttccaaacatcagcgatccctttcactccaaatttcatcgggtgaataatggcgacgtttgagctttaccggaggtcaacgatcgggatgtgtttgacggagactttagacgagatggtttccagcagtactttaagccctgagctcgctattcaggttctcgtccagttcgataagtctatgactgaagccctggaaagtcaagtgaagagcaaggtttccattaagggacatctgcacacctatagattctgtgacaatgtttggaccttcatcttacaagatgctttgtttaagaacgaggatactcaagaaaacg

SEQ ID NO: 195899 - DNA, 425 bp, Gossypium hirsutum
gtgattgtgaacctgaaagaggaccaaatgttttgagagaaaaaaaatcacatggcaagtgagatgtctcttaggatggagagattgttcatgggagaccagcagatgcttcaagaagacttctctagtgatgagggtgaatctgtcaactctcggagttgtttaatttttgagtattttgaacaagacactccttatagccgggaacccttagccaacaagattgcagatctggccttccaattccctgaactgaggacactaacaagctgtgatttgttgtcttccagctggatttctgtggcatggtatccaatttacagaatacctactgggcctacattaaaagatctagatgcttgctttctgacttatcattatcttcatacacccatagtggacgggcaccggccatgacatgttcc

SEQ ID NO: 195900 - DNA, 450 bp, Gossypium hirsutum
agggtatgtaataccaacaccagtcatccagcattttatccaagactatgagaagaatgaagcctatactggattccctattttggggattgagtggcaaaaaatggaaaacccagatttgcgtaaagcaatgggcatgaaacctgaacagaaaggtgttcgaatcagaagagttgatcccacagctccagaatctggggttttgaagtcatcagatattgtgctcagctttgatggggttgatattgccaatgatggaacggtatgggaaggattatgaatatgaagctccagtgaagctattggacaaactcttgcattcaatgctgcagtcacccgatgaacagcttgttgtggtgtctcaggttcttgtgtctgatatcaatattggatatgaggacattgttaacactcaggtccttgctcttaatggtaagccagtgaagaatt

SEQ ID NO: 195901 - DNA, 588 bp, Gossypium hirsutum
cggacgcgtgggcggacgcgtgggcggacgcgtgggcggacgcgtgggcaagaggaaactacttcgggaaaattcaatggatttgacacctaacgtcgcggtcgctaaggatggtagtgggaaatatgattgcatcacagaggccttagctgaagccccgttgaatagctgcgatcgatttgttattcacattaaggctggtacttataaggaaaaaatcctcgtgaccaaggagatgactaatgttatgttccttggtgatggcccaactgagaccatcatcaccaactgcgttaactgctgtaaggataatgttaaaacattcaacactgcaactgttggtgtggatggggctggtttcatggccaagggcactgagttcgataactcagcaggacccgaatgtcatcaagcagtggcttttatggcatcctgtgataaggtcgtcatgtttaattgtcatttcactgggtaccaagacaccctttacgctcatagagacaaacaattttatagggattgtctcattagcgggacggtggacttcattttcaggaatgcggcgagtgtgtttcaaaactgtcagat

SEQ ID NO: 195902 - DNA, 652 bp, Gossypium hirsutum
gtgagtgtagatcaaagaaattaaaaaatgcgattcagcagggcgttgaaggttgctccgattctgcttcttctgctgatcctttttacatttgcgaatgccaagaagtcagccgatgtgacccagctacagatcggagtcaagcataagcccaaatcatgcgagttccaagctcacaaaggtccgcccacccgtccgcactatcgggggaaactcactgatggaactgtattcgattcaagttttgaaaggggtgacccaattgaatttgagcttggtagtggtcaagtaatcaaaggatgggaccaaggactactaggaatgtgtgtcggtgagaagcggaagttgaaaatacccgcaaagcttggttatggtgaccatggttcaccacccaaaatcccaggtggagcaacactagtatttgacacggagcttgttgcagtcaatgggaagccatccagcggtggggataatacaagtgaagatgagctataataactgatgataggcactcgtctgagcagctttatccttttactacgtttgttttcctttaaaaatgctagcaatggtaaacctcaccagcctttctggctgggatttagaaaacaaattctggtggcattttttcataagcaaaaaactatttatt

SEQ ID NO: 195903 - DNA, 1076 bp, Gossypium hirsutum
  unsure (1)..(1076): unsure at all n locations
cttcggccaaaccagggatcctcctaaggacaactcaaataaagaagtctctattttggagaatgtttgttggaaagaacttggactcctttgtttcgtttggattgcattccttgtactgcagattaccaagaataatacaactacttgttcagcattgtattgggtgttgaacttgctgcagatcccagtttcagttggggtatctctatatgaggcagttagtctctataaaggatatagagttattgcatccaagggagaacatggcacaagttttcgagtagcccagcttgttacctactgtgcttttggagtactagctggagtgggcggccgtctgcttggcctaggaggaggatttatcatgggtccactattcttggagttgggtgtccctcctcaagtatcaagtgctacagctacctttgccatgacattttcctcatccatgtctgttgtagaatattaccttctgaagcgttttccagtaccttacgctctgtacttcactggggtagctacagttgctgcctttatcggacagcatgttgtccgaaagctgataattttatttggaagggcatctttgatcatcttcattctagcctccacaatatttgtcagtgcaatatcactaggtggtgttggcatatcaaacatgatcgggaaaatcgagcgccacgagtacatgggattcgagaacctgtgcaagtacgaaagctgatatctcaggttattttatctctcaattgatccacctccttaagtctcctgtaagttaggctagattgcgttttggggaagaaagaagatggtcaataattttccattctttacacaatccccatttttcactttccgttccgttttatatttatgagatacatttattgacaatattcagaaattgtctagatgaatggaattatagcttcctgttatttggttgtttnnnnnnnnnnnnnnnnnnnnnnnnnnnnnnnnnnnnnnnnnnnnnnnnnnnnnnnnnnnnnnnnnnnnnnnnnnnnnnnnnnnnnnnnnnnnnnnnnnnnnnnnnnnnnnnnnnnnnnnnn

SEQ ID NO: 195904 - DNA, 475 bp, Gossypium hirsutum
cccactgcgtcctttccacgcgtccgtattccttcattgggttctttgttagaacccttaaacctaccggaaacacaatgatccgaatcgccaaaaaccccaaacctctaacaactctgactcaccaattcctccaacgctgcaccgtcagtggaaccgccaaaggcaaatccaaactcaaagccggccaacctttgaaacgctccaaaatctccactaaaaaaggaaaaggcggcgcttctctcgacgattccctccccaaaggcggcagaatccccgacgagaagcaaaaactctacgaccaatgcctcaatgcacccacaccggtccgtcacctctcaccgaaagagcgagcccgcgaagccgaacgagaaaaattgggattaataagcaaggagcggcaacgggaaatggagattttgaagaagggaggaagaaaggcaatgggagtccctgacgagcctatgattatggg

SEQ ID NO: 195905 - DNA, 600 bp, Gossypium hirsutum
tcgtccacgcgtccgcccacgcgtccgtatgaaatgcttcaagttgcacacaaaagcacgggaaaacaaatctattatgagttgaactttgagcttgtttagcttggataaaatatcataaaaaagtttgcttctcttttttgtttttcaaccaactactccttaaattatggaagtgagaggccaagaacatgatattaaaacgccagggtcttcagcctttggtcttcactcgcctggagtagagagaagaaaagatggtaaccataatggtacggccgttctcacgtgcactcaaaccctagatcatgttcatcgtctccagaggcagccatcactcggtcaagggagagccccacatccggatcgagtcgctgccgccactggtgctgcagctgttgcacccatttcagctggttcaaacgctgagccgtccagcttcgtcagataccgagagtgtactcaagagccacgccgccagcatcggcgggaatgtgtacgatggctgcggcgagttcatgcctagtggggaagaaggaacactcgaggccttgaaatgtgctgcctgtgactgccatcgcaactttcatcgcaaggagg

SEQ ID NO: 195906 - DNA, 432 bp, Gossypium hirsutum
cagcagacccaattcttagggtttcaacacagcaaattttggggttttcccatccccctatttgaccattcgactgccccattccgccattgaaattgatggacggtggctccccatggagttgtttcattctcctattctaagcctcacctcgaaaggtaagatttttagcccgaaaacccatctcaagcttcaatttcgacgaagaagagatggtcctcgatggctcgtttgaaggtatgcttccttttttattatattatgcataaaacatatgaaacacgaaaggaagatgaaacagatgcgaaaaaaaaaagaaacacaaggcgttcaaaaaaaaatcaccttctagttctattctgatttctctctattgcggattgcgtaaatgtctgtttttttatgtaaccgattacaaggattaaaatttca

SEQ ID NO: 195907 - DNA, 343 bp, Gossypium hirsutum
ggaaaacagaggtaaatagttaagcaagctaaagaaatggcaaaagttcaacagatcactcttgtttccttggcgatctgcctttcaaccctcctcggcttcgctgccgccgccaaccctgaagagaagttcatcgttgaaggccgagtttactgcgacacttgccgtgttgaatttgagaccaaaatcagcaaaccaattaagggcgcatcagtgaaattggaatgccggaacattaccaacgagaaaatcgtgtcgcacagccaagacgtagttaccgacgaagccggaggatacaagatcgaggtgaaaggtgatcacgaagatgagatctgtgaagtga

SEQ ID NO: 195908 - DNA, 481 bp, Gossypium hirsutum
gtcaaaccctacaaaaaatgctgagtgcaccccagaggaagctttctcgattgtaggcgacaacattatatttgcaagtggaagtccatttagagatgttgatcttggaaatcgtcaaattgggcatagcaaccaaggaaacaacatgtatctctttccaggtattggccttggaactcttctgtctggctctaggatcatttcggatggcatgctacaggctgcagcagaacgtctggctgcctacatgacagaagatgaagttctcaagggcatgatattccctccaatatcaaagataagagatataacaaaggaggtagcagcagcttgtggtgaaggaagctgtagaagaggatctggcagaaggatatcgtgacattgacgctagagagctccaaaaaatatgtcagaacgaggaggaagttttagaatatgtggagaacagcatgtggagcccagaatatccaactctagttta

SEQ ID NO: 195909 - DNA, 720 bp, Gossypium hirsutum
aaaatattattccatcttcatcccttttaaccgccggccgtctttcacttctccggcgatatcattttttccgtcaagagctactctcagcagaatttgtcacagatggcttcttccttccgagcattcttgaacagtccagttggtccaaaaacaactcacttttggggacctgttgccaattggggatttgttcttgctggactggtggacatgaataagcccccagaaatgatttctggcaacatgacttcagcaatgtgtgtctattcagcattgttcatgaggtttgcatggatggtacagccacgaaactatcttctgttggcatgccatgcttcaaatgagacagtacagctctatcaactttcacgttgggctagagctcaggggtatttgtctgagaagaaagaggaggcctcatctcagtaaagtacccttttttcctgcttttctttccattttgagattctgctattttcttgtgatccctgtaagaatctattctgagctttactttataaagaaactgatttaattctaccttcatctggccgaagcttaagcacatagtaagccgattactgttaagtggaatcatgatcggccgcctttcttattatgcatgagtggtaaaacagcttagaattctacaatcaatgttgattcaataaactttttcttgatttagctgaccataaaagaaaaaaaaccggggaa

SEQ ID NO: 195910 - DNA, 839 bp, Gossypium hirsutum
ctctctttgatttctttgtcgtaattccaccatgtctgtcatttgagaggctgctctttctgcgtttttggagctgttgtctggcaagttggttgactctgtactcaactttgtagccggtcacaggcaagtccaccagcaactcgagcagtggcaatccatattacccgagatcaaagcagtgttgaaccgtacagaggagaagcagatcaagggcgaggacgatggtgtgaagaattggttggacgatctccaagacttagcttacgatgtggatgacatcttggacgagttcgcttaccaacagttacatctcaagctccaaaaacctcaatctcaagccagcactagtaaggtacagaagctcattcctacctgctgtactggtactaatttctccccaacctcttttaagttcaatactaagatgatttcaaagataaaagaaatcaccagtagactgaatcgtttcaaacataaaagaaatcaccagtagactgatcccgtttcaaacataaaagaaatcaccagtagactgaatcggttcaaacacttgaagaagtagtttggggttgagtgagatcatgtctcaaggtgcaacttccaagggaaagaaactcaggctgcaaccaacttccttgatggatggagctgtggagtatgttggtagagccaatgagaagcaagatatggttgagttgctcaaaattaacaactcagatggagtttgcgtcctttccatcgttggcatgggagggatgggcggaaaacagctcttgctcagctggtttacaatgatcccagctatggatttaaattgcggtccgataccggaatgg

SEQ ID NO: 195911 - DNA, 751 bp, Gossypium hirsutum
  unsure (1)..(751): unsure at all n locations
cccacgcgtccgagaaaatttcactgcgagattcatatcgggtttcaactcttttcctccaatttgcacttgaagtgatggataccggatcaaaggtgaagaaaggagccggaggaaggaaaggcggcggtccaaagaagaaaccggtttctcgttcagtgaaagccggattacagtttcccgtcggtcgaattggccggtacttgaagaaagggcgatactctcaacgtgtgggaacgggtgctccagtttaccttgctgctgttcttgaatacctagctgctgaggttcttgagttagctggcaatgctgcaagagacaacaagaagaataggatcattccaaggcatgttctattggcagtgaggaacgatgaagaacttgggaagcttttagctggtgtgactattgctcatggtggtgttttacccaatattaacccagttcttttaccaaagaaaaacgagaaagcggctgcaaaagagcctaagtcgccatctaaggctacaaagtctccaaagaaatcacctaagaaggcttagttgtttgtctattatagggtttgttttgatttatctgttaatgtatgtaggttccttttgtgtactttggttgtaggaaaatgttggtaatgttgtttagaatatgttttgtttgaaatgaatgaactgaaattcagattgaaaataaaaaccgatacccncttttaattgtatattccctacaacctttatatttccaaaccatcatg

SEQ ID NO: 195912 - DNA, 399 bp, Gossypium hirsutum
cccatgcgttcgttcgaaatttccttttctttttcgattttttcctccgatttgcatttgaagtgatggatgcaggatcaaaggtgaagaaaggagccggaggaaggaaaggcggcggtccaaagaagaagccggtttctcgttcggtgaaagccggagtacagtttcccgttggtcgaattggccgatacttgaagaaaggccgatactctcaacgtgtgggaaccggtgctccagtttaccttgctgctgttcttgaataccttgctgctgagggtcttggtgttagctggtaatgctgcaagagacaacaagaagaagttgatcattccacggcatgttctattagcattgagaaacgatgaagagcttgtgaagctcttagctggtgagactatt

SEQ ID NO: 195913 - DNA, 1081 bp, Gossypium hirsutum
  unsure (1)..(1081): unsure at all n locations
ggattttgattttttttctttaaaaaaatggtggctaaatctcgggtatggcagccatgcaagaagaagaggtattttatcaatagcaagctttaggaagtgggggaatatagggaaaaaaattaaataataataaaaaggatttggagagacaacgatggcgactcgcagtagcggttcgagtcggacgtgtgtggggaaatatgagttagggagaacgttgggagaaggaactttcgcgaaggtgaaattcgcaaggcatttagagacgggagagaatgtancaattaagattcttgataaagagaaagttttgaaacataagatgattgctcagattaaaagagaaatttcaacaatgaaactcatcatacacccaaatgtcatccgcttatatgaggtgatggctagcaagacgaaaatatacattgttctggaacttgtgactggtggtgaactttttgacaaaattgcaagcaaaggaaggttgaaagaagatgaagctagaaagtattttcagcagcttattaatgctgtggattactgccatagcaggggtgtttaccatcgagacctcaagcctgagaatttgctgctagatggtaatggagttcttaaagtttcggattttggtttgagtgctttacctcagcaagttcgagaggatggattacttcacacaacatgtggaacaccaaactatgttgctccagaggtgatcgacaataaaggctatgatggagctaaggcagatttgtggtcatgtggtgtgattctctttgtcttaatggctggttacttgccttttgaggactccaatttagtctctctgtataaaaagatatctaaggctgacttcggctgtcctccatggttctcctcaagtgccaagaaattaatcaagagaatcctagaccctaatcctttgacaaggataaccgttgccgaccttcttcagaatgagtggtttaagaaaggatttatcctacctaggtttgagcgagctgatgttagtcttgatgatgtggatgccattttcaacgaatcaagtgattctcggaaccttgttgaactgtgtgaa

SEQ ID NO: 195914 - DNA, 1000 bp, Gossypium hirsutum
cccacgcgtccgcccacgcgtccgtaagaactaaatccaccccctctcgttgctgatctaggtacttcagaataccctgctgaaatgaatcaaaagggcttgatttatagttttgttgcaaaaggaactgttgttttagctgagcacacatcatattctgggaactttagtaccattgctgttcaatgtttacagaagctgccttcaaatagcagcaagttcacgtattcttgtgacggtcacacatttaacctcctcattgacaatggatttgtgtttctagttgtcgcagatgaatcagttggcaggagtgtgcctttcgtttttcttgaacgggtgctagatgattttaaacaacgatatggtgcaagtataagaaatgagggtccccatcctttagctgatgatgacgatgatgacgacttatttgaggaccaatttagcattgcatataatcttgacagagaatttggaccaaggcttaaggagcacatgcaatattgtatgaaccatccagaagaaatgagtaagctctcgaagttaaaagctcaaatcactgaggtgaaggggattatgatggataacattgagaaggttttggatcgcggggagaagattgaacttctagtggacaaaactgagaacttacaattccaggctgatagcttccagaggcaagggcggcaactgcggcggaggatgtggctgcagaatctgcaaatgaaactgatggtggggggagctattcttgtgttgatcatccttttgtgggtttttgcgtgtggaggtttcaaatgttaacgttgataaccattgcattgcattgcctatgttttcttttatatatacaaaaaataataattctacatttgtttagatgtacaaaatatagttatgctcttgactttgtacatggattgctgttgttatgtagcactaccttgccgtttaagatatgtaatcaaagctttgaattttatacttttttgaagttttctaa

SEQ ID NO: 195915 - DNA, 707 bp, Gossypium hirsutum
  unsure (1)..(707): unsure at all n locations
aattgatccaaaagatttttccaattccttattggtagaattttttatttctcgattcgatttcgtctgtgtttcttggtatggtttattgagactgcagtccttggatggtacattgagaaatcataagcagagcatgagcactcttgagattagggggccttctcttaggggatatcgaaggagaaaggcagtgcttgatctgaatgttccacccagtgaaatcagggagcaggagggtacatctcaacaggctgggtatgaggatcaaacgaatcaatccgtacagactggtccacctgcaaccattgatgttgaggctattgatgatgatgtaattgaatcttctgctaaagcttttgcagaggctcagaacaattctaggaggagccgtggaaggactgtggttgatgttgattcaggctggtcagctaggtcaagtaataacaatcagaataggcacagaagacttcctccgagctcaagcattatcaatttggaaatctcgccacagtcaattcaggttcagganatcacaaagccacagccacctccaaaggaaccaaccttcaattgtccaatttgcatgggtccattaacagaagagatgtcnacaagatgtgggcatatnttctgcaaggcatgcattaaagctgcaatagctacacaggcaaaatgcccaacttgcaggaaaagagtcactgtgt

SEQ ID NO: 195916 - DNA, 628 bp, Gossypium hirsutum
  unsure (1)..(628): unsure at all n locations
agagtaacgaatgatcgatcatcgccaaagtcaacgaaccgctcagaatcatggctggaaacttaggatgcgtcgtcgtatccgttgatggcaacgaaggaagcatggacgccttacgatgggcgctcgataatattaagctccgaccatcttctccggactctactcaaccgcccggtcacttcctcatcctctacggccaacctccaccgtccatcgctgctggcctcaatcccggcgccatccccttcggcgggcccacccatctagaagttcctgcattcacggcagctatcgaggcgcatcagaagagaatcactgatgcgatcttgaaccatgctcttcagatttgcgctgaaaagaaggcaaacgtgaaaactcaagttgtgattggggatccaaaggaaaaaatttgtgaagtaattgaaaatgtgcatgctgatttgcttgtgatgggttcccgagcttttggccctattaaaagaatgtttttgggaagtgtttagcacctattgcgccaaccatgcacaatgcgctgttatgattgttaagaacaaggaagcttcctccaaatcttaagagacttgtcaccaagacaancttgttaggagctatgttacgctgcgct

SEQ ID NO: 195917 - DNA, 573 bp, Gossypium hirsutum
cccacgcgtccgagtacaacggatcttggtacataaagaaaactaaagaagcggacctttaaagttccactgaagatagtggaggagaacaacaggacctggaatgcctttttcaaaagaatctttggctgaatctaaacatagattggaagcattggacaagaaggatgcagagcgaagaagaacagcagaggtgaaaaataaccttgaagaatatatatatgctacgaaagagaagcttgaaacatctgaagactttgaaaaagtatcttcaaatgatgagcgccaatctgttatcaaaaagcttgatgaggttcatgtatggttgtatactgatggtgtagatgcgagtgcctcggtgtttcaagttcggctaaattcattaaaagcgacggctgatccaatatttttccgatttaaggagttgactgcacggccagaagcggtagaagttgctcgacaatatctctctgacttgaaacagactattcgtgggtgggagacagaaaaaccctggctgccgaaagacagaatagatgagttgtcaacccgtatggacaagttgaagacttg

SEQ ID NO: 195918 - DNA, 515 bp, Gossypium hirsutum
cccacgcgtccgcccacgcgtccgcccacgcgtccgcccacgcgtccgcccacgcgtccgccagtttttttttttaccatccaaaaaaggagaaaattgacattatatggatagtaaagtaccgtctgaaaagtttactcaggagctagctcgcgagttgcttattgcgatatcttattctgtacctgataccgacccgaattcagatcatgcattgaaaatcgtagatggcgcaaatggcgctgtggctgcaatcgacaaggctgaaaaatataggtctgaactgatttcgatatccgatacgtctcctgatgctcaagtgcctcctgttgtgcttgggaaccatgcaggttaaaggagacaaaattgtaatgggagattttaatacatgcagtggctgttaatgatttctagaactgaacttgttgtagtgttgtgtgatttttacacctaatgtggatttgtttcgcttgtgattctccccatatcaatgtaaataaggaaacatacttttg

SEQ ID NO: 195919 - DNA, 499 bp, Gossypium hirsutum
cgtccggccctgacaaaacccactactttatttacttgttctcgtaccccttcatgatagatcttgttgtggttgtaccaaatagcccaataggcaatagatctaattttgcgagcttctgtattctggctaacaaattctgtttctaaccattttttccaaattggttctctccggcatgttgaaattgacacccccaatcccctcaacacctgtcgtgtgaaagagcaatccatgaagaggtgttccacagtttcctcctcagctcgacaaaccgggcacaatgtgttagcagccagatggcgtatttttaaattgtacatagtgggtaggaagccattggcaattctccacataaagattcgaagtttacttggtaatttaagctctcataggtttgtaaagaaattcgaagcaatttcactatgtattctattacccccctctgtagtaagtcattgatagccactttttactgtataaactcctatgttttcgc

SEQ ID NO: 195920 - DNA, 1065 bp, Gossypium hirsutum
cattttcagttgaggaacctggtatgggctacatcaaaacatgatgtttatctcatgtcacaattttctgtcatgcattggtcttcattgacacacaagaagcgtgaaattcttaatgtttctgggcatgtggcaccatctgagaaacatcctggaagtctgatggaaggttttacgcaaaccttagtcagtactcttgcagtaaaggataagctgctagttgctggaggattccagggtgaactaatatgcaagcatttagatcgacctgaaataagcttctgctccaggacaacttatgatgacaatgccattacaaatgctgttgagatttatgtcactccaagtggtgcagttcactttacggcctcaaataatgactgtggagtcagagattttgatatggagaaatatcagctttccaagcattttcattttctttggcctgtcaatcatacttctctgagccctgatgggaaacttctaataatagttggagacaaccctgatattatgttggtagactctgatacagggaagactgttatgcccttgcgtggacacttggacttttcatttgcgtcagcatggcatcctgatggtgtcacttttgcaactgggaaccaagacaaaacatgccgaatttgggatgttcgaaacttgtcaaagtcaattgctgttctaaagggaaaccttggagcaatacggtccattcgctacacatctgatggtaagtacatggccatggctgagcctgctgactctgtgcatgtgtatgacgtcaaaagtgggtacgagaatgagcaagacatcgatttctttggtgagatatccggcctatcctttagtccggacacagagtctctctctattggcgtatgggatcgcacatatggcagccttcttgagtatagccggcagaggaactacttatatcttgattccctaatgtgagttgattgtgatgcgggcaaaacaagtatgttggtgtagtttatgatatttgaagaacttgtatcatttcaatctgtagaagagggtttactgtagatgtaaatgtaaaat

SEQ ID NO: 195921 - DNA, 502 bp, Gossypium hirsutum
gtttgttcatctgttgcagaaacattctaacaaaacgcctcttacagcacaacgaagcttctagtggaggaacctttacttgtaatgaagcccaaacacgctattgagtatcacaagaccataccaaatgagctgtatcctgcagatctgtcttacacagagggcaggctacatccacactcaacttccgtcgtgccagattaccaaaatggggcagcagatcgttaatcagtctctgactataactgcagttgtagcgagtttgacatctttttggaaggatgcatcaaagtttaacttgataacatcatctgggggtcttcacagatccttcaccataattttaatgggaggacggagattctcttggtttaggcagatctctagttcataccctcgaataaaccctaaaaattcttgcataaaaaatttgacccctttgtggattagcttatttctgcgatgccaaagtccccaaactgacaaaggaatgattcatctc

SEQ ID NO: 195922 - DNA, 400 bp, Gossypium hirsutum
ggtcgagcacgcgccacgcagaattctaaaaattgctaaagaattattagaaaaaaagacagaattgaacaaccgggcaggcgttgtttgtgcattgcatacggctttacaatggaattctcttttttctttcatcgaaaaaagaaaaagagaaaatgtagagagcgtctattagacccagatcactaaataatccaattaccacccttcttttttttttcggaaaagttcaaaaatactatgatggctccggtgctttatatatttatttcgtctgtgattcagcattcccaaagtttctttttttttcaaaaaaaagaacgaaaaaaaatagtctttttttttcgtactcttttattttataacataaatattgttataaatattgttaatagcctct

SEQ ID NO: 195923 - DNA, 388 bp, Gossypium hirsutum
gcgcttttattcactccgtaagagccttggaattgctgaagaatggatatatgtaattaagagagatcgagatggaaaaatttcttggcatgcctttgatcctgtataccagctctggcagccacttcctcctgtccctaaggagtattctgaagcctttggctttggatgtgctgtactcagtggttgccacctttatctattcggtggtaaggatccattaaaaggatcaatgcgacgagttatattttatagtgctaggacaaacaaatggcaccgtgccccagatatgcttcgtcgaagacatttctttggttcgtgtgttataaacaattgcttgtatgttgctggtggagagaatgaaggggtacatcgatcattgaggtct

SEQ ID NO: 195924 - DNA, 478 bp, Gossypium hirsutum
ggaccggtactgactggccgggccgacgcacgcggggttttcggtgttcttgcaatgtcaaggtccatcggtgatagatatttgaaaccatggattatcccggaaccggaagttatgtttattcctcgagctagagaagatgaatgtttgattttagccagtgatgggttgtgggatgcgatatccaatgaggaagctggcgaggtggctcgacggcgaatcctgctctggcacaaaaagaatggggttccatctctggtggaaagaggcataggaattgacccagcggcgcaagcggcagctgaatacctttcgatgctggccatccaaaatggtagcagagacaacatctctgtaattgttgtagacttgaaagctcaaaggaagttcaagagctaaacattatctgagtgttaaccccccccaaatccaatcattttaaaatcatagtcgatatagtacctcgcatattagagac

SEQ ID NO: 195925 - DNA, 387 bp, Gossypium hirsutum
ggaaaaactgattccttgagcttcatatgagctacaaggcactgcaaaacatcctgcactgttccttggtacctcttgcaaaaaaccagataagccattcatcagtattttgcaccagataggtataccccaagagagtttaaggcttgaccatatttctgactgtaggacactgtcgaaaaacatgatagctgtgctcttctccaacaccacaacgggggcacatggtattgttagccaccctcttgcaacatagattaaccattatagagatgaaattccagtagatccgccaaaccagtattgtaattttgttggtagttgtatgtcccatagttttttaaagaaagctttagtttcggtttgtaataagtaactagtaggatc

SEQ ID NO: 195926 - DNA, 553 bp, Gossypium hirsutum
cttaaagaaactattgaatggggtggccgaaacatggacaagaaaaagagcaaacttgggggcattgtagacgatgatcatcaaactgataatagatttaaagatattcgcattgaaaggacagatgaatttggtcgaattgtgactcctaaggaagccttccggatgctttctcataaatttcatggcaaggggcctggcaaaatgaagcaagaaaagcggatgaagcaatatcaggaagagttgaagctgaagcaaatgaaaaattcagatacaccttcactttcagtggagaggatgagggaagctcaagctcagctgaaaacaccctaccttgtccttagtggtcacgtcaaaccagggcaaactagtgatcctgcaagtggctttgctactgttgagaaggattttccgggaggcttgacgcctatgcttggtgatagaaaggttgagcatttcttgggaatcaagcgcaaggctgaggcagggaattcaagcacaccaaagaagcctaaaacttgaaaattgtaagatgtatggtttgggtatgatg

SEQ ID NO: 195927 - DNA, 445 bp, Gossypium hirsutum
ctctctctctgtcaatcggtcttgcccaacaataagttctataataaagttccaaatggatcgttcctctcattcagtctcagttgctttctttcttctgctgattcttttaaccacagagatggggcctatgtcagcggaggctaaaacatgcgagactaaaagcggtaaattcaaggggatgtgcatgagttctaccaactgtgctagtgtttgcaaatcagagcctggttttgatggtggacattgccgaggttttcgtcgtcagtgcgtttgcactaagccttgttaaaccactaagctttgttagatcagtaatctattatatttcattgtcacgaagatttccccttttttttttgcttatcatgcattttgtgcttgagagttgagagaaataacacatctccaacatatattgtataccagtaattttgttattata

SEQ ID NO: 195928 - DNA, 398 bp, Gossypium hirsutum
catacaccttgcttttctcttggatatgggtagccctttacaattccatatctgattttaatccttatactttatttttcatgttcatttcgtcagtttcttgcttatattaagtttctgccgacaaaatataagataaaaagggggtttattggcattgctacctattgctatttttttaccacttcaataatatatgggctgaggtgcacatttcatgggaggtgtagaggatgatgaaccagcctcaaaacgcatgaaactatcctctgaagaattgatacatctttcaaacggttcaactgttaaagagtctatagttgggtcttcaagagacttgatggctcggcccctgcagtctgatgggggcgaagaagttgttggttcaaaaggagtta

SEQ ID NO: 195929 - DNA, 387 bp, Gossypium hirsutum
gtgaagctgatcccttggattctcaggtggtcagcattgcgaaattccaagggggtggtgcattcaatgtcattcccggattctgtcaccattggtggcactttcagggcattttcaaaagaaagctttcttcaactcagacaaaggattgaggaggttttttcgaaacaagcaagcgtgcaaagatgcaatgcgacggtgatcttcgacgaaaggtccatgtaccctgtgaactcaaacaacaaagagttgcatgagcatttcagaaaggttgcaggggagattttgggctctgagaacattatagaaatgcagccgcagatgggaggagaggattttgcattcttttctgagtcgatccctggactttttttctttcttgggatg

SEQ ID NO: 195930 - DNA, 456 bp, Gossypium hirsutum
tcggaaatacatgtctcttcttttattccttcgcatctaactctctaaaccttggatccttcaatcttgatcgttggatccatctttttccttccattcaacccaggactatatttggtgacagcgatgtctcctgcatccaaagtcgaagtccaaagataaaaaatccagcaaggactctcagaaggcttctgcaaggccttctggacctgctaatgcagctagtggtgctccagctagtgcttacaatccacttttgggaacattccataccattgaaacagcaccatcatcatctgcttcacctcttcagagcaatggtcgtttccgaaacatagacgacacagatgagcatttgggaggctcacttggagctggggttgactttgattcaatatctaataatggtagctggtcaggtgaatcagaagagcacaaagagaaaacttcaaatct

SEQ ID NO: 195931 - DNA, 901 bp, Gossypium hirsutum
  unsure (1)..(901): unsure at all n locations
ccgatacccaacgggcatttgctttcggattttttgtaggtttaacctcaggtgcctgggtgggggcaacactcgcagttggtttcctgtccgccggttctacatttaaggttgctacattggattcaatgcttgcagtagttaacatgagaatattcctcgaggaaggtataccaaatcaaaacgacggtatgacacaaccgatcttgaaagaaaccgaaggtgtgattcaaaaagatggcaatgttggtacaagaaagatgcctgtattcaagaccattccgtccttgaaagacattattcgcttgataaagagcagtccatcattttctcaagcagcaattgttgctttcttccagagtcttggagaaggtgggatggaatcttcgataatgtactatttaaaggctcgtttccactttaacaagaatcagtttgctgatttgatgctaattggtggaattgtagcaaccatttcacagttgtttatcatgcccttactagtatctcccataggagatggaaggttgctttcaataggactctttgcctcctgtgtatatgccattctttacagtatagcctggtcagcttgggtcccatatgcagccgctgcagtgtctactgtgatggtctttgcaccaccatcattacgcagtattgcatcaaaacaagctggccccagagaacaggggaaggctcaaggatgcatctccggaataatttctttggccaatatcatggctccactaatttttagtcctttaacatcattgtttctgtctgnaaggggcacatttcatttccctggctttagtatcatttgcattgcaatcactttgatgattgccttcattcagagtttgatgatagggagagctcttcnactagcaatgcagat

SEQ ID NO: 195932 - DNA, 569 bp, Gossypium hirsutum
gtcgatatcaaataaaaaactttatgtttcttctccaccattatcttccatgctcacagtttggttatgtccctaagtaacatcttcatttatcattctttttgttttcttctcatcctttccctctatataaacccattctcaacctctctccattcccataactttttctctcttcttatcacatcaacaaaatcatgaggagcatttgtgttgtgcttgttatctctttgcctttccttctcggcattgcccagggtttcgatttccacgacaatgatttagcgtcggaggatagtttgtgggatctatacgagcgctggcggagccaccacacggtttccaggagtctcgacgagaaacatcggaggttcaatgtgttcaagcagaatgttttgcatgttcacaacaccaacaacaaggacaaaccttacaagttgaagatcaacaagtttgctgatatgaccaaccacgaatttaggaatgcttacgctagttccaagattaaacatcataagatgttccaaggacagtcccgtggcgccgggagtttcatgtacgagaacgtc

SEQ ID NO: 195933 - DNA, 469 bp, Gossypium hirsutum
aattaggtgagaaagtctcgagcttggaagttaactgcttttcagcgcttggatttcacttgtgatgatgtgttggactgtttgaaggaggatagtatcatcggaaaaggaggtgccgggattgtgtacaagggacttatgcctaatggtgatcaggttgcggtgaaaaggttacccgcaatgagccgagggtcttctcatgatcatggattcaatgctgagatacagacgctgggcaggattaggcacaggcacattgtgagattgttgggtttttgctcaaatcatgagacaaatcttttggtttatgagtatatgcccaatggtagtttgggagaggttcttcatgggaagaaagggggtcacttgcactgggataccagatataagattgcagttgaagctgctaaggggctttgctaccttcatcatgattgttcccctttgatagtccatcgagatgtgaaat

SEQ ID NO: 195934 - DNA, 1038 bp, Gossypium hirsutum
cggacgcgtgggttcaagtccatccaaactcctatgcattggttatcagcatggagaacatgaccctgaactggtacttcgggaatgatcgttcgaaacttgtatcaaactgcttattcaggatgggaggggctgcaatactgctctctaacaaatggtccgacaaaagaagatccaaatatcaattggttcatactgttcgcactcacaagggttcagatgataaatgcttttcctgtgttacacaggaagaagactccatagggaagattggtgttacattgtcgaaggatctcatggcagttgctggtgatgccttaaagaccaacattaccacattggggcctctggttcttccaatgtctgagcagcttcttttctttggtacattggttggtaagaagctgttcaaaatgaaggtcaaaccgtacattccggatttcaagctagcttttgagcatttctgcattcatgccggaggaagagccgttttggatgaactggagaagaatttgcagctgtcagaatggcacatggaaccatcaagaatgactctctaccggttcgggaacacctcaagcagttctctgtggtacgaattagcttactccgaagctaagggtagaattagaaggggtgacagaacatggcaaatagcatttggttcaggattcaagtgtaacagtgcagtttggaaagctttgaggacgataaatccggtaaaggagaaaaacccatggatggatgagatccataatttcccagttgatgttccaagggtctccaccatctaaatgacagaattgggtggtggtttcagcattgggtggaggaaacctttgcatttagataatctagttttttaagttatttaaatgggactagctttgagtgggattattattgttgtaacaatttgtggaaagcattgattcgagggtgttatgagaaaacattagaacatttttttttttactgacattatttcatgagatgcttgggctttcttccaagatcttcatcattttaaactgggat

SEQ ID NO: 195935 - DNA, 1140 bp, Gossypium hirsutum
tgttttattcacattattgacttcagaagcgggatcgaatacagctattcggttgcaattacttggaaggggagaagatttttgtcatgctcaaaaagttgaacatacttgtgagccgaaatatttccaagactacgattcctttcactaacaaattatggaaatctgctgatttgctagagtctgaaaaacttgaaaaaggcatacaagattgtgtgatggagataattaagaaaagagaagacaaagttgtgggtggagaagctgacagcttcggcgatgattttctgggattacttgtaaatgcttatcatgatttggacgataaaaacaggctttcattggaagacttggtaggtgaatgcaaaacaatctactttgctggacaagaaactgttaattcattgcttgcatggatagtcttgcatttggcaatccatggagattggcaagaaaaagcgagaagagaggtgattgacatatttggtaaccaaaatccgcatctcgaaggcattgccaaactcaaaataatgaccatgatcatcaatgaaactctaaggttgtatggtccgtcacatggcctgcccagaactgtcgcaagagaaggacagttgggaaagtttgtcttgcctgctgatatagatattctgtctctaaatattggacttcaccgtgaccctcacttgtggggggatgatgtgcatcattttaaacccgagagattcgccgaagggattgccaaagctaccaattacaccgcggctgcatttctccccttcgggttgggacctcgatcttgtgttggtatgacatttgcaacaatagaaaccaagattgttctctccatgattctacaacgttacaccattaccctctcccctgcctatatccactctccgatatccattctcagcattagaccacaacatgaaattcaggtgatacttgaaccactgcatcataatgcttgaagtacatagctgttaagaactaagggtttaacgtggttcatgtattttaggtttaagagatgagcacttaacatgtttaaggttccagcattggcatccccttccctatcctacgctatacccacctttatacataatggaattcaagtagctactgatttccaagatg

SEQ ID NO: 195936 - DNA, 400 bp, Gossypium hirsutum
atttctcaatctgaatctcagattttcagtcgggaaaatccaccatttttgctatccatttctcgtccagcacactaattgactaatacccagaggccagatattgtttatcggggtcgtctgattctatgagcaggctatgggaacttggtcagcaacgctgtgtgcattcatatgctgtgcatacggattctgtttgggcacttgcaagcaccccaacctttagtcatgtttatagtggtggtagagatctttctttatatttgacagacttgacaactagagagtcttttgctttgcacaaaggagcatccgattttgcagctggcattgcatgatgatagtatatgggttgcaacgacagattcttcggttcatagatggtcttgttgaggaaaaa

SEQ ID NO: 195937 - DNA, 705 bp, Gossypium hirsutum
ctgagttggataaatatctaactgaggctaatgaggaatttgttgaagattttgatattttattatggtagaaagtgaacagcactagatttcccactctttcaaaaatggccagagatgtgttagctataccggtttttacggttgcttcagagtctacatttagcaccggaggacgtgtgcttgatcaatataggagttctttaactcctaaaattgtacaagctcttgtgtgtactcaatattggattcaaaaatcattatcacaagaagacatcaaaaagattaaagaacaaatccaagatcttgacaagatcgaaaatgacttttcttggaatgcatcaaagcctaccctaaattcgtgagctttcgtgagttgaagggtttaatgcaaatggagattttttggagagaagaaatggatataaatggagaatattaaagacttacatttcaattatgtgttaatttcaagacttatgtaatgtttttaattatgtagtgattcaattcgggtaattcggttaattcggttaatttttaactaaaaataaaaaccatataattttctattaattcggttaaccgatcgatttaaccgaaaaaatttcggttcgattaatttttttttttaaaattcagttcggttaacggttaaaaattttggaaggtcggttaatccagttatagttattttgggtcggt

SEQ ID NO: 195938 - DNA, 1103 bp, Gossypium hirsutum
ttctgggcgaactgttctttttccatataattttgattagaaagggcatcacaacatatgaatatgttgttgcaatgagaacacaaagtgaaccacctggacagtctgcagatggtggagatcagcagagtatgccatcatcacctaccagttcagctgtgactgccataagtggaagaagctctcttggaaagagcttgcaatacaaaggtgcttggtgtaccccaccaagaatcttcatggagcaccaggatgaaattgtcccacatttggacccgggccgcttaccatccacagtagatccagatgctgtacagccaccagacaagggtaaaagattaccccaacgtcctgtccgaattagtgcatggaaacttgcaaaattggattctaatgaggcagttaaagctgctaccaaagctagagcaagttcatccgtccttcgtcctataggcgctaggcaacatccttgcagcgctgatcaagtgtctagtagtactattagtggaagaagcagtcccattagtactgatcacgggtttcggacaaaaactgctagagcagggatattgaattcttatccttcaagccatgctagcagagaagacgccgaatcatgtgctcgaagtgttgatgaaattagcagtgctcatctctccagcataaccccctctccaatggcacagcaacattcaaatagagaacatttcaaccccatgtatgaaacgtcaggcaatcaatcccctctgtcaacaaaacaaagtgaagggattgaacatgctgctggatatcccatcaggaaaaattctagctcgatagaaagctccaaaacttcagttttttgggatccagaaactggacgctttgtctcttcctcatccagaaatgcaggctctttgcaggctcctggatcagagcttttgtatagtggtcaatcgatattttttggcagtcctcttatgaatgaactggctaaccgaggaacgaggagtactagttcaatgtctgtcgggttgggtaggggttctacattgagtcatcattatcatcagcagggtagattgcagagaggagcccaactacctgtgtttgttcctactgat

SEQ ID NO: 195939 - DNA, 594 bp, Gossypium hirsutum
cggacgcgtgggcggacgcgtgggcggacgcgtgggatctgtatcttaaatgtctggatggcatgggttccgttttctctttcaagtttaaattgacgataattaatactttttccttgcagcggttggaatttctaggggactccgttttagattatcttattactctgcatttatataataaatatcctgggatcacgccaaaattattaacggatcttaggtcagcatctgttaacaacaattgctatgcattatcagctgtaaaggctggatttcttaagcacattctccaaagttcacagaagctttacaaggatataaaagaaaccgtcgaaagttttcaggaattatcgttggaatacactttcggctgggaatctgaaaaatctttcccccaggtacttgctgacgtgatggagtcacttgctggagctatttttgttgattcaggatacaataaggaaatcgtattccagagtataaggccactgttggagcccatgattactccggagactctgacggttcaccctgtcaaagagctatatgagctgtgtcaaaaggagcattatgaactaaaaaaacccattg

SEQ ID NO: 195940 - DNA, 654 bp, Gossypium hirsutum
cctcactccacatttttgccttctgttgctgttactccgattgcaccacctaaccgactaaagaaaggagtcccatcagttgactccaaccatgtgaggaatgagaatgctgttttcaagaagcaagcagcagtctctaaaaatgcagctgatgatcattcgcagctgttaggaatgcagaaacaacaatcaaatggcatttcttttggtgtggtcagtagtctctcaaatgtaaaaatattgagcaaatctaaagaccctacagaaattaatagagccaattttgagagaacaagtgttgaaagcaaggcctctgctcatggaaggtctaattcgaattttgttggaaaacaggacagggcaactggggcagcattaacttctagaagatagcttgtgcatttacctcaattgtgactggtcttgtttgttttgatgaactgatactagtttgttattatagcatatttgatttcatggatgtttataatatcatcgctcaaccaaaacaagttttcaagagatttatcgatctcattttggtccagcaggatacaccgaatctcgatgttgagtggtggatcatgcattaagctgatttcaataattttgggatatgaatttataggttgattggatcttttgatcttgggc

SEQ ID NO: 195941 - DNA, 451 bp, Gossypium hirsutum
cggacgcgtggggtcagagtcttgttcttgccctactatttgccctcttgtttgggtcaatcgagataatcttcctatcgtcgtcttttataagaatctctaaaggcggatgggttcctcttattctctctgtgatcttcatgctcatcatgttcgtctggcattatggttctaggaaaaagtatttatatgatttgcacaacaaagtacccatgaaacaaatcctgacactgggtcctagtctcggaattgtccgagtcccagggataggccttattttcaccgcgttggttagcggagttccggccacatttacccgttttttaaccaatctaccgacattttatcaagtggctgtctttgtctgtgagaagactgttcttgtaccatatgtccctcaaaaagaacggtacctcataggtcgtattggtcccaaatctttccgaatgta

SEQ ID NO: 195942 - DNA, 418 bp, Gossypium hirsutum
ggatcttgctgctccagttgaatcctttgttgataagcccgcggcagccgagacctcggcagctgctcctggagctggaaagggagcctatgttccaccaagcatgagagccggtgcagagagaacaaccggatcggatatgagacgtaggaacgatgaaaactctgtgagggtaacaaacttatctgaggacactcgggaggctgacttgcatgaacttttccgaccatttggtgctgtgacgcgtgtgtatgtcgctatggatcagaagacaggcacaagtagagggttcggttttgtcaactttgtgaacagagaggatgctcaaagagctattaacaagctgaacggatatgggtacgacaatctcatcctgcgagtcgaatggccacaccaagacaaactagaacatatcatc

SEQ ID NO: 195943 - DNA, 672 bp, Gossypium hirsutum
cacacttgcggttgcgcttcaagagtgttaagttccttcaaaatgctgacaataaccaccgcctgcgccttcgcctccatatctccaccaacaacacctaacctccaactagagtcaaccgccgtcacttgctgctcctcacttccctctccttatcttcattctcagtctcagattcggtggccactgctcgtggccttctccagatgcccccacctcgcctcactaacaggtattttttggtgagggctggggagtcccaatatgagagcctcggaataatcaacaccaaccctgtagcaaaaacttctgttgatagtgggttatcagacaaggggaaaaaccagactctgaaatctgctttggaattgaaggctatgggggcctgtgaaaggaattgctggatttggccttctattactcaaagagcttaccaggctgctgagatcattgcagctgttaatggtgtcagtcgtagttatatagttccagagtacagcttcctggatgctcgtggactgggagcatatgaaggcaaggaactggaagccatttcacaagtttatgaatcggatagcatatcttctacaatcaagccacctcctatagatgatggaacaccaaatgaaagtgtggcagatgtatttgtgcgtgtgacacaactcatgtcta

SEQ ID NO: 195944 - DNA, 394 bp, Gossypium hirsutum
gacctattattattgatcaatacacttgccctcttcatcaacattgcaagaattatactacagctgtggagattagcaatatcttatataatgatttaggagggacaacaaacggtgaaattgcggtggaactttcatgcagtaagtcagttccatgcaaaaatatccgcatgaaagacatacagttggattacggaataaatggtaaaatgtatgatgggcaccccaaatctcattgtttgaatgttgttcaaagttgggacgaacgatatgtttatccaaatgttccttgtttaacaaaaaaattaagttactaaactttattattttggatgtaataattaggttgtatcaaaaggttgcatatataaaataaataaatgcatctttttta

SEQ ID NO: 195945 - DNA, 786 bp, Gossypium hirsutum
  unsure (1)..(786): unsure at all n locations
cggccgcgtcgacaagaacttcccctcgcaaactcgaaatccccattactctccggtcactgcccaaaagttccaaaccaaaagaaatggccgaaactgagtccaccaccactgctcaagactcagccaccgcagaaacggagccccaccagactcaggctcaatcccaaatagatgaaaccgccgccaagctcaataatcttactctccgaatttggccccccactcaacgaacccgcgatgccgttatcaaccgtcttgtcgagacgctctcttcccaatctgtactttccaaacgctacggcaccatccccgaggacgaggccgcctccctggccaaatctatcgaggaggaggctttctcagccgccggtgcggccttctcccccgacgatgatggcatcgagatccttcagatgtattccaaggagatcagcaagcgtatgctcgatactgtcaaatctcgcgctgctactgccgctgccgccgatgctccgtcagccacggaagcagcgaatggtgaggaggtttcatcgtcgtccgtgaaggcggaggcttgagtttaaggatcctcatttctctctttctctctctttagggcttttctttaaattgatgatcggtcttgcctagggtttttaaagatctgtctgcttggctctggatttttcgagatgcttaattgcctatatacgacgataataaaatctggaactggtataccaattctttatcccttctttttttgaagggtttctggttttggggaaaaaaaaaaaaannnna

SEQ ID NO: 195946 - DNA, 695 bp, Gossypium hirsutum
  unsure (1)..(695): unsure at all n locations
atggataaaatgaagatcgaagaggttcaatcaacggctaaaaagcaaagaatcgcgactcacactcacatcaaaggccttggtctcgatgccactggaaatgcaattcctttaactgcaggttttgtggggcaagcagaggcaaaagaagctgctggtcttgtagtggacatgataaggcagaagaagatggctggccgtgctcttctgttggctgggcctcctggtactggaaaaacagcgttggcacttggaatttcccaagagcttgggagcaaggttccgttctgtccaatggttggatctgaagtatactcatcagaagtaaagaaaaccgaggttttgatggaaaacttccgacgggctattggtctacgtataaaggaaaataaagaggtctatgaaggagaggttactgaactctctcttgaagaaacagagagcgtaacaggtggttatggtaaaagcattagccatgtaattattggattgaaaactgttaaagggaccaaacaactgaagctagaccctacaatttatgatgccttgattaaggaaaaggtanctgttggagatgttatatatattgaagctaatattggagcagttaaaagggtgggcagaaatgatacttttgccacagaatttgaactttaaaccgaataatttgtgccacttccccaaagagaggttct

SEQ ID NO: 195947 - DNA, 509 bp, Gossypium hirsutum
cacttctccaactaccctattatgtcttattttcactcccctccatgaaagccatagctccaaaatagcttcaatccctcccccaaaaatggccattctcaaactgatcttcatcaccctcactctaccccttcttttccttcattcttatgttgctgtctcaattttagagctccaaaatgcactgaaaaccagtgaaattgatgccacggtgagaagggcttgttccaaaaagcttgaagattgtttggaaagtgaagatatggaatcagagacccaaaggaggttgcttttgatgcaaagaaggtacattagttatgaaacattgaggagggacatggttccttgtcaaaaaccaggttcttcttattatgattgtggtgctgctcaagctaatccttatagtagaggttgtgagattattacaagatgtgctagaggtatcaaaggtactaaaacctgaagaagaagaagaaaaaagaagacctaaatttgatgtctttttttta

SEQ ID NO: 195948 - DNA, 439 bp, Gossypium hirsutum
cccacccgtccgcccacgcgtccgcccacccgtccgaacatattcacacttttaataatatttaaaatggagaaatcttcccgttcaatgtcatctttagtccttcttatgtgggttcttctagcaacagagatgggatctatgacagggggaggtagaacatgtgagaccaaaagtagtgaatacaaggggatatgcttatttgatgctaattgtgatagtatttgcaaagtagagccaggtttcgatggtgggcattgccatggcttctttcgcagatgctattgcactaaaccttgttagatgagcaatctattaagatttcattatacttaaaagattgcctcatttccgcttggtatgtgtgtgcttgagagttgagagaataagatccacaacatattggtgtacatcgaattatattactattaaatatatc

SEQ ID NO: 195949 - DNA, 452 bp, Gossypium hirsutum
  unsure (1)..(452): unsure at all n locations
atcggagttggatatgctcttatgattgctcctgtttacacagctgaagtctctccggcttcctcccgtggtttcctcacctcattccccgaggtgttcattaatggtggtatattactggggtacgtatccaactatgcattttcgaagttaccaactgacttagggtggcggtttatgctcggcgtcggagcaatcccgtcggttttcttggctgtgggtgttttagctatgcccgagtcaccgcgttggctggttatgcaaggccgactcggtgaagccaagaaagttctggacaaaacttcggactccattgaagaagctcaacttagactaagtgaaatcaaagaagcagccggaatcccacaagtatgcaccgacgacgtcgttaaagtccaaaaagcgaagccacggcnaaaggcgtgttgaaagaaatactattatacccaaca

SEQ ID NO: 195950 - DNA, 633 bp, Gossypium hirsutum
attttcttcttcaaatcgggaaaaaatggttttctaattaaaaagaccttttgggtaagtcttttttttctcaattttctaccttaaatattgatgaaaatcattcatcttacattcttttctatttagatacattcatatattttaaatgaatttgggtctccctggtattttaagcgatagtttattcttaatagaaacttggatatgtggtaaatatttttgctttgggagtaaattttggtacagaaattgcatattagtccgacatcatctatgtattcaattgaaacatgagaaacaaaagatgtttatagttccgggttgtttggttcttgaatccgggaccggtagtggctcattaacaacatcgtttgcaagggccgtggcgccaacgggacatgtgtatacctttgatttccatgaacagagggctgcctcagctaggtaagcctaaatgtttattgtttgcaaaagtgcattgtgatgaaatatgacatagtaattgcttaggttaaacttgaatactgggttatcttgagttgatgtcttcatagatctacattttgttgccgtgatacttcattgtctctaattgtctcggtttacaaatctttattagtttcattagtg

SEQ ID NO: 195951 - DNA, 611 bp, Gossypium hirsutum
ctataatcaaatattcaaaaccctatttggttaacaatggaagttgaataaaacccagggtttttggctgcttccatgctcttttcttcttcatatctggaaaatattgctatctaattcagaagtacttctgggatgttgcttatggactcctcgacgaagatatctttcaatcgttgcattagagatggagatttggttattgtatatgagaggcatgataccatgaaagctgttaaagtgtgcgagaattcggttcttcaaaatcgtttcggtgtatttaaacattcggattggattggcaagccgtttggttccaaagttttcagcaacaaaggtggattcgtttacctattggctccgacaccggagttatggactttggttctaagtcataggactcagattctttatattgcggatattagctttgtgatcatgtacttggaagtagttccgggttgtttggttcttgaatccgggaccggtagtggctcattaacaacatcgtttgcaagggctgtgtctccaatgggacatgtgtatacctttgatttccatgaacagagggccgcctcagctagagaggacttcgagaggactggaataat

SEQ ID NO: 195952 - DNA, 868 bp, Gossypium hirsutum
  unsure (1)..(868): unsure at all n locations
tcgccctctcgtccggaaaaaaatcagagaaattctcacttgtcttgctaccaaagaaaagttccctgaaaactccgatcgacaatgtcaggattggaccgtttgcaaaggatgttcgccggtgctggcggcgctttgggtcatccgccgccggattccccgacccttgattcttcggagcaggtctatatctcctctctcgccctcctcaaaatgctcaagcatggaagagctggagttcccatggaagttatgggtttgatgttgggagagtttgttgatgagtacactgtgcgtgtcgtggatgtctttgcaatgccacagagtggtaccggtgttagtgtcgaagctgtggatcatgttttccaaacgaatatgcttgacatgctcaaacaaactggaaggccagagatggttgtgggttggtaccattcacatccaggattcggctgctggctttctggtgtcgacataaacacacagcagagttttgaagctttgaatcaaagggctgtagcagtggtggtggacccaattcagagtgttaaggtgaaggtggtaattgatgcattccgtttgatcaatccacaaaccatgatgcttggtcagaaccacgttagacaacttaaatctatggcatcttaataagccatctatccaagcctagatccatggactanatagacactactacttttatgccataacttacgtaagaatgaacttgaggaaaagatgctttngaatcttcttaaaagtagtggacagatggactgacacctcggcgtttggatctcatttgataacctatgacagactgatatgtatagctgatttactattaattcctcaggagctcgaggaaatn

SEQ ID NO: 195953 - DNA, 394 bp, Gossypium hirsutum
  unsure (1)..(394): unsure at all n locations
cctctttagatttctctagatttccttcaacccgggtttctcaaccatctttcctctcttcctcgctgatggcaagtgaaggctacatcctccaggtatgtttcttctcccgttcttaaggcttctgttgcaagttcatgagcttgacgattctctgatctgtgaataaactggaaatggctttcttgaaaaaattgtttctttctttggatatctcggatgaccgccccgatcgctgacttgtctgttgctgttgagttgcatttttttataactggttttgaatctcctattatggtaattgattgaaaacccagtgagatccctaactttactgcttgtaatcctgcatatgccttcgctatgaacggggacgatatngtggagtggagta

SEQ ID NO: 195954 - DNA, 404 bp, Gossypium hirsutum
cccactccttagaaaatatccaaaccctcaaaacttgtcggtaccatcttccaaaaacaagcagccttccaaaatcaaaaccatttgatgctcattcctctctccaaagcctacctcttcctcttctgtcaatctggttccctcctcctcccccataatctatcattgatgaccatcggaacatttccaattaggcctagatggtttcccaaaagcaaggcctgaaagtaagcatatccttccgctataaatggcgaagcgatctccttgtgcagtgtctgttttgaagccaaaatctcacttggagagttacgaacaaccactccagatctagatctcaccaaattttgattacaagcggcatcaaaattaactttaacatcagaacctaatgggggacacca

SEQ ID NO: 195955 - DNA, 761 bp, Gossypium hirsutum
atcgtccctctgttttctctacctttccaagatctcttctcacgatggcccaagcagatcagattagcaacagccctgaaatcaaagagccatccccgaaaggcccaaaactcggtcaaaatggagtacatgaagttacccatggtccagcctccctcttgaaaggcaaaaagctttctgaaaaagccgtgttgccgtcaagaggctctcctctcgccgctggctacgatctgtcaagtgcaacggatacaaaggtgccagccagaggaaaagcgttgattcccactgatctaagcattgctatccctgaaggaacatatggtcgcgttgcgccaaggtctggtttggcttggaagcattccatcgacgtaggtgctggagtgatagatgctgattacaggggacccctgggggtgattttgttcaaccattctgatgttgattttgaagtgaaagtgggtgacaggattgcccagttgatcattgagaagatcatgacacctgatgttttggaagttgatgatctggattctactactagaggtgctgggggatttggatctactggcgtttaaacctctgggttttctttccctaatgttataatggattagcgttaggtttaggattaggggttgttttagaaggttaggtttgggggactactgcctactggtgaaacaaagctttgctttgttttgcttatcggttattgtcttgtaagaaaccctgaatgggtcaatggtaacatattaagcaaa

SEQ ID NO: 195956 - DNA, 831 bp, Gossypium hirsutum
gatgataacaaagaggaaaaaaatgagaaaatacctgaccaacagaaaaaccaggattctggtaataaatcggacaaagaagcccaaagcggccccggtaacgactgcggatttgaaggtgcaattgaaatgccagtgtgatggatgctttgataggattcgcaaaattgtctctgaaaccaaaggtgtccaagagttcgaaagtagacaggcagaaggagatggtcacagttaaggggactatggatgttaaggccttggctgaggctttgaaggacaagctgaagaagcatgttgagattgtagctcctaagaaagagaaggatggcaacaaggagggcggcgacggagggaagaagaagaacaagggtggtggtgaagatggtgggaacgaagctaatggtggcaagatggaagggaaccgaatggagttcatgcttccaccccaatttggacacatgcctagttacattccgggttatcccggatacgggcacccagcttacgcgtatggaaacccgtatccgcacccacacgggcatggttaccccgggtatgtgccaggttacccggtgtatgttaatccacctcaccagatgtttaacgatgagaacaccaatgcttgtgctatcatgtaaggaggaatggggtttacggtataggtttaggtcaaggaaaatggaaaaaaaaatagtgtaaataggaaatagacaagaaagtttacttggagaagaaaattttcttatatatgttggattccagggttttgatcttgttatttgttgttaaaaaagttttactgttgtcatttttaatataattagtgttctt

SEQ ID NO: 195957 - DNA, 572 bp, Gossypium hirsutum
ggttgtggtggctactacaggtacggcgggcgtacaggtgaatgttttagtgaagaaaacccacaaggttgctcgatcatgtaaaaaaaccgcgggaatttgctgctgaaagcaatatatagctgaatttgatatactgtaatagtaataataaattctcttgtttactggtgtatgaatctgggggagtcattttgtggatttttatttatttctagttttattgagtttataaaagtcgtaaagatcattaacaaggttggtggcgttggttgtggcggcgacaacggctgcggtagtggtggtggccgtgtgctccaggcttgcaaaagtttgtttaccatagttttaaaatttaataaataaaaatgatgtatctttttatcaaaaaaaaaaaaaaaaaaaaaaaaaaaaaaaaaaaaaaaaaaaaaaaaaaaaaaaaaaaaaaaaaaaaaaaaaaaaaaaaaaaaaaaaaaaaaaaaaaaaaaaaaaaaaagggggggccgttttaaaggatccaagtttacgtacccgtgcttgcaaacgaataactttttttttggggcccctaa

SEQ ID NO: 195958 - DNA, 667 bp, Gossypium hirsutum
  unsure (1)..(667): unsure at all n locations
cttgctttancagcagtttcttccctttcatagttgctgaggatgatgtttgttgagagagccgaatgcttgagagtttactggagattactgacactgatgccgatgttggcagaatggaagccaaaaatgtagccatggacttcattcatgaagttggttggcttcttcatagaagtcaattgaagtctagattgggccagttggatcctagctcagaatccttttctctaaggcggttcaagtggcttatggagttctctatggaccatgaatggtgtgctgtagtgaagaaacttctaaatattcttcttgatggaacagtgggctctggggagcaccactctatctaccttgcattaacagagatgagtcttcttcacagagctgttaggaaaaattgtagacctctagtggagctccttttaagatttgtcccggagaacgcttcagatagattaggatttgaaaacgagacagtagctgatggtgttcataaaagctacttgtttagacctgatgtcataggtcctgctggtttgacccctcttcacattgcagcgggtaaagatggctccgaggatttgctggatgcattgactgatgatcctggaaaggctggcattgatgcttgaaaaatgctcgagacagcaccggttctacacct

SEQ ID NO: 195959 - DNA, 1237 bp, Gossypium hirsutum
  unsure (1)..(1237): unsure at all n locations
cccacgcgtncggattatgcaattatgctttcccattttgataatgtggatcttcctcctggggtagaggcttcaattccttggctgaaagactctgctccacttggaaatctacctcctgccctgggtgtctcactctcaacaaccccatgtctggctgaaagcaagaaagcgacaacatcaaatttggctgatagcgaactgaagtcggnttctatcaatacttcaatggtcttaagagagtcagggtctgatcggaaagaaggaaatgaagaaaatggagtcgtgcaaaattctctcagtttcaaacattttgatattgtggatgatttctcagatcatcattacagcaatttgaattcatcaggagagcaaccaaaggagtgggcaaagcaaatacaagaggagtggaagattctggaaaaggacttaccaaaaactatatatgtgagagtttatgaagcaaggatggatcttttaagggctgttattataggacctactggtactccataccatgatggcctttttgtttttgattgtttcttccctccaaaatatcccaaagagccaccgatggtttattattattctggtggcctccggttaaatccaaatttatacaactgcggtaaagtgtgtctaagccttttgggcacctggcatgggcatcaaaatgagatgtgggttccggggcaatcgaccatgctacaagtattggtttccatacaagctcttattctgaatgctagacctttctttaatgaacctgggtatganacttcgtatgttggggctgaaggtgacaggaggtccanaaattcaatgaagaagtatttattctatcattaaagacaatgatttacacactaagaagaccgccaaagcattttgaggactttgttactggtcattttcgcaaccgtgcacaagacatccttgtggcatgtcaagcatataaagagggtgctatagtaggctctgttgcggttaaagaaggtgttccagatgctaacaaaattgtaaagggtagctctgaggaatttaaaggaacgattccaaagatgatcaatgcggtggctaaagaatttgtgaaaaacgggtcaacgaactgtgagcagtttcagagttgcagaagctgattacggttaagaagagttggttagatctaaagtgtaggatgggatgtgttaagccattatagaagctaatgtagtgccgtttagtatgaatgatt

SEQ ID NO: 195960 - DNA, 628 bp, Gossypium hirsutum
caaaaagctttctcatggctatcatctactttcttttataaggtcacaagtttttgactaattagttctgttttctcttcacaaacttcttcaatattggaagtgccaagatgccaagatcaaggggctcggacatgccacaaaggcaatctcctcgagggacgcatcaggttaggccatcgagttctgattcagaccctttgcatcatcgacccattactgatcgtagtagtcctaagcttggagatcgtcgttcaccaagaggtgctccacaatctgatccattgaaccaaaagaagcttggcactcgtattgcggatttagaatctcaactggggcaagcacaaggagagctgaagaatctcaaagaccagttggcttcagcagaagctgcaaagaaagaagcgcaacaagagctggaaaataagaccaagaagcctaaagctcgggaacctgttgaagttaatgagaaggtttctccgaaaagaactcgagattctaagaaatcggattgtagcatcaaagatgaagtttctgaagataaccaacaagaaactgatgtgtttgaagtcacagtggaaaaaacagcaattgagcctaaggtggaaaccgaagaagttgatcaatg

SEQ ID NO: 195961 - DNA, 639 bp, Gossypium hirsutum
ccggaacgaaaaaaaacaaagaaagaaaaacttgagattcctctccctctttcacccaaacctctcttttcgctgaataccattccctatattctttcttacttcaatatgggttttttacccttaatatcttaaataccagaaaacaatttctctctttcctttttctttttttttttaatttcgatttttctggggatttttgaatctgggtatttctgaaaatggggaaaaaccaagcctacaaggctatgcaaagagccaggcttggctcttcctctgctggccctgaagagatcgaggatggcatggtggatggttcttttcattcaccagagtggcatgctgctcgtttggccagtcttaaaacttctcatacagttacgtgggaagagttccggaagaaacaaaaagaagatgcattgagaaaaggggaactagaacagatacggttcgaatgatgcgagaatatagagctcattagatgctgaaagacaagcaagctgcacatggtagaaacactcagtagtaatctagcataaaaggatcgaagacaagatcaagaacgcgcagcaaaaagaagcgtcaaacgaggctttgagcagctctcagtcatctagatctcgagatgtgagaggg

SEQ ID NO: 195962 - DNA, 750 bp, Gossypium hirsutum
aaaaccctactggctatctgcctggaagaatggcacctctgatgaacttctatggcttcatgtccctcgcttttgtgatcctcggaatcttttggttcctgcaatatgcaagattttggagagaagttcttcctttgcaaaattgtataacattagtaataacccttggcatgcttgagatggctctttggtattttgattacgctgagttcaatgacagtggaaccaggcctgtgggaatcaccatgtgggctgtcatctgtgttctttgggctccttctcagaattctacacggtaaatatcaaacttattgagccctaagcttctctttctgcctttccttttctgctacgcgttgtttatgaactgttttatggacattcaaaatgaaagaagaaaaaacttcatactcacaccctcatttgtttaatatatttcctggatcgttaataaacggtaaaacttggcaactatttcctgatcgttaataaaggtaaaacttggcaacttgagatgtctgtgtaggcttgattaccttgtttaatttgtagctagttcctctcgtgtacagaattttagatggtatggtggtatatgtggctgagtccccaaatttaaaattgggggaccttggatttatttagaggttcgcgtcttaaactaccccttggtttccccctaaaggtgggcctggagaccatgaatttcacaaggactattcccttaaaccttcacccttaaaattatgg

SEQ ID NO: 195963 - DNA, 434 bp, Gossypium hirsutum
gaagaatttacgtagtgaccgatccttcagatgatgattttttaaatcctaaacctggaaccctacctcatgctgtgatccagaaggaacctctttggatcatctttgcacgagctatgatcatcaggctaaaagaggagctcattatgtcgggtaacaaaacaatcgacgctaggggagccaatgtgcatgtggcttatggggctggtattactatccagtatgtgaggaacgttattatccatggcctccatattcaccacattgttcccggcaatggcggcatgatcagggattccgtaaaccactatgggttcaggacaaagagcgatggtgatgggatttctctttttggagcaacgaacgtttggcttgatcacctttcaatgtataagtgtagggatggtctcattgatgcccattcagggtcaact

SEQ ID NO: 195964 - DNA, 702 bp, Gossypium hirsutum
  unsure (1)..(702): unsure at all n locations
ctttttccaagacacaaatggactgttgttcaaggcaattccagcttcccttggagtcagtgcaactaaagagtaccatgtcaattctcttgctgttccacggaaagcaaaagaagctattggaggaattactaaactcactcatagtgatgggagatcgatggtgatcaacgtggaatacaatcagcttgatcctctgcttagagccaccggacatccagatggagatgttaattgtgagaccggttattctccttttccaggaaatataaaccaattgattttggagcttggtccatacattaaggagctcaccaaaacaggaggtgctattaaggaatttgttaaccccaagtataaagatgctagtaaaacatcatttaagtcctcaactcgactagagtgtatgatgcaagactatcctaaaacattgcctccatcagcaagagtcggatttacggtaatggatacgtggcttgcttatgcaccagtgaaaaacaaccctgaagatgctgctaacgtaccaaaacggaacccatatcacagtgcaacttctggagaaatggccatatatcgtgcgaacagtctcatccttcaaaaggcggnggtccaagtggaggatcctgtgcaacaagttttcaacggccaagangtggaagtgtggccacgggttacttgaaagcctaaatgggggatcacttt

SEQ ID NO: 195965 - DNA, 528 bp, Gossypium hirsutum
gggaagaacttcgaaaattgcttggccattcggaaaggagttgattttttgcttagaacccaaagagaagatggtggttggggagagagttacctttcttgtcccaaaaaggtatatacacccattgaggaaaaagaatcgaatttagtaagtactgcacaagcaatgatgagtctaattgttagtggccaggctgagagggatcctacacctctacatcgagctgcaaaattgttgataaattctcagttgccaaacggtggttttcctcagcagggactggctggtgtcttcatgaggaactgtatgttacactatgcaatatatagaaatgtttttccactgtgggcgcttgctgagtatcgggaccatgtttggccttcaaaatatatatgcttttgaattataagaatggatcagagaattatatacaatagattgggtaacctacgatctgagtaaaaataatgatgtaataaagttattgaaatcttgcattaaaattagatgtagctttcggtggaatct

SEQ ID NO: 195966 - DNA, 556 bp, Gossypium hirsutum
gacccacgcgtatcgtgcatctatgtgtgtgaacaagattgatcagattacactcgaagagctggaaatattggataaacttcctcattactgcccaatcagtgctcacctggagtggaacctcgatggtctcctggataagatatgggagtatcttgatttaactcgcatatacacaaaaccaaaagggatgaacccagactatgaagatcctgttatcctgtcatcgaagagaaggacagttgaggacttctgcactcgaattcataaagacatgcttaaacaatttaagtatgcacttgtatggggatcaagcgtaaaacacaagcctcaaagagttggcaaggatcatgaacttgaggatgaagatgttgttcagattatcaagaaagtgtgatttgaggatattggaatttatgccttcatgttttaggaatcccatgaatcatattgctcaacattgtaagctgctgccatttaggttgtggagctggaaattttgtgaaaaacctgacagcttgaatgtgtaattaaaaaccaatttgttgtcaagctc

SEQ ID NO: 195967 - DNA, 379 bp, Gossypium hirsutum
atgggttaacattgcttcctactatttagttggcattccaattgggttgttctcggatacgtattcaaaatggaagtcaagggtgtttggtttggcatgttgctggaacacttcttcaaactgttacacttattattatcacctggaaaactgattgggataagcaggttctcttggctcattcacgagttaacaagtggtttgtaccagaatcccgggaaacaaacagcaaccaagaaaatggtgcttgaaggggtcaatcttgttatttttcctaatggacttatatttttttggtgctatatgtcatttcttgaaacgatcgacgcatctgcgttaggattttgatttcccatgattttaagaaaagttttggtgc

SEQ ID NO: 195968 - DNA, 1189 bp, Gossypium hirsutum
gtctaatttctttttcttaaagaaattttgtttttaaaaccaatttactctttggtataaattaaattaaatgaacttaacgttacttagaaagaagtaattaatattaatattggtagataaatttatcattttggtaacgtcttttaagtcgtagtttgtattaaaaactggttctaacttaaagtgcattgaaatgaatttggttatatgttatacttgcaatatagagttgaacagaacatctccaattgccgtgattcatatagagaaatagtgcagtttctacttttttttcaagatgcattgaaatctcccttaatttccacaatctctcaactgatattcatcattgattcaaaagtgctgccaatactacagctggaaagtactttctattgatggccattcgcgttaaaaggtttacaccatttatgggtcaaattaccagtgtctctatcatgattgttctatttcaaggtttatttccatgtcatatcatttggcctgcaaccactttaattccctttaattcctatggtattttatctgtatatttttgctagtgcattaccgaactctgtacttgtaggagaatgccatatgcaggttgaggcatgtatttttgtgtgtattgctttttgtagttctttaggcccttgcatgggcttcttttttagatggattgaaggttgggacttcactagcactagatattggaaggtgtaccatgtcaagcatgttggccaatgttaacactggaaatcaaggcctacagggtgaactgtaaatctagctttgccaagtttcaagatttatgtccgaagacatggttagacataagaggcaagggatcaaagctttggagggctcctagtcgggatgatcatctcaaattcacatgcagtagcgggtctattcctggaagattattcattagttgctaatttgaagcaagagttaattgtttgaatcccctcttggtttacgtggtgcagagctcaacttagtgttgaagaactactgttagttgttgaagttggtcatacgaggtacatgtctaccgcgtaacaagttcctttacatagcgaaaattttcagcggactacggtcctgcgggttgttcccttgaaatatcatgggggtcttcacgtacattctgttgtcttgatatacattcatattgcac

SEQ ID NO: 195969 - DNA, 695 bp, Gossypium hirsutum
ggtgatcttgtcgccgttaaaaggttaccggcaatggggggcgggttttaccatgatcgtgggttcaatgctgagatacaaactctggggaggattaggcacaggcatattgtgagactgttgggtttttgctcaaatcatgaaaccaatctcttggtttatgaatatatgcctaatgggagtttaggagaggttcttcatgggaagaaagggggtcatttgcactgggataccagatacaagatcgcggtcgaggcggctaagggactatgctaccttcatcatgattgttcccctttgatagtccaccgggacgtgaaatcgaacaatatcctcctcgactcagagtttgaagctcacgttgctgattttggccttgctaaattcctgcaagattcaggcacttccgaatgcatgtccgccatagccggttcatacggatacattgctccagaatactccctacaccctgaaggtagacgagaagagctgatgttttatacctttggtgttgtcctgttagaactcgtctgtggcagaaaaccactaggtgagttcggtgacggtgtcgacattgttcaatgggtgcgaaagatgacagattcaaacatagaaggcgtcctcaaagtcctcgatcccagactcccatcggttcctctccacgaagtgatgcatgttttctacgttgcgatgct

SEQ ID NO: 195970 - DNA, 318 bp, Gossypium hirsutum
  unsure (1)..(318): unsure at all n locations
cccacgcgtccgtccagtgccaatgttgttcccttcaagtagcacaatttgttttatcttcttttcataagaagtttccctttgtgagctagttttcgtttgatacttatatgttgttggggtctaccttagtatctaactttacaagtaggtctattttgactatgaatttatattccgtccaaatttaatgctgtgagacaatcttaaagtgttatgtcaataaaattttatatatttcaagttcnnannannnnnnnnnnnnnnnnnnnnnnnnnnnnnnnnnnnnnnnnnnnnnnnnnnnnnnnnnnnnnnnnn

SEQ ID NO: 195971 - DNA, 645 bp, Gossypium hirsutum
cttactctcatcttctcaagaaacaaacaagtcatcacttaaacccactcaaacgcaaatggcacgtaccaagcaaaccgctagaaaatcaacgggaggcaaggcgccgaggaagcagttagccacaaaagcggcgcgaaaatcagctccggcaaccggtggagtcaagaagccgcataggttcaggccaggaactgtggcgttacgtgaaatccggaagtatcagaagagcacggaacttttgatcaggaaactcccatttcagaggttggtaagagaaatcgcccaggatttcaaaacagatctgaggttccaaagcagcgctgttgctgctctccaggaggccgccgaagcttacttggttggactttttgaagacaccaatctttgtgctattcacgctaaaagggttactataatgcccaaggacatccaacttgctcgtcgcattaggggtgagagagcttagagttatttaagatttattgtactaattggatttccatggatttgttgtaggattgaatatccaaaacgtggagatgtaaagcctttccctggtaaaagtagtaatattatggcaatttcagtactatatgttgatgctatttttggttcttttattaaaataaatattaaattcat

SEQ ID NO: 195972 - DNA, 910 bp, Gossypium hirsutum
ggagtgtcgcagtgacattcataggctaaatgcacctttacttgctatttacgagtcacttattccgcctaaagaggaaaaaactaagcaacaacagttattggcgttactcgagaaactagtttggaaagaatggcctcaagcaaagttatttccttatggttcatgtgttaatgattttggggtttcgagaagtgatattgatatctgtcttgcacttaatgaggatattaacaacaaatctgaaatcttgttaaagttggcggatattttgcagttggataatcttcagaatgtgcaggcactgactcgtgctagagtccccatagtaaagcttatggatccggtgactggaatttcctgtgatatatgcataaacaatgtattggctgtagtaaatacaaagcttctaagggattatgcacagatagatgcaagattacggcagttggcatttattgtgaaacactgggctaaatccagaggagtgaatgaaacttatcgcggaactttatctagctatgcgtatgttttgatgtgcattcatttcttacagcaaaggagaccggctatccttccatgcttgcaggggatggagaaaacctacaatgtcaccgtggataatatcgagtgtgcttactttgaccaaatcgaaaaacttctcaacttcggatcttctaacaaggaaactgttgctcaactggtttggggtttcttcaactattgggcatacggtcatgattacgcaaattcagtaatatctgttcggacaggaagcataatcagtaagcaagaaaaggattggacgaggagaattggcaacgatcggcacttaatctgcatagaggatccattcgagacatctcacgatctgggcagagtggtggacaagtttagcataagggtatta

SEQ ID NO: 195973 - DNA, 767 bp, Gossypium hirsutum
  unsure (1)..(767): unsure at all n locations
ctcttcttgtacacaaagatttagtgacaaatggtgcacttaatgagctaattgttgatcttcgtatacaaggtgttactttatatggtggaccaagggcaagtttattgttgaatatcccacaagcacgctcttttcatcatgaatacaattcaatggaatgcactgttgaaatagtggacgacgtggctgcagccatcgatcacatccatcaccatggcagtgcacacacagattgtatcatcaccgaagaccaagaaactgcagaaatcttcttgcatcaagttgacagcgctgctgttttccacaatgcaagcacaagattttgtgatggtgctcgattcggtctaggcgctgaggttgggataagtacaagtaggattcacgctcggggtccggttggagttgaaggattgttaacaacaagatggattctgaaaggaagtgggcaggtantaaatggtgataaaggggtcacttacacccacaaagacataccaataaattcttgaaaatgtatcagaaaatacccctaaaatgcaaaggggaaaatggctgaagctgctgaattggtttcttgaagggggttgaattgggataaaaatgttttgtcanggtgttaattgttatactattaatattgtgaaattattggtaatgccttatgtttttaaattaggaagttaatcctttcttttccagtttaanattaaaatttaaggatttgaatatttgtgtcgggaaaattggatttaaaaaatagaatg

SEQ ID NO: 195974 - DNA, 414 bp, Gossypium hirsutum
aaacgttaaaccctagaatttgttaagagtgaaattagacgtgtgtttgtttgggtgaagaataatgagtgaaaggcaagagcttcaacccgatccacagattcaatcgccccagggttcatcaagagatgacatgatttcctgggtggtggcgttagagacggctttgctcccctgcttgccagccagagagcttcaagctatcgaccgttctccgcacccttctcatcagattgatgtggagagacatgctagagatttcatggaagctgccaagaagcttcagctatatttccttggcttgcaacgcgaggatcatccaaccaaggctggaatgctcagaaaagagattgcaacaatggaagaagagttgaaaacgaagaccgagatgatgaagaatcaggagagactgat

SEQ ID NO: 195975 - DNA, 556 bp, Gossypium hirsutum
aagaaaagagcttagggttttaggagctgaaaactgaggaagagacagcgatgatggctacatcaagactgtttggaaggtgcggcggattgttagaagcggcgaaggctttctctgcttccttcgcttattcgtcttcttcttcttccagtggaaatggaagggggcttatgcgggtgatacctgtctctccacagctggccaagttccttggagcctccgaagcttctcgcaccgacgccattaaaaggatttgggactacatcaagctccacaatctccagaaccctgcaaacaagaaggagattatttgtgatgagaagttgaagacgatattcgccgggaaggagtctgtcggaatgttagagatcagcaaatatctctccccacattttctgaaatccaaataaactttgcctttgcctttgcctttgccttagcgttagccttttgttggaactttaagacttaagttgcattgtgatgaatctgaaaaaatgcttttgtcattagtctttttcagtacaaatgcttaaaccccttttttcccctcgat

SEQ ID NO: 195976 - DNA, 739 bp, Gossypium hirsutum
  unsure (1)..(739): unsure at all n locations
ttatttcagccaaaatctctcgaagtttcttttctctatatctcctctcctttcacaaatttcacccntaaatatggggctctctctccaaacgccccccaaaaaatcaacagcataagaaagaccagtgttttagactctttttaatgtacatttgattttcgtttacccattggtctttgtttccaaggtcgaagaaagctatgagatttttgtagctttttgttcttgaagagtggcggcagggagagagggaggattttggacggctgaaatggatcgggaaggaggatcccacggcggatcttgttattactacgttcttggaattcgtaaggatgcctctttctctgatatccgcactgcttatcggaagctcgctatgaaatggcatccagacagatacgccagaaacccaggaatcgccggagaagccaaacgccggtttcagcaaatccaagaagcttattctgtcctctccgacgagagcaagcgatcaatgtatgacgccggcctttacgatcccttggaagaagaagaccaagacttctgtgattttatgctagagatgatgtccatgatgaataatgtgaaagacaaggttgatattttgaagaatttcaangatgtttcccaaatggttgaggcattancttcaaataaaccccatccaacgtgacaaaacgcacgctcnctgcatcnaaggcaatgcgttaaagaaaactctcgtgtgaatatt

SEQ ID NO: 195977 - DNA, 802 bp, Gossypium hirsutum
gcgcccacgcgtccgcccacgcgtccgcctgtattgggggacctaagagacctcatgatcgagttcctttgagagaaatgaaggctgattggaattcgtgtcttaataataaaggttggtttcaagggctttgccgtgccaaaagaggcacagggtaaagtggcaaaattttcgttccacgggcagccagctgagctcaggcatggcagtgtggtgattgctgctattacgagctgcaccaatacatcaaaccctagtgtcatgcttggggcaggtcttgttgcaaagaaggcttgtgaacttggtttacaggtcaagccttggataaagacaagccttgcaccaggttcaggagttgttacaaaatatttactgcagagtgggctgcaagaatatctgaataagcagggcttccatattgttggatatggctgcacaacttgtattggaaattcaggagaattggatgaatcagttgcctctgctatttcagaaaacgacattgtagcgtctgctgtactttctgggaaccggaattttgagggtcgtgttcatgccttaacaagagccaactaccttgcttcacctcctttagtggttgcatatgcccttgctggcacggttgatattgactttgacaaggagccaattggaactgggaaggatggtaagagtgtctatttcaaggacatctggccttctactgaagaaattgcagaggctgtccaatccagtgtcttgccagagatgttcaaaagtacttacgaggctattacaaagggcaatcccatgtggaatcagc

SEQ ID NO: 195978 - DNA, 697 bp, Gossypium hirsutum
  unsure (1)..(697): unsure at all n locations
ctcctgtacttgctcttcctcctcctccatggaagcccctcctcaaggttacaggagaaatgtgggtatttgtctcatcaactcctccaaaaagattttttcggcctcgagactagacattcccagtgcttggcaaatgcctcagggtgggattgatgacaatgaagatccaaaagttgcagccctcagagaattaaaggaagaaacaggtgttagctcagctgaagttctcgcagaggtaccttattggctgacatacgacttccctccagaagtcagggaaaaactgaaacatcagtggggatcagactggaagggtcaagctcaaaagtggtttctccttaaattcacggggaaagaagaagaaatcaatcttctgggtgatgggagtgagaaacctgagtttggtgaatggtcttggatgacaccagagcaaatagttgagcatgcagtggatttcaagaaacctgtttacaataaggttttggaagttttcactccctacctccattgatatttgcaaacatcaccatttctaatgtgttgagatcatagttggatacaataatttggattcagagtcnggactgagcacgattactacggtttgatggtaaaaggttanttcttactatctgtaaaataaatgctccatgaattttggaatctaaaccttggcccggttggttggtgtttt

SEQ ID NO: 195979 - DNA, 393 bp, Gossypium hirsutum
ccgcttgctcttcctcctcctccatggaagccccccctcaaggttacaggagaaatgtgggtatttgtctcatcaattcctccaaaaagggtgggattgatgacaatgaagatccaaaagttgcagccctcagagaattaaaggaagaaacaggtgttagctcagctgaaattctcgcagaggtaccttattggctgacatacgacttcccaccagaagtcagggcaaaactgaaacatcagtggggatcagactggaaaggtcaagctcaaaagtggtttctccttaaattcacggggaaagaagaagaaatcaatcttctgggtgatgggagtgagaaacctgagtttggtgaatggtcttggatgacaccagagcaaatagttgagcatg

SEQ ID NO: 195980 - DNA, 461 bp, Gossypium hirsutum
gctatcttattgaaaaatttgtgagcatgggattcagggctgaccatattgcgagtgtgattcagaggatggaggagagtgggcaggcggtggattttaatgccgtgctggataggctgaatgtgcaatcctctggtggtactcagagagggggatggtaaatgccactgcttggttgaatcgaccttgaatggtacttgaataaaaaaggtgggtttttctaatgtatatgttgggagggatatgagtatttgtatgttacctcctgctagaaattgtatgtgacccggttgtatcctagtactcgtggtgatgctcttggatttcacacttgaattctagtaaccctttcaccgcaaactgtcttaaagccggctgtcagtttgatagatcaactgctatatttgtcagtccaagctttatttcccttgaaacaatctgttgtgtggataaaaaatgga

SEQ ID NO: 195981 - DNA, 730 bp, Gossypium hirsutum
cggacgcgtgggcggacgcgtggccggacgcgttttctgacgcgtgggtgaagcccgggagagggctgagaaggctgctctagaaagagcaactactgaagctcgtcaaagagcaatggcagacgcacgtgagagattagagaaggcatgtgcagaagctagggagaagtcttctatggaagccaggctcagagcagagcgtgctgctgtggagagagcaactgctgaggctcgagagcgtgcggtggagaaaataatggctgaaagggctgcttctgaggcgagagagcgagtagaacggtctatgtcagataaattttcgacttcttctagaaacagtggaatgagaagcagctattcatcctctgatctgaaggatcagcattttcagagcaccaattcttttggtggtttaagatatccttatgcctccgcatgtaatggggttgaaggtgaatcagctcagaggtgtaaagccagattggagagatatcaacgaacagctgaacgtgcagctaaagctcttgaagaaaagaacatgcgcgatcttcttgctcaaagagagcaagctgaaagaaatagattagcagaatctcttgatgccgatgtcaagaggtggtcgagtgggaaagaagggaaccttcgtgcattgctttcaactttgcaatacatccttggcccagagagtggttggcagccaattccgttaaccgaaagtataacttcagct

SEQ ID NO: 195982 - DNA, 570 bp, Gossypium hirsutum
ggtggtttaagatatccgtatgcctccgcatataatggggttgaaggtgaatcagctcagaggtgtaaagccagattggagagatatcaacgaacagctgaacgtgcagctaaagctctcgaagaaaagaacatgcgcgatcttattgctcaaagagagcaagctgaaagaaatagattagcggaatctcttgatgcggatgtcaagaggtggtcgagtgggaaagaagggaaccttcgtgcattgctttcaactttgcaatacgtatgtactattatccaaattctctccaatcaagcttttataatcatttcctttgtttactgggtcgtttaattgacttaatgcttaatcttccatcattcggaataatatcaaaatttctcattgctaatgtactttgatatccttacaacaagttaaaacccgagctttcttcatttgacggatccttggcccagagagtggttggcagccaattccgttaaccgaagttataacttcagctgccgttaagaaagcatacagaaaagccactctttgcgtccatcccgacaaattacagcaacg

SEQ ID NO: 195983 - DNA, 608 bp, Gossypium hirsutum
gaaccttcgtgcattgctttcaactttgcaatacttaaaacccgagctttcttgatttgacggatccttggcccagagagtggttggcagccaattccgttaaccgaagttataacttcagctgccgttaagaaagcatacagaaaagccactctttgcgtccatcccgacaaattacagcaacgaggtgcaagcattcatcagaaatacatttgtgaaaaggtcttcgatcttctaaaggaagcttggaacagattcaattcagaagagcggtaaaatgcaatcttttttttttttaaatacaggtgcgattggcttcattacaattaaactatggtgctgtaaattttacactgttagcatagtaaatgatcctctttttgtctattctatgtttctacggcatgtacttgtgtgtaattcaactatttataagcccaaagaaatagatgcaaagattcttagttaaaagaccatggaacacgaactccatgttattgggtttattttaactgttcattggctggacatgtttgttcctgccaactctttactcgagttcgagatttgttataatatggtattcgggtttattttttggtcttatt

SEQ ID NO: 195984 - DNA, 649 bp, Gossypium hirsutum
cccacgcgtccggggagcagctaagtctctttgtaccccattcgaacagcctgaactcccagaaggtgagacaccgtttaaggaaagatcatgggattgagggtggaattcgtgttgttttctctttagagaaacctaaagctcagctgcttccttttagaggaccaagtggtgaggaagacaacccttcagattatcaagtgaggatgcttgcttcttacttttgcagttttaaagtactctgtttgatcacctaacatcatgcagtggggaaattcatccaatatattgaagcagaatttggaatgagaattggaagtacatttggatggagctaaagttgtgtttcttttagcgatatatttgaacttgctggtgttaggtccctggtttttgctatctctagatttaagggtagaaggcaaaggaaaatattttggtctacgttagtatgtaatctacatgcttaatccaacaatttaatgtgttgttctgctgtcagatagtacctgggcaggttcaacaatttaatgcattgtattttttattaccttgcaatgtgtatagtcataggtaggttcaactaaccgagctggttttcatatgaataattgattgtagtttaattttaaatttttatatttacttt

SEQ ID NO: 195985 - DNA, 479 bp, Gossypium hirsutum
tttcccacgcgtccgaaatgacactataagccatttaactgaacatgttcttgagctcgagaggcagcaaatcttggaggactaggctatgatatctcaaaagatatgttgcgattgcggtgtgttggtgttcgtaaaatgcttgtttactcatgcaagtgcaagtttgaagttgtaagttatatggcttctttcaacccctcttatcctatccacctcttttaaaatgaagcagtgaagctttgaacaatatagattgtccatcattatttttaaatgacttagctgctttgacgctgactaatcatctggtgttattacatgttggaaattaggggaatttgcataagatgtagttccaaacttagaactctgaacttaacagagaatggatgtgattctttatgatgctatgagcaattttctcataataaaaaaaaaaaaataacactataaataaataattttataataaaaat

SEQ ID NO: 195986 - DNA, 388 bp, Gossypium hirsutum
agtttccctactcaggtcacctttgattccccaatggcggtctctacaccatccccagtctcttaccttacaagaatcgagcacaccaatctgtttccttccaaaaaactccaatttaaccccttttctcccgccaaaaagccattaacagtcgtctccatggctcccaaaaagaaggtaaacaaatacgactcagaatgggaaaaacaatggttcggagctgggattttttacgaaggaagtgaagaaattgaagtggatgtgttcaagaaacttgagaagagaaaagttctaagcaacgttgaaaaagctgggcttttatcgaaggctgaggagcttggtttcaccctttcatcgatagagaaactcggtgttttctctaaagcag

SEQ ID NO: 195987 - DNA, 454 bp, Gossypium hirsutum
cccacgcgtccgcccacgcgtccgcccacgtttcctaaaaaacttaaaattctctctgaaatgagaggagagagagagagagcttggctccggtctccgtcgagccgagcctcggtcctcggcttcacgcgcccatgcgccgtcaccgactcctccccgttcggtggccgaagacccgaaacctcgatttttctacgcaaataaagggttcgacctttttcttttcattatttacagtatataagtacatatatgtaaaatattttacctttgtgtatctcaattaactgtagtatcctactttgtgtacgtatgtaaaaataagatttttattgcatctatgtatgtatttcagaaacctcaaaatcatccctttacatcctctcaatttgggctttttatagccactgaaaaagaaaaagaaagaatctttacaatctttggtttatttctt

SEQ ID NO: 195988 - DNA, 635 bp, Gossypium hirsutum
cccacgcgtccgtggcaaactgtctcaagatgatgaggcccttgctattgctaccacaatgccgaagctcaagcaactcgaggtagcatacttgcttattagcacagaaggtgtgggtaagatacttgaaaactgccctgcgcttgaattattggacgtgagaggatgttggaacgtgaagctggatgaaaatcttgtcaagaaattctcacggctgaaggtggtcggacctctcggtgcggattattttgggatgaagggctgggatgattgttcaaactattcaggttcctcaggttacttggcctgggactttgttgctggagatgtcggtattgattacgatgatgagatatcagatgtggattgggaagacgaccaaagtatagaagatgtggaaatgaggttctacgacggttttgacttggaaaatgctgcgttcgattggcccctctccccttgaagggattgttatccattcgagctctacacagactgcggtgagcacttttttgattcccctttgctatgcacaaacattgttcttataaggtagtagtatataaaacaagctttcctatgagtatttgtaataataaaaaaatagaacttgtaatatgtagcaaaagaatgtg

SEQ ID NO: 195989 - DNA, 692 bp, Gossypium hirsutum
  unsure (1)..(692): unsure at all n locations
cccacgcgtccgcccacgcgtncggaagcaatcagtaggaaacccaagtgtctattgcaaacttactcttggcaacactccacgtcggcagaccaagattgtatcaactggtcctaatccagagtggggtgaaagttttgcgtggacttttgagagtcctccaaaaggccagaagctgcacatatcttgcaagaacaagagcaaaatggggaagagttcctttggaaaagttacaatccaaattgatcgagttgtaatgcttggatcggtagctggtgagtacacgttattgcctcaaagtaaaagcgggccatcacggaatttggaaatcgaattccagtggtctaacaagtgaagaaggtgagagagataattatcaccattattattattattactattattatttttcccggaaatttgatgattgatcaagtagggaacatacgttttggtttttccaattttatatcataatattacagtgtacatagtcttccggtgattttgacgtgtgtagaaatgttttattgtttcaaaaatagtgatttgtgaaagtattcatttaatttgtaatctgatttttcctttgcatttatttctgtagaggacacaggctatttttgctttgtaattctttgttggtgtgtgctttgtcaaatttgagagcaaaataaggatatcttgaattc

SEQ ID NO: 195990 - DNA, 516 bp, Gossypium hirsutum
tttaaatgctgcgagatatgtgatgaggtggcgggctattaaaatccttcaagttagcctttcggatttcaggttcatctcttctttatcacttttattaatttttattattatttaagcttcttagtggctgccagtgtatgccaaatgcaagaactaaatctacttattgtttccatgttcctattcttgtttgcaccaaatatgccatagagatttgaaattagaaaatacccttttagatggaagccctgcacctcgtttgaaaatctgcgatttcggttactctaaggcttgggaataattaattatatatagtccatcttaagtgtcagttgctttatgattttccagtcattaagttgtttttttaacacttggtgtagtcatctctgttgcattcaagacccaaatcaacagttggaactccagcatatatagcaccggaagttctggcgcggtgagagtatgatggaaaggtattatttcaactgtataaaaaataaaagaagaaga

SEQ ID NO: 195991 - DNA, 622 bp, Gossypium hirsutum
cccacgcgtacggccgcgaactcgctgcaaaaagtaacgagccaacttcgagtggctcggagcacgttgggttcgttctcgagaaccttctcttcagatgcattggttgaggttaaaccaggcgaagttggaatggtttccggaatccctgaagaacatcttcgtaggagggttgtgatttactcgcctgcaagaactgcaactcagcaaggatctgggaaagttggaaagtggaagatcaatttcgtgtcgacacaaaagtgggagaacccattgatgggttggacatcaactggtgacccttatgctaatgttggtgattccgcactcggttttgatagtgaagaagctgcaaagtcttttgccgagagacatgggtgggattatgtggttaaaaagcgccagacaccagtgctgaagccaaagtcctatgccgataacttcaagtggaaaggacctgctgtatctgaaaagtgatactatactattgcagatcctgttgcttttgattttcaaccataaatcaagttgcgagacgggggctcaggttttctttgttgcacattttctgctgtatcttgtgacaatttggattaaaataaatgtgatcaacagtgaccaa

SEQ ID NO: 195992 - DNA, 774 bp, Gossypium hirsutum
  unsure (1)..(774): unsure at all n locations
gngaaaagaacaggaaaaagttggctgattgcgcacttggatttggccgtggtactaccggtggaaaggatggacccatttacgttgtcactgatcctaccgatgatgttcttaacccaagtcgcggaactttgcgtcatgctgtgatccagaaccgcccactttggatctccgcccccgcgggcgtgattattaggttgaaagaggagctccttatgaccagcaacaaaaccatcgatggtaggggagccaacgtgcatattgcttatggggctggtattaccatccagtttgccaagaacgtcatcattcataacatccatatccataacatcttccctagcaaaggtggcaagatcaaggatggcgagaaccaccttgggttgaggacaaggagcgatggtgatggcatctcccttttcggagcaaccaacgtttggcttgaccacctttccgtttacaagtgctccgatggtatcatcgatgctattcagggttccaccgccattaccatttccaactgccacttcactgaccacaacgatgtgatgctgtttggagcaagcgacagctacagtgctgatgagaagatgcaaatcaccgttgctttcacccacttcggtaaaaatttggtacaaaggatgcctagggtccggtttggtttcgtccatgttgtgaacaacgattaccgtcattggatcatgtccgctattggaggcagcagtcaccctacaattatcagccatggcaaccgatttagagcctcacgtaaca

SEQ ID NO: 195993 - DNA, 646 bp, Gossypium hirsutum
ttagtgtatgacatggccttcctctgagaatatggatgatggtgacatgttgcccctgaaatgttccaatgatactgaggatatttacagatcagggagaaattattctggagaaagtaatgttgctaatggaaatcattctgtcaagcctcccacattccaaagaggagtgcttaggaccaattgtatagattgcttggatcgtacgaatgttgcacagtatgcatatggattggctgctcttggaagccagcttcatgctttagggattaaagattccccaaaaatagacctcgatgatcctttggcagatgaattaatgagtctctatgagagaatgggcgacacacttgcgcatcaatatggtggctctgcagctcacaataagatattttctcagagaaggggtcaatggagagcagcgacccagtcccaagaattttttaggactcttcaacgttattatagcaatgcatacatagatgcggagaaacaaaatgcaattaatatattcctcgggcatttccagcctcagcctggtaaacctgcactttgggagttgggttcctaccagcattataggggaagaaatggggaaacaataatggacgaagatggaaggtcacttttcaaaagatccttttct

SEQ ID NO: 195994 - DNA, 495 bp, Gossypium hirsutum
aagctgcctcctccatggcttcagctccttccaagctctatgcagatgatgttagccttgtggtagttttgctggacactaacccatttttctggagctcctcctcactctctttctctcagtttctctcccatgttcttgcgtttttgaatgcgatattgactctgaatcagctaaaccaagtcgtggttattgctactggatataattcctgtgactatgtctttgattcgtcttcagatttgaaccggagttttgagaatgggagaatgcctgttatgtgctccagtttgttgcagaagttggaggaatttcttattacagatgagcagttgagcaaggaggaacctgaaggaaagattaagtcttcccttttctcggggtcattgtcaatggctctttgttatatacagagagtgtttcgttcaggagccctccatccacatcctcgaatcttatgcttgcagggatcaccagatggacctgaacaatatg

SEQ ID NO: 195995 - DNA, 553 bp, Gossypium hirsutum
caccggacaccaccacaaactcatttaaaccagccccccccaaatctttttgctcagtttcctccaaccccaacatggcatttgcatcccaggcaatgatatcaacgaacagctgtgccttcacttccccaaacttgttgtttttgaagaaatgttccaaaattaacaacaagaccaggcaattccatttcttcactgttagagcatcttctgatgaatccgatgactgtaatgaagaggaatgtgcacccgataaagaggttgggaaggtgagtgtgcaatggttagccggggataagacaaaagtggtcgggacatttccgcctcgccgacggggctggactggctatgtcgaaaaggacaccgcggggcagaccaacatttattcaatagagcctgcagtttacgtagctgaaagtgcgataagctcgggaaccgccggttcttcagcggacggagctgagaatactgctgcagttgctgccggatttgcccttatcttttgtgctgcagcttcatctataggcctttaagttggtcaagaactcacctt

SEQ ID NO: 195996 - DNA, 586 bp, Gossypium hirsutum
cccacgcgtccgcgttgaactcccactactccctcttcctcttcatcttcctcttcctcttcttcacttcatttctgctctgcttctcagtgggaaaaaaaaaattcatagagcagagcaatggtgcccattttcgcttctttctctcttttactcatttctgctctcttcattgttgcagactgtggttctattggagtaaactacggaagaatcgccaacaaccttccttcagctaccaaagtagtggaactacttatatcccatggtttaaaccgtgtcaaagtctacgacactgacccggctgttctccatgcattatctggatccggaatcaaggtcaccgtcgacctcccaaacgagcaactcttcgccgctgctaaaagcacttcctttgctaactcttgggtccagcgaaacgtcgccgcttactaccctcacactgaaatagaagccattgccgtcggtaacgaagtcttcgtggacccccacaatacgactaagttcctcgtacccgccatgaaaaatatccaccaagctttggttaagtccaaccttcactcggatattaaaatctcttccccca

SEQ ID NO: 195997 - DNA, 614 bp, Gossypium hirsutum
cacaagaattacttaagtcagtctgagcagattcagatcccactggaagaatctggaattaaaaagcgatagggtttggttcgttgttaaaaagataggcagaggcatttaaaaagttttagaaattacttaggggaagcctaatcagagagatccatggagtttttagctaaagaatacgggtacgtagcgttagtggtggtggcttactgctttctcagcatatggatgggtatccaagtagggatggctcgcaagaagtataaggtttattaccccaccctttacgctcttgaatccgagaacaaagatgcaaagctcttcaactgtgttcagagagggcatcaaaactcgctggagatgatgcctatgttctttgtactgatgattttgggagggatggctcatccttgcatctccgctgcgcttggacttttttacaccgtcacccgttatttctactttaccggctattccaccggagatccccagaaacgtctcactattgggaaatatgggttcttggcattgctggggctcaagatttgcactatttcattagcaataaacctgctccgacgatgattttctttcccatctaattagggtatcgt

SEQ ID NO: 195998 - DNA, 431 bp, Gossypium hirsutum
cccacgcgtccgcccacgcgtccgcggagcatagaagtttaaaggcattcttacaccctacttctcttctgtctttctctttttcagctaaatcccacttgttgaatagtagaacatggaagggaagatgagctggacggtggcggatgcggtggactacaagggtttccctgctgacaggtcgaaaaccggaggttgggttccggctgcactcattctagggattgagatctgtgagaggctttcaacaatgggaattgcagttaaccttgtgacatacttggttggtgtaatgcatttgccaagttcaacttcagccaatgttgtgacagatttcatggggacatctttcctcttgtgtttgcttggaggcttccttgctgattcattccttggcagatacaagacgattgccatctttgccgctatac

SEQ ID NO: 195999 - DNA, 624 bp, Gossypium hirsutum
catttccaagcttctctagttgtcaagtgtttttgcagagcagaaatgaaggtctttgaaatcaatggcaacactctctcgcttgccctcttcgctgatgtcaccaactccaaggaactcctagactctatgcaagccggaacgcttgatcctgaagttgcgtttcttaatgcatcacttattgcggatgtttttccagttctagcagcagtgcataagacacttatttccaagtcacgtgagtcgttgactacacgaacactccattccgaacttgtttacaattactctgggtctaagcatatcaccgaatccctgaaacgatgtggtatttctgaaagttcaaggtatgtccttgccgctcgatttaacgcttctcccgatgagatgaaagctgtggagaagcttatcaatggaaaagagatcgatttagatgagtttgaaggaagagcagaccaagctcagatacaaaagcactacaaaatatccggccccgagctaggcatatccactctcgcagatgccataacatgtcgaattgctgctcgagatgctttatgagatcaatttcagaaggcattgcttcttagacaaaaatggagcagagagcaaagaaatgtaaat

SEQ ID NO: 196000 - DNA, 547 bp, Gossypium hirsutum
  unsure (1)..(547): unsure at all n locations
cgaaaacccctcctcaagaaatattcagtctctgtgcaattacaactccaagaaaaaatggcaacggaactaccaaaaccggcaaccgaagacgtaaagtttgatttgtttgaagatgatgatgagtttgaagaatttgagattgatgaagagtgggagttaaaggaagaaggaaaggagattacacagcaatgggaagatgactgggatgatgatgatgtcactgacgatttctctttacaactgaggagggaacttgagaataacactgagaacaacaactaagctggacttatgcattcctctgcactgaacttgtctgaatcggggttattttttttgtttgattttcttttccatgcaaagcgaatgaaggaatcagctgtaactctttatgcttgggtgtactggtagaaacttaaaatgcagaaactggtttgatggttctttaaaatatagacatttgatttttnnnnnnnnnnnnnnnnnnnnnnnnnnnnnnnnnnnnnnnnnnnnnnnnnnnnnnnnnnnnnnnnnnnnnnnnnnn

SEQ ID NO: 196001 - DNA, 483 bp, Gossypium hirsutum
cgatcttttggttctgatgtgacagatattggcttgggtctcctaaaagagtgctcgagtctccaagccttaacttttaaccactgtgaaaatatttcagaaattggactgaagcatattagtggtctaacgaacttgacatccttgagttttaaaaagagtgctgcaattacagctgaaggaatgtgtgccttttccagcttaataaacttggaaaagttggacctggagaggcgcacagggattcatggtggatttgtacatattaaaggtttggccaaacttgaatctcttaatatcagatgctgtaaatgtatcacagacttggacttgaaggctatttcagggcttaataatttgaaggagttgcaaatatcaaatagtaacgttacagattttgggctgtcttatttgagaggtttgcacaaacttgttatgttgaatctagaaggatgtaatgttactgctggatgtttggattct

SEQ ID NO: 196002 - DNA, 573 bp, Gossypium hirsutum
gcaagcaagtgcaaaagaaagtttactaagtcaaaccagtgatagtggtgcaagtactgttgtcgacaatgctgaaggtgattgtgatgagctaagaacagaggaatctcatcatctaaacccaagtattaagattgtatcagtttgtaatacttttagtaagagcgacgccgaccggattcgagagatctttaagaggaggagatgtgatagggctgcaaatttgaagcgaacgaaagttagagatgacgaggtagacagtgaagcctggatagagagagaactggagatgggaatagaactggaatctgccacttcccggaagcgagggagggtgcactgaggttttgaagttgggagaagtagttcgttgataccctctaatcacatatcttctttctacttaatgcatcaaagcgacccttccatggtctcatttatggcatttcaagaaagactgaattctatttctctcttagaacaactataattattgccttgttgtagactgtatacaagtgtagaataattgtaacattttttttcgagagatattttatttgtattttggat

SEQ ID NO: 196003 - DNA, 922 bp, Gossypium hirsutum
ggcgatttgatcgtcaaatttcaattgataaacctgacattaaaggccgtgagcagatatttctggtctacttgagaaagataaagcttgatcatgagccatcatattactctcaaagacttgcagctcttacccctggctttgccggagctgacattgctaatgtttgtaatgaagctgctctaattgctgcaaggagtgaaagggcacagatcacaatggaccattttgaggccgctatagacaggattattggtggtcttgagaagaagaacagggtaataagtaaacttgaaaggaaaacggttgcttatcatgaatcaggtcatgctgtttctggctggttcttggaacatgctgaacccctcttgaaagtaacaattgttcctcgtggtacagcagcacttggatttgctcagtatgttccgaatgaaaaccttctcatgacaaaagagcagctttttgtccggacatgcatggcccttggtggtcgagcagctgaacaggttttgttgggaaagatatcaacaggtgcgcaaaatgacctggaaaaggtgactaagatgacgtatgcccaggtggcagtttatggctttagtgacaaggtaggtctcctctcttttcctctgagagaagatggatttgagatgtcgaagccctatagcaataagacgggtgccatcattgatggtgaagtgcgtgagtgggtagctaaggcgtatgaaaaaacagtacaacttatagaggaacataaagaacaagtagcccagattgctgaattgttgcttgaaaaggaagttcttcaccaggaggatctggttcgagttttgggcgaacgaccatttaaatcaagcgaacttaccaactatgacagatttaaacaaggttttgaagatgaagaaactaagagcatgcaaacacc

SEQ ID NO: 196004 - DNA, 931 bp, Gossypium hirsutum
  unsure (1)..(931): unsure at all n locations
gctttctccacatacccaaggacgtatgatctcattcatgcacatggtctattcagtttgtacaaggacaagtaagtatacctagttaaatgtgcattccttttactttttatcattgtaatatatacaacaatttatgttgttcttttactagcactattgcattgatgggtgcaagtaggtaggtttacttttagatgtgtgcttcaattgtgtgaatacccctatgttaaacacgatcattacctattctttggtatgctcttaccattgctagagctacttggctttcgatttattacatctaggacttagatgtttaaatggaatgtttgcagatgtaatttggaagacattttattggagatggaccgaattctgcgtccagaaggtgcggttatattccgtgatgaagttgatgttctaattaaagtgaagaagataacagcaggaatgaggtgggacactaagatggtagaccatgaagacggtcccttggttcctgagaaagtattggttgctgttaagcaatattggaccgttgggggaaacacgacatctgcacagtaaacagcagacggcgacaagcttaaaccgtggcatgaactgagtttgtggattatatcagtttatcatcaattgatgaatttccagcctgaaaatttttgccagcaggattgttttggtgggtcacaggattaggtgaactaaggatcagtctgtattcatttgtattaatttatgaacagatagctataaactatgcttccaaagtttaatgatgattgaattaatcttattttttgttttaaggtttgcatattcaaaanncaaacaaacttgcaaaacaagctttttataaaaaccattgcaaaactggatactcttggaaaggattcatacaaggatagcacttttataatgcaacttt

SEQ ID NO: 196005 - DNA, 775 bp, Gossypium hirsutum
  unsure (1)..(775): unsure at all n locations
atcttgttatatcgctaaccatgactgtctcggtagctaacggccgtgtcctcatagtcggagcaaccggctttattggtcggttcgtggctgacgccagcttggatgctggtcgacccacttatgttctggtcaggccaagttccggaaaccaatattccaaggacaaagtagccaaagcccttcgggacagaggcgccatactgttgaatggattggcaaatgacaaggagttaatggtgaaactgctgaaagagcaccagattgagatagtaatatcagctctgggtggcgccacaatactagatcagctgtctttggttgaggcaattcactctgccggcactgttaagaggttcttgccgtcggagtttggacacgatgtggaccgagctgatccagtagagcctgggctcaccatgtacaaggaaaagcgtcaggtcaggcgtctgattgaaaagctggagatcccttacacctacatttggtgtaattccattgcttcttgcccctaccacaacaatacgcatccttccgaggtcattccaccctgggatcattttcgaatctatggagatggcgcgtcaaagcttactttgttgaggcaccgatntaganaattcacatgaaactgtgatgacttaggaacttgattagcagtcatttaagcctgctgcattntatacatgacgacttgcacttggtggaaggaatcgcgacattcctgatacgnnttggagctttttggtgggaagattttccacagttgtatccn

SEQ ID NO: 196006 - DNA, 406 bp, Gossypium hirsutum
cttgtatggatagagagaggatggctgtgctggaccaagcagagcctatcaacggatactaattgataaggtggaattttggtgaccactttgcttgtatggatagagagatatgcaacactttttctgcccccctactttcttagctttccttgtttaatgcctctgtagttgaagtataatctgtgaggtttcaaattcttaatataagcctccaagtttttctgttctgtataatgcggttcggaggctggttccctataagtctaagaagatggggttcatttctctattttactgttaatgtttatggcaatctgggttttgtccagtggtggtaatgtacgtcattatggtattatttgtaaatatttatgtaagataagaaaaaaatggaggcttttgt

SEQ ID NO: 196007 - DNA, 924 bp, Gossypium hirsutum
cccacgcgtccgccttaggggagttggcactgatagtgattccacttctatacccttcttttctaattatatgagtactgcagggaatgatttttcggttaatccagcaatgacaccttccagttgcattgataaatctggatttttgcagtctcaggaaaatgtgggccaatcaaacccacaaactagaacctttgttaatgtttataaatcagggtccttcgggagatcattggatatttctgcattcagcaactacaatgaacttcgcagtgaactggcacatatgtttggccttgaaggccagttggaggaccctctgagatcaggctggcagcttgtatttgttgaccgggagaatgatgttcttctccttggcgatgacccctggccggagttcgtgaacagtgtctggtgtatcaagatactttccccacaggaagtgcagcaaatgggcaaacgaggcctggagcttctaaactctgtgccagttcagaggctctctaatggcagttgtgatgactatgtgagccggcaggactcgagaaatcttagctctggtatcgcctccgtgggttctttggactactgaatgaaattcatcgggttatgatacctgtttttcttcctgtaatattaattgtgttcttgcaacccctttttaatagtaggtgggaaatgagcctgcctaacttctagctttggaagtttatatttataaaaaagctaatagtaatactgtaattataaaagatctttgtcgcctatgttattgaaatatccacactccatatgtattaggatatatcaatatttatgaagcaaacttagctttttccaaacaataaaatatgcataagccagaaataaattttggtttttgctaaaatttatgttttctacgatataattaatattttatta

SEQ ID NO: 196008 - DNA, 371 bp, Gossypium hirsutum
tccacgcgtccgcccacgcgttctttcacgcgtcccattcccgaaagacatgagtcattgtttcagctctttgaccacattgaggacaacttgtattggctgctagtttcctgtgttgtaaatttacctttgtaggcagatagttccatgacagtctccatatagtagcatttactttagatggtagatttagactccagagttgtttgtaaaattttgtttagatggtttgtaaagcatacgctctaggattttcatccattctctatctttcttgttaaactctaatacattttttaaataattaaaattataattatgtgtattattatattaatgggcggccgttttaaaagatccaagctttcgta

SEQ ID NO: 196009 - DNA, 455 bp, Gossypium hirsutum
cccacgcgtccggcttcgctttctcgaattttccttctccgtttatcccttttttctaaattttcttccgacagaaatcaattttgttttcccctttttcttcggggtaaaaagaacctttttctcatataaatcattgattagctcgaatttcgatccattatggctgcgaagattcttgccaacttaattgtaatgggctcaggtatattggctcgggccgttgttcaggcataccgtcaagcactttcaaatgccgccaaatctggtgttacccatgagacactacaaaacgcagtccgtagaggtggcaaagtcatgaccgagcaagaggccaggctgattcttggtgtaagcgaggagactgcttgggaggagatattaaagaagtatgaaattttatttgagaagaatgccaagaatgggagcttctaccttcagtcaaaggttcatag

SEQ ID NO: 196010 - DNA, 418 bp, Gossypium hirsutum
cttagccttgtttgtgagctaatgcaacttgaggttttggatgagaaagatcgtgagaggtttttgggtccatacaagaaagttcagcagtggattaagcatacaaggaatgctacgagtcctcactttgacaacgtgcataatatcctcatgaaagtcaaagaaaaactaaaaaataagccgttaatggaagcaaatcatggaggtgcgcttgtcttccaattgcgattgcgttcaagaatatgacgtgtgaaagaaaactgaatatatcatggagtccccagcttttgtgttgtcttggtatgaataaattggaaatgaaaggaagtatggctgtaagccatctggcttgcatgaagggcccttgaaacatccattgaaagtttcaaccattataacaatctttaaatcaaggtca

SEQ ID NO: 196011 - DNA, 465 bp, Gossypium hirsutum
gtcttaataaaatcagatgttagccttgttggcttggtgtcggccttgttgaattcttctaaattgcagttgaagaaggtgttctcttcattcaaggatgtcaaagtcattcagttctcttcaatgcaggatgcttttcttggtttcactgacaagacaagagaggagaaattcaggaaacgtgtaaagcagtatgtaggtatatggtgctgtgttgagaaccacattcctggacacatatattatgacatgtattgggacgagaaaccgggttggaaacctgttccacctaaaaccccagaggacgatcatccacctttctgaagccctctcttcaccctcttatcaaaaaggttgcccaagttctggccttgggaggtagaaaaagagacagagacagtggcggggacagtgacagtcacagcgtttcaaagctgctatggttcctaacacatcgtcaaaaac

SEQ ID NO: 196012 - DNA, 880 bp, Gossypium hirsutum
cccacgcgtccgcccacgcgtccgcccacgcgtacgtccacgcgtccgaagtctcactctttttttcttaaaactttgaatctttcatatattttaccttatttagcttcaagcaacaaaaatggctgatgaagcgttagtgaagaacaagcaagtggttctcaagaactatgtgaatgccggtttgcccaaagaatcagatatggaaattaaagaaaaaagcattcaattgaaagttccagaagggactaaagattcaattttagtgaaaaatctctacttatcttgcgatccttacatgaggaatcgtatgaagaagctcgaagattcgtatgtgccgtcttttgagcccggatcggctatatccggctacggagtggccaaagtcgtggattcgactcatccggaatacaaaaacggcgatctcgtgtgggggatgaccggttgggaagagtattctctcttaacggtgcctggtcttttgttcaaaattcaacacacggatgtgcctctcacctactatactggacttcttggtatggctggtatgactgcttatgctggtttttatgaaatctgcaccccgaagaaaggggaatatgtctatgtatcggctgcatccggagcagttggtcagctttgtcgggcaaatttgcgaaactgtcaggctgctatgttgtcggaagtgccggaagcaaagagaaaattgatctgctgaagaacaagttcggcctcgatgaggcgtccaactacacagaagatccggacttggatgctgacttaaaaaggtactttacagaacgcatcgatatttacttcgtatacgtactgggaaagatgctcaaagcagagctgctcaccatgaaaggccatggtcgta

SEQ ID NO: 196013 - DNA, 454 bp, Gossypium hirsutum
gcaggagcaaaactctgataagacactttggaaacttggaactcttcctgttggccttttagctttctacgggctgacagaaccacttgatcggagatggcatgtgttaggtttaggttacgatcttaacatcgacaaccgcctgatcgagagtgcagcagtcattcacttcaatggaaacatgaagccatggctaaaactagccatcggaaggtataagcctctatgggaaaggtacataaatcttagccacccatatctccaagaatgtgtcacaagttagacaaatgtgctctgtgctctatttttggttccaattgctcgacctccaatgatataaacccatgaaaaggccgatcgcggaaattcttttttgacattgttaggagatttgacatatcttttttggtagtttttttttttttggttcatcataagatcttgaaaaggaaaa

SEQ ID NO: 196014 - DNA, 411 bp, Gossypium hirsutum
atcgctgtaatttctttttctcttcttcctttttcttttttaaaagtatcagcaaaattcccaatcgtaaaaaaatggaggctcctcaaccccaacaacagcaacaacaaggtcctaagaagagaggtcgaaaaccaaagccaaaggaagagaaagaacagcagcaacaacaaagtgctagtaaaatgaatgagggaaagaaagctcaccaacctagcgttgatgagaagtacactcagtggaagtctttggttcctgttctttatgactggctcgctaatcacaatctcgtttggccttctctttcttgccgctggggaccacagcttgagcaagcttcttacaagaatcggcagcgtctctacctctctgaacagactgatagtagtgtccccgaatactcttgggatt

SEQ ID NO: 196015 - DNA, 504 bp, Gossypium hirsutum
  unsure (1)..(504): unsure at all n locations
cccacgcgtccgcccacgcgtccgtggaattctatgatcttcctcgtccttctattttagaggaaatttctactggtgtcccgacaagattgcctgaaggagtgaaatttgaaatgcgtacattaccagtgaggtgggtaaatgccatttcaatattgttcaagggagattgctctctgggccagtcttgaatcctcaatggtgaaggtattgtactctagatgtctgttcttgattatcttcaagttttatcttctgtaattcgagaagaaacaaaagagattcacaaagtttagaaagtgtctcgccaccaaggaaatgtttagcatttagccaccaaagccaaatgctaaacatttccttggtggggagatgctcctaagttctgtgaacttttggggttcgcttcggactacaagagacaaaaacccggggataatcgataatagactntctgagtataatacctccaccgttgaggtctgaaaccggcctaaagagcaa

SEQ ID NO: 196016 - DNA, 636 bp, Gossypium hirsutum
acctttaacacccccacctctttatatatatagcaccaccattatagtctccaaaaaccagtaagaatcaaccacttcgataatggccatgcataacctagttcaagctcttgtttttgttgctgtttttttcaacacattggcacccacagtcgcaaatgttgaaggggatgctttgtatgcattgaggagaagtgttaaagaccctaaaaatgtgctcaagagttgggatccaaccttggtggatccttgtacttggtttcatgttacctgtgatgctgataatcgtgttactcgtctagatcttggaaatgcaaaattgaagggcagattggtacctcagttgggaaagcttgaacgtcttcaatatttagagctgtatatgaacaacttggagggttccataccagaagaaattggagggttaaaaagcttagtgagtttggatctttacaataataaccttactggatctattcctgcttctctttccaagctctccaatcttaatttcctccgattgaatggtaatagactgacgggaagaattcccagacaacttaccaagctcccaaatttaaagatctttgatgtctcaaacaatgacttgtgtggtacaatcctcaccacgggttc

SEQ ID NO: 196017 - DNA, 421 bp, Gossypium hirsutum
ggtaatggaaatgcccttgaaacttcaagccagaatgcaaaatcagttagtgtgcatcctattcccttagattccatcaaccatgtgcatgggaaaagcattcctatggttagctgtggatccccaaatgtttctggctctggatcatcaaaagagcatcataatcaaccttttccagggcaactgatcaaacggagaaagcggcaccgaaggaagcatgttcaaaaccaagaaccttgtctgatgaggggtgtatacttcaaaaatatgaaatggcaagctgcaataaaagtcgacaagaaacagattcacttatgcactgttggttcacaagaagaagctgcccgcttatatgacagagctgctttcatgtgtggaagggagcctaacttcgagctttcagaggaggaaaaacaagagc

SEQ ID NO: 196018 - DNA, 831 bp, Gossypium hirsutum
ccctctttcaaaacttccctcctatttcccttcccttccttcttaatcaaggtttctcgagaaaattcacttcattttcctggaaattatctcttaattccagaaagttttgctcactgattagtaacaaagatttgtttcaattgttagtgccatatagtaaacatgattggatcaacggatttcattgatgagatagattgcggcagcttcttcgatgacctcatcgacttccctaacggagatgtcgaagcctacgactccaccgccgtcatcaacgccgccgcgtttcctactattttgacaactcagcccgagtcattacctttttctgactcggtttttctcaacaacagtgcttccgagctttccactgaactctttgttccgtatgaagatattgttcaattggaatggatgtcaaaatttgttgaagatactcagtgtggagcaagcttgacaactaagaaagaagattcctcttcaatcagtgagggatccaatcatcaattccagacttgcaagtccggtttcggttcttgaaagtagcagctcgtgttcaggaatgaaaccattgcctcgcagtcctgaaacgtctgcccctgggaaacgcggacgtccacgaagcaaacgtcctcgtctggccactttcaatcatcttccaggagttcagatgacctccccagcttcatctgtcaatgagaacgacattccccagccatttgctgtcccgaaggtgctgtcggattctgagaactatgctgagtcacggcttctgatcaaattaccgaaacaagtcaatccagaacataagaagaagaagttatcggt

SEQ ID NO: 196019 - DNA, 618 bp, Gossypium hirsutum
gtgctaccgagtttgcattgtcgggaatatataccgtaaagagtgatgtgtatagcttcggggtggtgatgttggagctggtaactggtcggaaaccactagacagttcaagggtgagatcagaacagtcacttgtccgatgggccactccacaactacacgatatcgatgcccttgcaaaaatggttgatcctacactcaatggcatgtatcctgcaaaatctctgtcgcgttttgccgacatcattgcgctttgtgtgcagccggaacccgagtttcgacctcccatgtctgaggtcgtgcaagcgttagtgaggttagtacaaagggcaagtgttgtgaaacggcgaccaagcgatgaatcgggattcgggtataagactccagatcatgaggcaggggacttttcattctaaggtctgggaaaaccatcaatcccgtaaatcgaaagagaaatcaagtttatgtaattatatgtctcatacattgacactttttttaaaaagtttattatagtgtttacagtgcaaatatataggtgtattattggacaacctgatgcacattcatgttttttgcatcatagtaataaaataataattttctgtagtttcaagc

SEQ ID NO: 196020 - DNA, 468 bp, Gossypium hirsutum
tttttatttctctcctaatttctctccttagccgactttaatccctccctttgaatgccgatccgccaccataaacgacgtccaacagattcaggcttcgagggtcaacattcttggctattcgtacatgattgagcacgtcactgacgtggcgtggtggagcagcgcacgttgcggagaagtggcattcggcgctcgagggaggtgtgagcagccgacctaggtgcggcgcacctaaggttttctgcttttttgatggttgtcggttagtgctaagtgggctggggttttgggcctaggttttttagtttttgtgttgggtgttttgggctgtaatttagactttgtttttatttgtttttttggtttatgggccccgagctaaattgggctctacacttgaaatttgtggtcgaaccaattgattctattttcaaaaacataaaaaattccatggaagagcaatac

SEQ ID NO: 196021 - DNA, 1182 bp, Gossypium hirsutum
caactaaaataatcaaaacccattgtatctttctccttgtttcactctgcagatcctcccccgttcattcattttgttccttttctcattgtcactctccacatcaatacttcccccaaatttttttttctaaaaacaatgtttcgaattcaaccgttggtttcggttttgctttgttgcttcaccttttggttccacatttcatttgggtacttgataacgtgctcggggatagttccgatgaggtaccggaacgataaggtatcgataacggatttcggcggcgtcggtgacggaaagacactcaatacaaaggctttccgggaagctatataccggattcaacatctgagaaggagaggtgggaccttgctttatgtgcctcctggggtgtacttaacggagagctttaatcttactagtcatatgactctttatttggctagaggcgccgtcatcaaagccactcaggacacatggaaatggccattggttgctcctttaccatcttatggaaggggaagggaacgccctggaggaagatacatgagcttcattcatggagatggattacgagatgtggtgatcagcggtgagaatggcacaattgatggtcaagggggtatctggtggaacatgtggagacaaggaaatctccagtttacaagaccaaatcttgttgaatttatgaattccagaggcattattatttccaatgtgatttttaaaaattcacctttttggaacattcaccctgtttattgcagcaatgttgttattcgatatgttaccatcctggctccgaccgactcgccgaacaccgatgggatcgatccagattcaagctccaatgtttgcatagaagactcgttcatttcaaccggagatgatcttgttgctgtaaaaagtggatgggacgaatacgggattgcttacggacgtcccagctctcacatcaccatccgacgtgtaacagggtcatccccatttgccggtatcgcagtgggaagcgaaacctccggcggagtggagcacgtcttggccgagaacatagttatttacaactccggtatcggtgttaacatcaagaccaacattggcaggggagggttcataaagaacatcacagtatctcaagtgttcatggagaacgtaagaaccggtatcaaaatcactggcgac

SEQ ID NO: 196022 - DNA, 449 bp, Gossypium hirsutum
  unsure (1)..(449): unsure at all n locations
tttttgtggcgaggttctttgtcctgatgaggtatatttcttttcatggcgataagttggattcctagaagtgaccacaagcaacccatataagtattaacaaaagaatatctgcactggttcatactgataccttnggttcgaaaaccgcggacatnttcctgaaaatgtgatggcaatcttcttcccaataaccacaacgaggacaaacggcgtccgtcactattcttctatatcttagattggctagagtagagatgtaattccatgcaatacgccagattatgactgtaatcttagatggtagttgtagattctatagctttccaaaaaaacttcttattttcggtctgtaataaataattgctaggctccatattngcaaaanncaatnnnnnnnnnnnnnnnnnnnnnnnnnnnnnnnnnnnnnnnnnnnnnnnnnnnnnnnn

SEQ ID NO: 196023 - DNA, 815 bp, Gossypium hirsutum
acatgtcaaagcaaatgccctacttcaggcccacttctctcggcagcatgtgggtgggaacctatcactagaccagcgagaggtgctcttgtttgctactaggctacttcaagccatggttgatgttatttcgagcaatggttggttgagccttgctcttcttgcaatggaggtgagccaaatggtgacacaaggaatgtgggagcgagactctatgcttctacagctcccatacttcactaaggaattagccaagagatgccaagagaaccctgggaagaacattgagaccatttttgatctggtggagatggaagatgacgagaggcgtgagctgttacagatgtctgatttgcagcttctggacattgcaaagttctgcaatcgtttccccaacatcgatttatcatacgaggtgattgatagtgacaatgtaagggctggggaatatgtcaccttgcaggttaccctcgagagggatctagaggggaagacagaggttggaccggttgatgctcccacgttcccgaaagcaaaagatgaagggtggtggctggttgtcggtgacaccactcgggaccagctgcttgctatcaaaagggtgtctcttccgaggaaagcgaaggtgacacttgaatttgctgctcccactgctgctacggagaaggcatacactttgtatttcatgtgtgattcttacctaggttgtgatcaggagtatagcttcactgtcgatgtcaaagaagccgctcgccctggtgaagacagtggctcagagtaggctcatgtgctgctcatgtttttttaaattcctg

SEQ ID NO: 196024 - DNA, 462 bp, Gossypium hirsutum
tgaaaaaatccaaattccctaatttcccccgctgctactgctagggtttctttctcttctctctcgcaactcaccaggtttctttggagaaaaaaagaaatgtctcgagtttacgtgggtaaccttgacccacgagtttcggagcgagatcttgaagacgagtttcgtgtctttggagttattcgaagtgtgtgggttgctagaaggccaccaggttacgctttcattgactttgatgatcacagagacgccgaggatgcaattcgtgaattagatggcaagaatggctggagagttgagctttctcataattctagaggcagaggaggacgtggaggcggaggcggaggtggaggtggtcggggacggtcgggtggttctgatttgaagtgctacgagtgtggtgaggctggtcattttgctcgagaatgtcgtacacgtggtggttccggaagacgtcgc

SEQ ID NO: 196025 - DNA, 659 bp, Gossypium hirsutum
cgataaatatcgaaagccctaactttgccggtcgagcctaaaggcggaagccgcgagttttctccttcgcgacactcacaacttaccagctttcttttgtaatcccaaaaagaaacaatgtctcgtgtgtacgtgggtaaccttgacccacgagtttcggagcgggaccttgaagacgagtttcgtgtctttggagttattcggagtgtatgggttgctcgaaggccacctggttatgctttcattgattttgatgatcgcagagacgccgaagccgcaattcgtgaattagatggcaagaatggctggagagttgagctttctcataattctagaggaagaggcggacgtggaggtggtcagggacgctctggtggttctgatttgaagtgttatgagtgtggtgagcctggtcattttgctcgagaatgtcgcatgcgtggtggttcaggaagacgccgcagccgcagccctagatatcgtagtagcccaagctatggacgaagaagttatagtcctcgtgcccgatctccaagacgtcgcagtccctctcctcgtgggcgtgggcacagcaagtcaccaccatatcgtggtcgtgaggaattgccatatgctaatggaaatggtgcaagggaacaccgacaaagcaggagctaagt

SEQ ID NO: 196026 - DNA, 562 bp, Gossypium hirsutum
aacggaatgaacgaggatcttgcttacaaaaacaccgttgaatgcattacaggaattatatcaaagaccatctcaacaaagggcatcttggctgtgtacaattccttgtcagaagagggaaaaggggaattcgagcttgcctatagcgcatcttattacccgtgcatggatatactgtatgagtgctatgaagatgtagccagcggaagtgaaatccgcagtgttgtattggctgggcaacggttttatgagaaggatggtctccctgcttttccaatgggaaaaattgatcagacacgcatgtggaaagttggtgagcgagtccaaaaggcacgcccatctggtgatttagggccattgtatccttttactgccggtgtctatgtggccttgatgatggctcagatcgagatattgaggaagaaaggacactcgtactctgagatcatcaacgagagtgtgatagaggcagtggattccttaaatccatttatgcatgctcgtggaggttccttcatggttgataactgctctaccacagcacgattgggatccacgaaat

SEQ ID NO: 196027 - DNA, 580 bp, Gossypium hirsutum
cctactcgtccggttgggttaaatccctggacaaaacaaatcagtttatcagtcctcactcagaaaattgggagattggaaaaagagaaacaaagaagagaaagaatggcttggatatggttggaagcagcacttcccctcggaatcatagctggaatgctctgcgttatgggcaatgctcagtatttcatccacaaagcttatcacggccggcccaagcacatcgggaacgatatgtgggacgtcgccatggaaagaagggataagaagctcttcgagaacctctcttcctccgattgatccctttttagttttcttctggaaacttggtcgatggtgtgagagaagaaataaaaagtgctctatgatattctgtaatgctgaagaagactaaagagcagatgaactcgagtattttctttttcattgtaatgttaagcatgaacttctgaaatgttgcacttttggcaacacttgctaatgtttacgctggtggtgtattggagatttgttgcttccaaattccttgtgatcttctatttgcaggtctatgaatcattttggattaaacccaagaaaa

SEQ ID NO: 196028 - DNA, 595 bp, Gossypium hirsutum
  unsure (1)..(595): unsure at all n locations
aaaacaaaacagtttattagtcctcactgaacatcggaaggttgaaaaagttgaaaccgaaaagagagagaatggcttggatatggttggaagctgcacttcctcttggaatcatagctggaatgctctgcgttatgggcaacgctcagtatttcatccacaaagcctatcatggccggccaaagcacatcgggaacgatatgtgggacgtcgccatggaaagaagggataagaagctcttcgagaacctctcttcctccgattgatccctttttagtttattactggttaaatgtaggaatcttggccaatggagcgatggagaagaaataaaagtgctttatgatgttttgtcctgctgaaagaagactaaagagcagatgaacttaagtattttcttttttgtaatgtgaagcatgaattccgaaaatattgcacttttcaacaggtgctaaatgtttacatttcttgtaacacccccacgcccgaaaccgtcaccggagtcaagcttgaggtgttattaaacttatcttaccttttaaacaactctaaatcacttattttaattttcggaatnttnttaattttttatttt

SEQ ID NO: 196029 - DNA, 419 bp, Gossypium hirsutum
ggcaggatgatagatctggtccacaaggtcatgtgctcgcattcagaggatgaattgaactcagagagtttgccaccaaaggtgatagaacaaggtggagagcctgacaattttgttcctgagaaacaggatttaggtgtgaaacctgaattccttggccagggtggatttcctgaagtaaaattttcatcaacatctagcccttgggaggatccagttggaatgccccccgagtggacaccacctaatgttagtgtacctttgctgaatctagttgataaggtgtttcagctgaagagaagaggctggctaagaagacaggtcttttggatatctaagcaaatattacagctggtgatggaggatgccattgatgactggcttttgaggcagatttattggcttcggagggaagacac

SEQ ID NO: 196030 - DNA, 573 bp, Gossypium hirsutum
aactttttggggaactttgccactaccagtttcacttctccgcccacgcgccccgcttcgagtgccaaaactatgcccagtattcgccttcttgtactcttcttcttcctcttcttctcagttcattcccaagaagacactcccatagctcgattccttcgttaccttcaattcaacaccgctcatcccaatccaagctacgctgaccccatctctttcctcatatcccaagccaacgccattggactccatgcccgaacccttgaattcaccccttctaaaccacttctccttctaacatggcctggctccaacccttctcttccctcagttctcttcaattcgcacctcgattccgttccggctgaaccttccaaatggatctaccctcctttctccgccactctcgcccctgacggtaaaatctacgcgcgcggtgctcaagatgacaagtgcatcgctatgcaatacttggaagccattcgcaacctcaaggctaacggctttactccttcacgaacagttcatatttcttatgtccctgatgaaaaaattggagggtttgatgggatc

SEQ ID NO: 196031 - DNA, 764 bp, Gossypium hirsutum
  unsure (1)..(764): unsure at all n locations
agaaggccggcctgggcaaatctgggaactagctactccgttcaaatcacccactttattttatcactttgaaagtaaattcagatcggcgagaggttagaaggtagcatttgggcgtgaaatgtcaatggggaccgataccacttgggttgggaagaagcctttgaggcgcatcggaggaatgtccgatgctctctccattgccgccgatcttggtttctctgttccccctcctccttctcaggaagaagtgcaaaacttatcatctgctacaggagaaaacggtgatgacttgataaaggtattaagagagctaaccactgtacagagaaagatagccgattggcaagttgaactacagggccgaaaggatgacaaaaatgttgcacaccttacacacgtgagtgaaatggaaaaagaagtgtgaaacattggcgaggattactactatattgaaggatgttattcagaataggatcgaatatagctcgtctgcacaaccttattcctagattgcatcccgtggagcagatatcagaacaatttctgattactgataaggctcagtgatatgggcatgactggtgtgtactgattccatgaccanacttaagaccctcttanntggggggaactcgccaatcagtgatacatctgacccatttttgagctgttgcacagaagtttgcacttaaattgaatggcttgaccatacacacccntcaggtctcctgcatggggatagcccacttcgttgaaaaaac

SEQ ID NO: 196032 - DNA, 421 bp, Gossypium hirsutum
cccacgcgtccgggctgatagaggatcttcttggatgtcaagccaaccagataattgaacactaacacagcttcaaggaccctcagcattggttcccagtcagatgggttctggaaatcagccccctcggcctgcatcgttgactcctgagatggagaaggcactacttcagcaggtaatgagcctcactccagaacaaattaatctcttgcctccagagcaaaggaatcaagtacttcagctccagcagattcttcgccaatgagaaggtctaatagcagaaaagattaatctctctcccccccgcccccccccgggcacattgcatgcgaggaattgatgatcgagattgaaggaattgtttaacatttgctgacaaacttatgcgagccctagatatttatttgaaggtttatagata

SEQ ID NO: 196033 - DNA, 489 bp, Gossypium hirsutum
gtggaactgagggggataaagggtagaaagatttgaacaaagagaatgaaaagaagaaaatttacaacagagatgaactagaagatgtaagcattgatgggtcagctttgaattatgattcagatgagttcactgagaataacaaagttgaggaagctcttaaaaatggtgggaacacctcaaatgcaaacagtacagttactggaggagatcaaaagggtaaaaggaaaggtcttcctgctaaaaacttaatggccgagaggcgccgtctaaagaaactcaatgataggctttacatgttgcggtcagttgttccaaagattagcaaaatggatagagcatctattcttggggatgccattgagtacctggaggaactactgcaaaggatcaatgatcttcataacgtatctgctttcaaccctggttggtctgtggtaacacatactaacattttcatacattatctttcaagtctgtttccttgcc

SEQ ID NO: 196034 - DNA, 402 bp, Gossypium hirsutum
  unsure (1)..(402): unsure at all n locations
cccacgcgtccgcccacgcgtncgagaaacaattttatagggattgtctcatcagcgggacagtggatttcatcttcggggatgcggcgagcgtgttccaaaattgtctgatcatcgcgaggaagccaggtgaaaaccagaacaacatgattacggcccacggaaggaaattcccatacactcactcagccattgtgcttcaaaattgtaccatctcgggcgcccctgactacctcccggtgaaggacaagagcaagacgtaccttggtcgtccttggaaagctttggcgaggaccatcataatgcaaagcaatattgatgacatcattacaccagagggttactcccccatggaaagaaccgtangactagacaccggttactttgtagagttccaaaata

SEQ ID NO: 196035 - DNA, 385 bp, Gossypium hirsutum
gcgcccacgcgtccgcccacgcgttcgcccacgcgttcgaacaaatccctaaccccattttgattttctctcaaccaaacccaaagaccaaaccttagccgtcacttttgggctactcatgggtatcatcggcgttcacgcctccacctctgccgtggttcacgacccaagtcgcgtaaatacaagaggagacccctgtacccccttgtggttagatatccaagccggaggatggcctccgacaatcgaaaccgcaggcttgcgaggagtcaacgaattcaggggttttccactttggtgcaagcttgcagtcctcgggcgttagacgtgctgacaccatgtgaggagtggcgatgcacaaagtacatgaggctagggtttctgg

SEQ ID NO: 196036 - DNA, 795 bp, Gossypium hirsutum
attgctttgggtgttgatgaggttgaggaccgggttgaagcttgtagaagaagagaaacaacgcactgccgggctcaaaggcccgaatcgtgcatttggtgaccttattgcagcatccggtatcacagatgcgatgcttgacagtttgatcgctctcaaggatctggaaggggttgaggggttgccacctttaagtgttatagaagacatgcgttatgaaaagaatacgaggaaatccacaagagctgaaatggaacgccagaagctggaggagatggcctaagaaagggtaagacaagtagatgataaaggaagggcttatgggactgggagaaagaaatgtagtacagctcgtgtttgggttgaacctggtgatgggaagttcattatcaatgacaaagaatttgatgtctatttcccaatgcttgatcaccgtgctgctcttcttcggccattctcagagaccaagaccttgggcctttgggacatcaaatgcacagtttaaggaggtggtctttctggtcaagtaggaacaattcagctgggaatcagtctggccttgcaaaattttgagccggagctacgtgctccccttagagccgctggtttcttgacaagggattcacgtgtggttgaaaggaaaaagccagggattgcaaaagcatggaagagcttccaatgggtcaagcgttgatggtcagcttcttgctgctcagatttttcctcaaagggacatcttttctttcctcggtttctttgcattggatgaaaagctgacctttattttgacaatgc

SEQ ID NO: 196037 - DNA, 985 bp, Gossypium hirsutum
ttacgcgtccgctttatgttcagggaaaagaggtaaatggcgctggaattaatgctagttctgctgtccatcaggatgttgatggtagagctacagatgtggccttgggatggtcgggtgcccttggttctccggttacattcgccaccacattagagcaggaatacagaagcgacatttttggggagagaggcatcttgctaggtgctgttcatgcggttgttgaatgcttgtttagaaggtatgtggaggatggaatgagtgaagaattggcttacaagaacactggtcagtgcataacaggaattgtgtcaaagaccatttcaacaaagggtatgctagctgtatacaactcattgaacgaggaaggaaaaaaacgatttgaggccgcttacagtgcctcatattatccttgcatggaaatcctatatgagtgttacgaagatgttgcaagtggaagcgagattcgcagtgttgttttggctgggcgtcggttttatgaaaaggagggtctacctgccttccctatgggtaaaattgatcagacacggatgtggaaagttggtgagcgtgtccgagcaactagagcgaaagatgatttaggtccactgtgccctttcacttctggggtttttgtggcgctaatgatggcacagatcgaggtcttgagaaagaagggccactcgtactcagaaatcatcaatgagagtttgattgaagctgttgattccttgaaccccttcatgcatgctcgaggagtttctttcatggttgataactgttccacaaccgcacgattgggatcaagaaaatgggctccacgttttgattacaaccttactcaacaagcattcgtagcagtggattcaggtgctcccatcaaccaggacctgataagcaacttcttatctgatcctgttcatgaagctatcgaagtctgtgcaaagctaagacctactgttgatatatcagtgcccccagatgc

SEQ ID NO: 196038 - DNA, 666 bp, Gossypium hirsutum
tcgtttcccttctctttattactagtccagagaacccaccaactgaactgtcattcgtgatggaggaaacacagcccgtgccacgagtaggtgtagtgctgttcgtgttgaaggggaaatcggtcctcctgggtcgccgccgcgcctcaatcggtgaatccacctttgctctccccggcggccacctcgagtttggtgagagcttcgaagagtgcggagccagagagttgatggaggagacgggcttggaaatggggaaagcagacttcttaacagtgaccaataaagtcttcctggacaaatccaaacactgccattacgtcatcgtctttctccgtgcagtgctggcggaccctaatcaagttccacaaaacccggagccagacaagtgcgacggctgggattggtatgactgggataatctgccccaacctctgttttcgacgcttgacgaaatggtacgaagtggcttcaacccctttccctccacttgacagctgctgaatgaatacgttttcttttcttatatattgcttgcgtataattgatccatgggttactttaatttcatcatgatgtattcagtgaccaatgttgtttgtaatatgaatcttagatggtgaacttttatggtttatattatgtagctaagtgatttcaagagtc

SEQ ID NO: 196039 - DNA, 646 bp, Gossypium hirsutum
gaagaatatcccagaagtgaagccgtgagggtaacattggctccgagggccggaactttgtcgcttccacagttgtacgaagcggaaatcatcatgaactcacagttgccatggtctaaacagttggtccacaattggaagtggaccttgtctgtatggacatcgctctatgtatacatgttcttcctcatacttctcgtcggttgctttagacagctattctttccattcacagcatcagcaggtgtcgaaagagatgcaagcgtagaggaattgagagagccagtaatgggcggcagaagaaatgatcgggttgaggtttccgatctaatgagcaaatggcggcgatagcagacggaagcggaaggcgatctttctgaacaaaggagtctcagagatagcggggtcatcagcatcaagcatgagcctaactagggaagataagagtgcggtaattgaagaggatgtgggagactcagaatcagtatgtttaggtggttgagtttaaaattttcgatgtttatgtttcacctacatatttatgctttgttttcttttggcaaaccttctttcttttccctagtaaataaatagtttactatgcttcagatgagaagtagggcgaaatgttgaattcattgacatc

SEQ ID NO: 196040 - DNA, 414 bp, Gossypium hirsutum
gttctcatgttgcgcagttcattgcgcttgacggacagctcgatggaagactcaagtggcgaccaattgtcttgccagacaactatatcgagcatgcatcaccgaaagaacagcttgctcttgctgggctgactggacatcacattgctgcaaccacattgagtctcctcggacgtacccgtgaagcgttacttttaatttgctagaatgctgtatagttttccttactggattgatgatgtacctgaagagcgtgagaaggctaagcaaagaatgaacagtggaatagaatattgtagcattttgatgatccctgtaatttgtatagatgttgaagtgtgaattgtgaagttgacagagtagtggtgaagaaccagaattgaagtgaatgaaatttataagaaattctacctc

SEQ ID NO: 196041 - DNA, 465 bp, Gossypium hirsutum
gtgaccagcaaaatcaagtcggcgtagaggactatatgggatgcgcttccgctcatggcatcgcgccgtccatcgcgatattcgacaccatacgagatgggcgactggattgcatttgcgtttatccttcgccgttgcattcaagggaacaaatgcaggagctggttgataatatgaagtgcatacttgtggatgcagggaagaatgttgctgatgaaactgagagttaaggagccagtctggtctttgtctgttggctcttcggcttacaagtagtggtggtgtggcccaattctcctccctagcttcattttaagtcgagagctgccattgacccttctagaaataagcaggttgggttcttaattggtgctatggttggcttggccttatttgcgcatgccatggtccccaaacttatggtgtgttttttttttatgccaaaaaaattattaatttcatttt

SEQ ID NO: 196042 - DNA, 569 bp, Gossypium hirsutum
taggaaccagcaggatgcccaaagtgcaataaatgacttaaatgggaagtggctcggaagtagacaaatccgatgtaactgggctgcaaaaggtgctacttccaatgatgacaatgccaaaagtatcgtagacttgaatggaccttctgaagaaggtcaagaaaaatctaatgacgattctccggagaacaatcctatgtataccactgtttatgtgggcgacctcgctccagaggttacatcagctgatctccacagtcatttccatgccctcggagcaggaactatcgaagatgtccgtgtccaacgagacaaaggtttcggttttgtgaggtacagttcacacgatgaagctgctctcgccattcagatgggaaatgctcgaattctttgcagtaaaccaatcaagtgctcatggggtagcaaaccaaccgcactgggaacaagctctggtcctctttctccaccaacagctgcacatatggctggtggtgctcaagtaatgaacatgatgcattcacaaggtcagtatgccgttaaggcacatgcagtcatgggaatgatgtggt

SEQ ID NO: 196043 - DNA, 449 bp, Gossypium hirsutum
cccacgcgtccgggaaactgcatgctctttggtattcctctcataagtgcttctagcgcatcagagcctgcagtctctcatattagtgctttcgccaagcctgtaggacatatgcaagctgcgttgcaccagggtcatgcacttgaatctgataaaagggctgaaaattcaaacgcctcccagatggcagaggatgtttctgcttttaatgagcaggagaaaatagtgaagctgggtcagccccatgcacgggagtttcaaagcaaactgtctactgcttcaactaggagttgtactaaggttctcatgcaggggactgctcttggaaggtctgtggaccttaccaagttcaacaactatgatgagttgatcgctgaattggatcaattatttgagtttggaggtgaattaatggcccctcaaaagaactgggctgttgttatactgat

SEQ ID NO: 196044 - DNA, 806 bp, Gossypium hirsutum
cccacgcgtccgcccacgcgtccgcccacgcgtccgcaagattgcagcagctcgtggaatggggggcatgtaatcaagacactacactttcagtggttcaactctaattaagtggactgttatttcaggacatagaccctaaactgacgggtacgtactggctgtatttagatctagactaatcattatttatgtcgtgctcgtgattctgtgatgtactaaaagtgttaaacctcatgaagctacctttgaagcttccgcttggtgtactgattgtagcattgccatgtcctgaccggattatgttcttgatacataacctgcaatgtatataaaaccaatgtggtgcatgtaacagatctggcacataaagctcaagatatcggttcaaagagaggaaagttatcggttgaggaggttctgtttctaattcgcaaggtaaactcttaatacgaatacgtgaggaactataatctgagtatgttcctggaattggtttttattgaaaaccgatttgaatctgcaggacttgccgaaactaaatcggtgtacggaattgctgtcaatgcaagaggaactgaagcaagcaaggaaggcatttgaggttgatgaagacaagctagcaacattagagtagcttaattggctctttatttgtttaggtcaaaaggccaagtgcattaagcgttgcaaacaaatgtttataatgattttgttataagataaaaggggtttagggttttagaaataatttttggtccctgaatttaagtctactttggtatattggtatttttttttttggt

SEQ ID NO: 196045 - DNA, 261 bp, Gossypium hirsutum
cccacgcgtccggtccaatgaagtttgtaatagagaggataaacgaacaatagcacctgagcatgtactcaaggctttagaggtgcttgggttcggaaagtacatgggagagctctatgctgcatatgagcagcacaagattgagacactgcaggactctttgaaaggtgggaaatggagcaatggggccgagatgaccgaggaagaagcagtagctgagcagcaaagaatgtttgccgaggcacgagcaaaaatgaatgg

SEQ ID NO: 196046 - DNA, 1214 bp, Gossypium hirsutum
  unsure (1)..(1214): unsure at all n locations
cttttataagcaatcctttcctttacactctaccctcactatcatccctcctttcttatttttccctttttggttcctctctttctgtccttactttgtgatggaattaggaagtgctcttcagttccttgataacaaatccattctagtcactggtggaactgggtttttggcaaagatatttgtggagaaaatattaagagttcaacccaatgtcaagaaattatatcttctcgtaagagcagccgaccataaatccgccatccatcgtttgcaccatgagatcgtagggaaggatctgttcagaaatctgaaaaagaaatgtgggaccaatttcagctcttttatatcacaaaaaattacagttataccaggtgacttaacccatcaagatttgggtctccatgattctgatttgcttcaactcctttgcaaggaactcgatgttcttcttaaccttgctgcaacaaccaactttgatgaaagatatgatgtggcactaggcctcaacacactgggagctaaatatgttgtggactttgccaagaaatgtgccaaactacaagtgttggttcacgtatccacagcatatgtgtcaggggaaaggtctgggcttatagttgaaaattcatacagaatgggggaaacacttaatggtgtgtcaggcttaaatgttaacattgagaagcaagtggttgaggatcaacttcatcttctccgtctccaaggtgcttctgataaggatatcaccgttgccatgaaagatctgggcattcaaagggcaaggcggtatggatggccaaacacgtatgtgtttaccaaggcaatgggagaaatgatggtgggggaattaaaagacattataccagcagtcatcattcgccctaccatcgtaactagcacttacaaagaacccttccctggttgggtcgaaggaatcagaaccattgatagcctaccagttggttatgcaaaaggcaaattaacattcttcctgngagatctggaggcaatagttgatgtgataccagcagacatggtggtgaacgccataattgtaccaatgatagctgaggcaagacatcaacaaccccaaaccatttaccaagtaggttcctcaatcagaaaccccctaaggtattctaatcttcaagactatggcttccgctacttcaccaagaatccatggatcaacaaagatggaaaacctgtga

SEQ ID NO: 196047 - DNA, 544 bp, Gossypium hirsutum
acccacgcgttcgagaagtagaaagagaaaaatcaaagatggggagaggcaagattgagatcaagaggattgagaactcaagtaacaggcaggtcacttactcaaagagaaggaatggaatcatgaagaaagctaaagagattactgttctttgtgatgctaaagtttctcttatcatctttgctagttctgggaagatgcatgaatattgcagcccttctactaagttgattgatattttggaccaatatcagaaaacttctgggaaaaagttatgggatgctaaacatgagaatctcagcaatgaaatagatagaatcaagaaagagaatgatagcatgcagattgagctcaggcatttgaaaggggaggatatcacatctttgccttacaaggagctgatggctttagaggatgccctcgagaatggccttacctgtgtccctgccaagcagatggatgttcttgatatggcaaagaaaaatacgaaattcttggaggaggacaataagcaactcaatttcattgtgaatcaacagcaact

SEQ ID NO: 196048 - DNA, 493 bp, Gossypium hirsutum
  unsure (1)..(493): unsure at all n locations
taaacctgactagtcggcatcactgatgcactttggggtgcaagagttttcacaggtattcacgaaacaagctgtgtaaaacatacggacataccggaatcaatcgaaaattggtttgtgcttcttcttcggtggccaagaagctttatggcggtcatagtctcttcgattaccatgttggagaaaatgctaaatgctacactgctctaaacatgaacataacagccatgaaatggaacttcaattcagggtcttgctatatttgaactttgtccttcacggttggtctaaaagaaaagcaccattgcttaatattaaagagtagaaatggtttcttgggagggattgtgtacataatttgtaccatatcagtttaaaaacagcaaaaggaaaatatatgttgaaagggagtatattcttttgtaacatctgcctatttttaatacaaggatgatctattcataccccnnaaaaaaaaaaaaaaaaaaacccc

SEQ ID NO: 196049 - DNA, 585 bp, Gossypium hirsutum
aacctatgtacgtaataaatgaaaaataaatttcctctccctccaagacggcaaaaccttcatcaaacaccgtcacttgagttgtgaagaacatctctaataacagtaggtttacagggaagagggggtaggagaataaacctaagcttttgagaggttactccgagattacacagctattgaagtttgaaagtagattttcactgttttgacttcgaaactcctaggtcttgattcgatcgtgagattccgtgggggctgatcttgacatacttcacatacagtcttgccaagggtgtgcttcttctttttttccgaagttatactacgaatgattttctatcatgtgaataaagcaatatactcatgacttccatttactgttaggagataatgcggacgcctgataactcagatttacgtagttgtgtcttgttttttcgtggttcattttgtgctttttttttctattctagaaatgtcatgactgattctgtttttggttggtttatcataagtgtgtgcattgctgtatattctattccaaagtatcctttaaacatgtaaggtatatatttatgttct

SEQ ID NO: 196050 - DNA, 422 bp, Gossypium hirsutum
gccttatcctaatcctctctgcaattcaaagaagaagaaaaatggcttcttcagctctctcaacactggctctccgcttacccacttcctctaatcctacgaacccttcccatttcaaagccccttccctccaattccctctccgttccctcactcctcctaacctcacccaccgttccaccgccctccgcgccacggccgcccccgaaaaaatcgaaaaacttggcaccgaaatctccaacttaaccctcgaggaagcccgcacccttgttgactaccttcaagagaaactcggcgtctctgccgctgccttcgctcccgcagccgtttcagttgccgcccccggtggtgccgatgccgaagcggctgttgtcgaagagaagaccgagttcgatgtggtgattgaggaggttcctagcaat

SEQ ID NO: 196051 - DNA, 355 bp, Gossypium hirsutum
gtcttgttttatttatgcaatgagctttttgccagcatgggagcaaccaccatcccaggggtatgaaaagccattctgattctacaattgtgcaaaatatgcgaagaaatactgcttagtatgtttacattagtcactcattgttgtctgttccatcctatggcaagttgcttttgaatttatgcttgtatatctctgctgctgataggaatttacgacatggtgaatgcatttctttcatttggctgttgcactacatcacaaaaggaaagaaagttcatcatgttcatttctaaagtatatttcttctccttttttgcttggattggattgagatctagaatgatattcaagt

SEQ ID NO: 196052 - DNA, 713 bp, Gossypium hirsutum
cccacgcgtccgaaagctcctctttctgtgaaagtgaaagtaagaatcagatttttggtgataatgatggagccttcatatccacaacagctgcggatccattgcttccctgtttcctgtaagcaaaaaagagagaaaatgaaggttgttgctgcttatttgttggctgtacttggaggcaatgcctctccttcagctgatgatcttaagaacattcttgccagcgttggagctgacgctgaagaggaaaggctccagcttcttttatctgaagtgaagggaaaagatataaccgagcttattgcatctgggagggaaaagcttgcctctgttcccagcggtggtggtgttgctgtggcggcatctgcacccggagccgccgccgccgccgctcctgctgcagctgagactaagaaggaagagaaagttgaggagaaagaggaatccgatgatgatatgggcttcagtctcttcgactaaaactaccacgcaccgccagcaacctatcaatgaaatacggatggtttttggtttctacggaggatttcttttgaatttaaggctgccctaggtttttaaagttagttatccagtgccatgtaggtctttctttttggattcattatatttgttttgctgaacccttttgttgcaatggaattttcttcccacttaattttaatcatcttttttttatattgatatttatatta

SEQ ID NO: 196053 - DNA, 375 bp, Gossypium hirsutum
caacagctgcggatccattgcttccctgtttcctgtaatcaaaaaagagagaaaatgaaggttgttgctgcagctgagactaagaaggaagagaaagttgaggagaaagaggaatccgatgatgatatgggcttcagtctcttcgactaaaagcaccgcgcaccgctttccgcgcaccgccagcaacctatgaatgaaatacggatggtttttggtttctacagaggatttcttttgaatttaaggctgccctaggtttttgaagttagttatccagtgccatttagttctttctttgtggattcatatatttgttttgctgaacccttttgttgcaatggaattttcttccgacttaattttaattatcttctc

SEQ ID NO: 196054 - DNA, 890 bp, Gossypium hirsutum
ctttctttcactccaaacacactctcagtatgtctgctttaagatccaccatttcttctgggataatcagatcaacttcacccacccattccttgttgcctgcagcttcatctttcaagcccatcaaaaacccttgtttacctcaaacccacaagcttttcacatcaaactccaacactttctcagctcccaagcgaggtttcacttgcaaaagccaggctattccatctgataactcagctccggaaaaagttcaagaactacatgtgtatgagttgaatgagagagatcgtgggagtccagcttaccttcgtttgagtcagaaatctgtgaactcactgggtgatcttgtcccttttagcaacaaaatatataggggagatttggagaaacggatcggaataacatcaggaatatgcatattaatagagcataaacccgaaatgaaaggtgatcgctacgaggccatcttcagcttttacttcggagactacggtcacatagcggtgcagggaccttacttgacttaccaggacacgtatctggctattactggtgggtctggcatttttgaaggcgtctccggtcaggttaggctccaccaaatcgtcttcccctttaagattttctacactttctatttgaagggaattggtgaactcccagaagagctgctttgcaagccagttgacccacacccagctgttgaagccgttccggctgctaaggcttgcgagccacatgccgccattgcaaatttcactaattaaataaattatgaatcttatgtaattttaaataatttgcaaatccaatgatgttagtatttttattttcattttaatattttgtagtagagagtaaaattagaaataaatgtgttccttttt

SEQ ID NO: 196055 - DNA, 482 bp, Gossypium hirsutum
cccacgcgtccgcccacgcttctctttctttccttctctccaaacacaattcactaaagcaaaaacagctagaagaagaaggaatggccgcctcggataaagttcaagaactgcatgtatatgagatgaatgaaagagatcgtggtagtccagcttaccttcgtttaagtcagaaacctgttaactcacttggtgatattgtcccttttagcaacaaaatatataggggagatatggagaaacggataggaataactgcagggatgtgtatattgatagagcataaacccgaactgaaaggtgaccgctacgaagccatcttcagcttttacttcggagactacggtcacatagcggtgcagggaccttacttgacttaccaggactcgtatctcgctattactggtggatctgcgcattttgaaggtgtctctggtcaggtcaagctccaccaaatcgtcttcccctttaagcttttctac

SEQ ID NO: 196056 - DNA, 417 bp, Gossypium hirsutum
tttccatctctccaaacacaattcactaaagcaaaaacagcttgtagaagaagggatggccgcctcgggtaggtacaatttccatttttcccagttccgcaagaaacccatccattttttacattcatattttcgatttgatgatttgtctctttgggttgatcttgtttaatatttctggggttttgtgattgtttcagataaagttcaagaactgcatgtatatgagatgaatgaaagagatcgtggtagtccagcttaccttcgtttaagtcagaaacctgttaactcacttggtgatatttgccccttttagcaacaaagtaaggttttttttttctgaattaatttatcgaattaaccaaatagttattgatatatatgtaattacagatatataggggagatatggagaaa

SEQ ID NO: 196057 - DNA, 490 bp, Gossypium hirsutum
aaatactgtagtttaactttaattaagaaagagtttttttttttcctttggaaagttggttccttgtaattctctataaattcttggcagggccaatggatttagcccttcattttcttttcttccaggtacttgaggttggagaggtgaggatcattaaaagaaagaaacatccctgtctctctcttttgtacaaacatattgttgtcagctttcagtggctcaatattttgtattggttgggaattacggcctctccccatttagagacccaaaacagcaaacctgcttgaaacttgagccctccatcaccaacacaaaaaacagagttcctttaatcacctgggtcatgaagcagctcacttgctcaggttccctggatgctttgaatcccatcttttcaccaaaagaggagatgatttcaatgaagaagcaaatttatagcagggagttccaggcgatgttagatgggttagaagatgaagacagc

SEQ ID NO: 196058 - DNA, 433 bp, Gossypium hirsutum
ctagctttggagatttgaaccatttgatttctgcttcaatgagtggcgtaacatgctgcttgaggttccctggacagctgaactccgacctccgaaggtttgccgttaatctgatcccattcccacgtcttcacttctttatggctggattcgcaccgctcacatcccgtggttcccagcattacatttccctcaccgtcccagagctgacacaacaaatgtgggatgccaagaacatgatgtgcgctgccgatcctcggcacggccgctacttgacagcctcagctatgttccgaggcaaaatgagcaccccagaagttgatgaacaaatgatcaatgtccaaaacaagaattcatcatacttcgtggagtggattcccaacaatgtgaagtccagtgtctgtgatatctcaccaaagggtttggagatgtc

SEQ ID NO: 196059 - DNA, 367 bp, Gossypium hirsutum
ccaacccgtccggccagcctcggtagaagaacactacacgagtggttttgaactgcaaaaggagatcgatttcgaagccttttcaccatgagagctaagtggaagaagaagcgtatgaggaggttgaagaggaagagaagaaagatgaggcaaagatctaagtagtttaattttatcttaaagcaagcaatttgttctatgtttctttagattttctgttgtttgatggatactttactttaaaaggatttaagttatctttatcgaaaccttttgaatattctggaaacatgttattgtgttttctattaaaagcttatggctttggatgttaattttctaatatttttggctcaaagttgcactt

SEQ ID NO: 196060 - DNA, 586 bp, Gossypium hirsutum
ttctctcaccagccacaaggaagaacttttgttccctgttggaagctggttatagttgtatcgtagtgcctggtggagtgcaagagacatttctcatgcagcatgattctgaggttgcattccttaagtcacgaagaggatttgttcgtatagccatggaaatggggtgtccactggtcccagttttcgcctttggtcagtcacatgcgtacaagtggtggaaaccaggtggcaagctcatccttcaactttcaagagctatcaaattcgttcctatgcttttttggggagcttttggaacacctataccgtgtcaacatccgatgcatgtggtggtggggaaacctatttacttgaagaaaaatccccaacctactgccgaagaggttctggaagtgcatgaccaatttgttaaagcacttgaagatctcttcgagagacacaaagctcgggttggatacgatgaccttcatttaaggattctttagtttcagcttattttaagtgaacagtgtttctttatttcccaatttcttgtatcctcttgttcactagcgatgcctcaaggaactactcagtgattaaa

SEQ ID NO: 196061 - DNA, 941 bp, Gossypium hirsutum
cccacgcgtccgataaaataaacatataaacaagtaccaccaaacctcctttttggcgccaagttcatgaacttaaatcctttgtttctcctatataaatccctctttccctcaaccagtcttcctcagctactattgatcagctcagacattggaaaacaaaaacactactatatatcaccatgccttcttcgccttcttttactcttgtgtctagatgcacggtttccccagaccaaatatctgacatcaaaaccttaaagctttcggtttctgacatccctatgctttcatgtcagtacattcaaaaaggggttttgctcacttctcctccttattcgttcgacgacctcgtgtgcttccttaaacaatccctgtccactactctctcctacttccctcctttggctggtcgtctcaccactgaccccgacggtcacgtccacatcaactgcaacgatgccggcattgacttcctcgttgtgaaatcccccaatatttccattcacaacgttttggtccccggcgatgtccccgattgtgtcaaacagtttttcactttcgacaagacacttagttactcaggccacttcaagcccttagctgcagttcaagttaccgagttggccgacggggtttttattgggtgtatagtgaatcacgctgtgaccgatgggacttcattctggcactttttcaacactttcgctgagatcaccaaaggggctttaaaaatatcgaaatctcccgattttggtcggaacaccgtgtttaattcccaagccgtgcttaaattccctcccggaggacccaccgttactttcgccggcgacgagccgttgagggaaaggattcttcatttcagcagagaagcgattttaaaacttaaatacagagctaattacggttgtttattaactaaacaaacgaattctcgagtc

SEQ ID NO: 196062 - DNA, 424 bp, Gossypium hirsutum
  unsure (1)..(424): unsure at all n locations
gaanngacgggccgacccgagcgacccgtgtgtgattgaagaatgaggtatctcattttcattacttgtttacttcataataaaatttgcttaagtttaacctctgagttgcatctctgacttcaaacaaaaaaagtgtaaggaatcattgcctccctcccatactcaaaaagtgtaatagaaatcaatttcagaaagctttacagagctgttttaggacttgggattttgtctgttgcaggtttaaacatgttcaccttttctttccatgaaggttccaaatatgctgtcagtttctgtatttaagcataggttaattaaaatttcttaccttttggatttaaaatttcaagttaaataatttatattgttaatatttttcatcccccccacacaaacctctactaaaattcactcaaaactt

SEQ ID NO: 196063 - DNA, 444 bp, Gossypium hirsutum
  unsure (1)..(444): unsure at all n locations
caggtctgtgtgtgggtatacctctggatagatgacaacagtgtggtggatttcattggaaaaatagtttattgctgtggtgtcatttatagctgcattaggattcttgttgtatggaggaagattatttttcatgctaagacgattccctattgaatcgaaaggaagaaggaagaagcttcacgaggttggatctgttacggccatttgtttcacctgcttccttattaggtgctttgtggtggttttatctgcctttgatgcagatgcgtcactggatgttttggaccatccagtactgaacttgatctattacacgctggttgagatcctaccttcggctctagtgctgtatatcttgcgtaaattgcctccaaagagagtatccgctcagtatcacccaatccgttagtcggaatgcatncttgttcgtagaaatgttta

SEQ ID NO: 196064 - DNA, 662 bp, Gossypium hirsutum
  unsure (1)..(662): unsure at all n locations
tgttcacgcgtccggtagagtcaaacagtacctccgaggctacttttggtcggatctttcaggcgtttaagaactcagagcaccaaaagcaagccaaaccaacgctgttcgtccggcacagtcgaaccctggtttcgcttctgctgccctccggactttaatcctcttacatcgaaacagaaatcccaagcgataaataagacagaaaagaagaagaagaagagataggaagagagggagataaaggaaggcatgggagatctattcatatggcttatttctttcttcatcctcattgcccttcttgttctcattgtttatcagctcatgtgcttggctgatttagagtttgattacatcaatccttacgactcttcatcacggataaacaaagtggtcctgccggaatttatcctccaaggaattttatgtgtattctatctattaacgggacattgggtcatggcgctcttatgtggtccatatttatactacaatgtgagactttacacacagaaaaagcacctggtagacgttacagagatatttaacatgcttcccnaggaagaagaagcagcgcctttttaagcttggctatcttgtccttctcctctttttctccttattctggatgatctggtctacattaaaagatatggaca

SEQ ID NO: 196065 - DNA, 419 bp, Gossypium hirsutum
ctcacatgctgcaataggtattccggggtgggggcgctgaatcgctattcaacaccaaaggtaaaaaaaatttccccaaaataacctgctttcttctcctttgctccagatttcttccaatgtttttccccaaatcaacagcacattcacccttcattttcatctccggtactctgtcatgttgttccatccttagtgaaagttgaggaaggaggggttggatggtcacgagaagattaagagttatatgtgtgtcgagtttttcatctcaagcagtgagaagagcccttgctacatgtatagttcttgataataataattggacgcttacaaagcatgttattttttctttctattgcaaatggtggatttcacttggctttgcaatagtagaagcttgtataagtgcttattattct

SEQ ID NO: 196066 - DNA, 620 bp, Gossypium hirsutum
  unsure (1)..(620): unsure at all n locations
tgcctttgctgtgaacgggggtgctatctcggagtgaatgaccgcctttaatgctagaatctccccttcctcgtttcgtacaagtaggcccgtagccgatctagaagattgactgtcaaaggctgtatcaaaatgaactgcgacttttgatcttcgacaaatctggcgaatggttctatcaacctgaaagattgaccagagaccacaacagaaatgtcggatctgttcgttagtaactagacggaagacctaggacattattgaaagacatggctactatccttttcatgttgaagacagtggggcactgatcattcaacacaactctcttgtgtctgagattaacaaaggacggaataaagttccaagagattctccatactattattttaatttttgaggggatgtataaattccatagtttcttgtagaagtttttagtttcggcatgtataatataactactaggatccaagttagacttctgtaatagtttataggcactcctgactaaaaaatccccgaacagttcccctcaccatacttgaaaatctttatgcgctgcctctgccaatggaatctgcatgatttttttcctgcgtcccccnnaaaaanannta

SEQ ID NO: 196067 - DNA, 871 bp, Gossypium hirsutum
ttcaaatcaaaatcatttccataaatccattttttcacgtagtcgcttcaaatacgttccagaatcaaaacaacgtcgtttcaagttcagatggaatcaacggcgaagccagcgggtggtagaaagggaggagtgaagaagaaggcagtatctaagtcggtaaaagcggggctccaatttcccgtgggtcgtatagctcggttcctcaagaaaggtcgttatgcgcagcgttacggcggtggcgctcccgtttatcttgccgccgtccttgagtatcttgccgctgaggttttggaactggcggggaatgcggcacgtgacaacaaaaagaacaggatcaacccgaggcacgtgctactagcagtgaggaacgacgaagagttgggtaagcttcttcaaggagtgaccattgctagtgggggtgttcttccaaacattaacccagtgttattacccaagaaaactgctgctgctgcatctgattctgaaaaagctaaatccaaatcccctaaaaaggcatagacattggatttgatgcaaacaatgtacaactctttttgcttctgtggtattctagtggtttagggatctcgccatttttttgtattatcttagaaatggcggatgataattggtgtgttggctttaaaactttgtactctgattccgcattttgtaaagtgctccaagcaaatggattgctttttttatttaatcattaaagaaatcctggcttaccgcagagcagcaagcctaaaaacaatccaaaaagagactctactaaatgttttgaaaaatgcctaagaaagcaataggatgaatggttattggtgttaaaaaaatcaattctctattttatcaacatacaatt

SEQ ID NO: 196068 - DNA, 721 bp, Gossypium hirsutum
ggaagaagtttctaaagattttgtaagtcctttttttttttgtcttcacttgttttctttacctaattttgggtgtgtgttttgatcagatttggtttgatgggttttgcttaagttctcataattctttttgagctcttgtatgtgagcaaggaaacttggaatttttttagttcaagctagctatgggaactcttgcaatcgataccgagtgtgtggattctgacatataccgtgctttgggattcaaagaattgggtaaaggagttgttggaactccacggattttgtcactgctttcttcgcttcttgaggaatccgtccaaagaaacgagatggagtccgagacggtgaagttcaaagataatgttgccatgtttcatgggttaagagctcccaccataagcattcagcattatattgatcgcatcttcaagtatgctggctgcagtccgttgtgctttctcgttgcatacatttatgtggatagatttgttcaacaaacggatgtgcatttgacttcccttaatgttcaccgactcctcataaccagtgtattggtagccgcaaagtttattgatgatgcgtttttcaacaatgcatattatgcgcgagtgggaggggtaagcacggcggaactcaacaggttggagatgagcttcctgtttggtctggatttcaaacttcaagtaactgtgaatacattccaaagatactgtta

SEQ ID NO: 196069 - DNA, 609 bp, Gossypium hirsutum
ataccattaaagggtacagagattgagagaaaactacttgtgggacttcacccccccccaaaaaaaactgttttttctctgtctctgcaataaactggaaggagcagacacagagacagggagagagagagagagagagagagagagagagagagagagagagaggtgtgggggagacagtatggctaagttaatcaaaggataagatttgatccatctctcttatgttttcctttttctttgtataaagtccagaagaagcagattcaaggatattgagaagaagtttctaaagattttgttaagctagctatgggaactcttgcaatcgatacggagtgtgtggattctgatatataccgtgctttgggattcaaagaattgggtaaaggagttgttggaactccacggattttatcacttctttcttcgcttcttgaggaatccgtccaaagaaacgagatggagtccgagacggtgaacttcaaagataatgttgccatgtttcatgggttaagagctcccaccataagcattcagcattatatcgatccgcattttcaagtatgctggctgcagaccgtcgtgctttcttgttgcatacattta

SEQ ID NO: 196070 - DNA, 469 bp, Gossypium hirsutum
ggttaactttccttcctagtcttccacttcaacaatgggtgagaaatgaataatcccactaccgacactgtctttcgtgtaaagcttcagacataccattaaagggtacagagattgagggaaaactacttgtgggacttcaaccccccctccccccccccaaaaaaaaacctgttttttctctttctgtctctgcaataaactggaaggagcagacacagagacagggagagacagagagagagagagaggtgtaggggagacagtatggctaagttaatctaaggataagatttgatccatctctcttatgttttcttttttctttgtatgaagttcagaagaagcagattcaaggatattgagaagaagtttctaaagattttttcaagctagctatgggaactcttgcaatcgataccgagtgtgtggattctgacatataccgtgctttgggattcaaagaatt

SEQ ID NO: 196071 - DNA, 395 bp, Gossypium hirsutum
ttgatttccgagttcaggatgatcgaagtttagggggttgctcgtctcctttactaagaagagaacctccaaatcttaataatcgaaatggtaacctgaaagaagaaatgtctgacaattctgctttccaagaagagcatttttatgtcagaaacagtcatatggatcaagctgatggtgtaacaaggcgagacatgatggatgataaagataaatctattacacctagtggtttgaaagagattgatagagatgtgcagaacgttgaaacaagcgggtcagatacaagttccacaaagggtaaaaatgcagttgataaattagcagagtgtcacagagaaaatgcagatgttcgagaagatgaaaaagttgaaaccgttcaaactgaagaaaag

SEQ ID NO: 196072 - DNA, 653 bp, Gossypium hirsutum
gggtttgtcggagagtatgaaccacttccaacaccggtgttaaccttcgagactcgtgctcctaaggaatcagcccttttcacaaagttgcagcatgctgctgatgttcatcctcgaaaggatgatgctactcataggacgaccccggttcctgcaactgatgttcgaaaggatgttggaacttataggaccccagttcctgctaagccacatcctcttgatgtccccgtttctgaatcgaaatcctcttcattttgttccgcggatgggtcaacatcagaagggaggccatctttgtttactccaccagctatgccatctgttccacctattagaagagatgagtccagcaatgctgccgctgtcgctgctcgtgcatggatgtctataggagctggagcctttaaggaagcaaatgaaaactttggcacttcgaaaggaaaaatatccgcagattcgttatacaacccggctagggaacttcatccacaagctccacaagttcgagggcaattccctctttctgcggggatgcattttcaacctcagccagagaagaattagttttcccctccatggtttcccaccgcaacatgttctcatgatgaaatgaagctcaatttccaaaaaccgaacccatgggttttccctca

SEQ ID NO: 196073 - DNA, 724 bp, Gossypium hirsutum
gcttcccattcccaaatcccatcttcttcttcctattgattcactcaagatccagagctgctacaaaatttcaccaaaaaaatcatctctttcagaaatccccaaaaatcccaaatcgagaaatgttactctctcttgttcaaagcagcttcctttcaccttcaacacccctctgcaaattccattccaacttgaacccactaaaaccctcttttttacttcccaaatccctttcccataaaaagtcgctgtgtttgtcaccaaagtatgccactgctattcgtgcttccatgattgaagctccagtgctttgggctggtcggctttgtatttattatgctcttttgaagtctgggttagctggatctcaggctaacccacttgtttcagggttggaggagaatggtgatagtgttggcgaatctggtgatttgggtttctctaagtggttggacaatatacgagggaaaccagacaaggaagcagctgacaaaagaaagctggtcagcaaatggcatccgaccacgaaaggtacacttaaaaggaactacagggtaccttccaaatccgaaggccgacgactacttaaagcagtggcgtctcttctgtcagacgatgatcattttactgatgccacctcccacaagggttgccagataaggagggagagtgctcatggtgaaagtgtatgctgcaacaatgttagagctttgtttgacgagct

SEQ ID NO: 196074 - DNA, 713 bp, Gossypium hirsutum
ctcacgcgtccgggggattccagaaggcatgatacctgttcagcttctgtgggttaatcttgttactgatggacctccagcaactgctctagggttcaatccccctgacaaagatataatgatgaagcctccaagacgaagtgacgactcactaatcactgcttggatcttgttccgctacctggtgattgggctctatgtggggatagccactgtcggggtcttcatcatatggtacacccaccatagcttcctgggcattgatctgagtggagatgggcatagtcttgttacctactcccgacttgctaactgggctaaatgcgattcttgggaaggtttttctgtgtcaccattcacagcaggttcccaagtgttcaaattcgattccgacccatgcgactactttcagtcagggaaaatcaaagcctcgactctttccctctctgtcttggtagccattgaaatgttcaactcccttaatgccctatctgaagatggaagcttgttaacgatgcctccttgggtgaacccatggctccttttagccatgtcagtctcattcggactgcacttcttgattctgtatgtgccatttcttgctcgagtgtttgggattgttcccctcagcaccaatgaatggctgctcgtaattgccgacgctttcccggtaattctaattgaagagcttttcaaattcatcgggagacgta

SEQ ID NO: 196075 - DNA, 341 bp, Gossypium hirsutum
aaagcaaacccgagcggaaactttgaggaaggcagaagagatttttgggacagataacaaagatctgttcctatcatttcagggattgctaaatcgcaacattcactagatcttaattatctcttcttgagataattgtccattactggttgcttggttctagttgatggatttgtccaaacatcaaaagagctgccataatgtaatattagatgaaagacgaaagcatcagcttctttttctttttcaagcaaattaatgtggttttgggctttgagactatatagctccccccattcaagcagggatttttgtgtaaataaattactctgcttttgcct

SEQ ID NO: 196076 - DNA, 769 bp, Gossypium hirsutum
cccacgcgtccgcggaagcagtcttatggtgtctccagtgcttgagcaggggaaaacatcagtcaaagcactcttcccacccggttcttggtacaatctctttgatatgacacaaaccatagtgtcaaagggacagtacttcatgctcgatgcgccgttgcatgtggtcaatgtacatttgtatcaaagcaccatactaccaatgcagcatggagggaatgatctccaaggaagctagaatgacaccatttactcttatagtaaccttccctgccggggctagcgaagcagaagccaaaggaaacctttatctcgacaatgacgagcttccagaaatgaaactcggaaacgggtattcaacatatgttgacttatacgccacattgaagcagggatcagtgaagatctggtcagaagttcaggagggtaagtttgctttagacaaaggttggaaaattgagaaaataacagtgttgggattgagtggaagtgtagacacgtctggacttgaaattaatggaagtccagtagccaatggtgcttccaacatagaattgagttcaatgaaacagatgcatttgcacgatgttgaagatggggttcgcaagaagaagtctttaatggtcgaactttcaggctcgaatttatttgttggaaagaactttgacatgtccatgaaaatgggggtacaaggttgatgattatggtgttatgtacttttttttttcccattttcattgttgatggtttactgtttgtcttaattggg

SEQ ID NO: 196077 - DNA, 607 bp, Gossypium hirsutum
gctaaggttacccctccaaagtctggtaagctcgaaaatggatcaaatgttacaaataataaaatgtctcatcaacgcggatcacaaactgtagtccgtgctccaaatgatcggaaaaagggagtgaacaagatgaaaacggctaaaataactaatgagagattagaacacaaaggagatggtattgtttcggaaggaaagaagattgatcctatatcggaaagcgatacagttttcgaaagatatagcattgaaactgatattatggttgaagaatgtcgtgataacagcgaggattctgtttgtgacattaccctggtgactaccgattatcaaaacaaccgaaaatgtatcggtccaaatgaaactgaccacgaaagcttcactagaggggccaaactaaaagcactgctattgagctgtccggctttcctcaatcacgccgactatcttttttatcttcatgtgaatcttcctacaacttcaccaaaatttgacatcaacgaattcacagatgccaacagaagacttttcttagactgcgcaaatgaaattgttcgaagaataagctttcccgattttcaaccggttcaaccttcgttattta

SEQ ID NO: 196078 - DNA, 420 bp, Gossypium hirsutum
gttcttttaatttttctctgcagattttatgtggcagaagtgctccttgctttggagtatcttcacatgcttgggatcatttacagagaccttaagcccgaaaacgttttggtgagagaagacggtcacataatgctctccgattttgacctctcccttagatgtgccgtctctccgacgcttgtaaaatcttcgaactcaaccctggaatcaaaaaattcggcatactgtgcccagcctgcgtgcattgaaccaacttgtgtaatgcagcctgattgtatccaacctgcatgttttggaccccgatttttttcaagcaagcagaagaaagacaagaagagcaaagttaagaatgaaacaaatcatcaagtgagtcctctccccgagctcatcgctgaaccgaccaatgctcgatcaatg

SEQ ID NO: 196079 - DNA, 783 bp, Gossypium hirsutum
cttttccttaatctccgagcaagacatacaacgaaatccataaccaagtcaaactagctcaactcaactcaacacttcacttcactagtctttgattgttttttctatagttataatgcaaaagagtccttcagcttcttccttgggtccaggtggtctagacctggctcaagccttcttcaagcccatccaaaactgcgatccaccttcctccaccaagcgccataacaagatctccgtcatcggagttgggaacgtcggtatggctatcgcccaaactatcctcacccaggacttagccgatgaactcgccctcgtcgacgccaagtctgacaagctccgcggcgaaatgctcgatctccaacacgccgcggcgttcctcccacgcactaaaatcaacgcgtccgttgattactccgtcaccgctggatctgatctgtgtattgtcactgctggcgcccgtcaaaaccctggcgagtctaggctgaatctgctgcagaggaacgttgctctgttttcgaacattattcctccactggcaaagtactcgccggattcgattctattgattgtttcgaatccggtggatgtgctaacttacgtgtcttggaaactgtcgggatttccatcgaatcgggtcatcggttcgggaacaaacttggattcgtcgaggtttcggttcttgatcgccgatcatttggacgtcaacgctcaggatgtgcaggccttcatagttggtgagcatggagacagctcggtagcactctggtctagcattagtat

SEQ ID NO: 196080 - DNA, 659 bp, Gossypium hirsutum
caacagctggaggctgttatagaagcagaaaagcaagctgctagagacttgattcgtgaaaagaggaaggatagagctttgttagctttgaagaagaagaaagctcgtggggaactattgacgcaagttgatacctggcttattaatgttgagcaacaattggcagatattgaactagcaagcaagcaaaaagcagtctttgatagcttgaaagcaggtcacaatgcaattaaggcaatacaaagtgagatcaacattgatgatgtgcagaagttaatggatgacaccgaagaggctaaggcttatcaagatgaaattaatgcgatcttgggggagaagttatcagcagaagatgaagaggagattttggcagaatttgagaacttggaaactcagatggccgttcaagatatgccagaagtgcctagtaaagcaggatctgaagaacaaaagttggatcttcctgatgtgccaaccaagaaaccagttgcttccaatgcagctacagatgatgctgaaatttccacaaaaagaagagttacggaggaacccctacctgcatgattgagaaaaagacgtgctggttcatgataaggagcttgcgattattaattaccattttcccgcttgcttcgcctatatttaaactgatctggtta

SEQ ID NO: 196081 - DNA, 352 bp, Gossypium hirsutum
gtgaaagaaggcaagcgtgctgtgaatgtgattctagctaaacacatctggcatgcgacgatttacggtgatggcaaaacaaagactttaatttccggcggccacaactgggctgatggaactcccacatttgctacagctactttcgctgcggcaggaaaaggatccattgcatagggccttgggttcattaacacagctggtgcaccaaagcaccacgcactggctatgcggcctggttctgatcgctccgtattctaccgctgtgcatttgatgcctaccaggacactctttattcccattccaatcgaccgttttaccgcgaatgtgacattttgggcacaattgact

SEQ ID NO: 196082 - DNA, 189 bp, Gossypium hirsutum
cccacgcgtccgtgcagttctgaattactagaaaaccaagtcaagctcttatttttggtggccataaatttgcacagtgctcatattttcggggttgatcccctgagctaacttctggatgagggtgactagcaaaagaaatggctgttttttcttcaaaaaaactgttggagtaacatcatgatcacc

SEQ ID NO: 196083 - DNA, 444 bp, Gossypium hirsutum
aatagacggaccgacccacgcgtgcggttgggacttctctcgaactggtttaagatctcatctcagtgaacaatggctagtctttacagaggggcatcaaggaaagacaagcagaagggaagacaccatggattaagccaacagaagaggcaagagattaaggaagcatttgaactgtttgacactgatggctcaggtaccatcgatgccaaagagctgaatgttgccatgagggctcttggtttcgaaatgacagaagagcaaatcaatcaaatgattgcggatgttgacaaggatggcagtggtgccattgactttgatgaatttgttcacatgatgactgccaagatcggggagagggacactaaagaagagcttatgaaagcattccaaatcattgatcaagataacaatggaaagatatctgctgatgacgttaaacgc

SEQ ID NO: 196084 - DNA, 474 bp, Gossypium hirsutum
cccacgcgtccgcccacgcgtccgcccacgcgtccggttcgagggaggacgcatagtccagcacgtgatgaaggaagcccacaagagagacgtagcccatccccaagggatcgcagacatgccaatggttcggattacagtgggagtcccagggggaggagcagaactccagatcgtgaagctgatgctggagacggggattataagagctccgcaaaggaaaatgggaacagccgcagtcctagccccgctcccaaagatgatcggagccctatttatgaagaagaagatgatgacaatcatgcatcttcgagacgcagcgaatcaaattaagctgcagtggtttgaatgggtaggtgttggtttgttagaaacttttgagttaatatatatttgatggataaatttgtgttttgaatattaaaggcatttggttttaatggaagtctatttatataaaattggctttttttt

SEQ ID NO: 196085 - DNA, 749 bp, Gossypium hirsutum
ggaccaactcaggaagaaattacaaacaggtggttcagtcaggatatttttggtgaagctgtacagcaaggggatttagggaagtataacgacagtggtgatgaaatggaggtcgataatcgagatgaaaagccggttattcccgagaagtcaaaagcaaagaaaaagcaggatgaaaaaacttctattcctgacaaggccaaggagaagaaagtaaacaatgctgccggccccaaaaacaccaaactccaggctgcttctaaagcagaggatgatttcgagattgtcccggcaccggctacagattcaagtgacgactcatcttcagatgactcacaggctgacgacgctgaaacgaaggctgagatattagcttgtgctaagaagatgctaaggaaaaagcaaagggatcaaattcttgatgatgcttataataaatatatgtttgatgatgacggtttaccgaaatggttcttagaggaggaaaagaggcatcgccaaccaattaagcccgttacaaaagaagagattgctgcaatgcgtgcacaattcaaagagatcaacgctcgaccggctaagaaagttgcagaggcaaaagcacgaaagacgcggattgcaataaaaaagctcgaaaaggtacggcagatagcaaacagtatttcagaccaagctgacatcttcgaaaggtcaaagaggaagcaaattgaacaactctacaagaaggctacccccaaaaagccccaaaggga

SEQ ID NO: 196086 - DNA, 529 bp, Gossypium hirsutum
  unsure (1)..(529): unsure at all n locations
tcggttaaggtgccaatcaggttttgtgttaggtttactgacagatatcactaaagacttctgtatttgagaatgagtcggccaatggaagaagatacaccaaagaatgaggaagaggaatttaacactggaccgctgtccgttttgatgatgagtgttaaaaataacactcaggttcttatcaactgtcgcaacaacaaaaagcttctcggccgagtgagagcattcgatcgccactgcaacatggttctggaaaatgtcagggaaatgtggactgaggtaccgaagaccgggaaaggcaagaagaaggcactaccagttaacaaggacagattcatcagtaagatgttccttatgggagattctgntataattgttctaagaaatcccaagtaaatttggtgctcttatgttatgaaacttttgtagtgtttatgtattcaactatggaaatgctatttaaaccaccaacggcactgcattggatttgctcaaagaactgtatctatattgagtagtagtttgggtt

SEQ ID NO: 196087 - DNA, 689 bp, Gossypium hirsutum
  unsure (1)..(689): unsure at all n locations
gaacaatggtatcaaatgaggatgaattcaacctgacaaatgagcaagagaggtgggttgttggcattatgcttggagtgactctgacaaagcttgtcctcatgttctattgccgcacatttacaaacgaaatcgttaaagcttatgctcaggatcacttctttgatgttatcacaaacatcattggccttgttgctgtgctacttgctaagtacatcgacgattggatggaccctgttggagctatcattctggctttgtacacaatacggacatggtcgatgacagtattagagaacgtgaactcattggttggaagatcagcagctccagaatatcttcagaaactgacctatctgtgttggaaccaccataaggccataaagaacatcgatacggtccgagcttacaccttcgggtctcactactttgtcgaagttgatattgtacttccggcaaacatggcattacaagaagctcatgacattggagaatccttgcaagagaaactggagttactgcccgacattgagcgagcgtttgttcatttggattatgaattcagtcacaaacctgaacatgcacaggcacatgctctgtaggtagccattaacctctggtttgtccggttgggctantaagttaaaatgtttctacctacaaattctatggcctatgtatngttggat

SEQ ID NO: 196088 - DNA, 598 bp, Gossypium hirsutum
  unsure (1)..(598): unsure at all n locations
atccaaccaaacatgcaacagggtaccggaggatctgagacggaggttacttgggaggatcaacagaatattaacaagtttggaagattaaacaatcgatttcatgagcttgacgatgaaatcaaggttgccaaggaagcaattgataacctggaggatgctagtaatgagttgattttaactgacgaggaagtagtacggttccaaatcggagaagtctttgctcatgtccccaaggaggaagtggagaccaggatagaagagatgaaggaagtgaatagcaagaacttggaaaaactcgaggaggagaaagagtcggtagtggcacaaatggctgagttgaagaagattctgtatgggaagttcaaggactccatcaatcttgaagaggattaatccccttggtttgcttttctttaccttttaagttggattactacttgcttgtgattgatatcagagctttggtcatctttctatttcgatttttagggtttgtcaccctaaacttcctggatatcctctttgacatgaacctatagacagatcaatgaatgaaatggtgttatgaaaagacatagattataaaaaaancagg

SEQ ID NO: 196089 - DNA, 623 bp, Gossypium hirsutum
cggtaagtccagatgggaagttgcttgcagtactcggagatagtgtggagtgcttgatcgttgatgcccaatctggcaaaattaccaacagcctaaaagggcatttggactattcttttgcttcagcttggcaccctgatgggcacattctggcaactgggaatcaggacactagctgtaggttgtgggacataagaaacctgtcgaagtccctagctatattgaagggaagaatgggagcaataagaggcgtgaagggcacatcggatggtcggttcctggccatagctgagcctgcagatttcgttcacatctttgatacgaagttggggtatgttaattgccaagaaattgatattttcggtgaaatagctggagtatcgtttagcccggatacagaagcgctctttgttggggttgctgatcgcacttacggcagcttgttagcgtataaccgcagacgatataaccaatatctggactccatgttgtagaatgcagtgcctctgataatttatatgagaggtaaggtaagctagtgtgaatattttaaggggttgtatcagaattgccttggataattgtgtttcagtgtataacttcctggggaggaacagcagcag

SEQ ID NO: 196090 - DNA, 563 bp, Gossypium hirsutum
  unsure (1)..(563): unsure at all n locations
tcctttcgtccgatttttgtttacatattagagccattgagccaatagctcgtaaaacatctacctgaatctacctatagcataagtattggttcagtactcggtatgttctttagtattaagtaaaaactgagcatgatggcatgatcaaggcttcgggttcttgagggcttcatgttcttccggtccttatatctttgcattgctaccgtttttctccggtttttcttcaagtaaacctattcattctagatgttaacaaataggtttccatacttcaggtatacgaagatgaaccagtgcttcaggcctttaagctaatgaggaaaaagagaatcggaggcatacccgtcattgaatgcggagggaaaaaagctatcggtaacataagccttcgagatgtacagttccttttaaccgcaccagatatataccgtgactacagatcaatcacagccaagaacttcctaatagcggttcgaaactacttggagaaacacgagatgaggtcgccaatgttgagtggcatgataacttgcangagggatgaaacagtcaaagag

SEQ ID NO: 196091 - DNA, 643 bp, Gossypium hirsutum
  unsure (1)..(643): unsure at all n locations
gacccacgcgtncgcccacgcgtccgatttcttgaattctcctctcaaccccctaaccaaatcatccatttcataaatattaatccaccaaaagaattatccattcagttcaaagacaccatgacatctacacctactcaagaaaacactcaagtagaaggatcccacgaacccacagtagaagcacccccatcggaagaagatattaagaaatggggcacgcacgtcatgggatccccagcagctcctagtgcccatccagacaaccagaaggcggctttatggaatgctagtgatcaccaacaaatctatgagctgccctatgtcgtttattcccctgcagaaagaccaagccataatccttttgaacctgtgattaacatgttcaatacctggagtaggaagaccgagtctatagcacgcaacatctggcacaaccttaaaactggaccgtctgtatcggaagcagcatggggtaaattaaacctgacagccaaagctataacagagggaggatttgagtctctgttcaagcagatttttgcaactgatacggatgaaagggttaaggaagacattcgcctgttatctctccacaacaacaggccctgttgcgggtacgctctatttatcaacggctcgg

SEQ ID NO: 196092 - DNA, 484 bp, Gossypium hirsutum
cccacgcgtccgcccacgcgtccgcccacgcgtccgcaagaaatcatggtaagtctcaaatcacttgtatctctcagttcccgatccgctgccgtagcactacttgttttggtggtttcagtggcagtgcagacccatactacaaatgcacaaagctgcccgaccgagctgacgagcctgaacgtgtgcgcacctttcgtggtgcccggtgcagctgtggctaaccctagcattgactgctgtaacgcactccaatcggtgcaccatgattgcctttgcagcactctaaggatcgcttctcgactcccttctcaatgcaatctcccaccactcacttgtgcttgaaagaaaagcagtggtgctgcatgcttaattgggtaggaaaatctaataacgccatggaatatggatacctgccctgtttttttctttcttttttaatgggtaataataagcaatggtggtggtgaaatggaaactaata

SEQ ID NO: 196093 - DNA, 805 bp, Gossypium hirsutum
cagtactacatagatatcatagagacgaagccttccaatgcaataagtatcattgagactgactgtgaggtggattttgctcctcccctcgattacaaagagccagaaaggcctgctgttcccacttcaagcaaggcacattctcaagttgaagaagctctggcagagactgaaccaaagttcagtgccttcactggtacaggaagacggttggatgggaaacctctgaagcaacagcctcctccggtttcttggtctgggaccaaagacaaggaacctgctgcttccaataggaataataggcagccttctccaggggctagttcacaaagtagcgcacgccaggctcagggcaagctggtatttggatcaaatgtcagccgttttaaggaaacaaaacaggaacccggaaatcaggctaaacaggagcagcctgaaaagaaggaagatcccaagttccagccattcaccgggagaaagtactcgctagagggttgattaaatcaatcctcaatttcttatgtgtttgtttttccgtggctcctggaaagtgacagaattattatatattcatcttggatgttctgttaacaaaatactcacctgagggttctcatgtcaaaatgaaattcgactctgttgtgaaagctggagagttttcccttcaaagaaacgacctgctctttaaaatgtgttagatctttggctaatactctagggaagtaggatgatattggaatttgattccacaacgattacgttgaatttatctctttattatggaacagccatgtaatttccctgc

SEQ ID NO: 196094 - DNA, 431 bp, Gossypium hirsutum
accaactttcccttaacatcttttggggccctttcctcatttgtggcattgcttgcgggctgactcttaccatattctgctggggggtctttacacagtaccgcagattcagccccgaagatgaggaaagtgagattgagacgatcgaaccgtcgaggtcaagtcgacggtccatccgctcaacaagcttcaagcagattattgactttgtagataagaaagaagaagagattaaggagatgttgaagagaaagaacagtaatagtaataaacaacagactagcatccatagtttctcagatggtcaagcaagttcaccttcctaagagagacaaaaatccaaacacatttttgtttggatcatttggaacctcaaatatttcctttttatccggttatattatagaatctgaattaatacaaaaatcata

SEQ ID NO: 196095 - DNA, 734 bp, Gossypium hirsutum
caattatcatcttccatggaatcccagaatctcaaacaccgttccagggatgaccctcgttttgccaccaccacctccaacgaaaagaacagagcatacaggcgagaaaaaagaatggcaatggccaaacgtgggctaagatcactagtcatagcagtttccttccctttgtctctcaccttgttaaacatatacttgtttggttcaggtcgtggttacgcctctttagccaaacctttctggttccctcctttgtggcttttacatacgggttgcttggcttcgagcttcgtgatggggctgtcggcttggtttgtttgggttgaaggtgggttccacgttaaaccgacggctttgtctctttatttgggttacttaggattgagtatggcttggcatccgactgtgctttggatgggagctagctgggctgggttgcttgtgagtttggcgatggttgggaccttggtcgggtgttcaagagattttggaaaggtgaatccgattgctggtaactcggttatgccttgtttggcttgggctgcgtttttggcgactgtaaatctaaaacttgtcttcctttgaagcatataccaccatcttttgttctgcaagaaatagtattgttttttttttccctcttatgaataagatcaagttgttggtttgttcattagacagcttagaaagaaacacatggccttttgattttcctgttgcttcttacattatca

SEQ ID NO: 196096 - DNA, 479 bp, Gossypium hirsutum
ttcttgcgtccgattggatctggctctttgcctactaaggctcgaaaaggtggttggcgatatctagatgcagggcaagtgctgatcgagagtgcatgctctgtagatcatgcagaggaagctttaaggacgctgttacctatgcaccctgagatccattacttccggttcaatccagtggatgaacgatgtgacatggagctggatgagacggatccaactttttgggcttagttggaagctgcaacggaggattacatcgataacaattcggaaactttcaaggatgcttgtgaaagacttgttgcaccatttaaaaatgcgtaagtggagagaggtataaatataaatctcaacaaccaatcatgtattttgttgttacagtgtaaaagatataaatgttgtaaatcgtattacgtagatgaagagagaggtaatctgaaaaaaacatctgagacctatttgtgaataatcagatg

SEQ ID NO: 196097 - DNA, 510 bp, Gossypium hirsutum
cggacgcgtgggcgagaacctttgcaaggcttgagttctgtttacccctattacaggtcgaatctctcaagcagagatcagatacatccagagtcaactatttggtcaattattttcacttgaaagattcgggcttatgtatgttgctgaacattcatttctggtccattgtttgcaaaaacctctccagctgagcttctttctgtgtttccttttttcatcttcccaggcatcttattttactatggttcctagttaaatagaagctgtttattagacaaatgtgtaagaattaataacccttttggctgaataacataagatgtcagggctttcaatctttgatgaactttaaactgtgatttaaatttgctgcttgttttcatgtttgcattcaatctcaaaataataaatttgtgaaatatatttgaaataaaaaaaaaccatatattaaaaatataaactgcttaaacgtaaaagatgtgcaaataaaaactattgtattaataa

SEQ ID NO: 196098 - DNA, 592 bp, Gossypium hirsutum
ccccgatctatgttggcaggctattgggggatgggcttgttacaactgaaggagaaaaatgggcgaagaagaggaagttggccaactatgctttccatggggagagtttaaagaacatgactccagcagtaattgccagcgttgaaacaatgctagacaagtggaaagacaaagaaggaaaagagatcgaagcattccaagaatttagaatcttgacttcagaagtcatatcaagaacagcttttggtagcagttacttcgaaggagagaagattttttacatgttgcagaagctcgcagatattgtgagccgcaattcaaacaagtctaggattccaatcctcagcaagttttggaaaactgacgatgacattgagtcagagaaacttgctagagaaatacaagatttggttatagagattgtgaagaaaagagaaaacaaagtttcgagtggaggagcagagagcttcggcagtgattttctgggattattagtaaaagcgtttaatatttcagatgaaaaaaactagatttcaatggaagatttggttgatgagtgcaaaacaatttattttgccggacaagaaacttg

SEQ ID NO: 196099 - DNA, 563 bp, Gossypium hirsutum
ggacaactcactcagtcttgctcacacgcttgttcagattgtttgtcaagatcataaaggtgggtgatacgacataacgcgaactctaaaggattacaacattcagatttcatatggacgcttctatataaaacaaggaagaaagtgtgagattgacttgtttataatgcaatccgatgggaagaagatagttgatcctagcaagcaaactgcattgtcgtcgcgtctgaaaatggaactgctccaaccactaagagtaactgtagtgagccggggtcctgacactgagcttctagttgcaaatcccgtagagttatcaagcaagggccggccttttgttttttatgacattacccttgctctaaagatgcttaatacttgcatcttctcggcagagattgggagacacatgatcggagatcgagagtgggaagtttacaggattctactagatgaaggggctagttcatccattctgagacgaaaggttgaggaagaagtttggaagcgcttgatgggttgggaataactatgattggtcacaacattgccccctccacaat

SEQ ID NO: 196100 - DNA, 450 bp, Gossypium hirsutum
ttcttcgcgtccgctcagtccaattttgtccctttccataatccatacgacaacgaaatacgctgaagaaaatgcagagtccctctcttcctcgacttctacttgtatccttcactctattaagtgtgttcaacctactacggggtgatgaaggattctgttccgctccttccatattggaccaaactgatagttcctctaaacctttgtactggaaagtcactagcccaactctgtctccttcgcatctccaagacttacctggtttcactcgtagtggttacagaagggaccatgcgttaataacgccagaaagtcatgtgttcagtcctttgcctgattggacaaatacactgggagcatatttaataactcccgcaattggttcacatttcgttatgtatctggcaaaaatgcaagaaaactcgaggtcagggcttccccctaatg

SEQ ID NO: 196101 - DNA, 503 bp, Gossypium hirsutum
cacacatgtcggtatgaggggtgtggatttgaccccaggacagaaacattgaattgcgcatcgctcgagtggtgctgaagagtgctcccatcttattattggatgaagctagctcgtccatcgaatctgagtctagccgagtggtccaggaggcacttgacacgctgataatggggaacaaaactaccattttgatagcccgtagagctgcaatgatgaggcatgttgacaacattgtagtacttaacggtggtcgaattgttgaggaagggacacatgattctttggtagccaaaaatggcttgtatgttcgtttaacgcaacctcatttcgggaagggcttgcgtcagcatcggctggtttaggttggcttgccagttgatcgtgccttgcatcagttcttctgtatattactcatttcactcatttgaattgctggaactatgaccattctgtgagcttcacttctctcggttgaaaagaatcccaaatcagaaggggaa

SEQ ID NO: 196102 - DNA, 700 bp, Gossypium hirsutum
gtccttgttccagacctatttcgtggttacttttgggaaaagggccaaccaaaaccaatgtttgaacaatggctggctagccaagaccttcagagggttgcaaatgacatagcaacctcaacaaaatggatggttgatgaatttagagctgcaggaatttcaaagaaacttggtatcattggattttgctttggcggtggccgtgtgatcgatgttttagccgctgaccagggtgcttgttttagcactgctgtctcattctatgggaccaggatggatccgacaccggcatctaaaataaaggtgcctgtgttgttcatttcaggggatgatgacccgctctgtcctattggtgttttgagcaagttcgagaagatcattggcaacggctctagggttgtaatcttcaaaggaagaggtcatgcctttgcccatcgaccaggatctacagaagaggatgcagatgctgagcaggcatttaccttgatgaggaattggcttcatgatggcctactcgtaaacagttgagcgcatctatgttcattggttatcttatagggtgcttaaggtagaattggtgcatctttctggcaatactctgaacaagcaatttgttcttgacgatgctcatgcccattgatgtatatacgctaattaatgtcggttttcatctcttttatattacaaagaatttcaggat

SEQ ID NO: 196103 - DNA, 444 bp, Gossypium hirsutum
agaatgtcgatggactctgattatcttgttgacaggcgtattgtgatcaaactacttgtgacctacttccagagaaaccagagcaaagaggttttggaacttatggttcggatgctgggtttctcagatgaagacaagcagcggataggtagtgctcaacaaggtactggcaaaggtgttgttcggggtgttttgggtctacctggtcgtttggttggtggcatcttgggtggaggttcggctgatgtacctgcaagtatagcccctgataatcagtcaattgcagatctttgggttgattttctactcaaggaaaccgaagaacgagaaaagagggcggaaggtgctagtaaatccaatggagaccttaatgggagaaatccaaatgctacaagacctactacatctgcgtcttgacaaacaacttgcggttctggtttctct

SEQ ID NO: 196104 - DNA, 803 bp, Gossypium hirsutum
ccggtttacgagatgaaggactaccttgactggactgaagggaaggggatttgggctcattcagataaaggaccatcaccatctccatatgtagcaactctacgagcgcttgtccaagcttctttttgtatggccatgtttctttacctttcaccatctcatcccttgtcctggtttactgatcctgcctaccaagaatggggattctggaggaagttgagttaccagtatatgtctggttttacaacgcggtggaaatattatttcatctggtcaatttcagaggcctcctttcattatatctggcctgggtttcaggggatggactgaatcttcaccaccaaaaccaaaatgggatcgagcaaaggttgttgatatcctaggatttgagttagcaaagagttcagtgctgttaccacttgtctggaacatacaagtcagcacctggcttcgtcactatgtttatgagagacttgttacgaaggggaagaagcctggttttttccagctgctggccacacagaccgtcagtgctgtttggcatggactgtatcctgggtacatccttttctttgttcagtcagctttgatgattgctggttcaagagttatttaccaatgggaaaaagctgtacccacaaacatggctcttgtgaagaaagcatttgccgtggtgaactttgcttacacacttctggttctgaactactcctgtgttggctttatggtattaagcaagcacgagacacttgcatcatatgggagtgtgtattatattggaaccatcattccgatagcattga

SEQ ID NO: 196105 - DNA, 1144 bp, Gossypium hirsutum
ttataactgacacccaaattcccgcattttctgtaaaaagaaaaacctccccgtcctttgagaaaccctagatgtcaacgtcaagccaaactcagttccgctatacccagacaccatcgaaggtcctgcatctccgtaatctcccatgggagtgtacggaagaggaactcgttgagctttgtaaaccctttgggaagatcgttaacactaagtgcaatgtcggcgccaatcggaaccaagcttttgttgaatttgtagacttaaatcaggctatttcgatggtttcatactatgcttcgtcatcggagccggcacaggttcgtggaaaaacagtatatattcaatattcaaacagacatgaaaattgtcaacaacaaaagtcctggagataccccaggaaatgttttgctggttaccattgagggtgtggaagctaatgatgtgaccattgagacaattcacttggtattttctgcatttggttttgtgcataaaattgctacttttgaaaaggctgcgggattccaggcattaatccaattcactgatgctgaaactgcatcttcagcaaggaatgccttggacggtagaagtattcccaggtacttgcttccaggccatgttacttcttgtcacctgcgaatttcgtattctgcacacactgatctgaatatcaagtttcagtctcatcggagcagggattataccaatccataccttcctgtcaatccaacgtgcgatggagggactcatgcagcctgtagttggtcctgatggaaaaaagcaagaacctcagagtaatgtgctacttgcttcaattgaaaatatgcagtatgctgtgacagttgatgttcttcactcggtattctctgcatttggcactgtccaaaagattgctatatttgagaagaatggcggaacacaggcactaattcaatatccggatgtcacgactgcagctgtcgccaaagaatccttagagggacactgcatatatgagggtggctattgcttacagtgataaaagtagagattacacaatcttagacctaagcttgcttgcgacacaaggtccaagtatgccttgcactccaaatgcttggcagaatcctcagaatgctccattataccctgggactgacta

SEQ ID NO: 196106 - DNA, 1132 bp, Gossypium hirsutum
  unsure (1)..(1132): unsure at all n locations
gggattccaaatgttagatggtttggagttgagggagactataatgttatggttatggatttacttggacctagtcttgaagatctatttaatttctgcagtaggaaactctcattgaagtcagttctcatgcttgctgatcaaatgatcaatcgtgtcgaatttgttcattcaaaatcatttctacatcgggatatcaagccagacaattttcttatgggcttgggaaggcgtgcgaatcaggtctacagcaggcgactttggtcttgctaagaaatatagagacagttcaacccatcagcacattccttacagggagaataagaacctgactggaactgcaagatatgcaagcatgaacacacacttgggcattgagcaaagccgtagggatgatttggagtctcttggatacgtgcttatgtacttcctaaggggaaagtcttccttggcaaggcctgaaagctggcaccaagaaacagaagtacgagaatattagtgagaagaaggtttctacttcaattgaggccttatgtcgaggttatcctacagagtttgcatcatacttccattattgccgttcactaagatttgatgataagccagactattcttatctcaaaagaatctttcgtgatctctttattcgtgaaggcttccanttcgattatgtctttgattggaccattttgaagtatcagcaatcacagctgaccactcctccagctcgagcccttggccccggtgctggaacaagtgctgccgggccccctgcttttgccaatgctgaccgacaagcagccggtgataacctgcgagcagctggtttgtcatctatgaattcatctcggcggaaaacatcaggacccttgaattccggaagtcacgcaaagcagaagggtccagttgcaaatgatcctgcaattactcaaagaacgcctatgttatatggggcaatccggtggatcctcttcaaggcacattgctggtagccgtgaagcttttgctggtagcgaaggccgacccccaacgttctcgtacaaccgatgctagccatggaggtttgaacagaaactcaagccgacaaagccccgttgaatcttctgaccctaagcgggcctcgtccatgaga

SEQ ID NO: 196107 - DNA, 940 bp, Gossypium hirsutum
  unsure (1)..(940): unsure at all n locations
ctacagagtttgcctcatacttccattattgttgttcactaaggtttgatgataagccagacgatgcttatcttaaaagaatctttcgtgacctctttattcgtgaaggcttccagttcgattatgtctttgattggaccattttgaagtatcagcaatcacagttgaccaatcctccagctcgagcccttggcctcggtgctggaacaagttctcccctgccacctgcaattgcgaatgctgacagacacacagctgcagaggacacacgagcagctggtttgtcatccatggattcttctcggcggagagcatcaggacccttgatgagttctggaaattatgcgaagcagaagagtccagttgcaaatgatcatgttagtgcgcagtcaggtgtgtaattctttcattatacggttgtgtccctatgcatatatagttgttcaatatttttttgtcaatcttccatttaagtaacgcgctggcttccttttataattaagaaatatatccgggtaaagtgccattgaaggccctatattaagagaccgaatgcattttggcctctatttaaaaaatgagataactagtccctgtacgttagatcaaagagcaaaccgggcctgctgttaaaaatttcatctatttttactgctaaaaactagtccctgtacatcatcatgaggtacacgggacatgccaatatcactgtcgggttatttggtcagccatactagttttaacaatacaaaaggttgagttttaacaaaaggacatttggtctttgactacatacaggattaattacccattttgagtanaaagcaaatgcaattgactctggatagagcttctagatttatccattcggaggttattttgttatattggacacataactaagccatatttcatatttttgggcacagtacttttttta

SEQ ID NO: 196108 - DNA, 643 bp, Gossypium hirsutum
cgtgacctctttattcgtgaaggcttccagttcgattatgtctttgattggaccattttgaagtatcagcactcacagttgaccaatcctcccgctcgagcccttggcctcggtgctggaacaagttctcccctgccacctgccattgcgaatgctgacagacacacagctatggaggacacacgagcagctggtttgtcatccatggattcttctcggcggagagcatcaggacccttgatgagttctggaaattatgcgaagcagaagagtccagttgcaaatgatcattttattgggcagtcaggtggatcatcttcaaggcaagctggtgtttctagcagtcgtgatgcatttgctggtagcgatgttgacccacaacgttctcgtacagcctacgctagccccggagcactgcaaaagaattcaagtcgacagagaagtcccattgattctgccgaccctaagcggtcaatgtctgcaagaaacaccagtcatgtcaagaactatgaagcggccctcaaaggaatcgagggcctgcaatttgaaagcgacgagagaattcactattaaacgcttggatatacaaaatttggtgtaaaaccgtgaaaatggttgatgtactaatacattttccaacaga

SEQ ID NO: 196109 - DNA, 487 bp, Gossypium hirsutum
ctcagagagtacgggctgctgacatgaaatgtttggcaactgccgcagtcaaagctagcagatggtatcgagaattgaatgcacagactgtcaagcatttggatacacttcacgaatatcttgggcttatgttagctgtgcatggtgcattttcagatcgatcaagtgctttattgacagttcaaactctcctatcagaactatctacacttcatgcaagagccgaaaaacttgaagctgcatcatcgaaaatatttggcggcgacaaatctaggattcacaagatagaggaactggaagaaactataagggttactgaagacgcaaaaaatgttgccataagagaatatgagaggatcaaggaaaataacaggtgtgaacttgaaaggcttgacaaggaaagacgcgttgacttcttgaacatgttgaaggggtttgttgtaaatcaagtgggatatgccgagaaaatttcaaatgtgtgggcaaa

SEQ ID NO: 196110 - DNA, 587 bp, Gossypium hirsutum
ttaccggtgggcgcacgcgtgcgagcgagtttactggaaaaccctagaaaccagcggctctttcttcaattttcgcttctttaggcggcggtaactcagaggtcgttttcttcttcttcacaagacacaatggcagatggtcatgaaactgacaagaacatcgagatttggaaaataaaaaagctaatcaaggcactagaatctgccaggggaaatgggaccagcatgatatccctcattatgcctcctcgtgatcaaatatcccgtgtcacaaagatgttaggtgacgaatttggaactgcatcgaacatcaaaagtagggtcaaccgtcagtctgtgttggctgccattacttctgctcaacagaggttgaagctctataacaaggttccccctaacgggctggtgctctacactgggacaattgttactgaagatggcaaggaaaagaaggtgacaattgactttgaacctttcaaacctattaatgcatctttgtacctctgtgataacaagttccatactgaaagcttgaatgagcttttagaggctgatgacaagtttggattatagtcatggatggtaat

SEQ ID NO: 196111 - DNA, 692 bp, Gossypium hirsutum
accactcctacgcgcacacatacagtgaactcatcgaagttacgacttcaccggagttatatcgtggtttgcggataaatgtgatcttattcttgttgtattcgaccctcacaaattagatatacgtgatgaatttaaacgagtaatttcgtgtttacgtggaaacgatgacaagatacgtgtcgacctaaacaaagcacaccaagttgacacccaacaactaatgagagtttatggagctctgatgtggtctcttggaaaagtcctgaatacccctgaagttgctcgtgtttacattggctcttttaacgataaccaaattaacggagctgatgttgatccattggggcaagacctttttgagaaagaacaagatgatcttctcaaggacttattagacattccaagaaaggcttgtgatcgtcggatcaatgaatttgtgaagcgtgctagagctgcaaaaattaatgcttatatagttagccatctcaagaaagagatgcctagtatgatgggcaaagctaaagctcaacaacggcttattgataatcttcaagatgaatttgccaaggtccaacgtgaataccatttgccgccgggtgatttcccgagtgttgagcactataaggaggtgttgaataattacaatatagataaatttgaaaaactgaaacccaaattggtacaagccg

SEQ ID NO: 196112 - DNA, 454 bp, Gossypium hirsutum
cccacgcgtccgcccacgcgtccgattttagtgttggaagctgtagcttcaagagcttatctggggttggttcattcagcaagatcagtggccgaggctccggaaggattgctgcagaaaatgaatgtattgataagccttgaaaaaacatgggttgtcagtcaaggacattctctttcacacaatgggagaaaaatcgagcaatcatggtcagtgctagacccattagttatatatgttagatggaagggaggtccatatgtagattttgggggaaaataagcgaaggaaataagtttcattgacttggtaagtttgaaaatagcttcattgggtcctatatttgttggaatctcttggttgctttagattgaagtggcgttggccttattgagggtgtattaatttaaatgcctgaattaatagggaaaaaatatattccaagtgaaataag

SEQ ID NO: 196113 - DNA, 712 bp, Gossypium hirsutum
gcgtgggctcatatgcaatttaatcagactgtcgaaacagcgtgttgatattgagaagcctaggcaccggacagttatcacctcggatgttcggcagcaaattatgatgatgaaccagaatgctaggggagaatgggagaaaaagcaggctgaggcagagaagctccagaaacttaatgaacctgaggctgagactgcctttgatggtgacaaggagaaagatgacagtcgagtaaaagcagtaaaggtaaataaggaggtggatgactagatgaggaccactgctgcaggtgttgccgctcgtgctgctgttggaggggatgacatgctgtcaaaatggcagcttatggctgagcaagctcgccagaaacgtgagggaggaacggatgcggcatctggttcacaagcacgtaaagatgcgaaccgcagacctttatctgcatctgggaaaagtacaaaggacaatcaagaatctgaaaagaggggccctctcaatcctcatggatctgggacaagcaagaaatttggccggaaccaaggtacgacactcacggtccatgctagagtggctcgtactatttccattaaggatgtgattgcagttctggaaagagagccccaaatgtcaaagtctacacttatttatggcttgtacgaaaaaacctgctccgaatctaaagcggagtgattatagtgcaccttttatacattt

SEQ ID NO: 196114 - DNA, 481 bp, Gossypium hirsutum
ctctcttcgatcaaagtttcataatccgaaggcgaagaggcaaaagattaatggctcctcccgcaaagccaataacgagtccagtctcagatgcatggtacccaaccctagccctcttaatgctctccattggtcttgtcgtcaccgcttccttcttcatctatgaagcaacttcttcgaagagaaatcgaagtcttgccaaggagctcatcactggcggagtggcatcggtcttcctgggcttcgggtcactgtttttgctactttcagccggtgtttatgtctgatttttgatatcggtcaaccggcttacagaggtttgcaaagaaaaggattggtgtctgcttttcttgcatttttgtagtttatcagatcaggaaagcttctttgataaacattttgatgtcacttgagtggttttattggtacatgcttgaatttgtatattcatgtcataagcatgtttcattcatgttacatg

SEQ ID NO: 196115 - DNA, 469 bp, Gossypium hirsutum
gtgagtggctgtttgggatttcaccctgctggttctctacaccgcaaatccatgctattcacgtctttgctcgcctttgcgattgctcttctcagcctcttctcacaatccctgaaggttaatagctttccagtattgggtttaaaaagctttataaatgcttgatgaatattttcctgcagttcagatacaagctagcacagatgagcaaatttctcaacttagagcggaggcagcagcgagggaggcagaggcagcagcgagggaggcggagtagaacagaaaatacaatgaactccagctacagcttcagtctatgatgactatgttccagcaacttcaaaatccgccatcttagacattttgtttcttgtaacttttaacactatcgtaagaatattttgaatattcatttacaatttatataatatatttttcgtatgaaaagaaaaaaaactactatgaacat

SEQ ID NO: 196116 - DNA, 533 bp, Gossypium hirsutum
gcgcccacgcgtccgcggacgcgtgggcaggtgcaagcatttcaggtggactgaaggcaaactacagcattactgctgcaaagggtatgtattattcggcccgaggaccagatccagaagacagttctctagatgatgcagacataatgaaaccgaacttgattgcccctggaaatttgatatgggctgcctggagttccctcgggacagattcagttgaattccaaggtgaaagctttgcaatgatgtctggaacaagcatggcagctcctcatattgctgggcttgctgcattgataaagcaaaagttttctcatttcagtcctgcagccatcgcctctgcactttcgacaacagcttctctttatgacaagagtggtggccccataatggctcagcgtgcttatgctaatcctgatgtaaaccagtcttcagcaacaccatttgacatgggcagtggttttgtgaatgctaccgcagctctagatcccggtctgatcttggattcaacttatgaagattatatgtctctt

SEQ ID NO: 196117 - DNA, 630 bp, Gossypium hirsutum
caagttgggctgaccgtcatggtgcagttctctcactgttctccttgctcaggcataacccttccaccatatttatgtctccagagtgcccgtctattttactccgtctcaaaagctccttgaaagatgagaagttcccactacgtgaaacatcaaccaaggcactggggaggcttttactctatcaagttcaaagtgacccccttaataccactgcccttttggatgttctttcatctgtgctgtcggcattgcgggatgactccagtgaagtaaggagaagggcattatctgctataaaagcagcttccaaagcaaatccatctgctatcatgactcatctgtcattaatcggccctgcccttgctgaatgtttaaaggacagcagcaccccagttagacttgccgcagaaagatgtgccctccacagcttccagttgacaaaaggtactgaaaatgttcaagctgcacaaaaatacatcacaggcttggatgctaggcgcatagcaaagtttcccgagcacagcgatgatcgtgatgaaagtgaagatgaacaagcaagcagctaaaaatattttccttgaacatatgcttcattaaggcttgagactcgaatggaagtgactgaaa

SEQ ID NO: 196118 - DNA, 448 bp, Gossypium hirsutum
ggttcagtcaccccattttcaagctttccattcaccccatctcatcacacctccggggttcgtctccttagaaactatcggagagaagtcgacagtctccatacttctcctaggagatccaactttgatatcgagctttcagacacggattctttgtccccatccccccctaattacaccgaaggttcctccacttctcaccaccatgttaatatggaggatcaagttcaagtagactacatcgataatgacataaatgaactaaactttaatgaacgacgtgaactcacacaacatgaaattaacatcgagttgaaagattcttcattcgatagaaggacaactagtatatgaatatatatatatatttgagttttaaatttacagtgataagatgggtaatgacaacaattgtaattggccaaaggcaaaaataagccatttgatt

SEQ ID NO: 196119 - DNA, 653 bp, Gossypium hirsutum
tacctagtggccctggcaaccagacagaagatgaagttcccctcctacaaaacatatattggaaagagttatcgtcgctcgtgtatgtatggattggttttcttattgtgcagatcattaaggaatatcttccaacttgctcagtcatgtactggattgtgacctccttgcagatacccattgctgcctctgtgacaatctttgaagccatatgcttatgcaaagggaccagagtgattgcatccaaaggaaaggaaatcacaaactggaagatgcatcggattcttctttattgttcctgtggcataatagctggtatgggaggagggctgctaggactaggaggtggcttcatcttgggtcctttattcctcgaactggggatacctccacaggtagctagtgcaacatcaacgttttctatggtgttttcatcttcgatgtcagttgtacaatattatcttctcgatcgtttcccagtcccatatgctgcttattttgtcctagtagcaacaatggctgccattgctggccagcatgtggtcagaaggatcattgcattcattgtaagagcattgataataatcttcatactagctttgacattctttatcaacgcaatcactttatgtggagttggcattgcttgatat

SEQ ID NO: 196120 - DNA, 804 bp, Gossypium hirsutum
ggagattgaactgctagcgtttgattactttttcctactctcacttgacagattcccccgatttacttgagttatctattactatgtcctttgaacttgaaaatacgtgcagctttatgtcagtcaggttacagttttaataaaataaaataccaaagtgccttaaaagggtttttttttaaaaaaaaaaaaaaaaactcgagaaaataccccttctcctactctctaacaaccaaactttctacccaatttctagtttttatataaatcactttatttcttcaaacactcaaaatccccatcttctctttttcttgtaaatcctggagcaaagccatgaagaaatccatggagatagctgattcagcctcttggtactgtgcccttgccttattgaccttaatactgatgggttgcatcaagacaagttccgtatcatcagatgaagctgcgagagggaagcagcttctgaagccaccctgtgacgaaatctatgtggtaggagaaggggagacacttcacaccatcagcgacaagtgcgacgatccttttatcgtggagcgcaaccctcacatccatgatcctgaccacgttttccccggccttgttatcaagatcatcccttctactgctgggaaactctagaggtagccatacgtcttctgaaaatatttgtgttaattcgtcccttatcaaggccccggttggtaaatttgggggggatggtggatccttagttctctcttatccaaattccatgcacacacatatgacatatatatggtgtaaaacgatgcttattga

SEQ ID NO: 196121 - DNA, 730 bp, Gossypium hirsutum
cattgctcctggtgttaatatcttggcaggatggactggtgccgctgcaccaactgatttagacattgatccaagaagagttgatttcaacataatttcaggcacttcaatgtcttgtcctcatgttagtggattggcagctctgcttaagaaagcataccccaattggtcacctgctgccataaaatctgctttgatgacaacagcttacaatttagataactcgggacacaccattaatgatcttgctactggggaagaagcatcaccatttatttttggagctggccatgtggatcccaacagagctctaaatccgggattggtatatgataccgatagtagcgactacatcgcgttcctttgctcaatcggctatgattcaaagaggattgaagtatttgtgagggaacctaatagttcagatgtatgtgctacaaaattggccacaccaggggatcttaattatccatcattttcagcagtttttaattctaatgatcatgtagttaagtacaggaggaaggtaaagaatgttgggacttcagctggtgcagtttatgaagctaaagtgaatgctccacctggtgtcaaaatcagtgtttcgccgagtaagctcctattcagtgctgtaaaccaaacgttgagctacgaggtttcattcgcaagtgacagtttgggggtgtcttcagttgagtcacaagggttcgggtcgatcgagtggagcgat

SEQ ID NO: 196122 - DNA, 550 bp, Gossypium hirsutum
aatggatctcaatagttcagagcaatatccacccgtatcaatggcggagcaagcggtgcgagagccgcttaacagttcatctgagtctgaaaatggtggaatattggagaaaaccccgccactccaggaccagaaagttgatgagaatattcaagaagattcaggcaaagatttgaaaaaggcgtgcacccctgataggcttaaagtccccaaggcattcaagttccctgaaaggtatagaagtccaaccgattctatgatgtcgcctgttacaaaaggtcttcttgcaagaaacaggaaagctggaggttcactcttaccacctagtataaatcaaactaagatccatgaattgcgtgttcaagatgttggtctttctcacaactgaacaagctaaaaccagatggatttgtctgaaatgaaatggtgttaatgtcgatataaattacaagcaaaaagaatgctgtttatgggatgtaatctctcttttttttttggatgcgaaatcttgttctaataataacatatttttggtagctgattaatcatc

SEQ ID NO: 196123 - DNA, 513 bp, Gossypium hirsutum
cgttgcttacccgacggagctaagattacaagcttttgtccctgattatatggaccggcaattcaatgatttgagacctgggaatgtaacgatagagtatgaggggcattcatctggtgttgcatatgggacagcgtttactattcatttctggcttggacgaaggccaagtaaagacgtggaatatagtgtttatgcgccgccgttcacgacgcattccatttcaatgaatcaaaggttgctgaaactgaggtgccggcacaaaacaagggacggcggtggttcgatgagtgctgttttggaggctccaccgtcgccgaatgtggcaccacctggttactatttgcttactgttgttaataatggcatccctagcttatctcaatggattagattcatccctgcttgatctttcttgcactttgtcttcaatatccaaaataatatgttttttaatctccctgaataaagtgtaaccacctattctgttaaaaaaaaaaaaaaagggcggcc

SEQ ID NO: 196124 - DNA, 1089 bp, Gossypium hirsutum
aaatggaagaaactcatcctgggttagtgactattatatgcgcatgacattcttctataaatagcctactcaacaagccaacttgatttatcttcaaaaataaaacatttcttctattaattcgttatgggtttggaatcagagatgaagcttcccgtcatcaatttttctgaggaaaatctaaagccaggaacaagcggttgggcatcggcatgcaaggatgtccggcgagctctggaagaacacggttgcttcgaagcaaaattcgataaattacctggtcaacttcacgacgctgttttcgccacagctgaagagctgttccagctcccaaccgaggtaaaaatgcggaacaccagcgacatgcctttcttcggttatttcggacaatacaaaactgttccactctacgagtccttggcaatcgaccacccaacatctcttgatggaactcaaaggttcaccaatctcatgtggcctgctggaaacgatcgctttcgcgaaagtgctcaaaggtactcagaggttgtggcagaacttcatcgaaccgtgatgagaatgttgtttgaaagctatggtgttggaaattgctacgattattacatcaaaatcacccgctaccttctacgatacttgagatacagtgagcctaagatgggggagagtaatgctggtttattgcctcatacagacaaaactttcttgtctatacttcatcaaggtgatatcagcggtttgcaggtgcaattgaaagatggtcaatgggttgcgccgccaccatcgccaacttctttcgttgtcatggctggggatgctttgatggcatggagtaatgaccgaataccatcttgtaatcatcaagtaatcatgaaggagaagggaataagatactcattgggcatgtttacattcatggatgggatcatacatatacttgaagaggtaggggacgagactcaccccatcaaatacaagtccttccaccactttgaactccttcagtttatgaattccaatttgaaaaccaaccctaacatgtgctttatcaaagccttttgtggtgtttgagacctacacaacaaggatgct

SEQ ID NO: 196125 - DNA, 525 bp, Gossypium hirsutum
  unsure (1)..(525): unsure at all n locations
gaaaaaaaaaagggataaggatgaagaagattattataattgctgttcttattttctgcgtgttaagttcacaaatggaaaacgtaacaccacaggtagattgctacgacgcatgtagtactggatgcgttcaaagtaacacgaggcttatgcagcgatgtgatcgcaagtgccagattagatgcagtccagattccaaggtagaggggaatttgggttagctaattgaaagatcaaaatctacttactacatagtttcttgctatataccactcaaatgtattgtgttgaataaaagcatttatatagcttcttatccatcgtcttaccttaaagcattgaagagatactagtaagttcaataattatgtatctttatctagattttgtgttcaataatattatataaaaaataaaatttattcttttttaataaattantatataatatcnnnnnnnnnnnnnnnnnnnnnnnnnnnnnnnnnnnnnnnnnnnnnnnnnnnnnnnnnnnnnnnnnnnnnnnnn

SEQ ID NO: 196126 - DNA, 528 bp, Gossypium hirsutum
acaccgatcaacagcagtggtcaatgagtatggtaacaacaatatataactatccgagcccacgttttatctcttcaccgaaaagaaaaaccacgtataggagggaacagccgcaggatctgagatacaacggctgaaagtcggcaaatactaacatataaagagtctccatgggatctctggacctaagctcaggatcagaagttgttaccattcatgttaatgaagcaaaaaacttactgcagtcaggctaccgttacatcgatgtcaggacagtggaagaattcgagaagggacatgtggaagcagcgaatattcttaacatcccatacttgttcatcacaccagaaggtagggtgaagaatcctgagttcttgaaggaggtttcatctctctgcaaggaggaagatcgtctcatagtgggctgccaaagtggggcgagatcccttgctgcaaccgctgatcttcttaaaattggtcttaagaatgtgcacgacatgggaggagggtatcttgcttgggtggaga

SEQ ID NO: 196127 - DNA, 652 bp, Gossypium hirsutum
ccctcgcgtccgaaataatatctgctcgttcttatcctgctcgctactctccactcaaatggcgctatccttaaccatcagcaatggcatcagtagcagtagcaatgcaaatgggggcccaatccttcccaacaaccagctacctttcggcctccctcatcgccgcaacgtcctcttcccaatctcccccagaaccttccacttgacctccgctgccaaaaagttctcttcccgaaccggacgcttcgatagcaagaaccggaggagcaatctcaccacaaaagaacaagatgaggaacaggagctcaaacggacggcggagattgaagaatcaaacattgctattggagttggattggaggacgttggtgggagttcgtctgagatttcggctgatggtaagccgttccccgatcttccgggccttcagccggatttatgggaaggtcccaagtgggatgttctcggtttccttgttcagtatttgtgggcttttggcatcgttttcgcgttaattgcatgcgggattgctgtggcgacttacaacgaaggggcaacagattttaaggagactcctgcatacaaagagtcgatccaatctcaagagctattagaacaacctgatgcctctaatcaaaacgtctttgaatca

SEQ ID NO: 196128 - DNA, 470 bp, Gossypium hirsutum
ggtgctagtgtcgactgtgacggtgaaaaggatgataccaaacgtagtatatgtcaggaagaatatgtaaatggagatgaagtagggatgttgcagcgtgagcataggtatcacgtgacatgcatacagaattggctgcagacaaatgttacttaccgagcgtgaccggtttgtctcttggcaactgcccttttcccattccagatgtttaggcatcagaatgcagaaaattgcaagcattctgcaacgcgaccaacctagcatgatggttctgcaagtgcaacttcatacaggaattctaaacaagggacaacttcatatatatccaatcaacaatcaacaacagtggttttatatctatcaatcaacaatagttgtttgccaattcacatataggacagtaacctttcctttcagtgcccaagacaaaaagttgccttttttttcggacgcgtgggcggacgagtggg

SEQ ID NO: 196129 - DNA, 682 bp, Gossypium hirsutum
  unsure (1)..(682): unsure at all n locations
caaaaataaagaagatcagctatcggaaaatgtctacgtcaccgtccgtcaccgaactccaggtggagaactttacgttccctccgacggtgaagcctcctggttccaccaaaaccctgttccttggtggagcaggggagagaggattggaaatccaagggaagttcataaagttcaccgcaattggagtttacctggaagatagcgccgtgaattgcctcggcgttaagtggaagggtaagagcgcggtggagttaacggaatccgttgagtttttcagagacgtggttacaggtgattttgagaagttcatacgggtgacaatgatattgccattaacgggtcaacaatactctgagaaagtatcagagaattgcgttgctatttggaaatctcttggaatctacactgatgcagaagcaaaagccattgaacaattcattgaagtcttcaaggatgaaaacttcccacctggctcgtccattcttttcactatttcaggccaaggttccttgactattgggttctccaaagatagctcagtaccanaaggtggganagttatgatagagaataaactacttgcaaactcagtgctggaatccatcattggtaagaatggagtttctcctgcagcaaaggaaagcttggcatcaagattatcaccattgttcaatgactt

SEQ ID NO: 196130 - DNA, 846 bp, Gossypium hirsutum
tgagatagggcaactctcaacagttccaccaaagcaaagaacacgacaagccatcgaagaattcatcaaaaggaaacgagaccttccacgtgaggctttcaagggaggtttcattttagagaagattgcaatgccactttccactggccacctcaacctaatcaacacaaacatcgacaacaacccttcggttaccttcaactacttcggccacccccgcgacctacgcagatgcgtcaatgggattcggatggctgccaaggttatacaatcggaccgattcacgaacttcaccaagtgtgacaaaccgaccgtagagaggcttcttaacatgagtgtcaatgctaacattaaccttatacccaagcatactaatgacaccaagtccctagaacagttctgcaaagacactgtaatcacaatctggcattaccatggagggtgccatgttgggaaggtggtggaccctaaccacaaagttcttggaaccagaagactccggatcgtggatggctccacatttagtgaatcccctggaactaaccctcaaggcactgtcttgatgatgggcaggtatatgggagtcaagattttgagacgaagactaggcaaagctgctggtgtgtaaggaccggcctttgtttgtggtagtagtgggagtaggaaatgaaatgtgataagtctgtagagaaataggaaatttggtgtttccttttgatttgcgctgtttatttttctgtcatgttgactgtgctctactaatggttggtgccaagattgatgagaagtcaaaaaaaagggaaaaatattttaggacattaggcttagctatgtgtttgcttttga

SEQ ID NO: 196131 - DNA, 978 bp, Gossypium hirsutum
ataaatcacagtaatttagattttttattgaaaatgttaggaggcaacaacagtaatgctgtgcttcccattttcctggatgagaatcatcttcaatatcagaatcagactaatggatcaaaccaactgcaattatttggaagcttgccagctgggtgcaatgttgatcctgtgaattattttggaaatgaacatcttgctcccatgattcgacccaataaaagaggcagagaaacagaagacattcaaaggcagcaaaagctacaaatttccttgaattacaacatctgtaaagaggaagctgactgttcagctggcattccaaatcctaatgctgtgtcaactggcttacggctatcgtatgatgatgatgagcgaaattcaactgtgacttctagtggaagcatgacacaaggaccatcaatgatcttgtcactcggtgacaacattagaagtgaacttgatcgtcagaaagaagagtttgatcagtacatcaaaattcaggaagagcatctgacaaagggaataagagacatgaagcagaggcacatggcttcttttcttgctgctattgagaaaggcatcagcaagaagcttagggagaaagatatggaactagagactatgaataacaagaatagggaactggttgagagaataaagcaggtgactgcagaagcacataattggcattatagagcaaaatacaacgagtcggttgttaatgtgttgaagagccaccttcagcaagtaatctcacaaggtgctcaacacgggaaagaaggttttggagatagtgaagttgatgatgcggcctcctatattgatccgaacaactttctcagtattcctcttggggctgcaaaatgtgtttccaagggcatgaaggaacacattatttgcagagcatgcaacgcaaaggaggtgtccatcttgttgatgccatgtaggcacctctgcttatgtaaagactgtgat

SEQ ID NO: 196132 - DNA, 669 bp, Gossypium hirsutum
ggacaggttatgaagttgaacagaccaaaaactgggcactccctataaactgcagtgcactagcagaggaatctgtttcaatacaaatggcagcaaaagcagcagtgtcagaatgtagagcagatggatggatccaattcgaggaaggagaattacagcaaagaaagaactttgtcgaaaggaatgacacgtggcagcacaaaatgcaattctcttactcatgcctatcacctgttcttagccctaatcctacctctacgacggcagcgattagcactgtcaccaccgtcgcccctccgccaccaataagaccaatgggcccaaagcaccaataccaacaccaacagctctttaagactcatcatggtcttaataatatctttaaatcaccatgcagatataacaacaacaataccaatgtctttgatttcaactttgttagaaaccaagaggcgacacttggagaagatgactcacaaaccctacaactcttccctcttcatagctgtaacgatgacggttccgatgattccaacgagaaagaaaacgagatatcgatcgccaccgccccggggaatgctaaccttggtggtcctaattatcagttttttgagttccttcctttgaagagctaaaatggaaaacaatggagggatattttttaaaaat

SEQ ID NO: 196133 - DNA, 528 bp, Gossypium hirsutum
cgcgttcggagccatacttgtaggcgattggggagggtgcttatagttactatgggaagaaaccctaaatgaacgggctgatgcaaaaggcgatgtcgggagtttcagtgccattcatgagagcaatattggacggctatgatgggttgaaaggcgtgaagagattagttgatgtgggaggcagcgcgggggattgcctccgaatgattttgcagaaatatccccatgttgagggaatcaactttgatttgcctgaggtcgttgccagagcacctagtattccgggcgtgactcacgttgggggtgacatgtttgagtcgattccagcggctgatgcaatcttcatgaagtgggtgttgacaacatggacagatgatgaatgtaaggcgataatggagaactgctacaaggcacttcctgtgggagggaaattgatagcatgcgagccagtgttgcccaaggaatcagatgatagtcataggactcgggcactcctggaaggtgacatttttgtgatgacaatttaca

SEQ ID NO: 196134 - DNA, 468 bp, Gossypium hirsutum
cgcgtccgatttcataaaaaccccaaatttctaagaactctcttgattcttctttggtttaatagatggaatggagaccaagtctcgcactctagagatcacggttttatcagcagaagacctgagaagcgacaacaaaccggtgaaaaagaacgcctacgtcgtcgtttcggtcgaccctttcaacaacaaggcgaccaaggtcgacggagaaggaggcagctacccttcgtggaacgacaagctggtgatggaaatgccgttacagacgcggtttgtaaccctcctagtcaaatgcaaggggtccagaggggaaaaaacggtggggttagcgaggataccggtgatggatttcgtcggagggtattcgccggctacttgtttgcaattcttgagttacaggttaagggatcccaaggggttgaagaatgggattattaatgtttcattgagagtaaaagagccttt

SEQ ID NO: 196135 - DNA, 446 bp, Gossypium hirsutum
ataaaatagatagttactctctcgcttctctcttcctgtctctgtccacgaccaacaactaagattatccaaacggtacaacataatagccgccctcgcgtccggctactgatagtgaagacccagggcattgtagaaaaacatggataccatcttcttccgcattatgacagcgaggacagaagctgtttgcaaccactctcttgagtctgagattcgatagagtaggaataaaattccataagattcgccatatagtaatagtaattttttatgggagatgtaaattccatagctttttatagaaattttttgtttcagcctgtaataaataagaactaggatccatactagcctcttgtaatagtttataggcacttcggactgaaaattcgccggaatgttcttctcgccagacttgaaagtcatcacgtgcttcttttgcc

SEQ ID NO: 196136 - DNA, 613 bp, Gossypium hirsutum
gattgaagggaggggctttcataccaatttatatgctgtacgtggcacttattttggaggaaaagaaggaaaaaggaaaatccaggggcttagatctaatcgggggtagtcctgatcttatctccggaccacgtgaaacagggaggatgtatgaagcaaatgttgatgatgtggggtacaggttggttgctatttatactccggtcagggaggatggcattgagggacaacctgtttctgcatcaactgagccaattgcagtcgagcatgatgtttataaagaagtaaaacagaagcttgatattggatctgtaaagtttgaggtattatgtgacaaggatcgcaacccaaagaaggtcccaggagaagggtgccttgagagaagaatcctggaaattaatagaaaacgagttaaggttgtaaagccgggttcaaagacttcttttcctgctaccgaaatacgtggaacctttgctcctccttttcatgtggaggttttccgtaatgaccaacgccgacttaggattgtgttggacagcgagaacgaagtagacctcatggtgcattcgcgatacatcagggatgttattgttcttgtgatccgtggtcttgc

SEQ ID NO: 196137 - DNA, 665 bp, Gossypium hirsutum
aaaagaaccgaaaaaagcagtccgcaaaccgacactaaacaaggacaccttggtgcgactatcactctctcttacatgttttatttgtcttgtcttaaacactaaacacctttgcgctctctcacacttttcctcttacgcataaggctgctctaactcagacacctccattgttacctcaacctcagcttttagctttagtttctcccttcgttaccctaatttgttctcatcaaccatggctgctactttactgttttcactgctcattcttgccatcactgcaggccactcaagtggtgcgacgggcaaatggtgtgtttgcaaagatggtgtgggtgatggaaacttgcagaagacgttggactatgcttgtggaaacggtgctgactgtaaccctatccgttcaaatggaccttgttacaaccccaacactgttaaagcacattgcaattatgctgttaacagctatttccaaaaaaaaggccaaggtcaaggctcctgtgaatttgctggcacggcagctatcactacaactgaccctagctctggtggctgttcttacccctccagtgccagtggtggaggcacgaccttaacaccaacaacaccgggcacgacaacaactccatcatcatcaacaaccaccacgccctccatcatgt

SEQ ID NO: 196138 - DNA, 403 bp, Gossypium hirsutum
ttctttcatccagcaaatcttcaattaaattggatccatacaattggcatataaagagatggagaatggaggagtagagaacgcccacgcccacggcgacggcaacggcaatgggcaggcggcgtcgtatacttattgggtgagagaaacgacggcggacgctgctccgctccctgttcctaagaagctcactgctcaagacatcctttcaactcaatctcagtctacatctattgtttctgtttggaataaggctggaacttgggaggagaaaaaccttaataactgggctactcaaagattaaaggaattgcttaaatctgtgggttcattggatttatcttgtggcaaggctgaaatttctgatgtaaccaagtgtgttggcgatgcttttttggtgact

SEQ ID NO: 196139 - DNA, 724 bp, Gossypium hirsutum
aaatggacctaaaaacgatgagattatagttgatcacagggtctcttttgaattgagcggcgaagatgttgcacgctgtctgaaaaacaaatcattggtatcaagcagaaccatgccggattatgaatatccaaaggacttggtggcgcaaggcaggatagaaaaagatgaaaaggtttcaggagaagctgaagaggaccattgttatcaaaagcatcgttcagttactcttgggtcaattaaagaattcaactttgactccggaaaaggagaagcttccgagaagcccaccgtcaggtccgagtggtgggctaacgaaaaggttgccggaaaggaagctaggccaggtaacaattggactttcttccctatgttacagccggaggtcagttgattttgtaactatgcaacttagtttcacctccatgcataaaagtcataaaacttgtttaataggtttgcaacactaaaccctgtagcgtttcagttgttttatctgaagttcgtactttctctcaatagtctttggtataattagatggtgaagtgaactaaaagactagttttcagaggtcgaaagagtctttattccttatgacctaaaaggtgattccagtgagggaatatttcatagggatcaaactatgttggtactgatagagcattcttttaatattcatttacctaatgttataccatataaaaaaaaccagtatttacatgt

SEQ ID NO: 196140 - DNA, 613 bp, Gossypium hirsutum
cccacgcgttcgcccacgcgttcgcccacgcgttcgactggatcctgaggcatggcaaaagcatcccaaacgagaaaggtcttattgtttcttcattggaaaatggcattcgccttgaataccaattagcatctgaaggtgttgagcaggctgagttggctggaaagttattcctcaaggaactgaaggaaaaggccttcccccttgaaaatgtccccatgtgttactcaccatttgcaaggacaagacatacggcagaggttgttgcatccactttgaatcttccatttgagggccctcaatgcaaggtcatggaagatcttcgagaacgttactttggtccttcgtttgaacttctgtctcatgacaaatatacagatatatgggcaatggatgaaaaagatccattcacaaggccagaaggtggagaaagtgtcgatgatgtggcttctaaacttgcaagtgctatggctaccatggaatcagaataccaaggatgtacgatcttggttgtcagccatggcgatcccttgcaaatcttgcaaaccatactcaatgcagcttcaaaacagatggaaccaagctgcaatgacctagcatctataattcaagc

SEQ ID NO: 196141 - DNA, 823 bp, Gossypium hirsutum
  unsure (1)..(823): unsure at all n locations
ttaattgtgggcatcaacactacatcaaccggctgggttgttgttgatgcttgttgcttcttggttatgctttacaaacttatggcatattggtttgtggagctcttggtggttcttttctgcataggtggtgtggagggccttcaaacttgctcggttgctttactgtcaaggtggttcaagcgcgctgcagaatcatacgttaaaattcctttgtttggagctgtctcataccttacattggctgtttcccctttctgcattgcgtttgctgttgtttgggctgtttaccgcaatgtttcctttgcttggataggtcaagatatactcggaattgcattgataatcacagttctgcaaattgtccatgtacctaatctcaaggtgggaacagttctactcagttgtgctttcttatatgacatcttctgggtttttgtttcaaagaagttgttccatgaaagcgtgatgatcgtggttgctcgtggtgataaaagtgggcaggatggaattccgatgttactgaagatcccacgaatgtttgatccatggggtggttatagcataataggatttggtgatatccttttacctggattgcttgtagcattttcactcaggtatgattggctggcaaacaagtctcttcgagctggctacttcgtgtgggcaatgattgcttatggcttangtcttcttgttacgtacgttgcactaaatttgatggatggacatggtcaaccagcactcctttacatttgtccctttacacttggaaccttttgaccctaggagaaagagaggtgatctagaaattctctga

SEQ ID NO: 196142 - DNA, 562 bp, Gossypium hirsutum
ccacgcgttcgccagaaaccgagtttcgacctcccatgtctgaggttgtgcaagctttagtgaggttagtgcaaagagcaagcgtggtcaaaaggagatcgagtgatgaatgcggattttcatatagaactccagatcatgagattatcgacttgtcattttgagtgagttgaaaccagaagagaatcaaactcaagaaatggaaaaaaggaaaaagggaaaggaaaaagaggttctgtaattatatctcacattgtcagaaagttcatagtttacactgcaaatatatagctgtattattggaacattatgatgcacattcacgttttgcatcttcttaataataattaaaaaaaggttttactttatttcattgaaataaaagtacatagacattcctttgcaaaaaaaaaaaacaaaaaaaaaaaaaaaagcactcaaaaatagaaaataaatagggaagacaacaacaaaaaaaccattcaaaaaatttgctcacttaaatttcctaaaatgggacaccaccctttaacccaattttaaacccaaccggggggggggg

SEQ ID NO: 196143 - DNA, 409 bp, Gossypium hirsutum
cgcctaactaatgcccagtcagaaaatactgaaacctaatctggcatctggatatcatttctttttttcttttgatgggtcagtttattgggaaagttgttctttcaaaaactgggtcatctttttttcttatactttcctcttagttcttttcttccccattcctttctcaatctggttcatgtctcctttcaatcctttgttgagtttcagcataccccgggacactcattaccaggtacatctcttcctttctttttagagtttttgttgccaaaatatgcacaagagcgtttgcggatcttggtgtgtgtttgaacatgaaacttttggatctgcttagtttcttgtgaaaatcatatatatatgctccaatatgtgatcgatcttgactttttgttgtacattt

SEQ ID NO: 196144 - DNA, 464 bp, Gossypium hirsutum
caaaaaccctagggttctagccatttgcttcttcttctttttcactgtaggctttctgttctaaatgctattgcttttatatccaagattcaacctttcaaaagtagtgagcttaaaagaaaacaagatttggtaaaagctagaaactgaaaggcaatggagggtagattggcgaattcttggcgattgacagtgaacgacaagaatttcatcaaaactgcgttgctttctgaaattcgaatcgatggtcgaaagccctttgaattccgtaagatttcaatcaagtttggcagagaggatgggtcatcagaggtgcagctaggccagactcgtgttatgggaatggttactgctcaattggttcagccttatagagaccggcctaaggaagggattctttcaatcttcacagaattttctccaatggctgatccttcattcgagccaggccgtccaggagaatt

SEQ ID NO: 196145 - DNA, 441 bp, Gossypium hirsutum
cccacgcgtccgtttgctcacgtttctggtgtctagttctctgctatttctttgaaaattttcaggatgcaacaagcaattccatacaaatcctggcctctgccatgcatcgacgcaacttcccatcgtgcccgttcaacaacaacacttggccacaacggacgcgggaaagacgtgcttaatatagtgtcggagaacgcggtgatagtgttggccaggaagggttgttgtatgagccatgtagtgaggcgtttgctgctgacactgggcgtaaaccctgcggttcatgagattgatgaggaggatgaggctggtgttttgaatgaattggggacgatttgcaaaggtaccgaaaacaataaaatggttcagcttccggctgtgtttataggtgggaggttgttggggggattggataaagcatggctacgcatattaacg

SEQ ID NO: 196146 - DNA, 1289 bp, Gossypium hirsutum
gcggagaatagaatttctaataaaggaccggattccctttccaagcttcagcaagccagatatggctcaaaatatggccaggagaagggttgttttggtgcagattttggcactagccttggccgctgttatgccattgctctcaggaggtgtggatattcaacaagttagggtgctggcagctaaattcaacgtgacttgcgtagtggtattcggagactccagcgtggatccaggcaataacaactatattgctacgccctttaagggtaatttcctaccgtatgggaaagacttcttcagaggccacccgactggacggttcagcaatggaaggctagccactgattttattgctgaagctttgggttacacgaacgaaattcgacctttccttaacaagagattgagaccagttgatatcttgcatggtgttagtttcgcatcagctgcttctggttatgatgagctcactgccaatctctcacatgtcctgccggtttccaagcagctagagtatttcagggaatataagatgcggctgaggcaactggttggagcgaggaaagcagaaaatattataaaaaatgcggtagctgtgatgagtatgggcacaaatgactttcttcaaaactactatttagaacccattcgccccaagcagtatactttggaagagtaccaaaattacttggcttcttgcatgtctgacgatgttaagacgatgcacagtcttgggataacaagattagtggtagttggggtgcctcccctggggtgcatgccccttgtcaagactctaatgaaccaggaaacatgtgtggaaaagtataacaatttctcctcctccttcaattccaagctacaattcaagttggaagtcgccaggacaacattagggatgaaaattggctacgttgatgcttatggcatctttgaggacgctgtcaataactccaaaaaatatggtttcattgaagcttcaaaagggtgttgcgggacggggaccataaattatggagatacatgcagaggcatgagtacatgccctgatgcgtcaaaatatgtattctgggatgctgttcatcccactgaaagaatgtatgaaataatcgctgggcaggccattgattctctccggaaacagctgatggcctagctagaagcctgcaagctgcaactttaggttagatcggtgcgttaattaagtatgccttgttcttagaactctccaactaaaaaacacggttttgttgtaattaacccttttgggcttctcccaattgttc

SEQ ID NO: 196147 - DNA, 535 bp, Gossypium hirsutum
  unsure (1)..(535): unsure at all n locations
gaccgacgcgtccgntggctgcgagttgacggagtgctaatgagattaagggacactcgcttgcattgtgtttttgacgagagtgcaagggctgtcattcttagagaaagatgttggagggaaggaacatttgaagctttgtctgctaaaggatatcctactgattctgcttcatatagtgatccaagcatcatcagccaaaggctacctgtcatcatgcatcagacccaaaagcttgtagtccctggtaatgtaaattgccacgcgcaacagattcattagttgaatatgtagacattgcgaatttgatccatttcggtggattcataagcaaaaaaaatcatgttcatgcacttgatgtaccattaacaagcaaaatttatgatgtgattttgagtgtaagcaaaaaaaaaataaaaaataaaaaaataaaataaattataaatataaatataatatatattaaatttgggcgggngtttttaaagttccaagtttattttcgcgttcatgcgacttaatagctcttttttag

SEQ ID NO: 196148 - DNA, 720 bp, Gossypium hirsutum
aacgtattgaagaagaaaatgaaaggaaacgtttggtggccctgcggaaagctgaaaaagaggaagagaaacgagcacgagaaaagattcgtcagaagttggaggaagataaggcagagagaaggcggaagcttgggctgccaccagaggagccttcagcagcacctaaaccttctgcatccattgtggaggagaaaaagagcgcattgccagttaggcctgccacaaaggctgaacatatgcgcgaatgtttgcgatctctcaagcaaaatcacaaggatgatgatgcgaaagtcaagagagcattccagactcttcttacatacataggaaatgtggccaggaatcctgatgaggagaaattcagaaaaattagactaaataatcaaactttccaggatagagttggatcttgtaaaaggagtggagttcttggagctgtgtgggtttgagaaagttgaaggagaggagttcttgtttctctcaagaaacaaggttgacatgcaagttctcaactcagctggatctgagctcaactctgctatcaataatcccttttttggggtcctttaactctgaaaatttactttaataaaactatataattaaggcatatgcattcatatatctattttggcttgttcctctttggtttttctttggagaatgtggaattttatctgtgaatttaatgatgtaccaactgggtattttccgctc

SEQ ID NO: 196149 - DNA, 760 bp, Gossypium hirsutum
  unsure (1)..(760): unsure at all n locations
ggcgattgatttggaggacataaagttccatcagtgtgtacgtctggcccgatttgaaaatgaccgaactatatctttcatacctcctgatggttcctttgatctcatgacatacagattcagcactcaggtaaaaccgctcatctgggtggaagctcaagttgaaaaacattcaaaaagccgtgttgagattatggtaaaggccaggagtcagttcaaggagcgtagtgctgctacgaatgttgagattgcggtgcctgtgcctgctgatgcttccagtccaaatgttcggacatcaatgggatctgcagcttatgcacctgaaaatgatgcattaatgtggaaaataagatcttttcctggtggaaaggagtatatgttgagggccgagtttactcttcctagcataacagatgaagaggcaactccagagagaaaagctcctattcgtgtgaagtttgagattccatattttaccgtttctgggatacaggttcgatatctgaagatcattgaaaaaagtggctaccaggctcttccatgggtacgatatattacaatggcaggcgagtatgaactaagacttatttagtgccagttcctttaatattgagagatccagttcaccgcatttttcgagagttagaatggacataaggatacaaggaaagcggttgataaacaaaagcccttgtgaagagcatgaaagagtggttcctnctaaaaaaaaaaaagcacttttctgcttcgtatttataat

SEQ ID NO: 196150 - DNA, 884 bp, Gossypium hirsutum
gaagctggttggcaggttagcccaaatctctatggtgacaataatacaagacttttcacctattggaccagtgatgcatatcaagctacaggctgctacaatctcctctgttctggtttcattcaaattaacagtgcaatagcaatgggagcaagcatatctcctgtttctgcttatcgaaattcccaatatgacatcagtatacttgtatggaaggatcctaaggaagggcattggtggatgcagttcggtaatgactatgtgttgggttattggccttccttcttattctcctacttggcggacagtgcttcgatgatcgagtggggaggtgaggttgtgaattcaaaaccagatggacatcacacttccactcaaatgggcagtggccgtttccccgaagaaggttttggcaaatctagttatttcaggaacatacaggttgttgatgactccaataatctcaaggctcccaaagggcttggcacctttacagaacaatcaaactgctatgatgtacaaacagggagcaacggggattggggccattacttttattatgggggccctggtaaaaaccccaattgtccttaagagcaagagggaaaagcacctttttctttttggcgttgtgttttctacctttgttcccgtgtatcattcaaaccctagtgtactgtctcctcttctatatctttttggtttttactattaggttgggttaggaacctctctagcgggaaatttagttttgactctggttgttttacttgaaaaagatcccatcccatgtaagtggtctggaattcggccaagtttctgaaaaagccaaagaggaactggcctttggtgctactctttgtaattctatttctttgtttact

SEQ ID NO: 196151 - DNA, 560 bp, Gossypium hirsutum
cccacgcgtccgcttgaaccatttgctaagaagtgcttcttttagggctgccattgactatatagggtctgagagaagggatgtttgcatgccatcccatggtggaaatatgggccacgctattcagggacagagagcgttttcaggacacaaaaagtatataactccaaataaaagacatatgcttccttattttctgaactcctcaatgcccgaagcagagttcaacaggatcataaaagaattacaccatgaatctttgggacaaccagaactcatgaccagcaaagctggaagggatgtaaccaagtatccggttccagaatgtatgtgcaatgatgcacattcccacttcatttgatacagaaagcttccaacccgatagctaacattgcaagagtcttcatcgagaatccaaatttctctgtgcttccccgaattcgagccctttgaaaatggagaataatgatttttcagacactgatgattgttgggagcgccatttcaagaaggaccacagccctcacaagcttttctgcaagcgtatcgtattccggtct

SEQ ID NO: 196152 - DNA, 490 bp, Gossypium hirsutum
  unsure (1)..(490): unsure at all n locations
cccacgcgtccgcccacgcgtccgattcagtgcagaactatgtgcaaaagtgtaagcggttggttttcgagtatgggccattgatcctcgcaaatgccgagcacttcttggaaactaccgatgtttgcaccatacttcatgcctgtgatggtggaaagcaagaatcagtggcagattcttgattttattttatgaaaaccacaaaggatattttgttgtaatatagtgtctgtatatacacgtaaaacattttaatcccaggtttgcaaattgtgtgttgaacgaattataaatattgaaaatgttatgtatttgctcgaatttgaacttgacttnnnnnnnnnnnnnnnnnnnnnnnnnnnnnnnnnnnnnnnnnnnnnnnnnnnnnnnnnnnnnnnnnnnnnnnnnnnnnnnnnnnnnnnnnnnnnnnnnnnnnnnnnnnnnnnnnnnnnnnnnnnnnnnnnnnnnnnnnnnnnnnnnnnnnnnnnnn

SEQ ID NO: 196153 - DNA, 608 bp, Gossypium hirsutum
  unsure (1)..(608): unsure at all n locations
agcgtatttccaagctaaagaagaacggctgctcgtatatgattatttcccaaatggcagcctcttctctcttattcatggaacaagaaccaatggtggtggaaagcctcttcattggacttcttgtcttaaaattgcagaggatttagcttctggattactttacattcaccaaaatccaggcttaactcatgggaatttaaaatcctcgaacgttttattaggccccgacttcgaatcatgccttacggattacggtctcacgttattccgagaccccgagtcaccagaagagccaggtgccgccacttttttctatagggcacccgaatgtcgggacatccgaaaatcatcgactcagccggccgatgtttatagcttcggagttctcctacttgaactcctaacgggcaaaacacccttccaagaccttgttcaagaacacggctcggatatccctcaatgggtaagatcggttcgagaggaagagaccgaatccggggacgaacctacgtcaggtaacgaaacgtccgaggggaagcttcaatcccttttgaacatagcaatggcttgcattgcccngcgcccgagaaccgtccatgatgcgg

SEQ ID NO: 196154 - DNA, 495 bp, Gossypium hirsutum
gacttttcttttcagttttttttatttcacagatttctcaactccctaatccccaatttcttaatttttacagaatatcaggtgttttaattcgcggagaggtagctatgtttaaagggatttttggaaaaaccaagccggaaacaaatgctctaaccactttagacaagttaaatgagacccttgaaatgctagagaaaaaggaaagtgtgcttctgaaaaagactgctgcagaggttgaaaaggccaaggagtatgccaaagggagaaataagaaagcggctatacagtgcttgaagaggaagaaactgtatgaacagcaaatcgaacagcttgggaactttcagcttcgtgttcacgatcaaatgataatgttagaaggtgccaaagccacaactgaaacggtggatgcattgagaactggagcaactgcgatgaatgcaatgcagaaagcaactagcatagatgatgtggacaaaacaatggatgagatca

SEQ ID NO: 196155 - DNA, 597 bp, Gossypium hirsutum
cccacgcgtccgaaagaaatggcctatattccattggacgaggacaccaaggttaaagggaaggctgccattgatgttgtctgcaacccgttggggaagtccgggggtgctctgatccagcagttcatgatcttgacctttggatcacttgcaaattctaccccataccttggagggatacttatggtgattgtttttgcatggctgtcggcagccagggctttggatgtcgcaattcactgcattgcgtagggaagaagaactcgagaaggagatggaaagagcagctgttaagatccctgtcgtgtccgaaagcggaagtggctctcttgcaagtggttcagcagaaacatcagaaacatcaactccaagcaatatctaagaaaaaaaaaaaacattcttccatttgttgccaacaggaagaataagaagctgataagaaaccagtgctaggcgactgttggctctagaattttgcttttgttcatacaaaggatattagttaaaaacgtaaatgctcgactttattataagtcctccatttctttagatgttgagcttagtgtttgtttagttattgtgctctttagaattgca

SEQ ID NO: 196156 - DNA, 504 bp, Gossypium hirsutum
ccgggcggaccaacccgtccggaacgaacatgtagttcaataaaatttgtaagactttgtagtgaaccagatcaaagagctggtggtcctacagcaaattctggtgttgcacctgatgcagctgaaatacagcttaaaagtccaaattggctatttggccaaagaaagtttgaagaagttggctcaggccccaaagtctctgtgcgcgaaattaaaaatggaggggccaatggtgaaatgaaacttgacgatttctgtgacttaaattggctttcttcctatgttgatgatgaacaggatattttccagaggtacctctcaatgacgtctgttgatgaagccaatggttggtatggtggaacacttcttggtgatcaagatgaaagcagtgagatatataggcattacgctgaattatgtcaggggctagccatggagcctttccaacatgatctggaaagggagaagcattacactgatgttctacaaatgaacacgatcgat

SEQ ID NO: 196157 - DNA, 701 bp, Gossypium hirsutum
  unsure (1)..(701): unsure at all n locations
ctgatgacttgtttttgtaagagaggcatgttggatgaagctaagaaggtatatgaaggattggaaggtaatgggtgtaatccaaatgcggctacttttcggacgctggtgttttatttatgtttaaatggattgtatgagcaaggttataaggtgttcaaagagagtgtgaggttgcataagattcctgattttaacactttgaagcatttggtggagggattggtgatgaaaaagaagatcaaggatgcgaaagggttaatcaggacggtaaaagaagacgtttcctcccaactttttgatagcatggaagaagctcgaggaagaacttggtttggtttctggtaatgctgaagctcgtgaggctaaagaatcaacaggttagaattgagattttagctgttattttgctggtggtttgagttagctgctttatattcttttgcagctaagaatgattagatgaactatgcaatccaccatagaagtttgaatgatgataatattttttttcttagatagttttacaaaaggtcaattctgcttaattgtaaggattaatttgtgttactcttttgctatgtttttgtttcattgttctacttgttttggaatgaaaagaaaattctttttnnnnaaaatncnaaaattattttccatttaatttgttaaaaatttttatttttttctcaattcctttt

SEQ ID NO: 196158 - DNA, 484 bp, Gossypium hirsutum
gtgagtttcgcagagtgtaacagagatggctttgagcttgaaaccttattgtctggttgttttgtttttgttttggataagtttgaatgcattggtcagtgatgtaggtgcagcaggagagtgtggaaggacccgaatcaggtcggctgcagcaagcttaagcccatgcctgggagcggctcggaatgcaagggctaaagttcctccagcttgctgcgccaaggtgggtgccttactcatgacctctccaaggtgcctttgtgctattttgttatcaccattggcaaagcaggccgggatcatgcctgggattgctattgccattcccaaaaaatgcaatattaggaacaggcaagctggcaaaaaatgtggaaggtacaccggcccatttgaaagaaaccatgtaggagaaaaattatgagtaatctcagttatttactaataggagagagagcttattaataaagttttgatgctgatttac

SEQ ID NO: 196159 - DNA, 729 bp, Gossypium hirsutum
  unsure (1)..(729): unsure at all n locations
gtcattgtagagaagggtatgcagaatggacaaaagataacattccctggcgaagctgatgaagcgcctgagactgttactggggatatagtctttgtccttcagcagaaggaccatccgaagttcaagaggaagggagaagacctatttttggaacatacgttgtctcttactgaggcattgtgtggctttcaatttgttattacccatcttgacggtcgacaacttctaatcaagtcgaaccctggggaggttgtgaagcctgattcttgcaaggcaatcaatgatgaggggatgccattataccagaggccattcatgaagggtaaattgtacattcagttcactgttgaattccctgattcccttggccctgatcaggttaaggcacttgaggccatcctgcctccaaaaccaacctctcagttgagtgatatggagctagacgagtgtgaggagaccacgctctatgatgtgaacattgaagaggagatgaggaggaagcagcagcaggcagcgcaggaagcttatgaggaagatgaagatatgcatggcggtgcccagagggtgcagtgtgcccagcaatgatgatgaagcaaaaaagaaaaaagaaagtgatatatggtttcaaaagtattctcgaggatacagaaagctggtttctctagtaatgtagagtggcaaagcatgtcttgctcangtggtggatgagcggtgttattattgtta

SEQ ID NO: 196160 - DNA, 619 bp, Gossypium hirsutum
cggacgcgtgggggagtttggaaatggtgagttcaccgaggctgaattgaagaaaattatggcaaatgagaagcttgctgagattgctatgactgatccaaagcgcgcaaagaggattttggccaatcgtcagtctgctgctcgttccaaagaacggaagatgcggtacatttcagagttggaacacaaggttcagactctgcagactgaagctaccacattgtctgctcagctaacacttttacagagagattctgttgggcttacaaatcagaacaatgagttgaagtttcgtcttcaagccatggagcaacaagcacaactccgtgatgctctaaatgaagcattaactgcggaggtccaacgattaaaacgtgctactcaacagctaggtggtgattccgacccttcaaaaggcatggtttccgagccgctttctgttaatcagcagatgttccagcttaacatatctcatcagatgcagcagcagtcacctccacagccccaacaacagaatgggaacacaactgcaaaaactgagttgaatcagtagcttggtctctgggaagctttggaaacccatgatatccccgtctctcttcacctcgggtattcatta

SEQ ID NO: 196161 - DNA, 532 bp, Gossypium hirsutum
gtgacaaatcccgatgtgttgagtgttgttactgagtgggaatcaagaggccttgttgcggaatggaaatcgaattttgggtcttttgattgtttcaccaacaaatttgtcaacactgaacaccaggaaagagaaagcaagaagtatgttggtgtgcctggaatgaattccatttgcaaagcattgtgccacgagcctggagtagacagtaagtttaatatgggcatcgggaagtttgaatggttagaacacgagaatctatggtcattgataggtttggacggacagcatcttggacattttaagggagtggtggcatcagacaaaaacattgctttgccaaggtttacagcgataacaggacaaccaccccctcttgatttgagtttggctccggagttagtgaaactgcacgatattcccatttatccttgttttgctctaatgctagcattcaatgaacctttgtctttggtacccgcaaaagggttgtcattcgccaattctaaagttttaagccgtgcacaatgtg

SEQ ID NO: 196162 - DNA, 783 bp, Gossypium hirsutum
ctcttgtactgtttctgtcttcaatacgccttgaaagatctaatctttcaccttcgtctaaactcttcaaataaggcaaagaaaaaaaaaacacccaaaaagatgaaaatcgggttccttgtatttgtagctgttgcattgctagcattcttgtgtagcccgaatgccgtgtatggaattagattcgtaattgatagagaagaatgcttctctcacgatgttaagtatgaaggggatacaattcatgtgtcgtttgttgtcatcaaggctgattcaacttggcataatagtcatgagggtgttgatctggtggtgaagggacctaccggtgatcagattcaagactatcgagacaagataagtgagaaatttgagtttgttgctcatcagaaaggaattcaccgtttctgtttcagtaataaatctccttactatgaaacggtcgactttgatgtacatgaaagtcattttacatactatgatcagcatgcaaaggatgagcatttcaaccctttgttagaacaaatatctaagttagaggaagctctttataacatccagtttgaacagcactggttagaggctcagacagaacgtcaggcaatagtaaatgaagccatgagtaaaagagcagttcacaaggccttttacgaatctgcagcactaattggagccagtgttcttcaagtttacctactccgccgcctttttgaacgaaagcttggaatgtcccgggtttagttttagcactgcactgcaatgtttcattagctataggatcat

SEQ ID NO: 196163 - DNA, 667 bp, Gossypium hirsutum
  unsure (1)..(667): unsure at all n locations
aaaagtgggagatcggttcttattgatgatggtgcgcttccatggattgtgcaaaacgctaacaatgattcctcacctattatgagacacattgagcttgcactatgtcatttagcccaacatgaagtaaacgcaaaggacatgataagtggaggtgccctttgggagctggtccggatatcgcgggattgttctcgagaagacataagaagtcttgctcgacgaactctgaatttaagtcccatatttcgagctgaaatgagacgactaaggatagaagtatgatttgagacgaagtgttgggttttcgaaaccggattattcgagtgtgtggatgtagctataggaaaaacaacaaaatgttggcattgtatagagggtaaggtgggagattctttaagactgggttggcttatgatattattacgatcatgtttactaggctcttcattcagcttagtgtatgttggtgttagttaaaaaagtggggagggataaaaattttgtaggcaattgagttgagtgagtcaatattttcccctttttctttttttaaagaaacaaacttctattagctaactggggggactaactcattatgtattctttaaatattcagggaacataaataaattgttatgatataaaaattgatgagttctcttna

SEQ ID NO: 196164 - DNA, 430 bp, Gossypium hirsutum
ccctcgcgtccgatggggttttcaattaacaactccctcgcccccccccacactcgtacccacattaccttccttatagccagctattccctcttgggaacagcctccggttggatcgtgcctcactctctccctacgtttactcccttccttatgtggtctcttcttcatccttctccacgccatcaccatagccggtgccgtcaccggttgttccgtccccgtttctgggtcaaacagattctacgcagctcacatggtggttatggtgttaacatcgatatttcaaggatccgtttcggttttgatcttgacccgaagtagtgatttcttggggtacttgaaatcttatgttagggaagatgatgggatcgtgatattgaagccttgttggtgggctttgtgtgacggttttttgtttggaatggat

SEQ ID NO: 196165 - DNA, 828 bp, Gossypium hirsutum
gtcctgtatgagtttgactgatcgagttcttactgagatccctaaccttggaccctttaaacatgcatatgcctctgctgcaaatggtgagggaacattgttgtgaataaccttctttagtgccagtagatctccccttagatctgatccccccaggcctgtcgctgatttgaagtttctactgtcgaacgctgcgtcaaagtggatcgttgattatggtatgtcctcctggattctgtagcttctgttcattttatcatgaatcttcattacttctattccttcatagattgccatgagcctttgaatattaagtgctaaaacctttcctgttatatttttcccctcatgtatgaattgatttctggaaaaccatatcaaccatagagcataacagaagagtcggcattgagcgccgttacttctcttgaaaacccagacatgaagactttcctctgcccaggggcaaccacagagacatctatcatttgaagtgactttcctgtacttgagattagcaagattagggatataatcccaggaaattggccaaatagtgattgcaattttttagggtagttgtaggctccataatttcctgtaaaattatttagttttggtctgtaataaataattactaggattcgaaatagcttattgtaatagtttataggccctgcgcactgaatacgcaccggataatactactttccaaacttgagtatcctcgtgcttagtctctgcaagagggatctgtagaattttttgagcaatttctgcttgaaaggtactattaatcaaatccgacctccatttcttgtttgtatt

SEQ ID NO: 196166 - DNA, 565 bp, Gossypium hirsutum
ggaaatattattgtgaatgatcgtctttaagaccagtagttcccccttcagatcctaacccaccagacctgctgctgatttgaagtttctactatcaaacgctgcatcgaaatggatcgttattctcggacattcacggaagatatgaaggctatcttctgcccaggagcagcaacggggacatctgtcgtttgaaatgacttctctgtacctgagattagcaagattaggaataaaatcccaggaaattcgccaaatagtgattacgatttttgaaggtagctggaggctccataatttcctgtaaaattctttagtttcggtctataataaataattagtaggatccagaatagcatattgtaactgcgtattgaatactcgccggataattctcctttccaaacttgagtatcctcgtgatcagtctctgcaagagggatctgtagaattttttgagcaatttctgcttgaaaggtactattaatcaaatccgacctccattttctgtttgtattatcaataagatccgagactaactgtaattccctattgtttgatctaa

SEQ ID NO: 196167 - DNA, 836 bp, Gossypium hirsutum
ttccgcttccatctcctctctcttttccttccttttctcttcacccacagagaaaaaggggtctcactcaaatgctctgctactaaaaacccattttttgcaatcatctttccttccttctctctctctctctctctcaaacaaaaccagttctcttccaaagaatcagtctgggttatggacggcggtgcttcctataacccacgtacagtcgaagaagtctttcgagatttcaagggtcgtcgagctgccatgattaaagccctcaccactgatgtggaagagttctacaagcagtgcgatccagaaaaggagaatctttgcctttatggatatcccagtgagcagtgggaggtgaatttacctgctgaagaggtgcctccagagcttccggagcctgcactgggtattaactttgccagagatgggatgccagaaaaggactggttgtctttggttgcctgtacacagtgacccgtggttacttgctgcggctttctattttggtgctaggtttggattcgataaagctgataggaaacgccttttcaatatgataaatgctcttccgacaatatttgaagttgtgacaggggcaactaagatacagacaaaggagaaatcgtcggtttcaaatcatagcagcaacaaatctaaatcaaactctaagcgacgttctgaatctcagcccaagtattcgaaggcagcagcatcaaaggatgaggttgaagatggcatggaagacgaaaacgatgaggagcatggagagacgttatgtggggcttgtggagagaattatgctgctgatgaattctggatttgctgtgatatctgtg

SEQ ID NO: 196168 - DNA, 623 bp, Gossypium hirsutum
cccacgcgtccgcttattcgtccggaagttccttgtacttgggaaataagtgcaaacaccgtttgttttattcgtctcttagtagcacaaacacaagcttacagcagaaaataagctggttcatcagattagtacacaatcacagaatgtatcactctttagttaagaacaactcatttttagaagagttcatctcgttgtaaaccctaaataaataaaataaaaaaactaggacatcatcttgaaactttatcttcaacacttctatattactataagaccatcatgtatctttattttctcaatttcccgtgttgctgacaccatttccggaccaccattgtgctcttctgatttcccttgctttgttccatttctcgatgtctctcaaccttacgtacatctttcgaatacgattaagtttctgagattcttgagtgatgaggtcgacagttgaggtgccttggctcatgattacctcatacccatccccgtaagagtccattccttcggctaacagttgccagaatagcccaccgatggctgcacctccacccctggctgatgagtaaatcgctgtataaacagtgttgtacagctcgtctctttggttaggacccgcc

SEQ ID NO: 196169 - DNA, 879 bp, Gossypium hirsutum
tcgcttacgcgtccggttgataagcatgttgatttgcagaattcgtctgcaaagaggatgattggcaaagtcgcagttgtaactggtggtgcaagagggattggagctgccacagctaaattatttgctgaaaacggggcttatgttgtcattgctgacatattagatgaaacagggaccatgcttgctgactccatcggagctcgctacattcattgtgatgtagccaaggaaagtgatgtcgaatcagctatccaacttgccatcacatggaaaggcaaactagacatactgtttagcaatgctggcattggaggcactgcaagcagcataaccagccttgacatggaacaagtcaaacatctggtctcaatcaatctgcttggcaatgtacatgcgatcaagcatgccgcacgagccatgctgagatgcaatacaaaaggttccatcatatgtacatcaagttctgcaggcatctcgggagcgctagcgtctcacccttactctttgtcgaaagctggtatcgtcggactgatgagaaccgcagcatgcgagttaggtgtgcacgggattcgtgtgaactgcatttctcctcatggtgtacctacagatatgctcattagtggttatagaatgttccgggggaacgaaacaacacccgaagaagtgaagaaactggtcggtgatcaagggagtctattacgtgggaaagctgcaactgttgaagatgtggcccaagctgcagtgtttcttgcctcagatgacaccggattcataacagcacataacctcattatcgatggtggatatacttctgctattagttcactgagtttcatctacaaatagtaaagaattgggagaagaaaaaaataaaac

SEQ ID NO: 196170 - DNA, 539 bp, Gossypium hirsutum
cccacgcgtccggtttatctgtgggtttgtgatcaaacgccgcatcgaaaaagatgggcttattcgcccttcgtatcctctgtctaggccttgtactggttgccaaaattccccatagcccgcaccaaaatcccatgcactgttcatttgtccctttgctgaatacccagatttggaagacgtggatgctatcttcttcgtcctggctacatctcaaacaacgaacctcttctcgattttagattagagaaagtggatatgtaattccacggtattctccatactgtaattttaatttttgagggcaactgtagattccataatttcttgtagaaattttttgtatcagtctgtaaataagcattaggctcccctctctaatagtttataagcgcttctaactgaaaagactccagtagcctcccctctccatacttggatgtcttcttgggcagactttgaaagtggaatccgcagaatcttctttgcgatatctgtattaaaggtattgacaatgaagactcttttccatgttctac

SEQ ID NO: 196171 - DNA, 1123 bp, Gossypium hirsutum
agctgtcccaaagctgagaaaattatctcagattatgttaaagaacacatccctaatgctccgtcactggctgcctctttcattcgcatgcacttccatgattgcttcgtcaggggctgtgatggatcagtgcttttaaacttcaccaatggccaatcaccagaaaagaatgctgtcccgaatcaaactctaagaggctttgatttcattgacagattgaaaagcatggttgaagctgaatgcccaggcattgtctcttgtgctgatatccttactttaattgcaagggactcaatcgtcaccgttggaggtccattttggcaagttccaacaggtcgaagggatggagctgatctcaaatgttactgaagctaacaacaatattccaagcccattcagcaacttcacaactctccttacacttttcaacaaccaaggactcgatacaaatgacttggtcctcctatccggggctcacaccatcggcatagctcactgcccagcattttcacgccgattgtacaattcgaccggccctgggggagtagacccaacgcttgacagtgaatacgcagctaacctcaaaacaaacaagtgtacaacacccaatgataacaccacaatagttgagatggaccctggaagccgtaagacctttgatcttagctactacacattgttaaccaaaagaaggggtcttttcaattccgatgctgctttaactacggactccactagcttgggtcttatcaaccagcttctttcgagccctcagtcgtttttctatgctcagtttgcaaagtctatggagaaaatggggcggattaatatcaaaacaggatcccaaggtgagataaggaagcaatgtgcactcgtcaacagttaaaaaaaacacttaattcagctgaagaaggttccttcaaaattgtatagggaagtttcatagtgtggtctcggtgggtgctctgtgtgtgtgtgtcatgtcctgaataattgggctcactgttacgttttttcttctttttcctttttatgttctttttttgttgttgagctcaatgggtttcataatcttcatatgttatgtatttgggtggattgaataatttattcttaatttatt

SEQ ID NO: 196172 - DNA, 688 bp, Gossypium hirsutum
  unsure (1)..(688): unsure at all n locations
atagggtgaaggttttattgagatcaattcatgggttccgagcgaaagccttccccaatggaacttgcttgccagaaagcagttgggtaactttgtgtataattgtgctgtgatgngatgctagagagatagaatttggtggcatctcgtgcggttgaatggtgctgcgctgccactggggtttgcaccatcggtttttccttaaacacacaactctgagtttttactaatggtaatttcccctttcttttttacatctttacccttttggatgggggatgatggggaagatttcagattactcaagattcaatagaatgttttattgataggggtgtcttgagtttttatttctttttccaaactttcattcaaaatttcttcgattaaatttgtcttcccccgttttcagtgacatgagaacttgcaaaggctggcgtcattagcacaggaataggttgaataatttgaagtaccaacacattggtaggttgccattagagtttgttgaaagctttttaagaacacagaactagtcatatgggtttcttcttccttaattttcttggaattgtcttcaagggaggaaataagttccggaggctgttatcttagatgttggctgatgtactgattacattgatcattacaattgatgaactatatactcccagaaattttcttatgt

SEQ ID NO: 196173 - DNA, 571 bp, Gossypium hirsutum
aatcagcaaaagaggctactccaaagaataatgctgcaaacaggaataggcttttgaataagaccagttcaaattcaaggtctgtttcggacactgggagtcgtaagttacataccaaaactcagaagacaaccaaaacagagcctgttaaaggaaaggaaaagacaaagggacagggcaccgaatcagctgatcaagaagatcaggtttgcccttcggctgcagctgagactgttgaagaggacaaagaaaatatggatgcacttctgacagaagaaagcagcctgtccggtgtgatgtagggggccaatgctcaaccatgcgttaaattccatcctctattgggttgtctttcatgggttgatggttgtataagggttttaaactttttaggtttaagggttccaatcttgtgtgaaggcaagacctgttcttttgtttttttacttaggttgttgctttaaactgggattgtctgtttctggtattatacaatcacttgaggaacaaattgtatcaaatcaaccaacttatttgttattttgttaatgttataaatatgatttgacat

SEQ ID NO: 196174 - DNA, 456 bp, Gossypium hirsutum
gcggggatgagtcttctgatctttgagagctcagcagcaggatatttagagactgcacgcctgcgtaagcattttaaggagcaagggagggatagggatgcttgggattgttcacgggttccattctgtccaggtggcaagcgccaactctatggctacattgccatgaaagaagatctggatttatttaaccagcactctcaaggaaagtccaggctgaaatttgagacgaggtcatatcaagagatggttgagagtcagataaagaagataaatgatgatagtcagcagcttaacctacttaaaaagaaggttgctcaagagcagcagccctcacaagtccttgcagagtctctaggacgattgagtgagaagctgcgccagacgacggaggaatatggtatcatgaggcagcaatctagattgcagcatgagcagaacaaagaggagttgggc

SEQ ID NO: 196175 - DNA, 915 bp, Gossypium hirsutum
  unsure (1)..(915): unsure at all n locations
gtcgcattagacgtgcacagaatctatatgatgaattcaggatagatcactttagaggatttgctggcttttgggctgtcccttctgaagcgaaagttgcaatggttggacgatggaaggttggtcctcaaaaatctttgttcgacgccatctccaaagcagttggaaagattaatatcatagctgaagatctgggagttataactgaggatgtagttcagctcaggaaatatattggagcacctggaatggccgttctccagtttggttttggtagtgactctagcaaccctcatttacctcacaatcacgagcacaatcaagttgtgtacactggaacacatgacaatgacacgatccaaggttggtggagcaatttgatggaacaagagaggtccaatgtattcaagtatcttcgtatcactgaagaagatgagatctcatgggcactgatccaagctgcagtttcttcaatagctcaaactactatcataaccatgcaggatgttcttgggttggacagttctgccaggatgaacattcctgcaacacagcatggaaactggagttggaggatacctaattccacgagttttgatagcctggaaaaagaagcgttaagattaagagagatgctttccatgtacggtcgaaagtagttcaggaaagcttcatatctttcttttcctcagtcattacacatgattttagtgccacccccaacattatgtgtctaaaaacaatctctctagctttgaataagttcttttaaaaagcttgataccctttcatttctttctcgttaatatcttactttctaaacacacgcacatgcctattgccatgtttgctactcaagagtaatgaaatcagtctctagcttcnnnnnnnnnnnnnnnnnnnnnnnnnnnnnnn

SEQ ID NO: 196176 - DNA, 363 bp, Gossypium hirsutum
acatcaattgaacgatgttaggcatttaacctttagtataaaacgacacatgataaaaattgagagcagatttacttttggcttcatattttttacctaaaacagtgaaacaatcgactcccgctgcatatggtcagattatgggataccttattacctcacccaagacaggttcaggcttcgagtctcttctatatctaatgaacttccgtggagccattatcacttccctttgtgacgatgacactttcactgggagagagggtttcagagtcagaaacatgactaggggaactgtctaccttgccattgtcagaagcatcagaatccgagttcaaatcaagcgaattcaaatcaacatgt

SEQ ID NO: 196177 - DNA, 730 bp, Gossypium hirsutum
cccacgcgtccgaaattaataaaatcttgatatagttgctctgcttttgcttctcttatactgagttccaagcaaaacccctttttgtttttcgtctgattcagctaaggtcttctttgggtagtttgagatttgagttattcatcatactatggcttctcaaccttctaagggatcagttcatgatttcactgttaaggatgcaagagggaatgatgttgatttaagtatttacaagggcaaggttttgttgattgtcaatgttgcatcacaatgtggcttgaccaattccaactacactgagctgagtaaattgtatgagcaatataaagatcaaggttttgagattcttgcattcccatgtaaccagtttggaggacaggagccagggaacaatgagcaaatcttagagtttgcttgcactcgctttaaagctgaataccccatatttgataaggtccgatgtgaatggtgagaaggctgctcccatatacaaattcctcaagtctaagtaaaggtggactttttggggacagcatcaagtggaatttttcaagttcttggcgataggaaggccatgttgtcgatcgtatgctccactactactctttacatgataggtttaagaaacctgtgctgatttgatggtggagaaatactgtcacttatgagttataatttattgctcgataaaaaaactatcttttttatgtctcactcaagaggtgaa

SEQ ID NO: 196178 - DNA, 596 bp, Gossypium hirsutum
caatgttgcatcacaatgtggcttgaccaattccaactacactgagctaagtaaattgtatgagcaatataaagatcaaggttttgagattcttgcattcccatgtaaccagtttggaggacaggagccagggaacaatgagcaaatcttagagtttgcttgcactcgctttaaagctgaataccccatatttgataaggttgatgtgaatggtgagaaggctgctcccgtatacaaattcctcaagtctagtaaaggtggactttttggggacagcatcaagtggaatttttccaagttcttggtcgataaggagggccatgtcgtcgatcgttatgctcccactacttctcctcttagcattgagaaggatattaagaaactgctggcttgaatttgatgggtggaagagattagctgatcacctcatggagttaataaattagatatgcctacgaataaaaaaaaaactattctatctctggttatgtttcccccatctcctaatgatgggttagactgtactacaatttagaagttgtaccttttataatattttattcaccatggaaaagcacacatctttgtttgtctta

SEQ ID NO: 196179 - DNA, 733 bp, Gossypium hirsutum
  unsure (1)..(733): unsure at all n locations
cggacgcgtgggatcgcctgtgctacagtatctttattatttggcacagattgggcttggctactgtctcctctgagcaacacattccttgtttcttggagctatgcatcggaatcccttttccaatgtttttcccttccggggtctgaatgtttcccttgtctacgcgatgatcccacttcaaatacacttaacaaaggaacctttggtggaagagtatagcatagctgcttctgtgtggaagctgagttcatgtgatctatgtgagattgcccgtaattcagtctaccagtcaggtttttctcatgctttgaagtcccactggattgggaagcactactacaagagagggcctgatggaaatgagatacagaggacaaatgtacctcatatccggctggaatttcgtgacacgatctggagagaggagatgcagctggtgtacctgggcaaggccgttatccctgcagatgtggacaagtaatgtgcaaccatacggcacaaggttcctttcttgaacactacacatcacatatactgaggaggaggcggcaaagaagagaagctggcctttggacctgaatcctgcatgaaagaagggatatgacgatcaacatgggaagctgatggatggtatttacaaagccactggttgggcaaagcaaaagcaaaagcaaagcttaacttgtangtggtggtggtgggaggaaacatcttgcaagatgacaaacac

SEQ ID NO: 196180 - DNA, 356 bp, Gossypium hirsutum
gcagacccgaacgagtaaggcacagctgagctgcacaaaccaactcatcaacctgaatgtgtgcgcaccctttatggtgcctggtgccaccgagacccagcctagttccctgtgttgtggtgcactccaagctgtgcaacatgattgcctctgcagcactctcaggattgctgctcaacttccttctcaatgcaatctcccacctctctattgtgccacctgacatatatgcatgcatgcaagcaagctggtagaatatatatatatggctgcagttttatttttcttttggaacgtgtggcatcatatgtgacaaagcaaatgcaatggagatcaaagttataattagtacttgg

SEQ ID NO: 196181 - DNA, 336 bp, Gossypium hirsutum
  unsure (1)..(336): unsure at all n locations
gtgcttaggttatataatgcccatatttcagtaagcaggatacgagggataagcaatttgcacatatgttttagtgaaaagctgggttttaatttctacgtttaatttgcagatgaggttgttatgtagctaaataatatatgtaaattgcttctctttgtttacagattttgttttattaataaaaagtgacatttgataaanaaaaatatatttttttaaaaataaaaaaatataaaaaaaaaaaaaataaaaaaaaaaaaatataaaattaaaatttaaaaaaaaaaatatataatataattgggaaaaaaaaaaaaaaaaggggggcccttt

SEQ ID NO: 196182 - DNA, 920 bp, Gossypium hirsutum
gtttgaacgaccggataagcctgcgccacaaacagtctcacaggctgacagtcaacttccgatggcctccgccgccgcacacctttccttcagccttccctttccgcctttctcttctccaggccaccgcccagtaactgcttttccttacccaaccactcagagtcagaatcagagtcgagtctccctcagaactcgagctttaggtcctgactttttgggtgatttcggggcacgtgaccctttcccagcggagatagctagtggatttgctgagaaagtgttgggaaacgtcgacacagagcataagattcttatccctaatgcatcagctctctctcttgctaagcaagattgctctccgatgtctcctttacagcctcccttgtcggtggatgaagctaaggctctaatgaagaaggttgttggatggaggctgttagatgaagaaggtggacttaaactgcagtgttcatggaaattacgagatttcaaatccggagttgaactcatcattcggatttataaggctacggaagctaccgatcatttcccgagcctccatttggaaggaccgaatcaagtccgagctgaactgtggactgcttcgattggagggttgagcatgaatgatttcattgtagctgccaagatagatgaaataaaaacatcggatcttgcgcctcgtaaacggatttgggcataaatcggagcactgattttcttttttccggcaagttatcggagcatatccgatgaaaccatggaagtcataagactcagggaacttcaatgcttttgatgaaagattcgaacatttttcgacacatacactccttttttatccttctaagcttttgtatatggaattatttgttgttagtaacatcattttttaacaataaaatggtgattctatc

SEQ ID NO: 196183 - DNA, 622 bp, Gossypium hirsutum
cttcctctttttgtacatatttttcccctccacggccatggccttgtctctgtttcattacctgccgaagcttgaccaaatggtttcgtgcgagtacagggacttgcctgaagtgaggattccaggctgcatacctattcgcggcaaagaaatgctggacccggctcaagacaggaaaaacgacgcttacaaatggctgcttcatcatgcaaagaggtatagattggctgaaggcataatggtgaacagtttcgtggagttggaagcaggagcaacgaaggcgttgcaagagaaagaacccgataagcccccggtttacccggttggtccacttgttaacgttgacgcgagtaacaaaggcaaagctgatgggacggattgcctgaagtggctagatgagcagccacatggctcggttttgtatgtgtcttttgggagcggtgggaccctgtcttccaaccagctaaacgaattggcggtggggttggagatgagtgagcaccgattcttgtgggttgtaagaagcccaaacgataaggttgctaacgccacttttttcagtgcggagagccagaaggaccctttcgattttctaccaaaggggtttctggagaggacaaaa

SEQ ID NO: 196184 - DNA, 307 bp, Gossypium hirsutum
gactagttctaaatcgcattgcacagctccaacaggtatgatgggctgtggggctgctgcggggacacaagatagtaggagaggggaggaagggatagaaggacaggcggaggacgccgagtcggcttacgtggaccctgaacggatggtttcttcgggaccatcttgcaaggcgtgtcggacacgcgtcgcctcggtggtgctgcttccgtgtcggcatctttgcctttgtacagagtgtgaccgagtggcgcaagcctgcccgctttgcctcgccgttcggaattctagcgttgaggttttcctt

SEQ ID NO: 196185 - DNA, 486 bp, Gossypium hirsutum
cccacgcgtccgcccacgcgtccgcccacgcgttcgcccacgcgtccgcccacgcgtccgccttgccatctcataccccgcccttgcagctgtaccacacatgttcatcaatggctacaagaatgtcttggctgttgcagttgcaacagagtattctttccgtcaggccgataaagtgaaagagtatttggcggatccaagcaaatttgccgttgctactgcccctgttgctgctgctggtggtgctgctccggctgctgctgtccctgcagaggagaaaaaaccagaaccagaagaagagtctgatgatgatatgggattcagtctctttgactaagtttgtctttattagtagaaagattcaggattggaagacttgagaaaaatctgagaacgctatgagttgttcatcgtagttttgttttgatgtggttgctttggaagttttgagaattcaaaaaaaaaaaaaaaaaacccacgcgtccg

SEQ ID NO: 196186 - DNA, 668 bp, Gossypium hirsutum
cttttctgtttgcttttactaaacggctcttcatctttagggcaaccgacacccacttcagaacaaatctcatctcctctccctttgctccgaatggtccagacgagttggttcctgctcctcccataactcacgtaaagtctctccgcgaaaggagatgccacattttcatgaagaattaactttgctgccacgattttaccctcctgctccttgacaacaaggcctgacgccgatctgttatgttgtgagtcgaaagccgcatcgaagaagatagccatattttctctttgttgtctctgactagactttgtattcgttactgaggaatttatttctgcttgtccagagtatccatagcccatagctgaatcctcgacactgttcagttgttcccttgctgaaaacccaggacactgttgaaagacgtggttactatcttctgtttcctgaccacacctcaagcatcgatcctcagttattactcttctcagttttaagctggagaaagttggaatgtagttccacgcgattttccatactgtaatcttaatttttgtaggcatatctagattccataatttcctgaagaaattatttgtatgggtctgtaaataatcatttagatctgtagtagatccctgtaatagtttatacgcgcttctcac

SEQ ID NO: 196187 - DNA, 653 bp, Gossypium hirsutum
cccacgcgtccggagaatctgattttttgaaagaaaccttttagactttgaatatcactgatgattgctcctatttctgatctgtcacgattttcgctttggcatttagatgtaactgtttttgagtctcctaatatgtccacattaaggtaacccggttgaatccctaacattgttgcttgatatcttgcgcatgcttccgccgcgaaaggagatgccacattttcatgaagaattaactttgctgccacgattttaccctcctccttgacaacaaggcctgacgccgatctgttatgttgtgagtcgaaagccgcatcgaagaagatagccatattttctctttgttgtctctgactagactttgtattcgttactgagagtatccatagcccatagctgaatcctcgacactgttcagttgttcccttgctgaaaacccaggacactgttgaaagacgtggttactatcttctgtttcctgaccacacctcaagcatcgatcctcagttattactcttctcagttttaagctggagaaagttggaatgtagttccacgcgattttccatactgtaatcttaatttttgtaggcatatctagattccataatttcctgaagaaattatctgtttgggtctgtaaataatca

SEQ ID NO: 196188 - DNA, 308 bp, Gossypium hirsutum
tgggacaggaaggggcgtttttagcttctgcctgcaggtgacagccgaagctctccgcttttgcggttggagttgggatgtccctactgcataccttgccagagagatgcagtacggtctgctgaggatagcgctggaagtgcgactgactagagcaaagagtgatgcggcctttataacgtccccgtttggtccatgtactgcaattggaagaaatggtggggtttgccattatgaggaagatgagcgacaatgatgcggtggtgcttaagctcatgcagtccgtgtcggtgggagccggagttttg

SEQ ID NO: 196189 - DNA, 660 bp, Gossypium hirsutum
  unsure (1)..(660): unsure at all n locations
ctccttgggaaaacatggtggcctgcagtggttgttgatgagagaggtgttagtaagagcagtaaacctggaaaaaaatcaaagggggaggtgcttgtgcgtctatacgggagccatgagtactcatatgcagaccctatgaaatatcgttccgagtttaaaacgattctagagcagaataacggtagttattacgacattcttgaaaaaggtttggagcagtttcgctctcgcctgaaatctagtaaaccaaaggggcaaggatctaaggctacagcaaacacaagagctgaagagaaagagaccgcaaaaaagaaaaatccccagcgaaaaggatcgaatgtcgaggagaaagctagtaagaaactcaagcgaaagagccctagtaccgataaacagggtaagaaaaaagccgatgagcaagaggggcccctaaagaaacaaaagaaaaataaccaaactgtggagccaaatagtcgaagtgccaaggcaaagcctaaaagttcaacttccaaggaacagaaaaagagcaaagcttcgaagcaaggcaaggaacagaaaaagccgaagcaaaataagccgaactccattgacacnaagagcagaacatccnaagagaaaaagctgttagaggagactgatgaccanagttctgaagga

SEQ ID NO: 196190 - DNA, 752 bp, Gossypium hirsutum
ggttcaggcgcaataaaaccatcataccccagctcatttaataccaataattcgtatggaaggggacctccacctggaagtgtcccaacctccggatatcaggatccaagatacagttttgatgggtttcgatctcctatcccatggcttgatggctctatgttttcagatgggcagcacaggcccgtctcaagccctgcaatgaactctttggtttcaaaagcaaatggttttccatcttcaaggaatcaaaacttcagatcgaattctaattacatgggactgcaccaccctgggacaatgtccggcatgggcacagctcatggttatgtcaatagaatgtacccaaacaaaccatatggccagtatgggaccacattcagatctggaatgggctttggatctaatggttatgatttgcgaacaaatgaaaggggttggttggcagacaacaagtacagaccaaggggacggggcaatggttattttggttcaggcaatgatatcatggacggttttaatgaattgaacaggggacctagggctaaggggcctaagagccaaaagggtgcaacacctatcacagcatctactaaggggcaaaatattccctcagatggaaccaaggatgaggaaaaggcatgtgttgttccagaccgtgaacagtataacctagtagaattccctgtggattatgacgatgccaagttctttgttattaaatcatacagcgaggatgatgttcataaaag

SEQ ID NO: 196191 - DNA, 637 bp, Gossypium hirsutum
cgaaatctcagagagagagagagagagatgggtagtttgggtaacagtgcaaactccaaagcggtacatgaagctggcgaagatgattatgatcaccacaagcacctttctcctactcatcagcagctcgatgctggtgctctctttgttcttaaatccaaaggatcatggctgcactgtggttaccacttgaccacatcaattgttgcaccaccgcttctcagcctcccatttgcattcaccttcctcggatgggctgccggaattataagtttggtggtcggagctttggtcactttctattcttacaacttgctatctctagtccttgaacaccatgctcaattgggtcgccgacatcttcgcttcagagacatggctaatgacatcttggggccaagatggggtcggtactatgttgggccaattcaattcatggtctgctatggtgctgtaattgcttgcactcttctgggaggacaatgtatgaaggcaatttacttgctatcacaaccaaatgggagtatgaagctttacgaattcgttattatatttgggctcttgatgctggttttagcacaaatcccatcttttcactcactaaggcatattaatttgatatccttggttctatgcc

SEQ ID NO: 196192 - DNA, 452 bp, Gossypium hirsutum
aatggatttggttcagttgcaaaggcaactagttgactacagaacctcactctaccatgagggttttctggatgaacaattcacccaacttcagtcactccaagatgaaaataacccagattttgttgtggaagtagtgtctcttttctttgaagattctgaaagacttcttaatgaactgagtaaagcactagagcagcaggtcatagatttcaaaaggatggatgctcaggttcaccagttgaaaggtagcagctccagcattggtgctcacagagtccagaaactctgcatcgtcttccggaactattgcgaagctcacaacgtggaaggatgtcttaaatgtctgcaacaagtgaagcatgagtatggcattattaaaaccaagcttgaatctatgttccagcttgaacaacaaatcttgaatgctggtggctcaatccctgtgtaat

SEQ ID NO: 196193 - DNA, 412 bp, Gossypium hirsutum
ctcatcctcctaatgttgctgctgtttaccgaaacattgacaagctatttgcacttcctgtaggttatgacctggtatggaggaattgtctagatgactacaccacaccggtctctatttggtatccgcgagcacctgatggattcttctccctgggatgtgtagctgttgcgggttttgaagagccagaagctgatttggtacgttgtgtggcagaaacagttgcagaggagacaacatttgaggagcagaaggtatggtgtgctccagaatcatatccgtggggttgtcatgtataccaagttcaaagtgacgcccttcattttgttgctctaagagaaactaaggaagaatccaactggaaaccctcaagggttcgtgatgatttccagtctccacgatcatcagaatc

SEQ ID NO: 196194 - DNA, 432 bp, Gossypium hirsutum
agacagcatgagcagcaggtacatgaagaaattgacaccgcaaactctcctttcatcaattactccaagaagagttttgttgacaccaataatcaagctccaatggggttctctgcaacacactttgagggagccgcacaatttgagggtcactttgggttttttcagtcttcttcgccatctcctgaccagctacaaaataaccagtggctttcaggaaatcaaagagcatggagttggaaatttgagattaaagcaatggaagaaaggagttgccataagtcaaaagaataaagatctcaaacagaattttattttatttttttataatgggtagggtagggagctgttcaggaatcaaatttagaactagtgttaacccagtactggcaattgcaatgggaaataaattttgttcagtgtttgttttct

SEQ ID NO: 196195 - DNA, 393 bp, Gossypium hirsutum
cccacgcgtccggacccacgcgtccgcccacgcgtccgcccacgcgtccgcccacgcgtccgcccacgcgtccggcagatgagtactttgagaaacatcccgaactgaaaaagaaattcgatgatgagagccgcaatgacaattggggctattgacatgtttggtaatataagggtcaggctataaaacagtcccaaccagtatttctgagttggtcttattatttcttttgttgttttaaccccaaatgatgattaccgaaactctgttttttgtggtaatttcatcgggaactaataatattataattcacttgagaaccaaagtggatattgcaagacatgcttttcatttaagtggcatccatgttcatgaggaacattcttttatttc

SEQ ID NO: 196196 - DNA, 1566 bp, Gossypium hirsutum
tgttgatgaaaagggtaagaaaaaagttgggtcttttttatggaagaaatgaaggtggaaattttaaattttacaggaattatttgaaagctagtgaatttggagtttactgatagattgaaggaaagggcagcaaaaagagttgttttttttctttctattatttttttaggaaaaaaagcgaagaaacagatcaaatcaaaaaaagtagaagcaacatagaggaatggcgatgcttgtagagccaccaaatggggagaagccaagagggaagcactactattcaatgtggcagacccttttcgagattgacacaaagtacgttccaatcaagccaatagggagaggagcatacggggtcgtttgctcatccatcaacaaggaaaccaacgaaaaagtggctataaagaagatcaacaatgtattcgacaatcgtgttgatgcgttgagaactttgagggagttgaaacttctcagacacattcgacatgacaacgtggtcgctttgaaggatgtcatgatgccaactcacagaaccagttttaaggatgtttacttggtttatgagcttatggacaccgatttgcttcagattatcaagtcttctcagccactttctaatgatcattgcaagtattttctttttcaggtactgggaagttttacctttgctttcaaatgtgttcatcagcttgtaactaacctttggtgttatattatagctactacgagggctgaagtaccttcactcggcaaacatcctgcatcgagacttgaagccagggaaccttcttatcaatgctaactgtgacctcaagatatgtgattttgggttggctcgaaccagcagaggcaatgaacaattcatgacagagtacgttgtcacccgttggtaccgcgcacccgagctcctactctgctgtgacaattatgggacctccattgatgtttggtcagtaggatgcatctttgcggagattcttggtcggaaaccaatctttcctggaacagaatgcctcaaccagcttaagctgattatcgatgtccttggaagccagcaagaggctgaccttcagtttattgataaccccaaagcccgacggtacatcaagtcacttccgtactctaggggcacccccctttcccttttataccctcaagccgatccattagccatagatttgttgcaaaggatgcttgtttttgacccatctaagagaattaccgtcacagaagctctcctacacccatacatgtcagggctatatgatccgaggtgcaatccacctgcccaagtcccgattgatctcgacatagacgagaacatgagagaagagatgattagggagatgatgtgggctgagatgcttcattaccacccagaggctgcatctgcaaatgcttagatgacattgttttaagctatgctgggttctgttactttgttataatgtttgtttcgcaaccagtattattatttaacctagaagaacaccattgaaacttctgcatgccatggaactttgcattgagatttttagttttgattggctcgtgttaacctgt

SEQ ID NO: 196197 - DNA, 500 bp, Gossypium hirsutum
ctttaatttctcctgtttcttcagttccagtgcgacatcaggttcgtgacattcaacataatctcaggaacatcaatgtcttgtcctcatgtttctggtgcagctgcctacgttaaatcatttcatcccacatggtctcctgctgctattcaatctgcccttatgaccacagccgcccccatgagctctggcatcaacatggaagctgaatttgcattcggttcaggccatttgaatcctttaaaagctgcatatccaggtctagtttacgatgcttatgaaaccgattacataaacttcttatgcggactaggttacgccactcggctaatacaattattatccaaagacaactccacttgtcctaaagacactaatgggacagtttcggaactaaactacccttccttaggtctttccacttcgccattgaaaccattcagccgtaccttcaaaaggaccgtcacacacgtgggatctccgacggcggtttacagagc

SEQ ID NO: 196198 - DNA, 973 bp, Gossypium hirsutum
  unsure (1)..(973): unsure at all n locations
cccacgcgtccgctctttccaattattgttgataaaggtagctctaaaaaactaaatgtgcccaatttgcaaactctgaagatagagaggtgctttgtaatggaagaaataatccaagactcacgagtatcaaccataagctttcaatgcctgagggaaatacaagtcacagaaagtaatgatttgaaatttctcttcccaatgtgtattgctaatagtcttgggaaattgcaaaccctaaagatagagagccgctttggaatggaagaaataatccaagactcacaagtatcatcaaccacaagcttccaatgcctaagggaagtacaagtcactgaatgcaataagttgaaatttctcttcccaatgtgtgttgctaatagtcttgggcaattgcaaactctgaggataaagagctgttcccaattgcaagaaataatccaaggaccagtggtgttaatctcaatgtctcaaggtcttgcacgattgaataaagtaaagttgattaatttgcctcaattgaacggaagggatagaaatgacatcgtgctgacatcgccatctttacacatgttaaaagtgagagattgtcctcaattgacaccttttatcgtttcaactaatatacaattctcggacatgacagaaaagaagcaaataagcaacgtgacagtccctgaaaggagaggaggaacatcnncntgtacggaatatttaacaattttcaattttgaagagttatttgaatattctggatataatctttcaagtctaaagttcctaacgttgtccgaactaactgaattgcgggtgatatggagtggtcccacccaagtcgagcactttcaaaatctcactcaattgacagtcgacnattgcaaaggttaaaaataatcttctcacctaacaatccctcaaaatttgccacaattgtgggactttggatatattttgactgtgcaggaaatcggaa

SEQ ID NO: 196199 - DNA, 687 bp, Gossypium hirsutum
cccacgcgtccgaaaagagttggagctaatcttaaggagtctgaaatttatgatcttatgcaagcagctgatgttgataatagtggcacaattgactacggggagtttgtagctgctacgctgcacctaaacaaaatcgagaaagaagatcatctatttgctgccttctcctactttgataaggatggtagtggttatattactccagatgagctccaaaaagcttgcgaggagtttggcatagaagatgttcgccttgaagaaatgatccgagaagttgatcaggataatgacggacgcatcgattacaatgagtttgtggcgatgatgcaggggggaaatgttgccggtgctggtaagaaaggcctgcaaaatagttttagcatcaagtttagagaagcattaaaattttagtacaggcaattgcactagttcttgttccttttttattttcacctttcaagtttttgagggaactgaggtttgtatagtaagaagttacctattgttctttgccaagaacagccatgtctttgcatggcgctttggccattttcttccaccttttttgctattaaattatgttccatcatgtcgtatactttatacagaacgaatctatgtctttaatttactacaaactgtcgatttgctacgtgttaaaaaaaaaaaaaaagagaataataa

SEQ ID NO: 196200 - DNA, 572 bp, Gossypium hirsutum
ggatggggttgcaaaagcttggccaacagattcctgatgcagatttgcagatcctagtggaagctgctgatgttgatggtgatggaactctgaattatggggagtttccggcagtttcagttcacctcaggaaaatggcgaacgatgagcacttgcacaaagcttttgccttctttgatctaaatcaaagtggtttcttagagatagaagatctgcgagattccttaaacgatgaagttgataccagtgaggaagttatcaatgccattatgcttgatgttgatactgacaaggatgggcgcataagttacgaggagtttgttgcaatgatgaaagctggtactgattggagaaaagcatccagacaatattcacgagaaagattcaacagtctaagcttgaagttgatgagagatggctcattgcaattaggcaattgagtacaagtctaatggaaatgaatgaatcaaagaacagtaagtacccttgctgtggaaggggggaaaaagagggaaaaacaaagattatccttgatttttgtttggttggatatcggtcaatttctttttaat

SEQ ID NO: 196201 - DNA, 426 bp, Gossypium hirsutum
ggaccaacaaaaacaaaaactcataaaattaagatagaataactgaacaccgtattgaaatgcagagcaatttaaaatctgacggtctaaaaagcagtaaatctaggccggcgccaagccaaaaaaaaattttaactcagccgtgggtattaaaagcttcccacaacaaattctttggggcagggttagttaagtctcgagcttgcaaggcggcagtcctcagagtcctaatcgtcgatttattcgcctcccagaaagacagactccggtaaggcaatttgtgcttcttgcagagttccctcaccagaggggaaaccttcctcaaatggcaccgcggcaacctggggaacaaatggtgctctaactggaactgtaaaccaccgaagaaccagtccatcatggaaggacaagagatatctattgtcc
